United States Patent Application Publication US 2005/0228172 A9 - sequence listing, part 14

SEQ ID NO: 45814 - DNA, 554 bp, Homo sapiens
tgcactccagcctggacgacagagcgagacaccttcaaaaacacaaacaaaaaacaaaacaaacaaaaaacggatcaaaatctgttttgagcagcacaaatcctgaatgaataaaaacatgtgcctaggtccctgccctggaaaagatcagagggccagtgtggagggtggaggaaaagtgcctcggtccttaacaccgataaagatgactttaatgcacccaggctcatgaactaggacagtgatccggaggacggggcgaggaggtagatggaggggctgcatttacatcgtcagagggggctgggcmctctgctaagggctttaggtaccctgtcttgttcaaactcttcagtgaccctgggagatgagtgcatttctttttaccagttcacagaggaggcactgaggtgagtttgttaagcaacgggcccaagatcacacaagcaaaaaatggtggggcttgtcctggaatccagctctatcagattagtacccagccctaaccactctgcctgctgccttcctggaggtccgttgatgtggcatgaggg

SEQ ID NO: 45815 - DNA, 567 bp, Homo sapiens
caaaaggaaaagaaaatagggctgtgctctggccccctgtaatcccagctactggggaggctgaagcaggaagatcgcttgagcccaggatttctagactgtagtgtgcgatgatcgtgcctgtgaatatccattgcactccaacctggtcaacatagtaagaccccctctcaaaaaaaaaaagaagatagggctcaaacaaataataatctcctgaattattaagcatttgaatagaaggaatcaatttctggggtatgagkgagttagaagagatttgcttcaagatgaaaggacggatgacagagaaatgaaaatacacagacacaaaacaagaaaaaaaacacggaactagtgataaaagcagaaagatgccatttgaggagtgttttgatttgctctaaataaattagaacagagtcaaagcctctcccctcatgccccctactaccacccgttcatttatttgctccaggaatcagatttcctgtgttggccttagggaacaattgtggggcttaaataccatctgccaggcagccacaacagtggatgtcaggctgacca

SEQ ID NO: 45816 - DNA, 531 bp, Homo sapiens
ttttgtaaaaaataactgcatgtaaaaaatagctacataaaaaaaatcgctgtgtaacaacatttggggagacctagcctgagatcaacacgggagaaaaatgcaagttttatttggctacaagcttaacgggaaccatcagtgagatactgttcttcattactactgcagctgctactcacagtaacagtaggcgtgcccgtagtaccagtaggatagcactgacagcaattaggatggaagctaccatgtatcccatgctatctgccaaacatggtrctaagtcccatactacactctctcacttccttacaactctatgaagtagaaatcttcatccccatttaagaagaaagtaaactgagtctctgagcagttaagtgacttgcacagggtcacacatctgggaagccacagttacagtgacaagattcaaacccagcctgattggcatccactaaccaaactcttaactgcggatgtaatctgagacctgatgagaaagaacgaataaaaaaaggatagctccac

SEQ ID NO: 45817 - DNA, 472 bp, Homo sapiens
gtggtggctcatgcctgtaatcccagcactttgggaggctgaggcgggtggatcacgaggtcaggagtttgagaccagtctgaccaacatggtgaaatcccgtctctactaaaaatacaaaaattagccgggtgtggtggcacgtgcctgtaatcccagctactcaggaggctgaggcagacgaatcacttgaacctgagaggtggaggttgcagtgagccaagattcgcaccactgcacyccagcctgggcaacagagcaagaccgcgtctcaaaaaaaaaaaaaaacctcagcaagaagaaatataaaaactattgtacaaaataaacacttaaatgaaactaggctctgctacagttttcttctactggggataataatagtgtttagggcagccatggttcttaagaaagaagtgatgagagatacctgtttttttatagattgtcttgggtaatctaagtagcacat

SEQ ID NO: 45818 - DNA, 1794 bp, Homo sapiens
cattctgtaggggaaagaaaaggcggtgagcctcagggagcacagaattttgttcaataagcatgcctcactcacctctcttatccttgagcagcctctgagtttgagggcccagtgtgaacctattagctgagctgtcctggttcgtaatgcaccggcacaacactgatgcttgcagcccggcagaggcataaataagctcatggccctggacctctctggccctcatgttcacacccygcctaacccctcacctgtactcctcgccctccagcagtttgcggtaggtggcgatctcgatgtccaaggccagcttcacactcatgagctcctggtactcacgcagcattcgtgccagctcctccttggcctgctgcagggcagcctccagctctacgcgcttgctgtgggcatctttaagggcattctcacctcgctgctctgcatcagccacggatacctgaagagtctggcactattgacaaaggcattagataggtggtcagcagtgccctgccttcaaggcctctacacctgtcccctcccctggtccagctttccttgggttaggatgtcaagattctatctgttctgcccactttccctgagacttatgcatctcattcactccagccatagcccaccaatgcctccaccagactgattaaataaaaatgagcaaaaacccatgaagaagagccaagaaacctatgcacaggagcgtcatggtgtgccaactaggatattgctgaaaaaatctgggtatgccttgcacaaagagctatgaattcccagcaacaagctcagggtcttctggcctgatgctttatctgcttgtccactctggagatgtctgcctgaggcccctggccttgtgctccatctggaagggagtgacacccacctgcttcttgatgttctcgatctctgcccgcagcctctggatcatcctgttgagctctgcaatttcactcttggtgttcttcaggttgtcaccatgttggtcaaccgagatctggagctgctggacctaagactcaagaagacacagagaaccaggtgttaggggcatttgggtagggtccattctcaagtgaactcagtgagaattgccacaggtggcaagaatagcaccaaatgtcaagtagtttcaaatcagaccaggaccaacgatgcctgggagagtctgttcatatctgacttctattgggcttgagctaatgatcacctgttcacagacatcaaaagcagagccccagagccagccccatctcctgagagatccataccacccaccttggtctggtacagggcttcagcctcagccttgctcctctgggcaatctcctcgtactgggcacggacctcggcaataatgctgtccaggtccaggttgcggttgttgtccatggaaaggaccacggacgtgtcgctgacatgggtctgcatctgggacagctcctgcagggcaaatgtctcacatcagcccccccaggaaagccttcactgacctgatacaggctcaagtaggagcagagctggcattcacaatgtgtaggaaggggagagacaggtaaagttctaaggagaaatcaagtggttgtgacagttcaggatggaagagcaatgcttctagtctttactggtccccaggaaccataagccactctaatgcagtgagtgccggtgtgttggaatggaagggaagggaatggatccatttcaccagaaaaaaaatgctagacagcaatgaattctattccaagcactctttagatctaatcaccccgtcta

SEQ ID NO: 45819 - DNA, 539 bp, Homo sapiens
tggtgactgaggtcacacaaggggataagggcaagtaggcggagctgggttcaaatattgtcatgtgctgtgcacgcccatgctctgagcttccctgagccacactggaacaatgaccattctgggacccacctgtcagggtgtccatggaggtatctgagatgactgaggagaactgcctagcaacatgcctggcatgctttgtgctctgtgtaaagacccacacttctctctctcccatccccctttcctccagatgccatcctcctcagtactgatgggatccaatacagaatgtgatgtttatgatttaatggatgacaaaataccaagtaaatatctaggccgatgtagtcaaatgccaaaccgtaaatcgcgtgttcaggcacctcctccaggttcatgagtgtaatcctggctggaagcaaagtcactttcagcaccgcagacagcatcctgggcrctgagggagtctgtagctcccttggctgaatgaagccatcaacacagggtatttacctttttcttggggccactgg

SEQ ID NO: 45820 - DNA, 524 bp, Homo sapiens
  misc_feature (1)...(524): n = A,T,C or G
cacttgatgaagagtttaggaaaaaaatcatgtgtctgaaagtggaaaaactctctttttgttttcactgtctatgtgggttcattcttaggaggaaggaatattcctaaacccgtaggtttagtaatacagtgttaaatgtttcatgataactatgcatttaacccttatcacgtgcataataaagaggttcatgagtttgaaaattgcatatagtcttttaaacaagctcaatcaacaagaatgttgtgtttcctacgctagtgattagaaaggcgtaagaactaaatatccatgccctatgtgaacaaaagctcattatccttacaactatattttttcaaatgactataagtctatattaaataagaaacacctccaagtacacgagatattttcatacctagagttttgtgtktatacnnnnnnnnnnnnnnnnnnnnnnnnnnnnnnnnnnnnnnnnnnnnnnnnnnnnnnnnnnnnnnnnnnnnnnnnnnnnnnnnnnnnnnnnnnnnnnnnnnnnt

SEQ ID NO: 45821 - DNA, 634 bp, Homo sapiens
tcatttgtcgattgattccttaagctatttttaaaattttctttatttttagagatgggagtctcactatgttgcctaggctagtctcgaattccccagctcaagcgatcctcctgcctcagcctcctgagcagctgggactacaggcacgccccaccatgcccagcccttaaactattttggattaggtttctattacttgcagccaaaagttctgaattaacaaagggcctcaccctggctcttccttggtatatattactatggggatgggatgaccgaggtcccatagaaatctcaactgatccattcttcccatctatttttccaggtctcatgaaaagttgccattttccctcctcaatttgttccctaaaattttactcagccaggcatggtggctcacatctgtaatccccttgggagcctgaggcaggtggatcacttgaggccaggagttggagaacagcttggccaacrtggtgaaaccccatctctgttaaaaatacaaaaattagccaggtgtggtggcaggtgtctgtggtcccagctacttgggaggcagatgcaggagaatctcttgaacccatgaggcagaggttgcagcgagccaagatcacaccactgcactcca

SEQ ID NO: 45822 - DNA, 519 bp, Homo sapiens
gaggggcattctggcccactggagcagagctctgagcttagcatgtggtgttgggaggccaggaagttcagcaggctgggatggagggtctcatgggctctactgaaggcaggagctggacacatctccatccctmccagcttggtcctcttccctctgcctaccccccatgccaggagctggccttgtggctgcaggtgtcggtgaggggctgggtgatgaaacgtggtcccagggggagccatgaggagggatggtgcttgcctctcactttcctctccccaagccagttgcccgctgccgagccccagacaatctcttctgttgctgccggacaggcctgcttggctgccctgtggaaacctccaacccaaggtggctagagccagtgtggcctcatcctccagctgcctgctgtccacaccaacctggggcatggcacaggggcataagaaggggcctctcctggatctgcttggattcactgagggcgtgagaaaaagagggcaatggtgaacc

SEQ ID NO: 45823 - DNA, 519 bp, Homo sapiens
gaggggcattctggcccactggagcagagctctgagcttagcatgtggtgttgggaggccaggaagttcagcaggctgggatggagggtctcatgggctctactgaaggcaggagctggacacatctccatccctcccagcttggtcctcttccctctgcctaccccccatgccaggagctggccttgtggctgcaggtgtcggtgaggggctgggtgatgaaacgtggtcccagggggagccatgaggagggatggtgcttgcctctcactttcctctccccaagccagttgcccgctgccgagccccagacaatctcttctgttgctgccggacaggcctgcttggctgccctgtggaaacctccaacccaaggtggctrgagccagtgtggcctcatcctccagctgcctgctgtccacaccaacctggggcatggcacaggggcataagaaggggcctctcctggatctgcttggattcactgagggcgtgagaaaaagagggcaatggtgaacc

SEQ ID NO: 45824 - DNA, 533 bp, Homo sapiens
tttaaaatatatcttaactggagtatattaactatagtatatttaactgaccagatatgatcaatatgctagtatcagttaaatctgagttatgagttttagcgtttttttttaaatgtgggtgtctatgtttgcttttaattttataatgagcgtgaatcattcatcttgagagtgttgggaaactgttattaaaaataatttttccccatccccaaaaacctttccacaaatttagtagagaaagaaarcagttttattgttgagtaagcattaaagcaggatataatgtgcatcacaagccatctcctaagaaattctcttaattttcactcttttatatgaccaggcagttacaacaatatcatacatattctcttttttttttttttttttttgagatggagtcttgctctgttgccccaggctgaagtgcagtggcatgatcttggctcactgcaagctccacctcccaggttcatgccattctcctgcctcagcctccccagcagctgggactacaggcgcacgcc

SEQ ID NO: 45825 - DNA, 533 bp, Homo sapiens
tttaaaatatatcttaactggagtatattaactatagtatatttaactgaccagatatgatcaatatgctagtatcagttaaatctgagttatgagttttagcgtttttttttaaatgtgggtgtctatgtttgcttttaattttataatgagcgtgaatcattcatcttgagagtgttgggaaactgttattaaaaataatttttccccatccccaaaaacctttccacaaatttagtagagaaagaaaacagttttattgttgagtaagcattaaagcaggatataatgtgcatcacaagccatctcctaagaaattctcttaattttcactcttttatatgaccaggcagttacaacaayatcatacatattctcttttttttttttttttttttgagatggagtcttgctctgttgccccaggctgaagtgcagtggcatgatcttggctcactgcaagctccacctcccaggttcatgccattctcctgcctcagcctccccagcagctgggactacaggcgcacgcc

SEQ ID NO: 45826 - DNA, 1793 bp, Homo sapiens
atatgtgcatatataggtttattcacttataatattatttactaaacacttcttgatcttaggaagtatgtttgtccttaagaatatgaraaattaatacatttttataaatctaggtaacttaatatctaatgggagagacataatctgtctctatatacctatgtagctatctatctactttatgacctattgtcagaagtggttgaaccagagcaactccatcttgaataggggctggataaaacaagggtgaaacttactggtttcctagagatttagtatctagaggtttcgtgtctagaggttaaatttcaaaatatttaaacatactatgactttgtgatttaggagatacactttaatatgtgtctcgtaagaacaagaacaatatataaagaatccatatacatattcttcactaagattcctcaatagttaatattttgccagtgggctttgtaattttctccatatataatcatattattattttttctgaatcatttgagagcaagttacaaaaatgatatgacttcactccccaatcttcagtgtatttcactagaacaaaaagagtctcttatataatctaagtataaaactctaatgtcttactatttattatctaatttatagaccttaatcaaagcttactgattgtcccaattctggccttcattaaaaaatctaccaagtttccaattaaggatgacatatgttatgttatttgtcatgtttctttagcctactttaatctggaacagttagtccttctttatctctcataagcttgcattcagggactaatccctataacgttaacattgacatttttatgtgtgcaagccagttatttgtagagtgaagctcaatttgggttgatctgatgttggaagaccataggtgagatgctgcactcttctcagcgcatctataatggagaatatgatttttttttcattactggtgatcttcactttgatcatatctttgctataaagttatttccttctctttgctatttaaaagtagtttttggggaaacactttcaggctgtataaatacattattcttcaccaaacgtttcccctctaattataacatccattgatagtccttgctgagtaagtttttataataaaaaattacaagtaatgatttactatgtctttcattatactttttccactggtatcctaattaaaagatgatattttctttatccttctatttgttaatttactaatttacatattttgggactcatgacttcctatttaattaaactggttatatgtagcatttctgatgaaataggtattcctggcttttcttgtattttccctacctagccaacagagtcagtcatcaaagtcagtcatttctcccaatagccttggggaaacctgtctagcttggttgactcttttcctcacatatttctcatcctcactctgagtagtttaagtatgttctatgaaaacgacaaaaggacaaaatggattaaaaaaatataagccataattgcaagtgctttccaagtctcttctccattatatctgctatgattccactgtccacaaagtcataaggccaagcccagacttaagaagtagaataaactgattctcccaaagtgagaaaacactataaagttacatggcaaagagatgatgaataattgttgccaatgattcaagttaacaaatggttgcggattattgtctaatcattgccttaactatatccctgttaccaagtagttttattttttgaaattctgaaattt

SEQ ID NO: 45827 - DNA, 1793 bp, Homo sapiens
atatgtgcatatataggtttattcacttataatattatttactaaacacttcttgatcttaggaagtatgtttgtccttaagaatatgagaaattaatacatttttataaatctaggtaacttaatatctaatgggagagacataatctgtctctatatacctatgtagctatctatctactttatgacctattgtcagaagtggttgaaccagagcaactccatcttgaataggggctggataaaacaagggtgaaacttactggtttcctagagatttagtatctagaggtttcgtgtctagaggttaaatttcaaaatatttaaacatactatgactttgtgatttaggagatacactttaatatgtgtctcgtaagaacaagaacaatatataaagaatccatatayatattcttcactaagattcctcaatagttaatattttgccagtgggctttgtaattttctccatatataatcatattattattttttctgaatcatttgagagcaagttacaaaaatgatatgacttcactccccaatcttcagtgtatttcactagaacaaaaagagtctcttatataatctaagtataaaactctaatgtcttactatttattatctaatttatagaccttaatcaaagcttactgattgtcccaattctggccttcattaaaaaatctaccaagtttccaattaaggatgacatatgttatgttatttgtcatgtttctttagcctactttaatctggaacagttagtccttctttatctctcataagcttgcattcagggactaatccctataacgttaacattgacatttttatgtgtgcaagccagttatttgtagagtgaagctcaatttgggttgatctgatgttggaagaccataggtgagatgctgcactcttctcagcgcatctataatggagaatatgatttttttttcattactggtgatcttcactttgatcatatctttgctataaagttatttccttctctttgctatttaaaagtagtttttggggaaacactttcaggctgtataaatacattattcttcaccaaacgtttcccctctaattataacatccattgatagtccttgctgagtaagtttttataataaaaaattacaagtaatgatttactatgtctttcattatactttttccactggtatcctaattaaaagatgatattttctttatccttctatttgttaatttactaatttacatattttgggactcatgacttcctatttaattaaactggttatatgtagcatttctgatgaaataggtattcctggcttttcttgtattttccctacctagccaacagagtcagtcatcaaagtcagtcatttctcccaatagccttggggaaacctgtctagcttggttgactcttttcctcacatatttctcatcctcactctgagtagtttaagtatgttctatgaaaacgacaaaaggacaaaatggattaaaaaaatataagccataattgcaagtgctttccaagtctcttctccattatatctgctatgattccactgtccacaaagtcataaggccaagcccagacttaagaagtagaataaactgattctcccaaagtgagaaaacactataaagttacatggcaaagagatgatgaataattgttgccaatgattcaagttaacaaatggttgcggattattgtctaatcattgccttaactatatccctgttaccaagtagttttattttttgaaattctgaaattt

SEQ ID NO: 45828 - DNA, 1793 bp, Homo sapiens
atatgtgcatatataggtttattcacttataatattatttactaaacacttcttgatcttaggaagtatgtttgtccttaagaatatgagaaattaatacatttttataaatctaggtaacttaatatctaatgggagagacataatctgtctctatatacctatgtagctatctatctactttatgacctattgtcagaagtggttgaaccagagcaactccatcttgaataggggctggataaaacaagggtgaaacttactggtttcctagagatttagtatctagaggtttcgtgtctagaggttaaatttcaaaatatttaaacatactatgactttgtgatttaggagatacactttaatatgtgtctcgtaagaacaagaacaatatataaagaatccatatacatattcttcactaagattcctcaatagttaatattttgccagtgggctttgtaattttctccatatataatcatattattattttttctgaatcatttgagagcaagttacaaaaatgatatgacttcactccccaatcttcagtgtatttcactagaacaaaaagagtctcttatataatctaagtataaaactctaatgtcttactatttattatctaatttatagaccttaatcaaagcttactgattgtcccaattctggccttcattaaaaaatctaccaagtttccaattaaggatgacatatgttatgttatttgtcatgtttctttagcctactttaatctggaacagttagtccttctttatctctcataagcttgcattcagggactaatccctataacgttaacattgacatttttatgtgtgcaagccagttatttgtagagtgaagctcaatttgggttgatctgatgttggaagaccataggtgagatgctgcactcttctcagcgcatctataatggagaatatgatttttttttcattactggtgatcttcactttgatcatatctttgctataaagttatttccttctctttgctatttaaaagtagtttttggggaaacactttcaggctgtataaatacattattcttcaccaaacgtttcccctctaattataacatccattgatagtccttgctgagtaagtttttataataaaaaattacaagtaatgatttactatgtctttcattatactttttccactggtatcctaattaaaagatgatattttctttatccttctatttgttaatttactaatttacatattttgggactcatgacttcctatttaattaaactggttatatgtagcatttctgatgaaayaggtattcctggcttttcttgtattttccctacctagccaacagagtcagtcatcaaagtcagtcatttctcccaatagccttggggaaacctgtctagcttggttgactcttttcctcacatatttctcatcctcactctgagtagtttaagtatgttctatgaaaacgacaaaaggacaaaatggattaaaaaaatataagccataattgcaagtgctttccaagtctcttctccattatatctgctatgattccactgtccacaaagtcataaggccaagcccagacttaagaagtagaataaactgattctcccaaagtgagaaaacactataaagttacatggcaaagagatgatgaataattgttgccaatgattcaagttaacaaatggttgcggattattgtctaatcattgccttaactatatccctgttaccaagtagttttattttttgaaattctgaaattt

SEQ ID NO: 45829 - DNA, 627 bp, Homo sapiens
cagctttgtcgacaatcatgatggttgttggtgtgcagccctatttctgggctctcttttctgtcccactggtctatgtgtctgtttttgtacttgtacatgctgttttggttgctgtacccctgtagtataagtacatttattatgtttattgttatttattattattccatataagttatatgtatgtataaatatatacataatttcataatatggaaagaactattaggaagtaaaatttagaaataggggtcatctgtgtaggctatagttgaagccgtaagaatgcatggattcactgagtaagaaataatacctaaacccaagtttgagtatactatatgcaccattgaggaaggagaaatggagccagcattagagtaggtttatagaaatgaatacatgaaagtatgaagtgaatgaggacaagagaggcatttttcttttttttttttttttgagrtggtgtcttgctctgtcaccaggctggagtgcagtggcaagatcttggctcactgcaaccttcgcttcctgggttcaagcgattctcctgcctcagcatcctaagtagctgtgattacaggcacgtgatgccacacccagctaatttttctatttttagta

SEQ ID NO: 45830 - DNA, 627 bp, Homo sapiens
cagctttgtcgacaatcatgatggttgttggtgtgcagccctatttctgggctctcttttctgtcccactggtctatgtgtctgtttttgtacttgtacatgctgttttggttgctgtacccctgtagtataagtacatttattatgtttattgttatttattattattccatataagttatatgtatgtataaatatatacataatttcataatatggaaagaactattaggaagtaaaatttagaaataggggtcatctgtgtaggctatagttgaagccgtaagaatgcatggattcactgagtaagaaataatacctaaacccaagtttgagtatactatatgcaccattgaggaaggagaaatggagccagcattagagtaggtttatagaaatgaatacatgaaagtatgaagtgaatgaggacaagagaggcatttttcttttttttttttttttgagatggwgtcttgctctgtcaccaggctggagtgcagtggcaagatcttggctcactgcaaccttcgcttcctgggttcaagcgattctcctgcctcagcatcctaagtagctgtgattacaggcacgtgatgccacacccagctaatttttctatttttagta

SEQ ID NO: 45831 - DNA, 554 bp, Homo sapiens
gaggttgtggtgaaccaagattgcaccactgcactccagcttgtgtgacagagtgagactccatctcaaaaaaacaagcaaacaaacaacaacaacaacaaaactggagggaaaaaagggcaagaagtcctgtgatggatgacctttgggatccttatttccacctctgcttagcaggactgacattgtctccacaccagacaaaccctctaatgccaaactaaataggatgcatttataggggtgcctggcctctatttcttcctcatttaggaaaatcataaagcatgcagaaaataacccagacaaatgtgccaagatccttgaagacttgttcctgcttctcaggtcaattaacaaaaaaagaaacaagaaaatcagtttcaagttgcatctccatagaaaccctttctcaatatcaactcagcagtgttagacagttttcttcacacaattatactagttgagctgagagattcaaaataacagtggatgargtaaagaaagttctaatttgattttgccaaggcacaaagccttgctaaaattgtggg

SEQ ID NO: 45832 - DNA, 597 bp, Homo sapiens
gtgtgtctctgcacgtgagatgggtttcctgaatacagcacactgatggatcttgactctttatccaatttgccagtctgtgtcttttaattggagcatttagtccatttacatttaaagctaatattgttatgtgtgactttgatcctgtcattatgatgttagctggttattttgctcattagtygatgcagtttcttcctagtctcgatggtctttacattttggcatgattttgcagtggctggtaccggttgttcctttccatgtttagtgtttctttcaggagctcttgtaaggcaggcctggtggtgacaaaatctctcaacatttgcttgtctgtaaagtattttatggctaatttcttgtatttttagtagagacaaggttttcactgtgttagccaggatggtctcgatctccttaccttgtgatccgcccacctcggcctcccaaagtgctgagattacaggcatgagccaccacgcccggcccaacaagtgtaactttctgttttagactgagaactccttttgtctagtgattatgttgtatcattgtatcctcattatggagacctgtgccacacaattgtat

SEQ ID NO: 45833 - DNA, 597 bp, Homo sapiens
gtgtgtctctgcacgtgagatgggtttcctgaatacagcacactgatggatcttgactctttatccaatttgccagtctgtgtcttttaattggagcatttagtccatttacatttaaagctaatattgttatgtgtgactttgatcctgtcattatgatgttagctggttattttgctcattagttgatgcagtttcttcctagtctcgatggtctttacattttggcatgattttgcagtggctggtaccggttgttcctttccatgtttagtgtttcyttcaggagctcttgtaaggcaggcctggtggtgacaaaatctctcaacatttgcttgtctgtaaagtattttatggctaatttcttgtatttttagtagagacaaggttttcactgtgttagccaggatggtctcgatctccttaccttgtgatccgcccacctcggcctcccaaagtgctgagattacaggcatgagccaccacgcccggcccaacaagtgtaactttctgttttagactgagaactccttttgtctagtgattatgttgtatcattgtatcctcattatggagacctgtgccacacaattgtat

SEQ ID NO: 45834 - DNA, 597 bp, Homo sapiens
gtgtgtctctgcacgtgagatgggtttcctgaatacagcacactgatggatcttgactctttatccaatttgccagtctgtgtcttttaattggagcatttagtccatttacatttaaagctaatattgttatgtgtgactttgatcctgtcattatgatgttagctggttattttgctcattagttgatgcagtttcttcctagtctcgatggtctttacattttggcatgattttgcagtggctggtaccggttgttcctttccatgtttagtgtttctttcaggagctcttgtaaggcaggcctggtggtgacaaaatctctcaacatttgcttgtctgtaaagtattttatggctaatttcttgtatttttagtagagacaaggttttcactgtgttagccaggatggtctcgatctcyttaccttgtgatccgcccacctcggcctcccaaagtgctgagattacaggcatgagccaccacgcccggcccaacaagtgtaactttctgttttagactgagaactccttttgtctagtgattatgttgtatcattgtatcctcattatggagacctgtgccacacaattgtat

SEQ ID NO: 45835 - DNA, 597 bp, Homo sapiens
gtgtgtctctgcacgtgagatgggtttcctgaatacagcacactgatggatcttgactctttatccaatttgccagtctgtgtcttttaattggagcatttagtccatttacatttaaagctaatattgttatgtgtgactttgatcctgtcattatgatgttagctggttattttgctcattagttgatgcagtttcttcctagtctcgatggtctttacattttggcatgattttgcagtggctggtaccggttgttcctttccatgtttagtgtttctttcaggagctcttgtaaggcaggcctggtggtgacaaaatctctcaacatttgcttgtctgtaaagtattttatggctaatttcttgtatttttagtagagacaaggttttcactgtgttagccaggatggtctcgatctccttaccttgtgatccgcccacctcggcctcccaaagtgctgagattacaggcatgagccaccacrcccggcccaacaagtgtaactttctgttttagactgagaactccttttgtctagtgattatgttgtatcattgtatcctcattatggagacctgtgccacacaattgtat

SEQ ID NO: 45836 - DNA, 558 bp, Homo sapiens
ctttggttgaactcttattaagcagcagctttccaaatttccataccttgttagaactatagacgaaatatagacccagatcaaattcttaatcctgccaatctctgttgcctcttatgtgaaatatttaaatttcatatagaatgaaacttctaaaaaatgattgatgttcccagaaagattagagcagatattgcctctaaaaaaatgagaacaatgtcatttgaaatagaaataaatatcaatgcaatacaagtgtatgaagmcaaatgcaaaggaaagcccccaagaagtaaaacgaaaagtcaaagacatggatacttggagataaaacatttatagtttagctggaaagaagattttagaaacaatgtaatagacttacatcttcttgtaatggtggagtgatttgggtaatttgccttgctcacaaataacatttataaaacatggacaaaatgttaacaacaacaaagtgactaaaagtaggaagcaactggagaaaggtatcatttgtaccaaagatatttgatagtttgtgtcttcctttttttttgc

SEQ ID NO: 45837 - DNA, 526 bp, Homo sapiens
tacgggtatgttaagggaatattctagaaaagacctgctgctattggagtcttctggttgcactttcaagaactkgctttatgtacaaaaattattttgtaattattacctaatattgctattatttgtagttaacatatttttatatacatttgattactgttatctctattttttaaaaaatctaaagataagagagattttgatttgtgaaaaattagatagaaattctttcttacattatataaatatttttggacagttgctaactatgtgtctgagctgcacaaggaacaagaatccaatacttgttatgatatagcacttgccctcatgtagctcccagttaacaaagagaaataagtcagtaaagtagaggttagggagcacaaactataaaggccaaagggcagagtgtatatctagtcatacttggaagatataattatgcacattttacaataaggaaatcaggtattaacaaagatgacttgctcacggcgcacagccacctggcagtggaaag

SEQ ID NO: 45838 - DNA, 526 bp, Homo sapiens
tacgggtatgttaagggaatattctagaaaagacctgctgctattggagtcttctggttgcactttcaagaacttgctttatgtacaaaaattattttgtaattattacctaatattgctattatttgtagttaacatatttttatatacatttgattactgttatctctattttttaaaaaatctaaagataagagagattttgatttgtgaaaaattagatagaaattctttcttacattatataaatatttttggacagttgctaactatgtgtctgagctgcacaaggaacaagaatccaatacttgttatgatatagcacttgccctcatgtagctcccagttwacaaagagaaataagtcagtaaagtagaggttagggagcacaaactataaaggccaaagggcagagtgtatatctagtcatacttggaagatataattatgcacattttacaataaggaaatcaggtattaacaaagatgacttgctcacggcgcacagccacctggcagtggaaag

SEQ ID NO: 45839 - DNA, 1630 bp, Homo sapiens
tatgtcaataagaaaccctcaaaattaaaaaaaatctgattcctcatcaagaaaaccatttatataattgtttcactttgttacttacaagtctttgaaattttctattgctcttaggataagcttcaagtgcattaaagtggcttgtaagacctggccccagtctcttctccagctcccaccctcacattctaatcacaacataatcaatttctttcatttcctctagagtattaaactctcttgcctctggatcttcatgttgtattttatcttcctggaatgctcttcctagtcctccatctgggtaactcttccttatttgtgagtctcagctcacaggtggtttcctctgaggagcatccccacatctgcttggtttgggttaaggtcccctcctctgtgctgtgtcatcacagcaggtcgttgcggcttagttctctgtctcttctaccaatctgtaaaatagccatgtctttctgttaccattttatccttgaaccaagcacagtgcctggctggcacatagtaggtgcttaataaatatttcttaactgaatgggtgcattggaataatttgttgagaaaaggaatcaggattaaagtgattttctaggtcccatgctgcccttgggtgcctgaattatcaggtcaattcagactgaacaaatattattgaacacagatatgtgccagctgcttccacctaccctatttcatttgatctcttccttagctttctattttccagctgaggacagtcggacccagcgaggctaaacaacttgatcatggcaacccatgaatagaaagaaccttgagtttcagagacctacctcattgctcttggacctatatcagggtgctgtctctttaaacatgtatgtgcctgttattctctgttgccacagccatccactaggctatcttattagaacataagagctcttgaattgctgacataaaagttacaactgagaccaaaatcaaaatggaatcctggaaaggaattggggaaggaagcgctggtctaagattccagacatttgagtttttgtctttcctgtgtgactctgggaaagttgtttagtctctgtgggccttagctttctcatctatacaatgagtgggaattattggataattttgtaggggccttcccactttaaatttaatgatccttgcaagctggtatgagagttaaaccttaacactttgagaaaatgctggaaatgtcgtattaggaatgacaccacagactgcagccttatttcaagttaagtaaatcctagaagtagatgtccacttttaatggaaaaaaaatgatrcattttatttccatactgaatcaacttcctaccttaaaatgggatttctgctatgaaaatggcctgacaagtgacactgtggtgtgggtacataaaaaccaaaccccgcagaacttagatgtaaaaatttctgaggaccttcacctgtgtgacaaaatgtagaatatacccctttaatagattcagaatcaagagatacatttctagtagggcttttgaagtattgagacctctcatggaaaatggatctcttttctcttttaggaatgctgcacattttttgagaagttaattaagaacag

SEQ ID NO: 45840 - DNA, 507 bp, Homo sapiens
caccctaagtgattcttggccacctgaagcttgagaaaaagatagtgtggaagttaggcagaacwggtctcaaattctcatagctaatagctgtatgatctctggaaagtttcttttttgttcttatttttgttttgttttgtttaaattagggtctcgctatattgctcaggctggtctcgaactcctggcttcaagtgatcttcctgcctcagcagaaagcttcttgatatcaactttgtggggttgatatgaaccactatgaaagccactaattcaatgcctggtatatcattaggatctagaagaaatgagctattactacttgagggtaaggttcaagacagtagagcagtgcttagcacattgcaggcacagtaaatattacagatactctcacagtgtgcagaaaagcactttttcttaagagtttaaacaatagataagacccttccaacaacagaggcatggtgtagcaactacaaggaatagcaccaaaggaggctc

SEQ ID NO: 45841 - DNA, 507 bp, Homo sapiens
caccctaagtgattcttggccacctgaagcttgagaaaaagatagtgtggaagttaggcagaactggtctcaaattctcatagctaatagctgtatgatctctggaaagtttcttttttgttcttatttttgttttgttttgtttaaattagggtctcgctatattgctcaggctggtctygaactcctggcttcaagtgatcttcctgcctcagcagaaagcttcttgatatcaactttgtggggttgatatgaaccactatgaaagccactaattcaatgcctggtatatcattaggatctagaagaaatgagctattactacttgagggtaaggttcaagacagtagagcagtgcttagcacattgcaggcacagtaaatattacagatactctcacagtgtgcagaaaagcactttttcttaagagtttaaacaatagataagacccttccaacaacagaggcatggtgtagcaactacaaggaatagcaccaaaggaggctc

SEQ ID NO: 45842 - DNA, 507 bp, Homo sapiens
caccctaagtgattcttggccacctgaagcttgagaaaaagatagtgtggaagttaggcagaactggtctcaaattctcatagctaatagctgtatgatctctggaaagtttcttttttgttcttatttttgttttgttttgtttaaattagggtctcgctatattgctcaggctggtctcgaactcctggcttcaagtgatcttcctgcctcagcagaaagcttcttgatatcaactttgtggggttgatatgaaccactatgaaagccactaattcaatgcctggtatatcattaggatctagaagaaatgagctattactacttgagggtaaggttcaagacagtagagcagtgcttagcacattgcaggcacagtaaatattacagatactctcacagtgtgcagaaaagcactttttcttaagagtttaaacaatagataagacccttccracaacagaggcatggtgtagcaactacaaggaatagcaccaaaggaggctc

SEQ ID NO: 45843 - DNA, 574 bp, Homo sapiens
attaygcttcctatttcagatagctgcttaaaatgagtaaggaaaaacggatgtgtgcatcagttccaactgtttatggactaaaactagttgatttcttggttaagaacaaaaagtgacaacctaattaactgaaaattttaagtgggcaattatagttttagctttaacgtaaaatattaactattctccaatcttgcatttttaacctaatactcaatataaatcgccacatgccatgtttcagatcaaggttttacttgggatctctcatgagtttttcaaggttttaattatctgcaatgtaacaatgtaccagtaaccttactggcttaaaccaggaatttattctttttacatgtcacaattttctgggtcaagacactggacagggcaatgtgggttggctgcttcatgatgtccctggtctcatctggaaggactctagtggctggggacgtgaagcaggcaccagaaggactctagtggctggggacatggagcaggcaccaagccctctctttgtggccagcacggacttcctcccagtctggcagtgtcaggtagtcaggtt

SEQ ID NO: 45844 - DNA, 623 bp, Homo sapiens
cgagtagtctagtaaaggctttgccaacttgtcaccatctgtggatattctggccagctcttgttttcaccctactgacttcttcagacactaggcttttgctttagaccattcatggtttttcttcctcttcaaatcagtaatcaataaatcctcttcaaatcaataaatttccactcctttaggaaactctgatcttctggtcatgccaaggtttaattaactggtttaattgtttttctgttttcttcgtttctttttcyttcttccttggggtttctagtaattttagtttgatgtctcactttctccatttttttatttcttaattttcttctgtgattattttcactgcagctgcagggcctaatcctgggttggcagagaactagcacttactctgccgtaattggaatccgagagagataggaggtgccctagtatgaaaatgtgtctgctcctctctgcttctggtagtctctctgtaggagtactttacgtattctgaatgttcacttcttatgagatacatgatgtgcaactataggttgaatgtctctgatccaaaaatctgaaatcccaaatgctccaaagtctgaaactttttgagtgccaacatgaca

SEQ ID NO: 45845 - DNA, 623 bp, Homo sapiens
cgagtagtctagtaaaggctttgccaacttgtcaccatctgtggatattctggccagctcttgttttcaccctactgacttcttcagacactaggcttttgctttagaccattcatggtttttcttcctcttcaaatcagtaatcaataaatcctcttcaaatcaataaatttccactcctttaggaaactctgatcttctggtcatgccaaggtttaattaactggtttaattgtttttctgttttcttcgtttctttttccttcttccttggggtttctagtaattttagtttgatgtctcactttctccatttttttatttcttaattttcttctgtgattattttcactgcagctgcagggcctaatcctgggttggcagagaactagcacttactctgccgtaattggaatccgrgagagataggaggtgccctagtatgaaaatgtgtctgctcctctctgcttctggtagtctctctgtaggagtactttacgtattctgaatgttcacttcttatgagatacatgatgtgcaactataggttgaatgtctctgatccaaaaatctgaaatcccaaatgctccaaagtctgaaactttttgagtgccaacatgaca

SEQ ID NO: 45846 - DNA, 623 bp, Homo sapiens
cgagtagtctagtaaaggctttgccaacttgtcaccatctgtggatattctggccagctcttgttttcaccctactgacttcttcagacactaggcttttgctttagaccattcatggtttttcttcctcttcaaatcagtaatcaataaatcctcttcaaatcaataaatttccactcctttaggaaactctgatcttctggtcatgccaaggtttaattaactggtttaattgtttttctgttttcttcgtttctttttccttcttccttggggtttctagtaattttagtttgatgtctcactttctccatttttttatttcttaattttcttctgtgattattttcactgcagctgcagggcctaatcctgggttggcagagaactagcacttactctgccgtaattggaatccgagagagataggaggtgccctagtrtgaaaatgtgtctgctcctctctgcttctggtagtctctctgtaggagtactttacgtattctgaatgttcacttcttatgagatacatgatgtgcaactataggttgaatgtctctgatccaaaaatctgaaatcccaaatgctccaaagtctgaaactttttgagtgccaacatgaca

SEQ ID NO: 45847 - DNA, 617 bp, Homo sapiens
atgtataatcttatttttctcttgaagttatcatccttattttggtgtatatacatatttaatgccaaccatttgtacagtgtttatatgatgaaatcattaataaaactgaatgtgagaaagtgtgaccactcagtattcttagacataagcaaaagtgatgacataaaaagaaaggaaaacactcctctttattaccagaaagtgcattttctcctgctttactgaaaaatgaacagccagaaaacgcttggctagatgagcctaaaagcaatcatccactactgctctttttaaaatgaaatattcagtasagcaagataaaataagggaccatgaaaaggggtttgggaacataaaactagaaggtagattctgttggagcatttcatggaattggaaaaagatctcccctccaggcctgccagtggtgatgaagctggacgtgagagttccagtaatcagtctcagtacagctgcaaacggaagtgcaatcagaattgtggtttttttgtagttttttttttgtagtttggattacaagagaaaaaaaattagatgtgtgtgtcaataacaacctctatttgcacctggtaattcattgtccaaataatact

SEQ ID NO: 45848 - DNA, 617 bp, Homo sapiens
atgtataatcttatttttctcttgaagttatcatccttattttggtgtatatacatatttaatgccaaccatttgtacagtgtttatatgatgaaatcattaataaaactgaatgtgagaaagtgtgaccactcagtattcttagacataagcaaaagtgatgacataaaaagaaaggaaaacactcctctttattaccagaaagtgcattttctcctgctttactgaaaaatgaacagccagaaaacgcttggctagatgagcctaaaagcaatcatccactactgctctttttaaaatgaaatattcagtacagcaagataaaataagggaccatgaaaaggggtttgggaacataaaactagaaggtagattctgttggagcatttcatggaattggaraaagatctcccctccaggcctgccagtggtgatgaagctggacgtgagagttccagtaatcagtctcagtacagctgcaaacggaagtgcaatcagaattgtggtttttttgtagttttttttttgtagtttggattacaagagaaaaaaaattagatgtgtgtgtcaataacaacctctatttgcacctggtaattcattgtccaaataatact

SEQ ID NO: 45849 - DNA, 546 bp, Homo sapiens
ggactacaggtgtgcacaatgcccagcaaatttttgtatttttagtagagacggggtttcaccatgttggccaggatggtctcgaactcttgacctcgtgatcctcctgcctcagyctcccaaagtgctgggattacaggcgtgagccaccatgcccagccctttaatttgttatattgggtttgtaaggcacatagattaattgattaaactgtgtgtagcacactgaaataatttattcctcttccaaagcctcgaaggagaaagaccagatattgctccttccttgcctctctaagtcactctactcttctcggtatttgtggcccttcaggtctgaggcaaaagcctcatggtttaatacacatggcagggaataccgaaggcatactctctactcacttagactcaattttcaatttacctcctatcaacaaatatttcaatatatcctaaagggtaaataagactatagaaaaatgaatagaatgtaccactgattgtatttagaatttttttttattaaaataacttccatcttttcat

SEQ ID NO: 45850 - DNA, 546 bp, Homo sapiens
ggactacaggtgtgcacaatgcccagcaaatttttgtatttttagtagagacggggtttcaccatgttggccaggatggtctcgaactcttgacctcgtgatcctcctgcctcagtctcccaaagtgctgggattacaggcrtgagccaccatgcccagccctttaatttgttatattgggtttgtaaggcacatagattaattgattaaactgtgtgtagcacactgaaataatttattcctcttccaaagcctcgaaggagaaagaccagatattgctccttccttgcctctctaagtcactctactcttctcggtatttgtggcccttcaggtctgaggcaaaagcctcatggtttaatacacatggcagggaataccgaaggcatactctctactcacttagactcaattttcaatttacctcctatcaacaaatatttcaatatatcctaaagggtaaataagactatagaaaaatgaatagaatgtaccactgattgtatttagaatttttttttattaaaataacttccatcttttcat

SEQ ID NO: 45851 - DNA, 535 bp, Homo sapiens
gagtgtctgctctgtgctaggactcaggtagcacgtcactccctgacgtccggaggttgagtccaatgaggaagacagacatgaaatgagtgccctagcgaaggccgatgagtctggcgggaggactcaatgcatctttatttcagcttggttcctcctcactctggggcaagctcctgttgctgagtgaaccacagcatgctttccctgtctattgttttccaaaggccagaggaacttcttggatgactcaactggggaggatgggagagaggcaaaagctgtgagatggggtgggggtacccccaggatgggaagctggtggagctctgtgagaactgcaagtggaggtgagccgggaggcaggagcaccttagcaaccaatggctttggggtgcttggggaggatggggatcccagcctccatggagattctcaagtccagtcatggtgtggaagctgcargaccacctgactccaaaggaccatggggacttacatgatggagatgccaggggttacagtgttgggtagg

SEQ ID NO: 45852 - DNA, 535 bp, Homo sapiens
gagtgtctgctctgtgctaggactcaggtagcacgtcactccctgacgtccggaggttgagtccaatgaggaagacagacatgaaatgagtgccctagcgaaggccgatgagtctggcgggaggactcaatgcatctttatttcagcttggttcctcctcactctggggcaagctcctgttgctgagtgaaccacagcatgctttccctgtctattgttttccaaaggccagaggaacttcttggatgactcaactggggaggatgggagagaggcaaaagctgtgagatggggtgggggtacccccaggatgggaagctggtggagctctgtgagaactgcaagtggaggtgagccgggaggcaggagcaccttagcaaccaatggctttggggtgcttggggaggatggggatcccagcctccatggagattctcaagtccagtcatggtgtggaagctgcaagaccacctgactccaarggaccatggggacttacatgatggagatgccaggggttacagtgttgggtagg

SEQ ID NO: 45853 - DNA, 426 bp, Homo sapiens
gggagggatagcattaggagaaatacctaatgtaaatgatgagttaatgggtgcagcaaaccaacatggcacatgtatacatatgtatcaaatctgcacattgtgcacatgttccctagaacttaaagtatactaacaaaagaaaagtctctggaagcatacataagaaaayataatactggttaactcctgggaggagagatgggtgactatggaagatatacctttcattgaataatatgaatcatattaatatattattcaaatattgatattaaaactgaacaaatatatttaagacataaagtagtttttgtgaatcttaaaaaaaaaaaaaaagacgtggagccaaaattatttctgaagttgtgcccaagaggaatccagggcctgtgtggactgtgaaaacctcagagactaaagggc

SEQ ID NO: 45854 - DNA, 611 bp, Homo sapiens
actaaaaaaaatacaaaaagttagccgggcatggtggcgggcacctgtagtcccagctattcgggagactgaggcaggagaatggcgtgaacctgggaggcggagcttgcagtgagcagagatggtgccactgcactccagcctgggtgacagagcgagactccgtctcaaaaaaaaawatatatatatatataagatatgcacaggcacaactagccactgttctatgtgcttgttttctgatcaactctaatttgagttagatcactccttaggtttagtctcaacacagatcaaaacatggacactactcttaatagaaacatgcctcactttatggaatagatgtttttcagggcaattatactgcagtcatcctgtttgtatcaaatcatatttttactagcataaattttaatttgagaaatgctttatcttcatgactgaggttatgtcaacacaattcatgcttatctattgacctaagagagctgttaactaacttctatattacaagtaagaatttgttgaaggataacttttagtcggcatattaacttcccaaataggtgtgaaatggactggggtgagtttatgagcacccagtagta

SEQ ID NO: 45855 - DNA, 543 bp, Homo sapiens
aatatcaatgacctattagttaacctgaacttctgacaacyacatcccatctcctaatgtggagaaatacaaagcattgtttaatatttccattgtcttgttttaatgataacaatattgaaatgcagaactgagttttgtttctcctttcttcctccatgttcagccagacaaatttcactgtttgaatatttgaaactctatttgaaatctgtagcttcatcatataaagaaaattatttactggaatcataataacaggaattactattctctgtttgctttctgcctccccttccactccatttcctacatatcagccagtgacctgcaaaggtgaattaggttgtgttcctcctcagcattatactctccaacctgccattgccctaaacgaaaagatcagctgtaacctgcagggccctgggtgtcctgtctcctaccatcaatcctaacttcaccttgcaccaccttctccttggattactaccctccagccacagtgttcttggaactcccatggccaagaatgctcttccttga

SEQ ID NO: 45856 - DNA, 1778 bp, Homo sapiens
taaagagattatttgtttgttcgtttgaaccttgtggaagcctctcttttcatcagatcgcttagaaaatggccacagttggtggttccccagtggtgagaggttcctagagcttctcatgttacataagaacaagtggattatttaatattttactttaaacatttttctttgcttaagagattgttaaaatatttgcaaatcaaaacaagacaaattttaaaaataagaatttggtttctttgttttgagtgacacgttgctcttatcaaaggatgaaagaagtcttcatgttattaatgtggtttttattccctgagataccaaaggtattgtatggaattgttgacttggtgtaattagaaaccaaaatgtcctattttaaacctaatgcaaaagtaaggaatgtagtttacaatgaacctccatgtgctcattacctggctttaacgattgtcgcctcatggccaaaattattcatgctcccttcttgtgattattttgaaaccaggcgctgacatcatrtattagttcatccataagcattttagtacctatctctaaaagatagactctttgtaaaaaacaaataactacaatgtagtatgacatggctaggtgcagttttaagttcaggtttttattggtgaagaggaagatggatcaggtgatttctgttgtgtcctggctttcagtgccaatggaaaagatatcattgttgactttccccagcagtctcactggactgggttgctatcagaaatggagttggtgcccagtattcatcctggggttacgtgagttatttttatgattgctagatttgctttgggacgaatggttttctgttgaattaagtttaataaatgacctttcttaactcagttgctattttacaaataggtgtgatggatgtcagatgtttcctatcaatggatccagattcaaatgcagaaactgtgatgactttgatttttgtgaaacgtgtttcaagaccaaaaaacacaataccaggcatacatttggcagaataaatgaaccaggtatggcagaatgtttatattctctcttccaccaaatattaatgaaatacttattgtggaccacagtgtactggaatttgttattttaaggttcctttgcatatggtaattctgtagagtgagtacagtgagacggaagtgacggtcctacccgctgatgactggctggctttttaaaaaaatcaggatggggtatcggggaagaattagaataactaggcttgtttgcttgtttttccataaagaaacattaaaagaatctcaagaaactagtaagtgtttagttgcgtggcatgtggaattggttagatggagagtgagtgttttaatttgtataccttttattatatttttcattgtggcaaaatatatttaacttaaaattagccacttagtcattttctaagtttataattcagggtattaagtaccttaagtacagtgttgcacaaccatcacaactttctcttaccaaaacttttcaccactccgatcagaaactctgtacccattaagcaatttaactgccctacttccccttaccccaaccctggtaaccttgaatctaactttggtctctacgattatgaccactccagacatctcatctagatggaaccatgtaagatttatccttttgtgtttagcataatgtcttcaagcttcatccgtattgtagcatgtgtcagaacgtcatcctttttaatggctgaataatattccactgtatgcata

SEQ ID NO: 45857 - DNA, 1778 bp, Homo sapiens
taaagagattatttgtttgttcgtttgaaccttgtggaagcctctcttttcatcagatcgcttagaaaatggccacagttggtggttccccagtggtgagaggttcctagagcttctcatgttacataagaacaagtggattatttaatattttactttaaacatttttctttgcttaagagattgttaaaatatttgcaaatcaaaacaagacaaattttaaaaataagaatttggtttctttgttttgagtgacacgttgctcttatcaaaggatgaaagaagtcttcatgttattaatgtggtttttattccctgagataccaaaggtattgtatggaattgttgacttggtgtaattagaaaccaaaatgtcctattttaaacctaatgcaaaagtaaggaatgtagtttacaatgaacctccatgtgctcattacctggctttaacgattgtcgcctcatggccaaaattattcatgctcccttcttgtgattattttgaaaccaggcgctgacatcatgtattagttcatccataagcattttagtacctatctctaaaagatagactctttgtaaaaaacaaataactacaatgtagtatgacatggctaggtgcagttttaagttcaggtttttattggtgaagaggaagatggatcaggtgatttctgttgtgtcctggctttcagtgccaatggaaaagatatcattgttgactttccccagcagtctcactggactgggttgctatcagaaatggagttggtgcccagtattcatcctggggttacgtgagttatttttatgattgctagatttgctttgggacgaatggttttctgttgaattaagtttaataaatgacctttcttaactcagttgctattttacaaataggtgtgatggatgtcagatgtttcctatcaatggatccagattcaaatgcagaaactgtgatgactttgatttttgtgaaacgtgtttcaagaccaaaaaacacaataccaggcatacatttggcagaataaatgaaccaggtatggcagaatgtttatattctctcttccaccaaatattaatgaaatacttattgtggaccacagtgtactggaatttgttattttaaggttcctttgcatatggtaattctgtagagtgagtacagtgagacggaagtgacggtcctacccgctgatgactggctggctttttaaaaaaatcaggatggggtatcggggaagaattagaataactaggcttgtttgcttgtttttccataaagaaacattaaaagaatctcaagaaactagtaagtgtttagttgcgtggcatgtggaattggttagatggagagtgagtgttttaatttgtataccttttattatatttttcattgtggcaaaatatatttaacttaaaattagccacttagtcattttctaagtttataattcagggtattaagtaccttaagtacagtgttgcacaaccatcacaactttctcttaccaaaacttttcaccactccgatcagaaactctgtacccattaagcaatttaactgccctacttccccttaccccaaccctggtaaccttgaatctaactttggtctctacgawtatgaccactccagacatctcatctagatggaaccatgtaagatttatccttttgtgtttagcataatgtcttcaagcttcatccgtattgtagcatgtgtcagaacgtcatcctttttaatggctgaataatattccactgtatgcata

SEQ ID NO: 45858 - DNA, 543 bp, Homo sapiens
aacaagaaagatgaaaggacaggaaatatacttatctttatctttcattaatttagggaaataaggcaaatctatcttgcatgctgttataatctcagtaactaggagtgaaataggtatgaagtataagcatgaaagactatgtacaaggacatttttgaccatacaggttgagaatcccttatccaaaatgcttgagatcagaagtgttttggattttggaatacttgcattacatttataccagctgagcaccccaaaccagaaaatctgaaatctcaaatgctccayataagcatttcatttgagggtcatgtcagtgctcagtaaatttcaggcttcagatttggagtgctcaacctgtgtaagttgttaacactgacataatgaagataacctaaatgtccatcaaaagaaaagttagataaactagtatatccaagttatggaatactacatactgacttttgaaagagaataaaataaatcaaaaaatgattagcagactcatgggccccttctgctaggccccaaatgacattc

SEQ ID NO: 45859 - DNA, 543 bp, Homo sapiens
aacaagaaagatgaaaggacaggaaatatacttatctttatctttcattaatttagggaaataaggcaaatctatcttgcatgctgttataatctcagtaactaggagtgaaataggtatgaagtataagcatgaaagactatgtacaaggacatttttgaccatacaggttgagaatcccttatccaaaatgcttgagatcagaagtgttttggattttggaatacttgcattacatttataccagctgagcaccccaaaccagaaaatctgaaatctcaaatgctccacatragcatttcatttgagggtcatgtcagtgctcagtaaatttcaggcttcagatttggagtgctcaacctgtgtaagttgttaacactgacataatgaagataacctaaatgtccatcaaaagaaaagttagataaactagtatatccaagttatggaatactacatactgacttttgaaagagaataaaataaatcaaaaaatgattagcagactcatgggccccttctgctaggccccaaatgacattc

SEQ ID NO: 45860 - DNA, 518 bp, Homo sapiens
ctcaagaaatttttgatttacttagaaaaaaatcactttaattaatttgttcttgttgtagaagagggcaagatatttttgaataatctaaagaggaggaaaattatattctacctctttccaaaatagtttgaaaaacaaagtaacaggatttgagtactaaccctaggagctaacatggaaggaggactgggatgcaccatggcttcagagaaattgagatcaaaaggggggttttgaaactggaacagttgggcacaatactatgcctaggaaacatcacagccacctctatgtgacaaagatactcactcagaaatctcttgtattcgggctaaactgaagatgactagaccctagaaaccagacagaagcacagagacccaaaaacaatttgaggatgcccatggggccaaaatataamgaagttcaaaaaaggaggcagaacatggtgtctgatgtctgataggaggaatctaggcaagaagactgaactcagagacaagattgtagtttcc

SEQ ID NO: 45861 - DNA, 551 bp, Homo sapiens
atcttttgctgttttgcttgatgtttaaaacgcactgagtgaattcaatcttttgaaaagcatatggacatgccaggattttggttttttttttttttttttttkggggggggaaatttgctatacctgaaacatttttttcctaaaaatgtctaagctggatttcctaaaaatatctgacattttttccctatcaatgtctaaactggcaacagttataaataaactctttgctggaatcctaggaattgattcttaaaacttaatatagttgtagttagtggtttatagactgttgaataactaggccaataaagcaagcaatgggaccaagagggtaagtggtaggaggcaggtggatggcttcatttatacaaggctgggggtctcagggtgccaagtagggcttgtgtggagccaaccatctaatgatgagagaaattaacaactggctggtaaggatatgtaacctttaatctgttccacttctggtcttccagatttctttctctctcttgatttcagtctctgagtctggagcctgaaaccca

SEQ ID NO: 45862 - DNA, 568 bp, Homo sapiens
gtaagacccagtcaggccctgaaggactcaaggctgaggtgctggactcagggcatgaaagctgcttcccaaaggggcctggacaccaggtgggccgtcagcactgcactgagagctgaacatggcctctgcccacagacacaagagccggtgggaggktccgtgccgaggacacaggtaggtgtcccaaccctgggactcacgaagccctctcagatctggagttctcagcgccagtcatggccaaagtgtggctctgtaatcgtggggtcctgagtgtggccgctgctgaccctgagatcccacaaattcccccaaaacagccagaaaaaaatccaggggcactccctccactgaggaccttaagggcctcaggccccacccactcacccctttccctggaaggcaccaaaaatgcagatgccaacccagcggaggatgcaggggcaggatcctggtgggggctgggccgcgtgggggcaggatcctgggggtggaagggccgcctgggggcaggatcctgggggtggaagggccaggtcaggtgtcgagctgggaacagtttcca

SEQ ID NO: 45863 - DNA, 1704 bp, Homo sapiens
  misc_feature (1)...(1704): n = A,T,C or G
atttggtaaaatgcttagtttcgatgtcagaaccataaacatggcgagtcacagattacagggccaggacccgagatatgaggcaatgtgcaaaggtgagggtctttgttcttggagtagtctctggaagcccctggtcaaggcagagtcagaactccaggatcaagggtttctgccccagccacacgcatgtctgctgaagctctgctcatcactctcgctcccgcagcctcacactgtgctctctgtattgttcctgtcctcaggggagctgccttaccttggggaccctagaattaggcagtgtccttgaattagccatgccctcctctgcgcccacagcagaaaggcacacctatttcactctcaacrtcctagagttgaacccactttttccccctgaacagtccatggaaatcttgacactgttatcagaaaaatggggagacaagtttagctggataggcaatggcattagtctacgtcaaaaggcaaagggaggtttgacttttatacgtattttcttattgatgaagatgaaacacaggacctttaattaaaaattctccccatattttcttatccccacatatgcctatgcatcagtatttgtatgttggacacaaagcacatacatttgatgaaaaagagtgactgggattagagtagtcatatttcacataagctcagggctttatatttcattaaggtttcttctacaccatccttcagaataacctctggattggacattagagtacagataatattttcatcttctctattttgcaaacaaaccaacaaaccaaactaacttgttcctactcccgaccctcagttaggaaatgactagaattgaaatctgctggcacttcccacagagatgtttccatcagctgaactcaaactgaagacagacaaatttggtttggcacattccatttcaggctgtgggttctcangccctgtggtgcacagtgagtctatcaagaactcgagaaggtagaaggtcacagccaaagccaaccttggtgttagtacaccaagtacaccaagaagtaacaagtacaccaagaagtcaggtggtgaagaatctggagtggcctcagaaatcagatcatcaagaattgaaagaccagggccaactgcaagaaaactgatacaaggcaataaaacagaaagccccttgcaatctgagtggccataccatgcttttaacctacgtaggaacaagtatgagagtaagacactgtgcaggctaaagaaagtagtaggctttggcaaatggatgttatcagctagttcaagaatctaaaacaggccagtcagggtggctcatgcctgtgtccccagcacttttggaggccgaggcaggagggatgcttgagcacaggagtttgagactagcttgggcaacacagtgagaacttctctttactaaaataaaaattaaaagtattaaccggtgtggtggtgagtagtcccagtgacttgggatgctatgttgggaaggatcacctgaacctgggaagttgaggctgcagtgaatcatgttcacaccacggcactccagcctgggcagcagagtgaaaccttgtctcaaaattaaaagaaaaagaatctaaaacaaggaaggtcattttacacatattgtattgccatccattttgtaattacatgtatgtcagcatatatgtgcataaa

SEQ ID NO: 45864 - DNA, 499 bp, Homo sapiens
tactattactaacgtaatacaaaatcatctatttttgagatcctgttttaacatcaccttttttcaaataagckattaggaaaataaaaacatgttaacaccagctttttagatacatttgtggttaaacatagcagctgatcattgaattttaattgctgattcttaatgctactgactttttattggaagtcctcacaggagttcagggccccccaggaagggcctccagaattcattgccaagggccgtttcctttaaccttcctgtgtacagagactgcacggcacctcccaaacaatagcttccaaacttatttggtaacagaactctttgttcaaatgaaatcttcagcaccccaacatttaaaacaacccaaaaggaaaagcagcgaacttgttattatcttctcgggtgttttattctgggtttaacagccaatattttattgtttgtagaaacctggaaacactctcgagagccagaggacagtttgaaa

SEQ ID NO: 45865 - DNA, 632 bp, Homo sapiens
catgggttaaatttcaatacctggatcttggagatgagactaatgtattcagctcttctacatgaaatataaggtttgaaaaatccacaaatacttacaaattaggatgtagccaatttgctaataatgatcacctctatacccatgtacattcttttacctgaaaaatattttacctccttttcctttttctctatcttgctaaattcctactatatttcaaatcacagataaagcattattttcctgaagaagctctcagagacccactgatacagatgttcctcttctgtgctcccattttatcctargtagatgtattataagtgctggctcactcatctctctctctcccacttctaggcaaattccatagaggcagtaaccacaattggctcctctttgtacacctgggacctaagaagatgcctggaccacagcaggtactcaatactcaataagatattcaataaactaaatatctataattaagacaaaacctatgaataaacccaaccttcagcttgcatgtttatgtgtggaatttcactttgtgtaacaaattagaaaagtaaaataagaaagaacaaaatgctgcaaatttccaggcctttaacaaggatgaaaagttg

SEQ ID NO: 45866 - DNA, 632 bp, Homo sapiens
catgggttaaatttcaatacctggatcttggagatgagactaatgtattcagctcttctacatgaaatataaggtttgaaaaatccacaaatacttacaaattaggatgtagccaatttgctaataatgatcacctctatacccatgtacattcttttacctgaaaaatattttacctccttttcctttttctctatcttgctaaattcctactatatttcaaatcacagataaagcattattttcctgaagaagctctcagagacccactgatacagatgttcctcttctgtgctcccattttatcctaagtagatgtattataagtgctggctcactcatctctctctctcccacttctaggcaaattccatagaggcagtaaccacaattggctcctctttgtacacctgggacctmagaagatgcctggaccacagcaggtactcaatactcaataagatattcaataaactaaatatctataattaagacaaaacctatgaataaacccaaccttcagcttgcatgtttatgtgtggaatttcactttgtgtaacaaattagaaaagtaaaataagaaagaacaaaatgctgcaaatttccaggcctttaacaaggatgaaaagttg

SEQ ID NO: 45867 - DNA, 616 bp, Homo sapiens
ggagtctcgctctgtcgcccaggctggagtgcagtggcgcaatctcagctcactgcaagctcctcctcctgggttcacgccattctcctgcctcagcctcccgagtagctgggactataggtgcccgccaccacatccggctaattttttttgtatttttagtagagacagggtttcaccgtgttagccaggatggtctggatctcctgacctcgtgatgctgggattacaggcgtgagccaccgcrcccggccttaaagctttctaaagattattttgttaagtacagcttagtttttttaagtccttaattttaagtacacgcttttaagtacacttgctggaaaaaaatttataaatatatataatcttcttgctatacacccaaaagaaacaacatattcttttagcttaaattgctcaggacactttttaaatggagtacacaatttctcatgtttgttaatttagaggtagacacccaaacagaatgaataacaaaattatgttaaaaatgaaaatggaaaaacctaagattgctacatattattatataaaatcatggatacttcctaaaacaaaacagggaaaatccaaagaacaacctcagatttcc

SEQ ID NO: 45868 - DNA, 647 bp, Homo sapiens
gagatggcgtttcaccatgttgcccaggctggtctcaaactcctgacctcaggcaatctgcctatcttggcctcccaaagttttaggattacaggtgtgagccgctgcgcccagcccaatggcttaatttttttcttcttttttttttttctttttgagatagggtctcgctctgtcgcccaggctggagtgcagtggtgcgacctcggctcaccacaacctatgcttcctgggttcaagcgattctcctgcctcagcctcccaagtagctgggactacagatacgtgccaccatgcccagataatttttgtattttttgtcaagacaggggtctcatcatrttgtccaggctcatcttgaactcctgaactgaagcgatccattcgcccttggcttacaaaagtgcctgggactacaggcatgcgctaccgtgcccagctctggcttaatttttttctaaaacaactcccgctgtcagccacccccaaaaccactacaaaatatgcacatgcatacattttatctgcaaatctgaaagtttgggaagacattcatcaaactattaatagaagtcagcatatgtttccttaaacagctaacggtcaatcttttcagctttatggatcttacagttgccatggcacca

SEQ ID NO: 45869 - DNA, 647 bp, Homo sapiens
gagatggcgtttcaccatgttgcccaggctggtctcaaactcctgacctcaggcaatctgcctatcttggcctcccaaagttttaggattacaggtgtgagccgctgcgcccagcccaatggcttaatttttttcttcttttttttttttctttttgagatagggtctcgctctgtcgcccaggctggagtgcagtggtgcgacctcggctcaccacaacctatgcttcctgggttcaagcgattctcctgcctcagcctcccaagtagctgggactacagatacgtgccaccatgcccagataatttttgtattttttgtcaagacaggggtctcatcatgttgtccaggctcatcttgaactcctgaactgaagcgatccattcgcccttggcttacaaaagtgcctgggactacaggcatgcgctaccgtgcccagctctggcttaatttttttctaaaacaactcccgctrtcagccacccccaaaaccactacaaaatatgcacatgcatacattttatctgcaaatctgaaagtttgggaagacattcatcaaactattaatagaagtcagcatatgtttccttaaacagctaacggtcaatcttttcagctttatggatcttacagttgccatggcacca

SEQ ID NO: 45870 - DNA, 647 bp, Homo sapiens
gagatggcgtttcaccatgttgcccaggctggtctcaaactcctgacctcaggcaatctgcctatcttggcctcccaaagttttaggattacaggtgtgagccgctgcgcccagcccaatggcttaatttttttcttcttttttttttttctttttgagatagggtctcgctctgtcgcccaggctggagtgcagtggtgcgacctcggctcaccacaacctatgcttcctgggttcaagcgattctcctgcctcagcctcccaagtagctgggactacagatacgtgccaccatgcccagataatttttgtattttttgtcaagacaggggtctcatcatgttgtccaggctcatcttgaactcctgaactgaagcgatccattcgcccttggcttacaaaagtgcctgggactacaggcatgcgctaccgtgcccagctctggcttaatttttttctaaaacaactcccgctgtcagccacccccaaaaccactacaaaatatgcacatgcatacattttatctgcaaatctgaaagtttgggaagacattcatyaaactattaatagaagtcagcatatgtttccttaaacagctaacggtcaatcttttcagctttatggatcttacagttgccatggcacca

SEQ ID NO: 45871 - DNA, 549 bp, Homo sapiens
tggctggatagctgggctggtaatcacctcctccatgtaccactcaaaatgtttgctgcatcatcttttttttttttgggatggagtttcttttgctcttgtcacccaggctggagtgcaatggcacaatcttggctcactgcaacctctgcctcccgggttcaagcgattctcctgccttagcctccccagtagctgggattacaggcacacaccgccacgcccagctaatttttgtgtttttagtagagaygggatttcctccatgttggccaggctggtctcgaactcctaaccttaggtgatccgcctgcatcggcctcccaaagtgttgggattacagacgtgagccaccgcgcccagcctgctgcatcatcttttaaatgacaaatgaaagacggattaagcctgccattgtcagctgtactgaagacaaaattgtctgcatgtaaaactgaaatgcctaaacccaaaggaagtccctgaaattctgagcattctgtgtgctcatagtccaattctgcacgcgatagattgcaccatgggatg

SEQ ID NO: 45872 - DNA, 549 bp, Homo sapiens
tggctggatagctgggctggtaatcacctcctccatgtaccactcaaaatgtttgctgcatcatcttttttttttttgggatggagtttcttttgctcttgtcacccaggctggagtgcaatggcacaatcttggctcactgcaacctctgcctcccgggttcaagcgattctcctgccttagcctccccagtagctgggattacaggcacacaccgccacgcccagctaatttttgtgtttttagtagagacgggatttcctccatgttggccaggctggtctcgaactcctaaccttaggtgatccgcctgcatcggcctcccaaartgttgggattacagacgtgagccaccgcgcccagcctgctgcatcatcttttaaatgacaaatgaaagacggattaagcctgccattgtcagctgtactgaagacaaaattgtctgcatgtaaaactgaaatgcctaaacccaaaggaagtccctgaaattctgagcattctgtgtgctcatagtccaattctgcacgcgatagattgcaccatgggatg

SEQ ID NO: 45873 - DNA, 549 bp, Homo sapiens
tggctggatagctgggctggtaatcacctcctccatgtaccactcaaaatgtttgctgcatcatcttttttttttttgggatggagtttcttttgctcttgtcacccaggctggagtgcaatggcacaatcttggctcactgcaacctctgcctcccgggttcaagcgattctcctgccttagcctccccagtagctgggattacaggcacacaccgccacgcccagctaatttttgtgtttttagtagagacgggatttcctccatgttggccaggctggtctcgaactcctaaccttaggtgatccgcctgcatcggcctcccaaagtgttgggattacagacgtgagccacygcgcccagcctgctgcatcatcttttaaatgacaaatgaaagacggattaagcctgccattgtcagctgtactgaagacaaaattgtctgcatgtaaaactgaaatgcctaaacccaaaggaagtccctgaaattctgagcattctgtgtgctcatagtccaattctgcacgcgatagattgcaccatgggatg

SEQ ID NO: 45874 - DNA, 532 bp, Homo sapiens
cactccagcctgggtgtcagagtgagactccatctcaaaaaaaaaaaaaaaaaatatatatatatatacatatatatatagaaatacagaaatatatttaaatataaatatatattacatttagttaatggttcattttcttcccagaagttgattttaaaaatattgatgaatttgcttccattaaaacmaggaaagagctgggcatggtggtgtgcacctgtattctcagctactcaggaggctgaggtgggagaatggtttgagcccaggaggtcaaggctgcagtaagcccagatcgcacaactgcactctagcctgggagacagagcaaaaacgtgactccaaaaataataaaaaataaatcttacaaaaatttaaaaacaaacaggaaattagagttttaataattttggtttggggatacataaaacatttatacaatgctttaaattctaatacactttccaatttttcagtattttttcaactaatgctctgggaggataagcgtgttgtacgtggtcaataa

SEQ ID NO: 45875 - DNA, 532 bp, Homo sapiens
cactccagcctgggtgtcagagtgagactccatctcaaaaaaaaaaaaaaaaaatatatatatatatacatatatatatagaaatacagaaatatatttaaatataaatatatattacatttagttaatggttcattttcttcccagaagttgattttaaaaatattgatgaatttgcttccattaaaaccaggaaagagctgggcatggtggtgtgcacctgtattctcagctactcaggaggctgaggtgggagaatggtttgagcccaggaggtcaaggctgcagtaagcccagatcgcacaactgcactctagcctgggagacagagcaaaaacgtgactccaaaaataataaaaaataaatcttacaaaaatttaaaaacaaacaggaaattagagttttaataattttggtttggggatacataaaacatttatacaatgytttaaattctaatacactttccaatttttcagtattttttcaactaatgctctgggaggataagcgtgttgtacgtggtcaataa

SEQ ID NO: 45876 - DNA, 543 bp, Homo sapiens
cccagtttttcctttctgagaaattactttgatagtctttttcttaaaaaaaaaaaaaaaaaaaaaaaaagaaggaaattacttttaggtcttgaccaaagggtgttccaagtgaagaggtcccaaattttattaagcgggcaaagggggttttatttttttcagcattgcttcattaatctgaatgtaaaactataaaaaaaatagtctctaatttagctagaaaataayactcatttgcttgctaaggtctagcaacaaaagaatgttaatgcacattactacctattactacaacagtgaacacaaaatgaaatgagcagatgctgatttaccttctctggtgaatcatgcatggcacgaaactgcagtcctgaagcaagctagaccatctgtgctgttttctccagatgagccaaatttgatgacaaaccattctccatatataggagtttttctttctttctctccattttatattagaaagtatagtttccccaatagaagatgcagaaaactattttgcatcttctactatattgc

SEQ ID NO: 45877 - DNA, 578 bp, Homo sapiens
tgaggtaggtatcatcattttttcctttttgcaaaagagggaacagacaagacactaagtgatttgctcaaagtcctacatctaacaaacagaagagctaggataaaatgcaaaatggaagtttgaagatttttaaactagtaggatgacaagctctaagcgtgaagatccctgcaatacaagcctgtctgatcrccactgtagatccaggacctgacccatagcagcaacacacaataaacgtattttaaattgaataaatgaatgacttccacatgcaatgaacaaaattaaaatagaggctagacataatatctgtgaggaatgtattaacatagtatctgtgaggaaggtattaaactcctcaatgactgagggagcatgagttcaggaagtcagatggtcatagggagagagcaggagagtaattctcaagccaaaaaagatgatgatggaagtggcaataaaccacatctgggcccaataattcaaggactgtaatagaaacctcaattcaaaaagataagcctgagaaataggggaccagagtgtacaatttaacagtgtgacaggaaggg

SEQ ID NO: 45878 - DNA, 578 bp, Homo sapiens
tgaggtaggtatcatcattttttcctttttgcaaaagagggaacagacaagacactaagtgatttgctcaaagtcctacatctaacaaacagaagagctaggataaaatgcaaaatggaagtttgaagatttttaaactagtaggatgacaagctctaagcgtgaagatccctgcaatacaagcctgtctgatcgccactgtagatccaggacctgacccatagcagcaacacacaataaacgtattttaaattgaataaatgaatgacttccacatgcaatgaacaaaattaaaatagaggctagacatartatctgtgaggaatgtattaacatagtatctgtgaggaaggtattaaactcctcaatgactgagggagcatgagttcaggaagtcagatggtcatagggagagagcaggagagtaattctcaagccaaaaaagatgatgatggaagtggcaataaaccacatctgggcccaataattcaaggactgtaatagaaacctcaattcaaaaagataagcctgagaaataggggaccagagtgtacaatttaacagtgtgacaggaaggg

SEQ ID NO: 45879 - DNA, 578 bp, Homo sapiens
tgaggtaggtatcatcattttttcctttttgcaaaagagggaacagacaagacactaagtgatttgctcaaagtcctacatctaacaaacagaagagctaggataaaatgcaaaatggaagtttgaagatttttaaactagtaggatgacaagctctaagcgtgaagatccctgcaatacaagcctgtctgatcgccactgtagatccaggacctgacccatagcagcaacacacaataaacgtattttaaattgaataaatgaatgacttccacatgcaatgaacaaaattaaaatagaggctagacataatatctgtgaggaaygtattaacatagtatctgtgaggaaggtattaaactcctcaatgactgagggagcatgagttcaggaagtcagatggtcatagggagagagcaggagagtaattctcaagccaaaaaagatgatgatggaagtggcaataaaccacatctgggcccaataattcaaggactgtaatagaaacctcaattcaaaaagataagcctgagaaataggggaccagagtgtacaatttaacagtgtgacaggaaggg

SEQ ID NO: 45880 - DNA, 578 bp, Homo sapiens
tgaggtaggtatcatcattttttcctttttgcaaaagagggaacagacaagacactaagtgatttgctcaaagtcctacatctaacaaacagaagagctaggataaaatgcaaaatggaagtttgaagatttttaaactagtaggatgacaagctctaagcgtgaagatccctgcaatacaagcctgtctgatcgccactgtagatccaggacctgacccatagcagcaacacacaataaacgtattttaaattgaataaatgaatgacttccacatgcaatgaacaaaattaaaatagaggctagacataatatctgtgaggaatgtattaacatagtatctgtgaggaaggtattaaactcctcaatgactgagggagcatgagttcaggaagtcagatggtcatagggaragagcaggagagtaattctcaagccaaaaaagatgatgatggaagtggcaataaaccacatctgggcccaataattcaaggactgtaatagaaacctcaattcaaaaagataagcctgagaaataggggaccagagtgtacaatttaacagtgtgacaggaaggg

SEQ ID NO: 45881 - DNA, 532 bp, Homo sapiens
gaatcatgagcttagggaacccaaatattttataataggcagcaatctggcctgccctttaccaggaaaagagaagctacctttattacactgaacagtaaacaaatccacactttgctctggaaggagacactatatctaatttctaaggctgtttgctgtataaayaaatttgaaaatatagttcggcacagaggcaatctatataaaccacgttttgtagtttctgtaacttgatgaattaacatcttcaagatggaatgtcaaccactttaggtaaacaattagggacctgagataaccacctgacatccccacactcttagccccgcatgagtttataggggtgacacttttaaatatagcaaaccagtcccagtgtatcctttcctgcctcagcagaaaccactgtatcctttccttcacccagtgtatcctttcccagtgtatcctttccttctcccagtagaaaccactgtaaggcacttatctactctctttctaccttataattgatcctgatcttccccta

SEQ ID NO: 45882 - DNA, 2093 bp, Homo sapiens
ctagcttagcaacaccagtgcaagtcagtttttcaagacagctatgtcaggaaatttccaggaatgggcccaatttgatcatatgcccagtccagaaataatcactgttgtcagagggatgggatggtctgaactgtcacctgtatgtaaggggtgaatgtcatcaggttcacctgaaccagagggaattggagagaggagttctattgctagaaggggaactagacggaaaaagaaatagataactccaaaccataatgttatggtgcattatttatagactgtaagccttctagaggcaaaacttgaatctctttcttgatcattatagtatccttaacacctagtacagtgcttggcacagaatcagtgcttaatacagatttgttgaataaatcattttctcattttttaattatcaatttcacaatgtcagcgtttaaaatatttacactctgctctgtactcacaatattcaaagttgtttggctttagtgttatatttaattggattcactacatcaaaaatcctttcactgtcaacttctccatacctgagctcttattttgaataaaataaaagtgggccaaattttgccatatggttttccaagaagcagtattaggattgctgtatttcctgagtactcacattcttgagcatatcttctgttgctttcatagttaattaacaaattggcaggatataaaaattcttagggtgattctttcaaaaccttgtcaattatcattcatctgtctttttccatggaatattgctatggaaaactctgtgtggatcctttcttcttaaaagttcaataactttactaagtattttctcatattgactggaatgtatcagttttccctagggaaatagtatgaagattcaagttttattcgagaaaagttttttctctcatctctttaaatatttttcctctattacatttattgtttcctcatttgtttcattttcttcttaaggggctctcattatgcgtatgtggtagagaggcgggtgtgaatccaggttttatggggcctgaagcttacataatctgtggggcagagtggggcagaggaaaacctctgtaagaaaaagaatgcagaattaggcttgaaagtgaatatttatttagaatgaggaatataaattacaaattcaaaaaactggctagtatcacgaacaaaaaaaatccagaaaaataactaacataactttataacagttttctttcccccaaaggtgttccaagttcatttcctaccttagacctagaacgggcatttttctaagaagcactggtttcttttagtagaatatggttcttcaagattataatgctcaaagtgctgctgcgttggtcagtgtttctagacctttcagtgggcagagctagaataaaattgtgtgtggtgtgtgtgtatgataaaatacctcataaattcatattgacattcccaattcaaattcaggactatagagtttccactgaatgtctatattatatccatatctccttgtccaagaatctkgaatcaagaatcttgattcttaatgcatcagggatggttgaattatgatatcccataattactcattttttcaatgctctaatacatacacaacagccgcagagtagcagtaccaataccaccatcaactactatgactacttaatgaaagtttttttttaatttggcacatgctctcctcattctcctactttttagtttatctattcattcatttatttaaagaaaatagagattacatatgatgttctctcccttttgtcccgcatttagtctaagttccgcaaacaaatatacatttaatgatcactcctagtccttatgtcatctttgctgatctgaaattcattctttagtagattttgcattaagggtcatgggaacaatattccttggatttttacatgttgataatagttgtggccctttatgcctgaaagtcagttttgctggatgtcaaatccttgaatcacatcttttttccttaaacagggtcacttctaagtggcgtgcgattatggatctttcttgctcccataagatggagcctc

SEQ ID NO: 45883 - DNA, 603 bp, Homo sapiens
tttcagtttgccctagaagagactctatttacacctgtggtctcagcataactattatcatcttccctccttcgcattcagtaaagattagtttggttgggtgcagtggctcacccctgtaatcccagcactttgggaggctgaggcaggaggattgattgagctcaggaatttgargctgcagtgatctatgaccacaccactgcactccaacctgagtgacagaacaagacccatctcttaaaaaaacactgattggtttagacaactaataatctgtcaccccagttaatccatgccagggaatttaaacttaatcctgaagataggtccaaggagccagtgaaatgtttccagaaggaaagaaacatgatcaacatttgcattttaggaagattattttggccacagtagaagaaaataatgctggaggcaagagatgttttaggagattattgtagtcatccgaggtagagatgaaggtagtcaggattaaaatactgacagtgataatggatagattcaagatagatgataactactgagagagaggaatcacaaagacttggtgattttacttactttgtgttcattagctgttta

SEQ ID NO: 45884 - DNA, 540 bp, Homo sapiens
aattattggatgaaggaaaatcttttaagccttatcatatgttgactttgcttaaaagcccagctcctatacaaaggcatatggtgttcacaacaacagaggtgtacacacaccatatgcggtctgtgggcagcaaacaaacaactcactaaaycaaaaacactctaggaaacaggaagaactttcagtcagtaagcacatgtttatctttcccattaatcacctctcggtacactctcacaaacagactgatgcaagagacaggaaataaaggcacaccacactcatcctactgaaacaagctagtcaaggtgcaataacccagttattttaacaccggcctgaaggcatgcaagccaagaagagcaagaatatcatattccgaagaaaacacagcagtaaaatggcatcttttttgtttgtttcagccacttaaaggtatcacagataaacacagattaagaggacatggccaaattccaggaattcaccagaaacaagacatgcagaccaacatgatttaaattcctgttcataacc

SEQ ID NO: 45885 - DNA, 554 bp, Homo sapiens
tgacataaggaaatgttcataacacatgaagatggaaacaggcaatatgcataaaaaatagtatatataatatcatcccatttctaattgaacaaaataaaagaaagccaccaacaataggtttttgagtggtatggttgtcaagaattttttttcttgtagtttatgaattatttacaayacatagttattttataaactgaaaaagcaactgacattttcaaaagtcacagtcattcttctcctctcctgaagagtatgggtggcaactttcaaagcaatgagattgggtattaaattgtcattgtggcccgtgagggaagaagctcccacaaccaagtggccagtaagagagatggttagtggaagaagaggaaaattaaagtacttctaagccatataagaaatacccagagttgatactaaatgaatagttgaatgtagatggttgttttattttggttttggatgttataattccttaaaaatgaaagtgttacaaaagtaataaatgcctgtcgtgatcatgtgtttttaaaaggacatctaaactc

SEQ ID NO: 45886 - DNA, 557 bp, Homo sapiens
cactttgaataactggaaattttaacagccttttatcaccccaaattcctttttgtgctgtttcctatagyttgtagtccagaagcaattggcttatgcaagcgttaagaaggcatatttgaggagggtggtgtgggagtggaggagacagaccgcagcataatgtctaggaattatgactaaactagagtgaagagtgtataaaataattgttttcctcctcccttttttccgtattaaaaaaaaaccactctgttttttctatcatattttctattggatttagaacttaggacttaagtttatagcacttggtaattccaatattttatacatcttataccacacaataccattttatttcaatcatggaattttaattttggttcccatgagtcaatcccatcacagcaggatcctgagcacaatatcccctagagataaaaataatcgtatttaatatttttatgaatgattacacatttggtgtcaagcacttgaaacattggaatcaaaacatataattgctgaaccattggcataaagaaactgacact

SEQ ID NO: 45887 - DNA, 604 bp, Homo sapiens
aagagacttcattttagctacagtcaattcagagtgaggaatgagttcttagttcctagaggagagaatatgggagtctaggatctgagaaactgaggctgtttctgccttgaagctttcagaacaaatagccttcatcctgttttccatcggtttccttccattattctatttctgttttaaacaccttcctagggaatcgctgtgtraaaggagattctctcagcctaaaaggagaaactgtcaatgactgccatgcagaaataatctcccggagaggcttcatcaggtgagcgaggtcagagctgtggcccggctgcccggctgtggagagctccagttccctgccccacatggctctgacacggcctctgaatccccctcagacagacgggtcatgatgtggcagtggcagcctttgcttttcacccgtccatttgaacctgtctgatggaatccatcccctctgtgagctgagctgcctcccactgctcggcctgtttttaaatgctgtccttttttctgctaactctgctgcttcatgttcttttctaaaaacacaaaatgaccttttagtcctcagggccttgaggatgaggcagct

SEQ ID NO: 45888 - DNA, 604 bp, Homo sapiens
aagagacttcattttagctacagtcaattcagagtgaggaatgagttcttagttcctagaggagagaatatgggagtctaggatctgagaaactgaggctgtttctgccttgaagctttcagaacaaatagccttcatcctgttttccatcggtttccttccattattctatttctgttttaaacaccttcctagggaatcgctgtgtgaaaggagattctctcagcctaaaaggagaaactgtcaatgactgccatgcagaaataatctcccggagaggcttcatcaggtgagcgaggtcagagctgtggcccggctgcccggctgtggagagctccagttccctgccccacatggctctgacacggcctctgaatccccctcagacagacgggtcatgatgtggcagtggcagcctttgcttttcacccgtccatttgaacctgtctgatggaatccatcccctctgtgasctgagctgcctcccactgctcggcctgtttttaaatgctgtccttttttctgctaactctgctgcttcatgttcttttctaaaaacacaaaatgaccttttagtcctcagggccttgaggatgaggcagct

SEQ ID NO: 45889 - DNA, 939 bp, Homo sapiens
ttttcaactatttgcaaggctatatgaacatttttgaaatactagttactctgttgtgagaacataagtttacatttaatttttaaataagttttatttttatacatctttaacacgtagaattctccagcactgtgtggatccaattataaaaatgaaacatattttactaaaaatacatctacatagtattcgaatactcaaatggatgttggcagtgaatggagaaaacctatcaaaactgaacaaawctagaataaaattactacaaaattagcaaaacagtcagttttagaagaaaacttttgaggacatataaaatgcaaatgccgtgaatgatgtgatctctccttacatacccacttgtttcacacgcttgaggtcagaagtctaaaactgaatagacacctggatttataatttattatagtcacagatccttatcaaattatgtcatatacaattcttatattactattttcagagggaagaattaggaattcaaatactctagtttataacataatagaattgcatacaattaatgattgaatagactacttttacttgaataattaaattcaacaaagttaaaggaacacaaaactcatataggcagttaatattaataacaaattttaaccctctcccacctctctttagtaaagtaagttttcaactactctgaatgttacagaaaatggatagtgataatgaagatggaatatttttcttcatgtagtgtcttgagtttgagtttaattcaccatttgggtttaatataccttatatttaacaaatgttgtaaagaatattaaaaaattagggaaagaatttaaatattacacactattctctgcttacatataaaaatgaacaacacttctataaatttcatgtcattttcatattttaagattttttaaagtgactttttta

SEQ ID NO: 45890 - DNA, 600 bp, Homo sapiens
tcttgtttagagaggaaccgggaacttcacaaagataagatattaataggactggatcctttgtgggcacgaagtaggggagtatttagatttgcagctgtgtgcagccatttagactagatatctgagtggctggcctcgggctttagggtggggacggcaggctgtctggcttgcccctgagatgtcatgcggcctaaaggaattctgttactattgttgaatggctgaataagagcaaatgagggcgttccttccctctgacacatagtggggaaaagtgcgtctctgcatgtccagtgccctgtggcttggccttgcagccctcatgtctacacctggggtgcccggggcctctcctgcctcttcctaggtgggtggcctctgtgtgaagaaagacaagacraacagcatctctgtgggccattctccaccctcagcctcaggttttccaaatgccactcctgaattttctggagttttgtgtcgtttccaaacttgtttcgaagaagagctttgaactaatgtagcagaatgcaaagtggaattcttcccagaaacgaattctgtttaactctttgggtttagtggaggtgtcaa

SEQ ID NO: 45891 - DNA, 560 bp, Homo sapiens
cttctgcttgctcacccagggagtggcctcccaagcttcgccactgctccagacagcagcagatgaagctctgaggagtccacgcctttctggaagcttgttgttgccctgccaacatatattgacttgtcaagagctctgtctttaagccaatcacatcctgatcacagttcattaaaggtgtgtattcctctagwgagctcattgtctgttgtcagaaatcactcagtgcccaaacacattaggatgagaatggactgtgtaggagagaagaaaagaaatgggttctgcttattttctttgactttaacagctacttccccttactcaactcaacactcatgtacacatatcagagaagcattacgatctgcaagctgcaggactggctcctatttaatgtgtaaaaagtggcttttctctactttcctctccctaaatccttctaacttcaacctctttcctctaacctgctcattcttcctgctttcttccaagtaggaaactacttggttaacatcagagatttttccacctccaagcttctaaaattctagaaa

SEQ ID NO: 45892 - DNA, 560 bp, Homo sapiens
cttctgcttgctcacccagggagtggcctcccaagcttcgccactgctccagacagcagcagatgaagctctgaggagtccacgcctttctggaagcttgttgttgccctgccaacatatattgacttgtcaagagctctgtctttaagccaatcacatcctgatcacagttcattaaaggtgtgtattcctctagagagctcattgtctgttgtcagaaatcactcagtgcccaaacacattaggatgagaatggactgtgtaggagagaagaaaagaaatgggttctgcttattttctttgactttaacagctacttccccttactcaactcaacactcatgtacacatatcagagaagcattacgatctgcaagctgcaggactggctcctatttaatgtgtaaaaagtggcttttctctactttcctctccctaaatccttctaacttcaacctctttcctctaacctgctcattcttcctgctttcttcmaagtaggaaactacttggttaacatcagagatttttccacctccaagcttctaaaattctagaaa

SEQ ID NO: 45893 - DNA, 594 bp, Homo sapiens
ttgttggccttatagcattttggggttttagttcaaacacttatttttaaagtatgtttattttttctgactataaagtgacacagattcaatgtggataatttagaatgtatgaaaaatatgaacaaattatagttacttgtaattctacaacatagtgataatgactgttatcatatttcttctaagttgggaaaactgctattttcattaactttgctttaccatgtagctttttttaaaagtgttttcttccccagccattgctccttcatttctcattcacacttctcaatgcactgccatctggctcccttcctgtcaatcctttgtagcttctgttgtcatggtcacaaatgataatttttttctttgtcactaatttgaatggacactattcaatctatcttacttaaattatctgcagtacttsagaatcctgccctaccacctagggaagttaataaaagctgctgagtcagactgcttccaactcattgcttaagcctttgggaataagcccagtcaaatctgtgtgccaagaaagaattaggactcagtctattttgcgtcactagctagtctacctcaaaa

SEQ ID NO: 45894 - DNA, 585 bp, Homo sapiens
cttgcctgatgcctgatccaaaggtgatatttaacctgactttctaaatacatggcactcagagattaagtggctttcctacagtaacacaactactatagyactgtcctattccaaagactcttcttagtgaactttatacgtagtttcaaggggtaccttcatagccctgctaggattagaattagggattccttatgccatttggatttatccaataatggtggagctaaagttctgctatattttacctaatttgggagaatgttttactctagatatataacatcagattcttattaaacacgaatgacttgctgtaagggtttttcttttcatcacagtagcattttcccatcgtattctaatttagtcctaatggaagtaactgagccatgaacgtcaacttcccctttctcagataacccatataaagttatgtttctcaaaacaaaatcaaaattgaactatcatatgatcaagcaataccactggatatatatcctactgagtatcaatccaaaggaaatgaaatcagtatgtctaagaaatatctgcacttccatgttaattaaaggtaaccat

SEQ ID NO: 45895 - DNA, 584 bp, Homo sapiens
tcagccttctgcaaatataataaaccaaagtctgctcttaacttccaattgctagatccctcatatacacacatatgtattcttaagacattgtgttctcaataccgtataagtttgtctatatataaatactataagtttgcatatgtatatatatacacacacatatgtattcttcatgtatatatacatatatatatatatatatatatatgtgaaggaaagtccataaatagcattctcaacttatgtgtgtgccttttactggaaattaaagttccgatgacagcatgtatcatacacaccctcatggccacatttgttaatatctattctgtattaattaattcaactttaatacattttgattkgattccccaaacagccaatcatttgcatctgatttgttttctctccaaaatttaaacacatgatttttgaaggatggagtgaagggcaaatgtattttaaaagtcttgatttggatagcaagagtgcataatggaaatttctggaaaactaaatatgactaagtggcatatatgaattgaaggatttgcaaatacctcatcttctggaaatgt

SEQ ID NO: 45896 - DNA, 582 bp, Homo sapiens
cattggttaaagtttgcccacagggtgtctgctttctgcacttccgggtgtatgacctaatctttctagaagctgacccaagaggctccgcaatgtgagccacaaaaagtcatcagcattccctacctgcctctctgcagtctgcagcatgatgggctggccagatgagctcttgcaagagcatgggcaccaagagatatcactgaatctcacagctcagtggcaaccagaagtcccagagcaggaaaggggaggtccatgcagtgtgaattgaggtagtggcaggtcatgagtgacatgaggaattgcaaatagctgctgcagccggaccagcctgctaagcaggtggaacactgtaacagcatgatcctgccagacggcagcaacaagcttccttcctaccacagacaaaatgtttcatctacaatctccaagaatgcagctgctggtgggccatcttggtcatgagcagaaaaccatggktgcataaatctagggggccttctaagctgccagaacagtaaccgtgcctagtatgggggcctgaattggaagatgctcccatagtgtcagtttccttcc

SEQ ID NO: 45897 - DNA, 630 bp, Homo sapiens
tgcatttttgacttggtatgcaatactacagaagtaatactatgttcttttctaatcaggaggtacataatgtccatttgttctggtgaaggtaaatttgatcgtttgattaaggtgatgtataccagatttcttcactgtaaagttactactttttcctctgtaatgaaagtgttttgtgggaagatactttgacattatgtaacaaatgctgtttctcatcatagctttcagcaccaattttcaatattttgcctgaaacaattattactctgtttttgccaaatggtgatttttwaataagatttttagtatagttaaatttttgtcttcttccatagcttttgtgtttttctgttctacttttctctaaggctttcctcactcaaaacattattaaaaattctcatgtttacttctctttttaaaaaactagtgataacatttcatgagcactttctaatgtttatgactttaagattgccagaaggaaaagatcactgaagaccacctaggttaacaaacagcttaaatttgaaaaaacaagtgaaagaagccaacgcatgttatcagttcataacattacctcccttctagaagaatagcttcttccattctctccagtttgct

SEQ ID NO: 45898 - DNA, 616 bp, Homo sapiens
aaacatggatttgtttcacctctaaccaaagagggagtgtagggggtttgtttttgggttttttttcaatgtgagctgccaaagccctctacatcacaataggtaattagtaaattatcaagtgaaacaatcacttaataaattgggttgtttctcaggctaaaagtttaggtgattaaactaaggatggtgtcttcaaaagtctatgttcagtataactgacaggtagattgtatgtaacatttgctctttagatcactgtgtacaggccgggtgcgctggctcacggctgtaatcccagcactttgggaggccagggcgggcagatcacctgaggtgaggagttcgagaccagcctggccaacgtagtaaaaccccgtctctgctaaaaatacacaaattagcccagcgtggtggtgcatgccttgtaatmccagctactcaggaggctgaggcaggagaattgcttgaacccaggaggcggaggttgcagcgagcagagatggcgccactgcaccccagcctgggcgacagagcaagactgcatctcaaaaacaaacaaagtaagataactgagtacaatgatgaatacctgtgtacagtaattaacacctac

SEQ ID NO: 45899 - DNA, 622 bp, Homo sapiens
aagggattccatgctttcacattgttataactttcttgcatatttatgtatggccttgctttgtcctttattacagtgcctgggaaaccccaacccagttacatctaactctctgcctattccatgcctgcctccttgcacctggatatgactggataaaaacctacagccatgactaccaggcccatgttaaatttatgttatcactaactcaagtggaatctttgggctacctggtagttctgcttcatcatactgtccgttcattctcccattctctagaaaagtgtttttcaaattgtgcatttaaaaacttaaatagattaaagctgaatagaatttaatagggtacacagcataaaataaggataaacactatttcatgaaatgcttgtttcttttatatttgtatgtacatttatatacacacatctgtgccagtttgggatataaaacrtgctgtgaatttaaaaaaaagttctaggcaattttttcacattttcttccttctccttgaacttccatccctttttcatctcttcattctcatctgatgattctgcttcctattttactaagaaaacaggactcagaagagagcttctgcacctatcagcctatg

SEQ ID NO: 45900 - DNA, 529 bp, Homo sapiens
gtgatcctcccgcctcagcctcccaaatggcagggattacaggtgtgagccactgcgcctggccgataactattttcaagcaaagcaattatggcatgttataagaaatttggggattttaactgtttatttacccaatttactaacttaatgccaccttaayggcaataattagatttttctcagcagaaagactgttagtagaatgtactccttcacttttcaatataacaattaacctgatatccatctgcaaagtgctccatactgtcaacagaataaaatgaccatcatctaaatcctacagattctggtaaaatggtgaaagcttttattcctgtgacatttgaattcttagaagcaaagaagattgtagaaacaatttaaaacatatttccataaatttaacaaatagtctttctgtttcaatgtatattttggctttgtggactgctcatgactatactgggggggcggggggcggggaaaaaaaacaaacaagataaaaggatgtgactcacacctcacc

SEQ ID NO: 45901 - DNA, 544 bp, Homo sapiens
aaagtcaataaacttgagtttatctcctagccctacctctaactagctgtgtggccccacacaaaacacttgccttctctgatcctcaggttctcatctgcaaagcaataaggttggaccaagccctgtgtagtggcagtgtcaacatcacctgggagcttgttagaaatgcagagtctcaggctcctctccagaactactggatcagaagctgcattttaacatgatcccagktgatttatatgcaaattaaagaaccatggctttaaagaaccattcctgctctagtaatgtattattttgtgtttttttccaaatgcatattaaaatatagttacgaagaatttatccaagactgcatcaaacattctacataaaatgggtgtatcatctcttaccctttaaaagtttgtactttgtgagaaaaaaggtttaaaggcagaaacaggcacaagcagtcgtacattcagttccagtgctagatatacatatttcttccttttgcctcctttgtgttttgggccttgacagtgtggtaagggca

SEQ ID NO: 45902 - DNA, 544 bp, Homo sapiens
aaagtcaataaacttgagtttatctcctagccctacctctaactagctgtgtggccccacacaaaacacttgccttctctgatcctcaggttctcatctgcaaagcaataaggttggaccaagccctgtgtagtggcagtgtcaacatcacctgggagcttgttagaaatgcagagtctcaggctcctctccagaactactggatcagaagctgcattttaacatgatcccaggtgatttatatgcaaattaaagaaccatggctttaaagaaccattcctgctctagtaatgtattattttgtgtttttttccaaatgcatattaaaatatagttaygaagaatttatccaagactgcatcaaacattctacataaaatgggtgtatcatctcttaccctttaaaagtttgtactttgtgagaaaaaaggtttaaaggcagaaacaggcacaagcagtcgtacattcagttccagtgctagatatacatatttcttccttttgcctcctttgtgttttgggccttgacagtgtggtaagggca

SEQ ID NO: 45903 - DNA, 544 bp, Homo sapiens
aaagtcaataaacttgagtttatctcctagccctacctctaactagctgtgtggccccacacaaaacacttgccttctctgatcctcaggttctcatctgcaaagcaataaggttggaccaagccctgtgtagtggcagtgtcaacatcacctgggagcttgttagaaatgcagagtctcaggctcctctccagaactactggatcagaagctgcattttaacatgatcccaggtgatttatatgcaaattaaagaaccatggctttaaagaaccattcctgctctagtaatgtattattttgtgtttttttccaaatgcatattaaaatatagttacgaagaatttatccaagactgcatcaaacattctacataaaatgggtrtatcatctcttaccctttaaaagtttgtactttgtgagaaaaaaggtttaaaggcagaaacaggcacaagcagtcgtacattcagttccagtgctagatatacatatttcttccttttgcctcctttgtgttttgggccttgacagtgtggtaagggca

SEQ ID NO: 45904 - DNA, 1056 bp, Homo sapiens
gaggcaaagggactggctcctgggagcccagccaggagtggaagagcagggtgtgggccractctccagggtcactgccacccgcctgcctgctacctgctgccccagcctctcagcctcaccacaggctctccgtcaacctgggccatcacctgggcctgcacccagctctggctctgagtcaggggtcacaaacctgggtgccactaggtgtgcggctggagtgaacggagagcccgttgctggcctcagggctgccagcacggaaaacatggagcacatggacacacactcgcccacctgctcagctccggcccagtgcacgcaggaacacggggctggtgtcagacagcttccaactttccaagaaatgccagaaatgaggacttttaaaatctttaaggttaaaaaaataaaataaaaaacaccacggggagcaacatagcatcaaaagctgcagctcgtccgctgacaccgaactgctcgtgcccgtgtgagacctcccacaggcagaggcacagcacggccgggcctcccggcaggagggagaggtgcccctgtgacactcgtgctatgaaaggagaatgtgggatgggctgagcttggtgccagggtctgcctcagggttgattccagtgcaccgaggacaaagctggtgccgggcccgccacctgctgccaccgctccagcttgcctgctgcagagagaccaggctgctgggcagtgctgtggggggcacagcacaggccccaatcctctggacaatggccctgtctaccttgcattgctgctgagtcaattaccctgtctcatacaaagtggtggggaggggaagggttaagcaaagggcaacccccaacttctgcctggttccatctgagagccttcgctagcccctgtttctgaatctctgcagctccctatagcctacacaagggccacagcctcaggcaggtcaccaaaggagtcaagtgggcccagagtgggcaaggggaccacaccccagaagacagagcaggcctggtcctggggggcttcctgcagatgatgtgggca

SEQ ID NO: 45905 - DNA, 588 bp, Homo sapiens
tctgagtagacctgctgccaccacagggccctccaccttggaagaggaaggcagcaaggctgttkgagagaggaagcattagaaggactggacccaccgctgctggcattgaagagggagctgaggagtaagccaatgaatgtgggtggcctccaaaggctgagaacgggccccagctgacagcccacaaggaaatgggaaactcagtcccagaaccacagggacctgagttttgccaacagcccgagtgggcaaggaaacagattctcccgggagcctccggaaggaaccacggccctgccagcaccttggtcttggcctcgtgagactcaaagcagagactcggctgaggctcctggacttctggcctacaggaccatgagatatcaatttgtgctgttttaagctgctaagtttgtgataatttgttatggcaggaataggaaagtcacacccacccacccaccacaggactccagtagccgatttgcctaacctttgagaatcaatttcacagtgagagcaatccagatcctcttccgaactcagcaccttccttgcacacgtttgagctgggccaactgtcta

SEQ ID NO: 45906 - DNA, 588 bp, Homo sapiens
tctgagtagacctgctgccaccacagggccctccaccttggaagaggaaggcagcaaggctgtttgagagaggaagcattagaaggactggacccaccgctgctggcattgaagagggagctgaggagtaagccaatgaatgtgggtggcctccaaaggctgagaacgggccccagctgacagcccacaaggaaatgggaaactcagtcccagaaccacagggacctgagttttgccaacagcccgagtgggcaaggaaacagattctcccgggagcctccggaaggaaccacggccctgccagcaccttggtcttggcctygtgagactcaaagcagagactcggctgaggctcctggacttctggcctacaggaccatgagatatcaatttgtgctgttttaagctgctaagtttgtgataatttgttatggcaggaataggaaagtcacacccacccacccaccacaggactccagtagccgatttgcctaacctttgagaatcaatttcacagtgagagcaatccagatcctcttccgaactcagcaccttccttgcacacgtttgagctgggccaactgtcta

SEQ ID NO: 45907 - DNA, 588 bp, Homo sapiens
tctgagtagacctgctgccaccacagggccctccaccttggaagaggaaggcagcaaggctgtttgagagaggaagcattagaaggactggacccaccgctgctggcattgaagagggagctgaggagtaagccaatgaatgtgggtggcctccaaaggctgagaacgggccccagctgacagcccacaaggaaatgggaaactcagtcccagaaccacagggacctgagttttgccaacagcccgagtgggcaaggaaacagattctcccgggagcctccggaaggaaccacggccctgccagcaccttggtcttggcctcgtgagactcaaagcagagactcggctgaggctcctggacttctggcctacaggaccatgagatatcaatttgtgctgttttaagctgctaagtttgtgataatttgttatggcaggaatagkaaagtcacacccacccacccaccacaggactccagtagccgatttgcctaacctttgagaatcaatttcacagtgagagcaatccagatcctcttccgaactcagcaccttccttgcacacgtttgagctgggccaactgtcta

SEQ ID NO: 45908 - DNA, 1651 bp, Homo sapiens
aaataattctactattaaagacaaaggcacatatgtgttcatcacagcactgtttacaataacatatacatggaatcaatctaaatcatcatcaatagtggacagaataaggmaaatgtggtacctatacaacatggaatattatacagccataaacaagagtgagatcatgttctttgcagcaacatgtatggagctggaggccattatcctaagcaaactaatgcaggaacagaaaacaaaacactgcatgttctcacttataagtgggaactaaaccctgagtacacatggacacaaagaacagaacaatagattccagggcctacttgagggtgggaagagggtgggaacagaaaacttacctattgggtaccatgcttattacctgggtggtgaaataatctgaatatcaaacccctacaacatgagatttacccatataacacatctgtgcattttccctctgaatccaaaatcaaagctggaaaaaagaaaaaataaatatttgtttgagggaaaaatgtcattcaatctttttctcgaacataattcttaatggtgctataataatttggatgcatcgtgtttagttgtagttttttattgggtactttattctaatacagtataatatgcttcaaaatgactttactttttataacactgacagatattttttccatgtaatgatttagctttaaatataatgtttctaatatttcaacattactgtacatattactaacatttgccttgcttatctttttcactcctttattttttccctttttgtattttgatttaggcatgtctctttttaacaggatctacttagattttttcctactcacctaagtggaaaatctctgatagttaagaggaaaaatttaattcattttcagtattttttgtttctattaattttagatgggtgggtgcgtgcacatggagatttaggtacatgagctacttctgccattttagttcaatttcctcttgatattttttttcctaggataagcactgagcattaaaaacaacatttctttgattgaaatactctaaagtacggtagcaaaatatatcttatatgtcctcactaaaccttgccattcacatctcatattttatttatatgaattagccgttaatagctagtctagctctaaggaatttagaaacctacttattttattaacttcattttttttttgtttgtttgtttgaatgacggactttagcatttttgttttgaaataagttcaaattttattttttggtggagggacacttagctaaaattctatttagtctacaacccaccacagtctggattgaactcccatctcaagtgaaattgccctgactggcatgaaaagtgacttctagttaatcaatccattgattattttatcctgctattctacctagtctctctgatgcacttggcaactgtaagaagaaattctcagaagatggtggaataccatcagagaaaggcattctcctgggccttcttccttggtggcatctgccattccatggaaagcagcttcattcagtgttcagtctttggctctgttctcttctgacttactaatttctccttgggatagctcatttaaaagttgtttcccaatttttcaca

SEQ ID NO: 45909 - DNA, 584 bp, Homo sapiens
gcagtctgatatgtcaccaccaaatcaaaaacatatctgtgctctctttcttaaagagtgtgaggtctccagtgatgatgttaataaatttttaacatgggtaaaggaggtatcaaactacaaaaacctaaactttgaaaatcttagggaaacactaagaactttccacaaggaaactggaaggaaagatcaaaagcagcctacacagaatggtcaggaagagttgttcctagacaatgagatgagtcttcctctggaaaacacaagtaagtgtgatttttatcatcaastttcagtgtaattgacatacttaataactacagtgtttaaaatgttaccactagcatagtattctttttaaaaatccatttggtgaaaaatgtgtttatgttgcttttggagtatgccattgacatttcaggtttctcatctgtagcatgaagggattatatgagctgatctttaaaatcttccagttcctttccacctctaaaactgtgattttaatctctctttctaacttttgtattcacagcgattaccttgaatcattaataaaaaaaaattcagttgctggccaggtg

SEQ ID NO: 45910 - DNA, 561 bp, Homo sapiens
ttttttaagacagagtctcgctgtgtcgcccaggctggagtgcagcggtgtgatctcagctcaccgcaacctccgcctcctgggttcgagcaattttcctgcctcagcctcccaagcagctgggattacaggcatgcgtcaccgtgtctggctaatactttttgtatttttagtagagatggggtrtgaccatgttggccaggctggtcttgaactcctggtctgaagtgattcacccaccttggcctcccaaagtgctgagattacaggtgtgagccaccgtgcccagccaagccatggacttttaaattcaatgtttctcgttccaggtatttgtctccttagatatttattggcttgcctcaatcatccaacaaatattccctgggcatcatctgtgtgtccagtgctgtgttaacatcatcgacagctggcatttaggatggacatttggggagtttggagaattggggaggttacactgttgccaggtggcaaagtctcatctgataagattgaaatcagctcctctcatgcacacactgaaccatagcgcctctc

SEQ ID NO: 45911 - DNA, 652 bp, Homo sapiens
cttttttttggtcaatgtttcaatgactgttacagactctccctacagtgacctgacataccagataatcagacctgccaaattctctgtaaattggaatcaggaagagctaaatgaggctctgaggctcattccttgttaatcaaatcaagtaaataacttcagtgctcaggtgtctttaaaaaaaaaaaaaagaacaagtttggctcatcagaagctattttagttaatattagtatttttcatatcttgagccatgatgggtggctgttaggttatttcaaggaatatggcatgactatgcactaactagtatgctttgcacatatggatactattagttttaaatgtttcaactaataaactacaaactgatctaaagagtatctgaattcatagcaaggcttggtcggtatatattttctgaataaatggatactaaatatactactactatcatagagagatgttatgaggctttttttttatgttaagagggccataatactcagatatgttaacagatattgtgccagaggacagtttccaaaaatgttactcatgagtaatgtaagaacacatacaaattaaaaataagatgcttaatcctctctattgraaataaagaaatttacccccccttcccattttc

SEQ ID NO: 45912 - DNA, 419 bp, Homo sapiens
ggatctcccctcaccttgggggatgagcccaggctcctttctggggtctccagtgtgtccccgatggaccagcttcctgcatggcaccgccctccggccccaccccgagccctgagccccgccttgagccctgggcgctcctggccctggcctggcactcaagggctgctttcagggctgtttctcgtctgtcttttttcttttctttcttttttttttttcttccttgagacggagtttcactcttgttgcccaggctggactgcaatggcacgatctcggctcaccccaacctccacctcccgggttcaagtgattctcctgcctcagcctcccaagtagctgggatcacaggcgtgtgccaccacgcctggctaatttttgtatttagtagagwtggggtttctccacatgggcca

SEQ ID NO: 45913 - DNA, 531 bp, Homo sapiens
caaatatgtggataaaacattttacatttttttggaagagtgattttttggaaaagtgatttgttttgccatgtttgtcttaaaaatagttgacttactttgttgctctttactggaaagagcattttgttacagaatatttttggtaggaaaatgtgatgaatgcactatttggcttgtgtgggcttcttctcaattatttggtgaagtatttccttttccaaccttcctgcaaagttgttgagaaagcttctctaagtacttttctctatttttgtattttcttaaaaagattgccaagtatttgaagaatgatctatgtatccaagcttaattgcatttactgtttttaaatgctagagcatacaaaccatttaccagcattctccratgtgatagtaataccagtgccatagaaattgcaaaatgaaaaagaatgctaagtaaaatggctttactgtgctattactttgactcaaaaggttcttaaatcaaatgtaatttgtccaagcatcttttaattatttgaaa

SEQ ID NO: 45914 - DNA, 600 bp, Homo sapiens
ttttcatttattctacatggaacttaagcacattcaacctcagtaccattatctttttgccagatatgagaaatgttcttatgtgattgttttgaaaattatytcttcattctttctcttttttcttcctctaatttgctatatttggagcttctgaaactatcttccttaactcttcacttttcttccatttttttcatctctttgttattttcctgctatactcttggagaactcctcagcttgattttctagccctgtaagtgttttattctgctatttacacaacatctagcaaatatttattgagcacctagtgtgtgctaggtactcttttggatatgggaatacagcagtaaacaaataaagttactgtcttcaagacttcctattgatgggagccaaaaaataaacaatatatcaagtagtggaacatgtgtgaagaaaaataatgcaagaacaggagatagagtataacaaggaatggaatagaaaagatggtcaggaagatctcttgaatgacatggcctctgagaagaggactacaattccctgaaattctgcaaaattatctcaaagaaggtttccccaggataggag

SEQ ID NO: 45915 - DNA, 600 bp, Homo sapiens
ttttcatttattctacatggaacttaagcacattcaacctcagtaccattatctttttgccagatatgagaaatgttcttatgtgattgttttgaaaattatctcttcattctttctcttttttcttcctctaatttgctatatttggagcttctgaaactatcttccttawctcttcacttttcttccatttttttcatctctttgttattttcctgctatactcttggagaactcctcagcttgattttctagccctgtaagtgttttattctgctatttacacaacatctagcaaatatttattgagcacctagtgtgtgctaggtactcttttggatatgggaatacagcagtaaacaaataaagttactgtcttcaagacttcctattgatgggagccaaaaaataaacaatatatcaagtagtggaacatgtgtgaagaaaaataatgcaagaacaggagatagagtataacaaggaatggaatagaaaagatggtcaggaagatctcttgaatgacatggcctctgagaagaggactacaattccctgaaattctgcaaaattatctcaaagaaggtttccccaggataggag

SEQ ID NO: 45916 - DNA, 568 bp, Homo sapiens
tgcctkcttaattccataggaatatatccctttgaataccagaatcataagatgtgtttttgttgttgttgttgttgtttttgccaatctactattagtagctgctatgatttaaatgtttgctcctgctacaattcatgctgaaatttaatttctatgtaaccatattcaaaggtgaaaactttaagagatgattaggccatgagggctacatgttcctgggtggtattgttcccatataaaagggtgaatttgaatatctcttgttctctcttttgcccttctgccttcagccatcactattttcatttccttgattataccttttagcagtgaatttacttatttattttaaaagagtgtgttaaatctgtgacctaccagcattagttgtaaaggggaatggttttgatttttttgatgatgatcgatgtgtgtgtgtgcgtgtgtgtgtgtgtatgtgtatgtgtatgtacatttctgtgagtgaatgtgtacgtatatgaatgtgactgggatttttttccctttcttttatttcttattttataaaatgtactactaattt

SEQ ID NO: 45917 - DNA, 568 bp, Homo sapiens
tgcctgcttaattccataggaatatatccctttgaataccagaatcataagatgtgtttttgttgttgttgttgttgtttttgccaatctactattagtagctgctatgatttaaatgtttgctcctgctacaattcatgctgaaatttaatttctaygtaaccatattcaaaggtgaaaactttaagagatgattaggccatgagggctacatgttcctgggtggtattgttcccatataaaagggtgaatttgaatatctcttgttctctcttttgcccttctgccttcagccatcactattttcatttccttgattataccttttagcagtgaatttacttatttattttaaaagagtgtgttaaatctgtgacctaccagcattagttgtaaaggggaatggttttgatttttttgatgatgatcgatgtgtgtgtgtgcgtgtgtgtgtgtgtatgtgtatgtgtatgtacatttctgtgagtgaatgtgtacgtatatgaatgtgactgggatttttttccctttcttttatttcttattttataaaatgtactactaattt

SEQ ID NO: 45918 - DNA, 538 bp, Homo sapiens
gcaaaagaaataagtataatttaacacttgaaacaatattttaagagaatctagactagataaagggttatcttcataatataaaacatcgaaagttatgtcaactttgaggggaargatttgcctcctcacatgacaagggacataaaaacttttccctccgtcagctgggcgcggtggctcacacctataatcccagcattttgggaggccgaggcgggtgcatcatgaggtcaggagttcaagaccagcctggccaacatggtgaaaccctgtctctactccaaatacaaaaattagctgggtgtgatggcatgcacctgtaaccccagttactcaggaggctgaggcaggagagtggcttaaacccgggaggcggaggttgtggtgagccaagatggtgccattgcactccagcctgggcaatagagcgagactccatctcaaaaaaaaaaaaagaaaaagaaaaaaaggtttttccctccttcttgagaacacctgagcaactggcagtggcggggcagtggaggggggagat

SEQ ID NO: 45919 - DNA, 538 bp, Homo sapiens
gcaaaagaaataagtataatttaacacttgaaacaatattttaagagaatctagactagataaagggttatcttcataatataaaacatcgaaagttatgtcaactttgaggggaaggatttgcctcctcacatgacaagggacataaaaacttttccctccgtcagctgggcgcggtggctcacacctataatcccagcattttgggaggccgaggcgggtgcatcatgaggtcaggagttcaagaccagcctggccaacatggtgaaaccctgtctctactccaaatacaaaaattagctgggtgtgatggcatgcacctgtaaccccagttactcaggaggctgaggcaggagagtggcttaaaccygggaggcggaggttgtggtgagccaagatggtgccattgcactccagcctgggcaatagagcgagactccatctcaaaaaaaaaaaaagaaaaagaaaaaaaggtttttccctccttcttgagaacacctgagcaactggcagtggcggggcagtggaggggggagat

SEQ ID NO: 45920 - DNA, 1255 bp, Homo sapiens
cttaggtaacaaggtcaccaggattaattagtgaaaatcctgctgagtttcagatcatctcagtggccctctataaagtgttctcactcacctggcagcctcctttcttaatctcagttggaatctcaaccacaaagtggttgctccttgtatctagaagtcatttaaaagacagtaatcaaaatttctgttctcttttatttgttcctctgcttccctatcaataattctgggaggagtgggagagagaacagtgcgtaatcaaaaggcagacctagcaaattattattttattgataaaataattcagcaaattctcaatattcctgcttcacagtgattaccctagattttatattttagggttttgcacctacctcttatcatcaccccactaactagagtgtagtctgtgtaggacaccgattagactcacccctggtttggcaggcaaagaatgccaaggcaaaagcacagccgacaaagctccctgtacttgtgcagatagagaggcagagtataccccggagctgagctgcaaggtacaaatcctgaccctcctacttgataactgtgttactcggagtcagttaacctctcagagcctcagattcctaatacatatgatgcatataggaacagtgccatcagaataagaagagcagctacatcacaggactgctatagggtgaatggagttatgatgtaaagtagtgcctgggatacacatagcacattttaagtaaatgtggcatatcaatatagtaattacatatagcacaatagaaaagttagagtgtgatgaaatccaataggctttacaaaaatcaagtaagtattagtactacataaccacagaaaagggaggcccaaaggaacagtcaagaaatgcagcaagggccaggcacagtggctcatgcctstaattccaacactttgagaggctgaggcgtgtgagcccaggagttcaagaccagcttgggctacatggtgaaatcccgtctctacaaaaatacaaaaattagccaggcgtgatggtgtacatctatagtaccaggtacttgggacactgaggtgaaaggatcactggctgaggctgcagtaagccataataacaccgctgcactccatcctggacaacagaatgagaccctgtcaaaaaaaaggaaggaaggaagagagagagggagggagggagggagggagggaaggatggagagagggaaatgcagcaaggagaagagatggggagcaa

SEQ ID NO: 45921 - DNA, 598 bp, Homo sapiens
atgcacagaaaactgttaataatagttaccttagaagtaaaaatgggagggcaaaaaaggagcacttttcctttttcctttatataatatctggatccttattagagcatgtactatttcttttgttttgtttgtagtgacagaggtcttgctttgttgcccaggctggtcttgaacacctggcttcaaggaggagttttgcacccagccttttttttttttaacaaaaggtcttgctctgtcactctttaacttttatttttttttcaagccattcaaatgtaatagtgggtttttrttgttgttgttgttgttgtttaaagaaagagggctgggtgcggtggctcacacctatatcccagcactttgggaggccaaggtgggtggatcacttgaggccaggagttggagacctgcctggccaacatggtgaaacaccgtgtctactaaaaatacaaaaattgcatacctgtaatcccagctacttgggaggctgaggcacaagaatcaattgaacctgggaggcgaaggctgcaatgagctgagattatgccactgccttccagcctgggtgacacagtgagaggaaagaaagaaa

SEQ ID NO: 45922 - DNA, 605 bp, Homo sapiens
atgctggtaaatgaaagagttgtaaaatggcatgttctgcacactacaacttccacaacaaatatgtataaatatgtagagaaaaatgttagcagagttgctgttaggtgacagaattggaggtgtttttggtcctttttaaatgggttttccaattttcacaattaaaaataaattacttttgggctgggcgcaatggctcacacctgtaatcccagcactttgggaggccgaggcgggtggatcacgaggtcaggagatgaagaccattctggccaatatggtgaaactctgtctctactaaaaatacaaaaatcagcygggcgtggtggcacatgcctgtaattccagctactcaggaggctgaggcaggagaatcgcttgaaccagggagctggaggttgcagtgagccgagatcgcaccacagcacttcagcctggtgacagagcgagactctgtctcaaaaaataaaaacaaaataaaataaaaattacttttgaaattagaaatataagtaactttacaaactgtgaccaggtgtggtggcccatgccagtattcccagcactttgggaggctgaggtgggaggatcgcttgagccca

SEQ ID NO: 45923 - DNA, 504 bp, Homo sapiens
  misc_feature (1)...(504): n = A,T,C or G
ctgttgcaaatatttgtgtgtgtgtgtgtgtgtgtgtgtgtgtgtgtgtgtgtgtgtgasagagagagagagagagttttgcaaggctttaattttaatctattttggaaattcattctaatcaggctgtgatgtaatgatccagtttgtttccatcagccagcagattgattgaattgcttatctttttctagggtgggaagaagaccctctgatctcttgagaggtgctttactcatgagggtccacctgtaagcctttcatagaggtggataatgtgaacttccatgagtcctgcaagttaggaagaggaaaacatgcctcctttggagggcttgagtggtgctattgggacaggtgacaactgcattagatgcaaaatttttaatttagattaaaaagnnnnnnnnnnnnnnnnnnnnnnnnnnnnnnnnnnnnnnnnnnnnnnnnnnnnnnnnnnnnnnnnnnnnnnnnnnnnnnnnnnnnnnnnnnnnnnnnnnnngg

SEQ ID NO: 45924 - DNA, 504 bp, Homo sapiens
  misc_feature (1)...(504): n = A,T,C or G
ctgttgcaaatatttgtgtgtgtgtgtgtgtgtgtgtgtgtgtgtgtgtgtgtgtgtgagasagagagagagagagttttgcaaggctttaattttaatctattttggaaattcattctaatcaggctgtgatgtaatgatccagtttgtttccatcagccagcagattgattgaattgcttatctttttctagggtgggaagaagaccctctgatctcttgagaggtgctttactcatgagggtccacctgtaagcctttcatagaggtggataatgtgaacttccatgagtcctgcaagttaggaagaggaaaacatgcctcctttggagggcttgagtggtgctattgggacaggtgacaactgcattagatgcaaaatttttaatttagattaaaaagnnnnnnnnnnnnnnnnnnnnnnnnnnnnnnnnnnnnnnnnnnnnnnnnnnnnnnnnnnnnnnnnnnnnnnnnnnnnnnnnnnnnnnnnnnnnnnnnnnnngg

SEQ ID NO: 45925 - DNA, 484 bp, Homo sapiens
tgtcattggtgggataagacgcagtgtggagcatatggcaaaccacagtgagagggatcataagttcaggcccctcggttttttggagcaaggtgccatctgcagcggagaattcaataccttttgagaaacagctcctggcatgttactagacccagacacagaaagaatcttgaccactgagcaccaagtgaacatgtatctggaacttcccattaggggctaggtttcatcaaacccaccaagtcataaagataaactactcagaaacaatccattgtccaagaccagaaggcataagttagttgcaaggatagatagcacagactctcacttcaatcactactattgytcctccccctactcacacctatgtctgtatgggagtcctcataggatgaggtgtaagaaaagggaaaagcctcagtttgttttatgaatggatcagcctggtatatttgtgtaagctggaaatagatggtgg

SEQ ID NO: 45926 - DNA, 1775 bp, Homo sapiens
ccttccagccctggtattctagaattgtagttggtggcttctaggacctggaaggtgttgcttgaaaccagtgctgtttaatcagtgggagattttacaccacccacttcaagcaatgtttgaagacattttgttgttgtttttgtttctttgtttgtttgttttgagacaaagttttgctttgtggcccaggctggagtgcagtggcacaatcactgctcactgcagcctcgaactcctgggctcaagtgatcctcccatcttagtcacctgagtagctgggactacaggcatgagccaccatgcctgactaatttttaatttttttttttttagagatgggatcttgctgtgttgcccaggctggtctccaatccctgatctcaggtgatcctcccacctcagcctcccaagtagccgggactacaggcccatgccaccacacctggcaaaaacccatgctgtttaaccagagggagattttgcccccaggggatatttggcaatgttcgaagacatttttgattgtcaaaaaatttatgtgcaggggtgctactggcatctggtgggtagaggccaaggatgttgttcaacatcccacaacacccaggacaaccagcccacaacaaagaactcactggcctgagtgtcagaagtgctaaggctgagaaaccctgggttaaactttgtgaccccttgcatggcaaggatacggaattttgagccctgagtattcacgcagcaggtatttaaagggtgcttactcttcgcccagctctgtgtaggtacttggggagtatacagaactggaagatgcttcatcccttccggggcttaaaactgagttgctccaagcctctggttctggacacattgtgcctgagcacccttagatgttgatgctaccatccctcttaggataaaataccactttggatttccaaagaaaatattttatcctcaacagagtagccactatttatttatttattcctacctcatgcatagagctacactgagtgtagctggtttattttcaaaaagaagttgaggaaatgccacacattagactcaaggaagaaagttagaatcagatgtgcaactgtaagccagcaacacagttgatgcaagtaagcttcctggcagcaagggcaaaaagggaaataatccttcatgataatataaagcattgaagggactgtattactgtctcctcaaagggtacaaagtcttgaataaaattttaatgtaggcttcacacagaagatactgcttagtatttggtaatgcgtactatgttcaccaggcatatcaaaggcaggcatttctgggttttggatggaatgataaattaggaatgatatctgtcttcagatgtctgttggagaagataagcaattatgccactacctgttaaacagggttataaatgtgaggataaaaggagtgttactatgtgagtgaggcaggcagagaagacttacagaataaaacaayatgtttttatttttatcttttaattttttttttttttgagacagggtcttgctctgtcactcaggctggagtacactggtgtgatcacggttcactgcagcctcaacctcccaggctcaagtgatcctcccacctcagcctccggagtatctgggactacaagtgcacaccaccatgcccggctaattttttgtatttttgtagagacggggttttgccatgttgctcaaagtggtcttgaactcctagactctagcaatctgcccaccttggcctcc

SEQ ID NO: 45927 - DNA, 680 bp, Homo sapiens
cttcaaatgtatcatgattattattattatcactgtcgttatgtgcttagcttttgttgtttctcttgaagattccatgaagcaaagttactggatcatagatatgtagggaatatacccttaaagttcttattttttttggtgggggggggggacagcgtctcactctgtggctcaggctggaggacagtggtgcaatctcagctcactgcaacctcctattccagggttcaagatatttttgtgcctctacctcccaagtatctgggaccacaggygtgcactgccatgcccagctaatttttgtatttagtagagtccaggtttcaccatgttggtcaggctggtcttgaactcctgacctcaagtgatccacccatgttggcctcctgaagtgctgggattacaggcatgagccactgtgcacactccgcctacccttaaagttttgatagattatgttaattatctcacaaagatgtaattcttctatatgtttaataatatgtgatgttattctacatttaaacctattattttatttaatttaaaacagatgctacatagtattaagatcattttaacatttcagtgttacttgccgaatgtcaaacaactgtaaaaagtacaagccgtaatacaaaccatgttggtgatgtaatatcttactgctaatattt

SEQ ID NO: 45928 - DNA, 594 bp, Homo sapiens
atatatctatatatagagagagggagaacataaaatttaaccctttttatatagtattataaacatggcattaaattattcccagtttattggataacctaattctatttatttaagtatcttctaatttctattgcaaccagtaaggttgttgaatcactcaccatctctctctttattacactttaaattcagcttatccacaatggaatgaagtattaagctgcataatcctagtagaatcaatgctaagaacaaatagaatggcaaactaataataatgataataatgattctttacagtaatcatattgttagtggtggcattcatatttttagtttctttctttgacatgarggtgtgggataaaacaaatttaataattttgttggtgtcatttggaactgtaattttctgtagggaaggaaataagggtgtcaatgtaaagtagatgaggttatataaaaatactctagtccaaaatttgaattacaagtatcattgtgagctcatgagatattttatttcatacacatatatacagtagactttcactggtgtcagggggagaagctagtggcacagcaatactc

SEQ ID NO: 45929 - DNA, 554 bp, Homo sapiens
tctggtttctttcttaggaacctaatacctagagcagtggttttccatcaggggcaaattgcccccaccctggggacagttggcaatgtttggagacatgttgggatgtcaaaactggagtggggtttgcccctggcaggcaagcagggtagaggccagcgatgtcgctaaacatcctacagcactcaagacgaattcccccttaccctgccccccgtgacagggaatcccctygccaggacatccaaagcaccacgagcaagaaaccctgtgtgctccgacttcacactgctgaattcttcccttgtcctcttgggagaaggatctttattccaacaatgtggccatttttctcttttaaaaaattttatttatatatttttatgtttttttatggagatgggatatcagtctgttgcccaggctggtctcgaactcctgggctcaagcgatcctcccaccttgacctcccaaaatgcaaatgctgggattataagcatgagtcgcggcacctggcccgtggccatttttcaaaaccttgcttgaaccatctg

SEQ ID NO: 45930 - DNA, 554 bp, Homo sapiens
tctggtttctttcttaggaacctaatacctagagcagtggttttccatcaggggcaaattgcccccaccctggggacagttggcaatgtttggagacatgttgggatgtcaaaactggagtggggtttgcccctggcaggcaagcagggtagaggccagcgatgtcgctaaacatcctacagcactcaagacgaattcccccttaccctgccccccgtgacagggaatccccttgccaggacatccaaagcaccaygagcaagaaaccctgtgtgctccgacttcacactgctgaattcttcccttgtcctcttgggagaaggatctttattccaacaatgtggccatttttctcttttaaaaaattttatttatatatttttatgtttttttatggagatgggatatcagtctgttgcccaggctggtctcgaactcctgggctcaagcgatcctcccaccttgacctcccaaaatgcaaatgctgggattataagcatgagtcgcggcacctggcccgtggccatttttcaaaaccttgcttgaaccatctg

SEQ ID NO: 45931 - DNA, 604 bp, Homo sapiens
tggttatgagctgtgtgtgctgtggtgatctatgggtgttgtgtggatgggatgcgtagaatgtgtgtgttgtggtktatgttgtatgttgtggtgtgtgtgtgttgtagtatgtgtgttttgttgtgttgggtgtgaggtgtgtgttgtgagctgtgtgtggtttgtgtgccgtgttttgtgtgttgtatatgtgttgtatgtgtgagatgtgtgtgtgtttttggtgtgtgttgtgttgtgtggtatgtgtattgggagctgtgtgtggtgaatatttgtaaaacttgcacacaacaggaagtgccttctggatctcaaacctggttgctggctaccagaggaagggaagtgtctgattaattcaaaggtcttttgtgaaagttgaagatgcaaaagacttggggtgagaggaagcttcactgagaataaacctaagagttcctaaaaatccagagtgccagcacccagctcgggattgattctggatgccccaccctacaaaagtctgtgctgtaggttcagtaggaggaacactgccctacatcattcgggagacacagttcactgtgctgtcttgctgcccagtcaatgtcgccagaca

SEQ ID NO: 45932 - DNA, 604 bp, Homo sapiens
tggttatgagctgtgtgtgctgtggtgatctatgggtgttgtgtggatgggatgcgtagaatgtgtgtgttgtggtgtatgttgtatgttgtggtgtgtgtgtgttgtagtatgtgtgttttgttgtgttgggtgtgaggtgtgtgttgtgagctgtgtgtggtttgtgtgccgtgttttgtgtgttgtatatgtgttgtatgtgtgagatgtgtgtgtgtttttggtgtgtgttgtgttgtgtggtatgtgtattgggagctgtgtgtggtgaatatttgtaaaacttgcacacaacaggaagtgccttctggatctcaaacctggttgctggctaccagaggaagggaagtgtctgattaattcaaaggtcttttgtgaaagttgaagatgcaaaagacttggggtgagaggaagcttcactgagaataaacctaagagttcctaaaaatccagagtgccagcacccagctcgggatygattctggatgccccaccctacaaaagtctgtgctgtaggttcagtaggaggaacactgccctacatcattcgggagacacagttcactgtgctgtcttgctgcccagtcaatgtcgccagaca

SEQ ID NO: 45933 - DNA, 604 bp, Homo sapiens
tggttatgagctgtgtgtgctgtggtgatctatgggtgttgtgtggatgggatgcgtagaatgtgtgtgttgtggtgtatgttgtatgttgtggtgtgtgtgtgttgtagtatgtgtgttttgttgtgttgggtgtgaggtgtgtgttgtgagctgtgtgtggtttgtgtgccgtgttttgtgtgttgtatatgtgttgtatgtgtgagatgtgtgtgtgtttttggtgtgtgttgtgttgtgtggtatgtgtattgggagctgtgtgtggtgaatatttgtaaaacttgcacacaacaggaagtgccttctggatctcaaacctggttgctggctaccagaggaagggaagtgtctgattaattcaaaggtcttttgtgaaagttgaagatgcaaaagacttggggtgagaggaagcttcactgagaataaacctaagagttcctaaaaatccagagtgccagcacccagctcgggattrattctggatgccccaccctacaaaagtctgtgctgtaggttcagtaggaggaacactgccctacatcattcgggagacacagttcactgtgctgtcttgctgcccagtcaatgtcgccagaca

SEQ ID NO: 45934 - DNA, 608 bp, Homo sapiens
acattgctctctctgaactggtttgttaacccttttttcctatctcctttatcttgatgttaaatgttactttgttgtggaatgtttagtcaaaacagatagrtaggtaggtaggtaggtaggtaggttatgtgtggtttgcaatattgtctgacctgtggagtgacttgagcttgtgtgcctatggctctgccaagtgaatgggtagcactaaagagaattacctcctctggagcttcaggtagctcatggctttgatgattgaaatagcattggtgaaagtctgacattatggaaagacacaaatatttgtggacttggtcatgtctgactgtgcactgctcatgataccttcctattacttcgcctagagcctgaatgggaaagggagaggcaagcaactgaccaactagcaaacaaataaaatgaacctactgtgaacagaaaaactatttctgcccatagtagtggcttattgcagatacttatcttcagtttaaagttatctttgagtctctatgtttgtagctggaaagatgcagatgttttaaatcaagaaagttggacaagtttgttcctaatattccttccaagtttaattcaatgga

SEQ ID NO: 45935 - DNA, 576 bp, Homo sapiens
catatgttacattttgattgttatattgctttagtttcttttaatctaaaatattccccctacttttatttattcacaacgctatttcagtgcagttttaaagagtgggggtatcttgctgataacatttacccttttaatgatgtttataattatrcccttctaccaaggacttcaatggccctaaatgtgacttttatctgatgctgatatttccatttataaactactgagacctttctacctccaagaaacatgttcgttagaattcaaagctatgtatattcagtgttcattgtcacataaagacccctattattgtgaatatactcattagcaccatttccacaaggaatattcctattgtttataaataaatacctatgactatgatgaccatcacaagtaggacgatgggctagggtgagatgccattctatccagtgtggaatatattctaaggggcaaaatgggctaagcttagttgtttgagagaagaacattaattcagttctcaggcttttgtggggctctaccaggtacagtcaaactaaagctctaccacaagtacattaa

SEQ ID NO: 45936 - DNA, 576 bp, Homo sapiens
catatgttacattttgattgttatattgctttagtttcttttaatctaaaatattccccctacttttatttattcacaacgctatttcagtgcagttttaaagagtgggggtatcttgctgataacatttacccttttaatgatgtttataattatacccttctaccaaggacttsaatggccctaaatgtgacttttatctgatgctgatatttccatttataaactactgagacctttctacctccaagaaacatgttcgttagaattcaaagctatgtatattcagtgttcattgtcacataaagacccctattattgtgaatatactcattagcaccatttccacaaggaatattcctattgtttataaataaatacctatgactatgatgaccatcacaagtaggacgatgggctagggtgagatgccattctatccagtgtggaatatattctaaggggcaaaatgggctaagcttagttgtttgagagaagaacattaattcagttctcaggcttttgtggggctctaccaggtacagtcaaactaaagctctaccacaagtacattaa

SEQ ID NO: 45937 - DNA, 588 bp, Homo sapiens
tgcatactaaaatccctgcccagagagaagcttagcccccattttctatacacgcagcatatatagaagcatcatcagggactgctcgggtgctgcctttactccacctcaacatacaatgactcagttaaccagcccaataaaagcttgttttcaccattgttcaggaaggttttgctttgggaactatcctcagcattcttcttatyacaagtaataaaatctccttgttgaatcctcgattatggtaaatggactgtcatccaccaagcaatcaaacccacccattgtgtgggtaacaaacagccttcttttggaagaagaggccatctaggactttccgagctagagaggagaagtcagctcctggcttcaaagcttcaaaggacaggctgaccctcttgttaggggctaatgcagatggtgacatttaagttgaagccaatgctcacttactaatccaaaaatcctagggccttaaataattatgctaaatcaactttacctacgctatataaagctgcgatgacagcacacttgtttactgcacagtttactgaatatttttaaagtccactgttgagacct

SEQ ID NO: 45938 - DNA, 626 bp, Homo sapiens
tgcctggacccctgagggcacagggaacccaagggttctgagacactgggtttcatcgtcctcacctcctcccagctgtgctacataaaacatcagttgtgtaggatattgtgttcattttctggggctaccataacaatgtgctaccgactgggtggctttaactacagaaacttattccctcagttctggaagctaaaagtctgagatcaaggttttatagggttggttcctttggaggcctcrctccttggtttgcagatggctgccttctccagtggcttcctgtggtcttccctctgtgtgtgtctgtgtgctgatcaccttttcttatgagaacgtcactcatattgggttagggcccaccctaatgtcctcattttcacttaattacctctttaaacacattatctccatatatggctacattctgaagtactgggagttaggacttcaacatatgaattttgaatagatacaattcagcctctagcagatactataatgggttaatcttatgtgtcaacttggctagtctgtaatacctagttgtttgatcaaactgcagtttagatattgctgtgaagttattttttagatacaaataacatttacaatcagtagac

SEQ ID NO: 45939 - DNA, 592 bp, Homo sapiens
agctgattgccaggctgaactgttggatacatattgatttaatcagagtgcttaattaaactatgtaagttgcccagcaaatcattacatcacagcttccttcaaaggaagacagtttctatttcgctttccttttccttgtgaattagaaatygttattgattgaaaagaaattaagataaggattcttgcttttcataacaacttaagaaactgccataccctctggctacatttctttttaatcataaggaataaatgttgtttgcgtaagtgtgcttagactgcaatttggtatgtgggaattctttgttttttttctaaagagttcagaatctgaataaacaagactacattatatacctaaacaaagaagatagtcacttacaaccctccattttaaagaccaagaaaatcgacctcaaagaaataagtcctgcaaaatattgagataatccatgattcaaattcaggtgtcccccacttcttaccatgactaaagtgttcccaaaacctcaaattaagcttccatctgctgaaaaccagagaagcatacccatttgactctatgggtttccaacagcaccttcca

SEQ ID NO: 45940 - DNA, 569 bp, Homo sapiens
ttaaaataatattatgtattttgacttgagtatattactcaaaacagagccttgtatgtgggatagtgtaaaattcctgcttgttttaatatttttatgcacattaacatttgggaaaaacagcccttgccactttgtctccatatttgttgcctamagatgacctgaataaatttaactctctactttcttcaagtgtgaagccatcagcactgctaataagtgatgagcatggcagatagtcccttctgtcaacagcaagctgcttaaattaaaaccactcatttccatctgaggccaccctcatccacgtgggatattcagctttctctctcagccaggttttcagactcaaacctgcaagtcacttgcattgattttgtcttgtttgccaatttacatgtaactttggcccctggacttccagtaatgacaacaacattatgctttgatgctatccattttcttgatttatgtgggaatacttttctgattgtctctaagactcattatataaggtgtgtgtagcccagtcaattggcaagggtaccaagatatcaatgggattg

SEQ ID NO: 45941 - DNA, 569 bp, Homo sapiens
ttaaaataatattatgtattttgacttgagtatattactcaaaacagagccttgtatgtgggatagtgtaaaattcctgcttgttttaatatttttatgcacattaacatttgggaaaaacagcccttgccactttgtctccatatttgttgcctacagatgacctgaataaatttaactctctactttcttcaagtgtgaagccatcagcactgctaataagtgatgagcatggcagatagtcccttctgtcaacagcaagctgcttaaattaaaaccactcatttccatctgaggccaccctcatccacgtgggatattcagctttctctctcagccaggttttcagactcaaacctgcaagtcacttgcattgattttgycttgtttgccaatttacatgtaactttggcccctggacttccagtaatgacaacaacattatgctttgatgctatccattttcttgatttatgtgggaatacttttctgattgtctctaagactcattatataaggtgtgtgtagcccagtcaattggcaagggtaccaagatatcaatgggattg

SEQ ID NO: 45942 - DNA, 586 bp, Homo sapiens
ggagttctcctcttccatttcttacttttcttcctctctgtccctgctcttgtccgttctattaagagtccatggttttcggtgagactgtcacttttatagcataacaaacatttgctaaaggatatcatcaatattatccagaaaaaaatatggatttggcttgtgggtatttccctctgaagactgtgaggccctccagcattgccagctctccactgctctggggccactgaaracccccacttctttaggtgatgcccaggtactcaggcatcaaagtttttggtgagaagggagaataatggagacgaccaagggcttgtggaagaagagaaggaggatactaaaatgagaaggggagggaaggaaaggggttatgctcataccttcaaagtaagtactgtgaactgataggtgatgtgaagaaaaagtaaagaactgctttgcaccaaccccgggactccagagacaagtgtgtcaacactggttcactcctccaggtactcctggtgtagtgaagtggtaaaatgtgtacgtttacatctgtgatggcacatgcaaatatatatatatatacacacac

SEQ ID NO: 45943 - DNA, 533 bp, Homo sapiens
aatgtgtycattgtctgacatgattcatgacatgattctattaaggcagattctgttctgctcagtgctatgcctacagggccctgatggagactgtgcacaataaatgttcaataagtacttgtgaatattgaaaaaatgcacaggtgctcccagcagctcacccctccagtggctgttctttctacctgtcaaagcctgtgctgacacatatactgggaggtgacccccagctgcggctgccccaccaggcacatcaagccaggccccggccctgctttcacctggctcgcctatggctagtctgtccagcagccgctgtgcacccaccaaaccacaggcaatggaaatgcatagtcttgggtttgaattcttaacagagcataggactggcattgctttattcagacacagtcaaggaaggcaagggggagggagaggcgcttttccaccatccctgcactggtgaagcagccgcggtcagggaggttgttcctggcagagggaagagtaggtgggaaagaaccgagagg

SEQ ID NO: 45944 - DNA, 533 bp, Homo sapiens
aatgtgtccattgtctgacatgattcatgacatgattctattaaggcagattctgttctgctcagtgctatgcctacagggccctgatggagactgtgcacaataaatgttcaataagtacttgtgaatattgaaaaaatgcacaggtgctcccagcagctcacccctccagtggctgttctttctacctgtcaaagcytgtgctgacacatatactgggaggtgacccccagctgcggctgccccaccaggcacatcaagccaggccccggccctgctttcacctggctcgcctatggctagtctgtccagcagccgctgtgcacccaccaaaccacaggcaatggaaatgcatagtcttgggtttgaattcttaacagagcataggactggcattgctttattcagacacagtcaaggaaggcaagggggagggagaggcgcttttccaccatccctgcactggtgaagcagccgcggtcagggaggttgttcctggcagagggaagagtaggtgggaaagaaccgagagg

SEQ ID NO: 45945 - DNA, 560 bp, Homo sapiens
aagtacaggggacattagaggataagctcataagggctggactaaatctttttttttttttttttttttgagacagaatctcggaatctcgctctgtcgcccaggctggagtgcagtggtgcaatcttggctcactgcaagctccacctcctggattcctgccattctcctgcctcagcctcccgagtagctgggactacaggcrcctgccaccatggggggccaattttttgtatttttggtagagatggggtttcaccatgttagccaggatggtctcgatctcctgacctcatgattcgcccgcctcggcctcccaacgtgctgggattacaggcgtgagccaccgcgcctggcctaaatcttttaaggagactcagtctttgtggcctgacacttggggaacagtcagcttcaggaagttgggatgccacacctttgtttcttgaaccatttagggaggtgtttcttgaaccattttgaaatcagaagtgtgagtcctccagccctgacttttttttcaagattgttttggctatttcaggtcccttgcaatccca

SEQ ID NO: 45946 - DNA, 560 bp, Homo sapiens
aagtacaggggacattagaggataagctcataagggctggactaaatctttttttttttttttttttttgagacagaatctcggaatctcgctctgtcgcccaggctggagtgcagtggtgcaatcttggctcactgcaagctccacctcctggattcctgccattctcctgcctcagcctcccgagtagctgggactacaggcacctgccaccatggkgggccaattttttgtatttttggtagagatggggtttcaccatgttagccaggatggtctcgatctcctgacctcatgattcgcccgcctcggcctcccaacgtgctgggattacaggcgtgagccaccgcgcctggcctaaatcttttaaggagactcagtctttgtggcctgacacttggggaacagtcagcttcaggaagttgggatgccacacctttgtttcttgaaccatttagggaggtgtttcttgaaccattttgaaatcagaagtgtgagtcctccagccctgacttttttttcaagattgttttggctatttcaggtcccttgcaatccca

SEQ ID NO: 45947 - DNA, 1869 bp, Homo sapiens
catatcattttctaaatggccataaatgcttactatgttgtgtggactgaactccttaatacacagaactgttcggtatttcttttgcccaacagtagacatgaaaatactgctgaactttcattgcatgaaccaaagaagttttggaaattcttccttactgtgagagagtgagcagtgagttgttttgagggcagtgtgttccaggaagaggcaaaatcaagggcagaagtcctgaggcaggaacaaacatggggaatcccagagcagtaaaaggccggtgtggcgaggtgtactgagtagaagatgaggtaagggatagaagcagatttggatgatgtacagcctcacaggccagagtaaggaacttaattgtgttgtgagattgaagagaagccttggacagtgttgaggagaggagtgatatgtgacaggatttgcactttcaaatgaacatctagctgtaggttggagaactgtctatgggaagctgatttacaaaagtataaaacattagctccgggcctgctcagaggcctggataaatcttcgccccatccttgccaccttcttctcttggtttctctgtttaccttcggtacataagactctagatatagtagaaatgatgaaatgtgcacacagggcagagaaatttggtatgtttgccacttggtgtatccctttctggaggtgaaaccctcttccagaagtgtattaattgactacagagaagaaagagcaggagcattttatcacattgcgtaggaatggagagggcaaggcactagaaggtgctctgtgggggcagtgcagcctgtcaggatgacttcagcggtgtgagtcagccttcgtaaatgacaggagcaggacctccttggtcaaggcgtccagtgtggtgagccttggggcccagccatctgtcgaggaagatggcgccatttatttcctgtgcttggtagttgcagggaactcctttgagcaaaaaatcttagaggcataaggtaataggataagtaaaagcaacagagacattactagggccacagctggggcagaggcagaccctcacagagatgaaaagagcagacagggctctcccaacagcattcttggtgcagaaattgccgatgtgtgaccttggggaaccaaggatggatcccatctcctcttttccaacagccttttaactcagttgcgtgattgaaacccatgataaggctaataaaaaaggaatttcctttgtagaggttgactcattcccagttctagtcccactgaactgtttgctggtcagcggccatgtttaattctggacatcacatgaacccttgatgaaattgttaaaaatgataaaccaaagttatcttgattttcaacattcctagtttccgtcttgaaccacagcttctctgctccaaatcactgataatcattgcttcagctgaagagaaaataacagcctacaatagtgagagaaatacttttygattttgagactcaaatttgatttttcttgaaattataaagagataataatcttgaaaaccaggctgtgttgagacacagaaggatttcccattttctaaagtttcccttacgtattaagtgtcaggcatggcagtctgcacatagagctataggagaagccaaaccttgggaggtggaggataagacagagcaaaagtccctgccatgctctcatttatacagtgcagagcagaagagcagcattggtggggaggtggctagattgatgggcctaaaatagtgcccttcattgccttcttcctgtcacaggctgaatcatgtaaacagagagccctgcctctttccctgggggagtggagaagggctgggaagcccatg

SEQ ID NO: 45948 - DNA, 565 bp, Homo sapiens
tatctcacaatattataattgcctgtctaataatttctttttccagccaggtgaggacaggacctcccctaatgtgtttattttgcagttcaataagtaattgttggataggcaaatgcatcagcaaatgagtcaactttccctggagtcaattttctactttttrtcttctccttcagtacttttataacactggaaaagcagcacaccagtccagctctgggctgtgctagacatcttctgctagctatgaaaaaaacataatttgtgccctacactcatccccttagtgagcactgacccctcactgagaaccttgagtctcctcatcgagtggacagaacttaccgtggtaggaaccaggtttgattttactgatctgaagctcttcttgtcccacttactagggagagcctggacttcctggagatctagggccagtggggcaaactgggcagcgaggaagacaggtatgaagttttgaagtccctaccctccccagatctgggtattcagttccaaggtaaagagaaggggttgacaccttcagcccaattatgggggg

SEQ ID NO: 45949 - DNA, 1912 bp, Homo sapiens
gaaccagggcgtaataagacactgaaaaatcaggtatgagcttaaccagaaaatattatcaatccaatgccaactctttagggatacgctgcacatggtttccccattgtttaaatcagtgttttccagcctgaattataaattgtaggcttgaaaactaagctctctatcttgaaactatgtaaatatctcattccttatcaaaatgtcagttgattcatgtatgaatttatgtctgttgactcatagtttcatgttttattcacatgaataaagcttcaccaagtgaagcccttcccatgctgctctagcactggcacaccatggcagatgggcctccttgtggatgtcctcctcatactgctcgagctctgagtacgcatatcaggctgctccctgagtaaaagccattctcatcctgatccagttttgacactccatgctaagcattatcacatgatcaggattatggttcaaagtaattgcttcctggtacaccttgattcatttagcctcccatactaccatgctatatatgtgtgtgcgtgtgtgtgtgtgtgttgtatttaatacaagatgaaaactcataacaagcctgtcaactaaaaccaggaatctattgccaaaatcccagaagaatctgtagcccttagaatgtaacagaaaagaaactggggatggagtgaggggtgaagcttgtgggacattgcttcctggaggtagtgttctctctggtcaggtgtagagacatgaagagctctggtaacagtgcatgctaggaattgtagttttatatttactttcctgtaatgagacctgggattctgcacacagaaaaaaatatgtccccctaggatctattccagagttattgacgatgttattggagtccacaaatacatgaacttttgttggttggttcattggttttagtttccctggtgactctagatttgaacatctatttgggaaccactgtcttttatggatccttaacagattttggcaatttggctaaaaatttagcaactgaaatagcatataagaagataaggccataggaaatgggctgaaaactgagacaagaatagactgagatgatagaaaaattgaattatatacaattataaaataatgagatagaaaaggagactggttaagaaaaaattctaatggccttaaacttacagtggcaaaacttgacaaagaaaagagatgaattaattgggtaaaaaaataaaatggctatgtgcaagaccagaaagatgcattcattcaatacatattttttatcacctatgatgtgctgggctgttggaatacagtggtgaacacatgatacatggattcagctatataattgcactcacacactgtaaaggagataggcacttaataaatattcacaaaatacacattaaaactgtgatagcagctatggggaaaatctatgggtgctattaagggcatacatataccatgttaaaatttgtattagtcagggttctccaaagagacagagtcaataggatatacatgatatatgagaggagatttgttaggattggctcacacaattatggaggctgagaagttgcaggacaagccatctgcaagctggagaccctgcaatgctgaaaacatcaaactcagtccaagtcagaaggcctcagagccagggaagctgatggggtaacagtccaaggccawaggcctgagaacccagggggccactggtgtaagtcttggaatttaaaggccagggagcctggagttgttgcatagggacaggagaaaaagagtgtatcccagctgcagcagacagatcaacacattcaccttttctctgtttttgttccctccagacccccagcagattaacgacaccttcccacactgagggcagttcttt

SEQ ID NO: 45950 - DNA, 568 bp, Homo sapiens
ctcttaaatgatattttcaaaaaataatcaggctaaaatgcatttgaagtttgtttttcagtcaatatgaaaaaatctgtggtgataagacagggacatatttagctgtttgactcaaggcagcagaagttgaaggttgaagtgtagtcaaggttaacttccactttttttcttaactttttttttttacttgaatgcagcttcaatcaatagtcttgaagctccagattatctatcaaatgaagaaaacctgtcttaggtagctagattctctaatcaaatactgaccagataagatcttctgggtgataagaacagatttaaaacccagagtgacattctttgatgagaatcatagaatatctatacatgtcaagatgaaacatgttttatatagtatacatttaactctcaagttattaatgtcttaataaaaaaatatawgttattactactgctataattattatatgtttaagagctaaagtcaaaacttttcctttttgcgtaactaagatatgtatttaatctatatctataacccaatacaatgttcagtttgtggaac

SEQ ID NO: 45951 - DNA, 568 bp, Homo sapiens
ctcttaaatgatattttcaaaaaataatcaggctaaaatgcatttgaagtttgtttttcagtcaatatgaaaaaatctgtggtgataagacagggacatatttagctgtttgactcaaggcagcagaagttgaaggttgaagtgtagtcaaggttaacttccactttttttcttaactttttttttttacttgaatgcagcttcaatcaatagtcttgaagctccagattatctatcaaatgaagaaaacctgtcttaggtagctagattctctaatcaaatactgaccagataagatcttctgggtgataagaacagatttaaaacccagagtgacattctttgatgagaatcatagaatatctatacatgtcaagatgaaacatgttttatatagtatacatttaactctcaagttattaatgtcttaataaaaaaatataagttattactactgctataattattatatgtttaagagctaaagtcaaaacttttcctttttgcgtaactaagatatgtatttaatctatatctataacccaatacaatgttcagtttgtrgaac

SEQ ID NO: 45952 - DNA, 577 bp, Homo sapiens
tagtatattcccatgttgcagatgtggacactgaggcccagagcagggaagtggctcttccaagaccacacaactaattagcaataagcctcttggtccccatccttgtatcttttcagcccaggggacagatatgggagaaagcctttacaaacccatgtgccccacacatatgcaggtagctgtgtcagyccatctgttccccacagtggccctgaccctctgttctacagcattcaccacacagtccccattcttcctttgcatcaacagcttccctgcccacccgttcacagctgtgtgtcctcttcacaggtcatccgagaagtgagcaagccagttgggggagctgagggagtggaggtccccagatccccagtcctcctgtgcaagttggacctggacaaggtatatctgtctccactaagtcttccccaggccaggcagtggccactcaacacgggctcaaccccaggggaactaactggctggggggaaagtcaggcaactgccaaactgtaggtgcccagcacagagctggcacaacagtaggtgcttaataaatgtctcctgaatt

SEQ ID NO: 45953 - DNA, 592 bp, Homo sapiens
tggtgccctccgaggaatttactggtatttatgaaaagaacatggcttagttgcgtctcttctgatctaacccatttggaacgtaacttagaaggacagtcctgcgcatcttcttgcgaaactgttccatagtcctcccctaggaagtcgtgcagttcttggagacatttgggcaactctttaatctgcctcatcagggagggagggcacacaggcctggggtagaaaaggccagcctcattyttttttttttattgtgatgaaattgcaaacttacatcctgagactaaaattaaatggaggaaagctctgcccgtcgtgggtggtcttcctcgggcccttcggaaggaggggtcggatggagcaggagagcacatttagcaacatttccaatagggtaatgacagcaatcatgatagctgtcccccttgggagggagaaatcacaaaaacctacacagtgacaaaaataaacaagcgtgtaacgccagcagaggaggcctggcccgctctgaacttggagaacatcaaagtgaagccagttatcaggccgtccaggctccaggctccttcgcgtcctgctcagtgctttt

SEQ ID NO: 45954 - DNA, 572 bp, Homo sapiens
agcatttctggactccagtctctccagggcccagtgagaggtggggacagtggacaggcttgtatgggaggtggcggtccatgctgcagccagatttgtgttcatttcccttctgcaagcaccccgcgctgtgtttgttccaagaccttggtgctttcctgcgttcctggcagcctcctgtgccctagttaggtgggcccacccgcagctgtggcctcacccgggacccaggcctgcctcccaggccacaggcacccaaaggagccccaatgtcctcagtctgccaggatccccagtagcaccccctgcaggcctgcccagaagagagccaggaagcgaccactcactgccctccaggtaaaaaggccatcggatctattccagacatacacctccatttggggagaggagagaggggttggargacagagttcatgagcctagatggaatttttcagacagggagccaagttgaaagtgagcaaaacagttctcagtgttcctaactgtaaaatagggctgaagctagaacttagcttgaaaggtgaccatgaggacctatcaggcaataa

SEQ ID NO: 45955 - DNA, 561 bp, Homo sapiens
tttctttgaaaataattgaacacttctgttgcaatcctgttccagtattgcaaaaaataaaaatttaaaaatgtaaattccactgaaggtcagatatgctgataacagtctgcagcctgatacacttgaaaatactgygcgacatgcaaaggaaatttcatgaaatgataacccataaaagagttatgtgaagaacagccatggacgtatagagtcagggcactaaagcatggtgacagagactgttttccaaagaaatagttttcctaacctcaatctttatgtcaaattgactgaacccatgtcagaaaaaacttttctctaaactgaattgctcatattgttgcttaaatctattttacctcatcaagtcatctgtaaacattcagtcagctggatcccaagctctcctatagtaacatgttatgttcctgaaaattatcaatgggcttgggaagggtatgaagaaatgagacactgataactgcgcttcatgatggaactgactagagaacggagcacagtttattgggcagttacatggatattgaagccaggggg

SEQ ID NO: 45956 - DNA, 3284 bp, Homo sapiens
ccaacttatagctaggatttgtgttgatagttattggaaggtaaagagaaaaatcccatataaaaatattctgttactctggcccataaaatcatcattttaaaagaaacaaggtggaaggtagggctgaaagggatattgagaggacactgatgaccaacttctttgagccacaagtttgcccaaggcctgctctggtaccaaagtggccatttctctcctcagtgacccctctccagactggctgcccattctatcctgctttgcttctgccacccacttcctgggcttctagtgctgggctggtaccatttatttgtttattcagggcaggaaagtacttgaccaggtgtctgtagcaccaaatgcctgtggctccctagagtaggagagtcaggcccaagatgatacacacagtgaccactttgaaggttccactcgaggcatggctcagccagaacattcccagagaaactcactccctcaaagttaaggtcaccgtagtcattttagctattgaagaccacagtgctctatatgtgttggctcatttgtgctccaatctcctctatgacatcagttctattattatctccattttgcagtggaggaaacaacttatacaggtttagtattttgtccaagatcacagttcctaagtggtagctctgggattcacacccaagcagtgtgaccgtagagccagactccagccagtgtatgtattatttactcccggttgtctgtgaaatgtagaaaagaaaaggaaaagaataaaaatcccctctgactccagcaacagagataactatttgctttttccccacctgctatccttatgcaaaccccaccttaatgtggtggtaacatcagcttcccaggcatattcctgtgggaaacagtctgtctccctccctggcagtggcatgtctcagaagtagcctttggcaacctcttggtgaagtctgtgtctccctcccacaccccgccatgctaccctctcaggtgacctctgcagggcccacaccagcaagatttcttgactagtccccaggccagcccttctcccttcccaccgcagagacagtttctgcagaggcttgccctctcttgcccacagcctggctagcctaatcatctcaggtcataaatgctgaagctttagcaggttactcctcccaggttgacatgcttatacaggcatttttgagagatattgtactttttagccaaaagccccaaagtagagacacactgggcttggccagggttttggtgttctcttaaagcacaccatccctttgctgcttcaccagtgggagtgaaatgttttcacagggaaacgtccttctggctgccaggctgtgatggggaggtgtcagtgggtgggtgccggaggggaagatgttttatgttacaacacaggaagtcaatgaccttgaggcctctgagcactctgccaggtcaattcatctcggaggttgttctttcctgccccaaagcctaggctgactacaaagctccttccgcccctcagagcaattagagaaacagaaagaagcagagtaccaggatctgaaaatggagcagtgcagagagaaagctagtgtaagaccrtgcttctcaaccctttcacacataatacttaacttttgtaagaaatatttcataatattcattttgctatctagaaatgaagttcttagatatataacctacctacacatataatttttaaaataaatataatgtcctacctacaatgtaaagaaaaataaaaggagagtagtggataataaaatatatttaaatatgtgaattctagtacacagctgccctagaagacatagcaaagggccaggtgcctgcacctttacttaaaatcattgtgaacacaagggatatagctgcagttaaattggcgattcaatattatgagaagggttgctgtcagaaacatgcatttccaaaattcttggtaaagttctttttttttttttttttgagacagggtctcactctgttacccaagctggagtgcagtggcacaaacatggctcactgcagcctcaacctcttgggctcaagtgattcttctgcctctgcctcttgtgcatttggtaccacaggtgcatgccaccacaccgggctaatttttttaattttttgtagagatggggtctctccatgttgcccaggctggcctcaaactcccgggctcaagcaatcctcctaccttggcttcccaaaactctgggattatggacgtgagcgactgagcccagcttaaagttctaaacaaaacaaaatatcatcttgccttgattcccacaatagttatgatcctaaaaatttcagtatatattcaaccatgcaaaaaacacatgacgtttatatgtaaaacagagttacattccaggcacaggtagtctgtaagattttcatcaacacaaatgtctactgtgattttccaaaggcatatgggacacagaacagttgcgtttcaggaagtccagcatccttggcccccacttcctaaaatgctagttgacccacaattttgtcattgtgacaaaaatgcttccataaatgtccaaactacgcaccccccagaagtatggcccccatggaaaatcaatgtctgaggcgaccccaggaactgattagcggtaagatcgcataccttaactctgtatggcatgaattgctcagtagcatcaaggaaatggagggcgaaatactgataaacaatataggcaagtgttagtgacgtgtttctcaagaagttaaaaatacttgccctcaggaagatcagtgtagtaggatccattcagagtttgctaaatcatcttaaagaactaggaatgcccaaggctagagaagatttaacgttaacttaactgaggataataaatccaaggaagaactaaaattaaatttgatgaaagccaatttgtcaaagatcaattatccaaaagtcaagtcactaaatgaccaattcaccaaaagccaatgtgtcaaatattaacttgctgaaagattaattcaccccaaactgccaaatttagtactttaagccatgtctagtactgcagcaatttcaccataagccaatttgctaccattgagtcactgtggctggccaaatcctagtgtgtttggcacttttggtctatatcattaagtaatgagaagatcctgggtatttcaaatgttgtgcattttgcacatctcaaatgtcaaggaatttatgaaaaataaggtagatttctctttgccaatgc

SEQ ID NO: 45957 - DNA, 516 bp, Homo sapiens
aaaatgactatagaccaagataggaagaaaaggagatatgtataaatattcacacatcagaattaatattacacttacagaatatttacattatattaaattttatagtgccacttttccattatgtctactttgaatgtgttcctgataattgctaatttttctataacaaatacaaaaataactttatgagttcatatccctgcctattgtattaraaacttgacatggatttatgaggttgtatattcaaggtgtaatgtgaaaattatattgttttaatggctaaaaacatgtcacttgacttgaagagcttcttcaaataatttctttgtaatacgaaagatctactattttaagaaggtgtgagtacaccaaaacatcgagataacatatttgtggtgcatgtgtgaggacagccacatttaccttaatgttattatacatttgtctgatcatcagcctctaacatagaaaatccttacaacttgttaaccttcaggattagctgttatg

SEQ ID NO: 45958 - DNA, 527 bp, Homo sapiens
tcatgcctgtaatctgagcactttcagatgccaaggcagggggatcacttaaggctgggagtttgaggccagactgggcaacagagtgagaccctatctctacaaaaaaaatttgaactagttggttgtgctggcatgcacctgtagttccagctacttgggaggctgaggcagaaggctgactcaagcccaggcrtttgaggttgcagtgagctgtgattggatcataccactgctatccagtctgggcaacagcaagggacctctgtctaaaaatttaattgaatgcagatggataaacttgatgacatgactagcctagttcaaaaagatgcaaacacaatgcaagttaaacaaaaaacaaagaatttgaggtttccttgtgtcttagtttgggttctctcaggagaagaccctaagacaagcatttgtagttgatgtgagaggtgaaagtagtgagataaaaaagggaaagaagtcaatgtacagtgttatcaatcaagctactcctgtgggcaacgagggct

SEQ ID NO: 45959 - DNA, 550 bp, Homo sapiens
tatgaaaagagagtctgtactctgacggtgactgagagattcacgaagctcttcatggtcggaacatagttattgttttcgagctctatgtctctcctttgttgctaacatgtctatagcacaatttttgctttgcatttgatatacatgtgattatgtggtttcctttacttttcaaataactttaatcctgtttatacatagaacacaggactacagggaatttttcaacacattttaatttcagagatttcttcatgactgccttccttaggctggtcacccactctaacctctgtgtctttcgagggccttaagtaatgaaaggagacacgggcctggggttccagggtccaggatgtactatctgggctcaatgatactgtatattgmagtgaaagtgacaatggggcagcaaaggaggcaaagaaaaggagagggaagcagaggtaggaatacagatggaacaaagacctgctctttcactgggatggtgaagggggcccccgtggctgggcataaattggcagagaaacttgtgctgaccgaa

SEQ ID NO: 45960 - DNA, 559 bp, Homo sapiens
gaaacccctgataaaaccatcagatctcatgaaacttactcactaccatgagaacagtatgggggaaaccacccccatgattcaaattatctccctctgggtccctctcacaacatgtgggaattataggagtccaattcaagttgagatttgggtggagacacagagccaaaccatatcacctaccatttataaaaattaatccccattcaaagagtactacccacccccccccgccaacaacacacacacacacacacacacacacacacacacacatamacacacgctgtttgacactgatgattatgacccacaaagaagtgtctgggatggtggaagtctccttcatagccaaatgtaccacttctataatataaggaatataaaatgcaaatggtccacaaaataatactgcaatttaccaaagatgcaggatgtcatgaagtcaaggaaagtaacagggaagaactgcataaatcacaagcaaaatcaccaataagtgataatctggcagagttagacacatttggcagatcacagatggcagaattagaca

SEQ ID NO: 45961 - DNA, 564 bp, Homo sapiens
gttgtacataaaagggttattttgattgtttctgttggtttgtctgaactggggtaagttgctctcttctgttcaaaaagtgaggtcagggatttttgtttccctgggtcctagaacagtagctcctttgtctagcccctccagggtttacttgacatcttaaggactacaaaggttaggatgagttcctctcagtccacagcacctggaaatcttccagctacttacatgtttaagaactataggctgagattttgtgtcttttcagaaaaatgggtgaacttttctaagggtaatttagaattgccgaagccacttggagaacctttaacttagataaaataagcttatcttagaggcaccttgaaaaaaggagaatatgaaacctccccaaaacaatgggatacattcttcaattggtataaagaggcttctgaaagacaaaatgactctagaatcacctctctaaaaaatccttacagcatgctaatragaaagtaaagaccaaaattcagattgactgtactgatgcaacagaaccgcctgttaaatctctctgcttct

SEQ ID NO: 45962 - DNA, 601 bp, Homo sapiens
caaataatgaccttaggcaagatatgattctgagtgaataaaaaaaattattaaaaaatatttgttgcattaaaagataaatayatttttgaatgattttcatcaggcctgaattcaaagaattttcaggaatattctaaatttaaaagaaattttcattataagaacatccatgcttaagtattatgagttgattaaagttttaattctgattggccaatgtttttagttgttacaataatgaattaatgaatctgaaatacaaaataaattataacaatgacagtgaagatggttataaagaaagtgaaaataatttttatacctgaagtacaaatattattttagaagttagcccttgtttatataaccaagagattttaatttctcaaatataatattcaagctcatttaattagtaagctcaacagagttatagtgagttaggaccagatcaagtttattatgaatatgtggtattcttattgtatgaataccataaaattaataatgtagcaatattcaacctgaaaaataaggataaaattgccttacatttgcagcccccaaaatttttatgtcaaaatataagcttccatca

SEQ ID NO: 45963 - DNA, 522 bp, Homo sapiens
atgagcagagcccaggttcagctgggcaccttcaggtttagagacctcagctgctggggctgaaaacagaggccactggaacaagcctggaaagaaccaggactgagcttgtgatggcccagaggccttcagctccctctgctccttttcttggagcagctgaggctctgaggggtgggcagcgcagacccacggtcgtcgtgctcagccccaacttccctgcagatgcctttccctgacatacaaagctccaaccccagccaggcttttcatgcccttgtgtgtcccgttggcctgcagaccacagcagggctyggccccagtttccggaccatctgcccacatggccaaggctggtcctggatcctgaaacccacagctgccagctcccaccctgtgtccaagccgcccttgcagcacttgagcccagccagccttccctggccctgtctgctccctggaagcactggccaccctgaatcgcctgccagggcccagctgtccttctgcccagcagccccc

SEQ ID NO: 45964 - DNA, 524 bp, Homo sapiens
tgcctgcagcaatcagagaagccatcaaggagaaggtaatatttaatctgagatttgaaggacattaataattgaatgatcaatttttgatgtggactcatgtaacagaaaacaaaaaccaaaagaataaggcatcagggagttatataatattggcatttgtataattttatctttactattatttctatactagggtataatttattaccatgggcaaatatttaatccaccattaattcattttaggtacatttattgattagtctmctatgtgcaagtactatgttttggataagagatattaagctatgtaaatttagaactgttaagaaaagcccaattgaattctggatcagaattatgatccagaaatatgacagcttaatatacaattgattaagcaaggagaaaccaatgttgtggatactaatttggagaaataattatgtagtcaaaaataagataaactaaaacaaagaagaagaaacaattaaaatagagagtacttggtgaaggaaatg

SEQ ID NO: 45965 - DNA, 1712 bp, Homo sapiens
ttgcagcaaagaaaaactttaatcaatgcaagggcaccaaacaaggaaatgggaggattctcaagccccaaatctgttctgtgaaggggttctgggcaagggactttaaggggatcatggagggtgaggggctagaaaatttgggttgtcaattggtcagggtaagggggatgaaatcaccgggatgtgggatgtggaacctgcattatttcctgagtcagctttttgctgggctctttagaccagctgatgtgtgtatgtgtgtgtgtgtgtgtgtgtatgtatatttgttttttgtttttgagacatggtcttgctctgttgcccaactggatttcagtagcgtgacctcactgcagtagcgtgacctcagctcactgcaacttctgcctcccaggctcaagtggtcctcccacctcagatctcctgagcagctggtactacagacctgtgccatgatgcctgacctaatttctttaattttttgtgaaaatgtggttttgccttgttgacgagtatgttgataggttttttggtatgccgaacctaaaggagaaactcatgcagaaagattatagtctcacaatgtcttagattttatctgtagaaaagaaaaggaccaaaaggtcttgtgacaagggctacattatcctagggtggtagtaatccatgaccagctacaaagacgtaggacaaagggaaagctggcctaatgattactgctgcttgtcctgaaagcgtagatgaattttccccccttaatcaattttatgtaattttcttagggacagtttcagttcctcccaggcttgatcccttcttaatcttgaggtgtaacagctaatatggtgggaaacaggcaatgacgactctagcttctttttgctgataaggggcacagtcagagaatgagtcgggattagaggaatgaaaccgtattgtaacaacctgcaagtcgttacacccagctgaaggtgctgcatgaacatgttagtacttcagtctatggttttattgtaatatttaattgaatagcagcctatgatgtaaactgtaagccctataaacagaattgtgagcttgaactttaagagcccttggaaaatggactggaaaacgtggagtatcgaggggaaaagctcaaaaaactagtcagacttagggtctgtggtatagacatatggtctccagcgagactgctgaaatattttctttagcttggtttttattttaccagaagcattgatataagtataacaggtggtattgatcactgtacagactcccctcagtaaagccaagagaaaatcaagtgtagctccattgttaagaactatctgggtaagtaaatgtaaagagttttctcagccttaatgttcttagcagcctcttttgcaattatttctaaagttgccggtaagtttctgatcatggcccagttagtgtatacttcatagctaggaattgtgatgcccaagaaggccctgtcaccggatatattgatatatgcctggcagtggcttttggagtccgtgggaaaatgggcagaatctttagtcattaggatggactgaccagtgtcccaataagtaagagccctcaatatacaggttattgagacaccagtgagcttgtcctaacagaggakgttctgatcctgtgtcacaaataaacatttgccaaggggacacacaagtgaagccctcaaagat

SEQ ID NO: 45966 - DNA, 614 bp, Homo sapiens
tcgaagtaaatcttttttggattttttgccttaaaaaagtttattttagtaacaatccatagtacatcacacagaactgttatgctcagttggtgcttattttttattgtgtagagttagcatattagtgtgtaataagaatttatctcttcctagagtaatcctgaaagatgagttataattcaagctcctatctttatgtggaatctgaagtgcattctctattaactagggtattccctgtcacctttgtctttaagccaaaacattagacctactactgttgaatcacagcttgacttcagagtctcttacactgtcatttcctctgtttggaaagtgtaagtgaagggtccatctaaattctgaatagaattttttttttttttttttttttgagacagttgcgctttgtggcccargttggagtgcagtggcatgattctggctcactgcaacttctgcctcccggcttcaagtgattctcatgccttagcctcctgagtagcttggattacaggtgtgcgccactacacccagcaatgtttgtatttttagtagagatggggttttgccatgttggcggccaggctggtcttgaactcctggcctca

SEQ ID NO: 45967 - DNA, 1103 bp, Homo sapiens
ttcatagatactttatttaaaaagtacactaattgaagttttacaccattttatgattcatcaaacacagcaactgaatactggcgtatagcaacattwcagatgatgtaagtgtaagataaaactcataacacattttaaaaagggtaaaaggaaggaaaggaaaaaggatacaaggctgtagaaagattttaaaaacaaacgtcgtatgtctgaacctttgcctggagtttcatattttgtgaaaagcagtttgtaagtagaggactcgtaagtgcacctagtacactgcaatggcacagacacggcagatagtcaataaaatgatctttaacttctgatctaggttatttttgttgttgttcatgtattaacctagtgaaactcagccaatagatggagtggcattgacctgtacaacttccaaaatcccatccaaccttagtgtcctctgaagttctccataacttattgtctgttccaaccaacatttagcataagctacagcttatattgttaataattcttctatgtttatgtgctgatttgcaaataaatgggcctatatagtctctatctagtgttggattgggatcaaaagtttcatgaaatcattgtttttagtatatgtacagatggataattgtataaataagtacagatgtgtataaatgtgtgagtatacatacatatattttctagctcctctaacaaaagggcctagaaacaacatcatcccagtaacaatgagaacaccattctccaattaaaggaaccaaggctccttggggacatatttgatatcaggattgggcagggaaaatacaagattagtttgaaatattttgtcatgttaggaagtaaggaaatgctcacaaaatggggaaaatgtgaaagggaaacagatccactttgaataaacttccatagccaaatttgagaaaattggggcaataaaatagataacaatagtaatatattacaatctacagaagaaaattttcaattaatccaggccgagtgcagttgctcatgcctgtattcccagccctttaggaggcagaggcgggcagatcacttgaggtcaggagttcgagaccagc

SEQ ID NO: 45968 - DNA, 1103 bp, Homo sapiens
ttcatagatactttatttaaaaagtacactaattgaagttttacaccattttatgattcatcaaacacagcaactgaatactggcgtatagcaacattacagatgatgtwagtgtaagataaaactcataacacattttaaaaagggtaaaaggaaggaaaggaaaaaggatacaaggctgtagaaagattttaaaaacaaacgtcgtatgtctgaacctttgcctggagtttcatattttgtgaaaagcagtttgtaagtagaggactcgtaagtgcacctagtacactgcaatggcacagacacggcagatagtcaataaaatgatctttaacttctgatctaggttatttttgttgttgttcatgtattaacctagtgaaactcagccaatagatggagtggcattgacctgtacaacttccaaaatcccatccaaccttagtgtcctctgaagttctccataacttattgtctgttccaaccaacatttagcataagctacagcttatattgttaataattcttctatgtttatgtgctgatttgcaaataaatgggcctatatagtctctatctagtgttggattgggatcaaaagtttcatgaaatcattgtttttagtatatgtacagatggataattgtataaataagtacagatgtgtataaatgtgtgagtatacatacatatattttctagctcctctaacaaaagggcctagaaacaacatcatcccagtaacaatgagaacaccattctccaattaaaggaaccaaggctccttggggacatatttgatatcaggattgggcagggaaaatacaagattagtttgaaatattttgtcatgttaggaagtaaggaaatgctcacaaaatggggaaaatgtgaaagggaaacagatccactttgaataaacttccatagccaaatttgagaaaattggggcaataaaatagataacaatagtaatatattacaatctacagaagaaaattttcaattaatccaggccgagtgcagttgctcatgcctgtattcccagccctttaggaggcagaggcgggcagatcacttgaggtcaggagttcgagaccagc

SEQ ID NO: 45969 - DNA, 1103 bp, Homo sapiens
ttcatagatactttatttaaaaagtacactaattgaagttttacaccattttatgattcatcaaacacagcaactgaatactggcgtatagcaacattacagatgatgtaagtstaagataaaactcataacacattttaaaaagggtaaaaggaaggaaaggaaaaaggatacaaggctgtagaaagattttaaaaacaaacgtcgtatgtctgaacctttgcctggagtttcatattttgtgaaaagcagtttgtaagtagaggactcgtaagtgcacctagtacactgcaatggcacagacacggcagatagtcaataaaatgatctttaacttctgatctaggttatttttgttgttgttcatgtattaacctagtgaaactcagccaatagatggagtggcattgacctgtacaacttccaaaatcccatccaaccttagtgtcctctgaagttctccataacttattgtctgttccaaccaacatttagcataagctacagcttatattgttaataattcttctatgtttatgtgctgatttgcaaataaatgggcctatatagtctctatctagtgttggattgggatcaaaagtttcatgaaatcattgtttttagtatatgtacagatggataattgtataaataagtacagatgtgtataaatgtgtgagtatacatacatatattttctagctcctctaacaaaagggcctagaaacaacatcatcccagtaacaatgagaacaccattctccaattaaaggaaccaaggctccttggggacatatttgatatcaggattgggcagggaaaatacaagattagtttgaaatattttgtcatgttaggaagtaaggaaatgctcacaaaatggggaaaatgtgaaagggaaacagatccactttgaataaacttccatagccaaatttgagaaaattggggcaataaaatagataacaatagtaatatattacaatctacagaagaaaattttcaattaatccaggccgagtgcagttgctcatgcctgtattcccagccctttaggaggcagaggcgggcagatcacttgaggtcaggagttcgagaccagc

SEQ ID NO: 45970 - DNA, 1103 bp, Homo sapiens
ttcatagatactttatttaaaaagtacactaattgaagttttacaccattttatgattcatcaaacacagcaactgaatactggcgtatagcaacattacagatgatgtaagtgtaagataaaactcataacacattttaaaaagggtaaaaggaaggaaaggaaaaaggatacaaggctgtagaaagattttaaaaacaaacgtcgtatgtctgaacctttgcctggagtttcatattttgtgaaaagcagtttgtaagtagaggactcgtaagtgcacctagtacactgcaatggcacagacacggcagatagtcaataaaatgatctttaacttctgatctaggttatttttgttgttgttcatgtattaacctagtgaaactcagccaatagatggagtggcattgacctgtacaacttccaaaatcccatccaaccttagtgtcctctgaagttctccataacttattgtctgttccwaccaacatttagcataagctacagcttatattgttaataattcttctatgtttatgtgctgatttgcaaataaatgggcctatatagtctctatctagtgttggattgggatcaaaagtttcatgaaatcattgtttttagtatatgtacagatggataattgtataaataagtacagatgtgtataaatgtgtgagtatacatacatatattttctagctcctctaacaaaagggcctagaaacaacatcatcccagtaacaatgagaacaccattctccaattaaaggaaccaaggctccttggggacatatttgatatcaggattgggcagggaaaatacaagattagtttgaaatattttgtcatgttaggaagtaaggaaatgctcacaaaatggggaaaatgtgaaagggaaacagatccactttgaataaacttccatagccaaatttgagaaaattggggcaataaaatagataacaatagtaatatattacaatctacagaagaaaattttcaattaatccaggccgagtgcagttgctcatgcctgtattcccagccctttaggaggcagaggcgggcagatcacttgaggtcaggagttcgagaccagc

SEQ ID NO: 45971 - DNA, 1103 bp, Homo sapiens
ttcatagatactttatttaaaaagtacactaattgaagttttacaccattttatgattcatcaaacacagcaactgaatactggcgtatagcaacattacagatgatgtaagtgtaagataaaactcataacacattttaaaaagggtaaaaggaaggaaaggaaaaaggatacaaggctgtagaaagattttaaaaacaaacgtcgtatgtctgaacctttgcctggagtttcatattttgtgaaaagcagtttgtaagtagaggactcgtaagtgcacctagtacactgcaatggcacagacacggcagatagtcaataaaatgatctttaacttctgatctaggttatttttgttgttgttcatgtattaacctagtgaaactcagccaatagatggagtggcattgacctgtacaacttccaaaatcccatccaaccttagtgtcctctgaagttctccataacttattgtctgttccaaccaacatttagcataagctacagcttatattgttaataattcttctatgtttatgtgctgayttgcaaataaatgggcctatatagtctctatctagtgttggattgggatcaaaagtttcatgaaatcattgtttttagtatatgtacagatggataattgtataaataagtacagatgtgtataaatgtgtgagtatacatacatatattttctagctcctctaacaaaagggcctagaaacaacatcatcccagtaacaatgagaacaccattctccaattaaaggaaccaaggctccttggggacatatttgatatcaggattgggcagggaaaatacaagattagtttgaaatattttgtcatgttaggaagtaaggaaatgctcacaaaatggggaaaatgtgaaagggaaacagatccactttgaataaacttccatagccaaatttgagaaaattggggcaataaaatagataacaatagtaatatattacaatctacagaagaaaattttcaattaatccaggccgagtgcagttgctcatgcctgtattcccagccctttaggaggcagaggcgggcagatcacttgaggtcaggagttcgagaccagc

SEQ ID NO: 45972 - DNA, 597 bp, Homo sapiens
ggtgacagaataataattccataataattccttttatgggtatactttattttgcttatcctttcagcaatcgatggatatatacgtcatttctactttttgattaataatgttgtaaaaaatattcctggaaaaatcctagggaaaacaaaggataaccccaaaaggtaaaataaataaataagtaaataaggtggcaaaccaaacaaatattttggtttgggaggtaaaggttaattatttaatctctaccacaagttgatcctatttcacagggctaggatatatatatatatataaaatatatatatataaaatatatwtatatacacacacatatacatacatacacatacatacatacatatgcaataaaaaagtacaaaggcaaaactatatacaatatatgcacaaagagtttcatagaaatagaaactaaacatactaaaaaccttccccaaaattttttgaggaaatattaaagtcaaagtagaaagcaaagaaagtaagtactgggtagagacaactttcaataaacaatagatgaaatgcatgacaccatgcaattaaagctgattgcagcactgttcagaatag

SEQ ID NO: 45973 - DNA, 582 bp, Homo sapiens
ggtttcaccatgttgggcaggctggtttcaaactcctgacctcaagtgatctgcccgcctcagcctcccaaagttctgggattacaggcttgagcctctatgcccggccacctaaggtctgtaatttttaaatgattgtgttcattgagtcatattttactccactttctaatattttagtatctttttttttttttcactccaggaactagaagatgtgaacaaatggggtcttcatgttttcagaatagcagagttgtctggtaaccggcccttgactgttatcatgcacaccatttttcaggtaaggtggttgagttstattacatttattttatttaggaacttaatgtccagtctgtagcttatgcatacattttgtcttttttaatattccccaccttttgcttatttttatacttttatccttatttgctcctttgccaagggacaagtaaagatacagaaaggtggagtgtggataaaccacaaataacatcaattttgttattttttttgcatttaagaaaaagatgtgatatagccaaattgaagcaatttattaaaataataatttagaca

SEQ ID NO: 45974 - DNA, 1762 bp, Homo sapiens
taccttatgcaggggaggactcaggcctcttcagctcatgtgtggtggcctggtattcaatttttgtaaagtggaaaacctgcatacaggacccctctttttgttgagagctttcctttcgcttaataaattccaccctcctcacctttcgatatgtctacacgcctaatttttcctggttgtgagacaagaacccagatttggctgaactaaggagcaaaaaatcctgcatcattgtggtagcccatatggggacatgaggaagggtgagtaaaatgcagacccaaaaatctcgttcccttttgttactgagctttctcatcctcagatattttctgagggcagggcaaactggcccccctgcaasgggttgggaatgtcagcctcagttcaacccagtcttttctatggattttcctttttttgcaggtgaactgtaatagcacctatcttttctcttacaatatttgaggtgttccaaccccaccccaatggccacaggtgtacgcacaggatggatgggcaaacagctgctccctgcaccctcatcttccctccctgctagggtgcatgaccgtgtctgctgcctgtgcacatggcatccaatggccatgcaggacaggactgagccatagccactgcccggccccagggcggtcgggcggccaggccccacatggctggctggtcagtgtcccccaccatatgtccacagagtcttctcctcccccagccgaggggtccagcttggtctgacatcaattaaaagtttctctgcctattggagaaacccatttgcataagaataagagattcttcccccaggcatcttctgtgccccatacttaagctgtttttttcttttctctaccttgtcagtagttaacacagccctgcatttaatctgtttttttgtttgtttgtttgttttcttttctccagcaggtcaaaagttggtgggttggtgtgaaagtagttgtggtttttgccattatttacaatggtggggaccatgattgcttttgcaccaacttaataacacatctctgtgagtagtgggagcttctatagctatgccagagcgtttttcctcttggaaggcatcttactagaccaggaccccaattacaggacaccgtttttccctcccttgtttgagaaggactcaattccacattttcaccttagcattcagcttaggataaggaggcaacagcaagctgtcaagaggcacatggggcttgatgagtctgtgcttccccactgaggcagttcttttttcccaactcaactccaagcttcaggttgaagccctaggaaagaaaaatggatctgagcgatccacaggcagatgacaacagaatttaaaagacacagcacatgtgagcatgattaattcctgtctattaagccaggcctcccatttcatgaataaaggtcatgctagtatccatggcataaatgaggtccagggaatttgaaggccaccaatggcagagagaaaggccgtgtgtgaggaagtgtggatattcccactcccagaccccctattagcatgggtgaaagccgcattaacatccatgggcggcaccctgtcaaggtcaccgggacttggggatataaggacagaagaaggaaagaggataatttttccttctctctctcacatacccagggtatttactaggaagagaaaggaaacagatgcctggctcccctctttctagatgagtagccattcatcttcagtctgtccccattt

SEQ ID NO: 45975 - DNA, 1762 bp, Homo sapiens
taccttatgcaggggaggactcaggcctcttcagctcatgtgtggtggcctggtattcaatttttgtaaagtggaaaacctgcatacaggacccctctttttgttgagagctttcctttcgcttaataaattccaccctcctcacctttcgatatgtctacacgcctaatttttcctggttgtgagacaagaacccagatttggctgaactaaggagcaaaaaatcctgcatcattgtggtagcccatatggggacatgaggaagggtgagtaaaatgcagacccaaaaatctcgttcccttttgttactgagctttctcatcctcagatattttctgagggcagggcaaactggcccccctgcaacgggttgggaatgtcagcctcagttcaacccagtcttttctatggattttcctttttttgcaggtgaactgtaatagcacctatcttttctcttacaatatttgaggtgttccaaccccaccccaatggccacaggtgtacgcacaggatggatgggcaaacagctgctccctgcaccctcatcttccctccctgctagggtgcatgaccgtgtctgctgcctgtgcacatggcatccaatggccatgcaggacaggactgagccatagccactgcccggccccagggcggtcgggcggccaggccccacatggctggctggtcagtgtcccccaccatatgtccacagagtcttctcctcccccagccgaggggtccagcttggtctgacatcaattaaaagtttctctgcctattggagaaacccatttgcataagaataagagattcttcccccaggcatcttctgtgccccatacttaagctgtttttttcttttctctaccttgtcagtagttaacacagccctgcatttaatctgtttttttgtttgtttgtttgttttcttttctccagcaggtcaaaagttggtgggttggtgtgaaagtagttgtggtttttgccattatttacaatggtggggaccatgattgcttttgcaccaacttaataacacatctctgtgagtagtgggagcttctatagctatgccagagcgtttttcctcttggaaggcatcttactagaccaggaccccaattacaggacaccgtttttccctcccttgtttgagaaggactcaattccacattttcaccttagcattcagcttaggataaggaggcaacagcaagctgtcaagaggcacatggggcttgatgagtctgtgcttccccactgaggcagttcttttttcccaactcaactccaagcttcaggttgaagccctaggaaagaaaaatggatctgagcgatccacaggcagatgacaacagaatttaaaagacacagcacatgtgagcatgattaattcctgtctattaagccaggcctcccatttcatgaataaaggtcatgctagtatccatggcataaatgaggtccagggaatttgaaggccaccaatggcagagagaaaggccgtgtgtgaggaagtgtggatattcccactcccagaccccctattagcatgggtgaaagccrcattaacatccatgggcggcaccctgtcaaggtcaccgggacttggggatataaggacagaagaaggaaagaggataatttttccttctctctctcacatacccagggtatttactaggaagagaaaggaaacagatgcctggctcccctctttctagatgagtagccattcatcttcagtctgtccccattt

SEQ ID NO: 45976 - DNA, 614 bp, Homo sapiens
ttgaccccaatacaggggctggatatgaacaggcaacagctgggtttctgagtcagaaagacttggttaattgctaattgcttaggtgagtaatttaattttgttgagtcagattcttcagctacaaaatgcagatgacagtacttattcctccaggttgtggggaaaatggagattctaagcacgatgtccatttcacagaaaggtaccaatttggtgacttattttcctttctaccttcagaagtggctatccytgccacccaaacagacccttgactctcaagtggacggggtcccatttgcacagggggagaccttacagcctacgttgagtctatacttaccacttagtgagcattgtgtccgctcaggggcctctgtgggcatccgtctcctctgcagcatctttcctccccactgctgggtctgcacatgacctcctccttgggttaggcctctgatcagtgatgaccttggtatggtggtgatggtcagtcttggcatcaaatgagccagtttatatcatcagctattcaataaaataccaatctaggtgtcaccgtgaaagtattttgtgacattgttatgtacgtgttgttacaaatgtgcatg

SEQ ID NO: 45977 - DNA, 583 bp, Homo sapiens
aagaagtgcgatcctcacaaagttaggtggaccaaagcattctggaaagcagctggtaaagagcttacagtggataattcatttgaatttgaaaaccgtagaaatgaacctatcaaataccagtgagagctatggaataaaactactgatgcaatgaagagaattgaagagatcaaacagaaacacgaagcttaatgaacagattgaagaaaaataaagagctacagaaagttcaggatatcaaagaagtcaagcaaaacatccatcttatccgagcccctcttgcaggcaaagggaagcagttggaagagaaaatggcacagcagctacaagaggatgtggacatggaagatgcttcttaaaaatctctgtaaccatttcttttatgaacatttgaaaatgccctttggagacttgaaactgctaaattattagyttattttttacataaggccacttaaatgaaaaatgattaaaatatatttttcctaccttgccatctaatggcactaggcagcatttgtataataactaatggcaaaaattcatggctagtgatgtataaaataaaatattctttgca

SEQ ID NO: 45978 - DNA, 527 bp, Homo sapiens
cccgagtagctgggactacagccgtgcgccaccacgcccagctaatttttgtatttttagtagagatggggttttgctgtgttggccaggttggtctcgaactcctaacctcaggtgatctgcctgcctgccttggcctcccaaagtgctgggattacaggtgtgagacaccgtgcccggcctcaaatacatatattttaaatgaactctcagcagaattcagaatgctcaatcaagtccttcacttcgtactctagattgctggtaaatacggcctaaaaaaaaaaaaatcactgctaggtcatacattgaaaagagaaaagtrtgcaaaacattaaacaaaagaaaatagtaataaaaatctgacattttttataggaataacattttgaactgaaatctcttttgtaggtagaaacctaatgagaagtttaaacaataaaaaattgcaacttattaaattttgcacatatgtggaagcagaagtttagataaggaaatacttttcccaacagtattcattttct

SEQ ID NO: 45979 - DNA, 595 bp, Homo sapiens
  misc_feature (1)...(595): n = A,T,C or G
agggtccatgggagaaacatggttntcctggggttgcaccttcactcactgctttcctgggtgggggacattcccgtggctccatgttgctcttgggtgggtcatcatcctatcatgcttttcttcattctccatagctcatttccttgattagtcccaacatgcgtacctggatgcttcagttgaagatgctatattaactcacctttttcaatgcttcagttgaaggtgctgtattaaccacctgtccatgagagccacagaccgtagctgcttctagtcagccatcttggccccacctctacaatgacattttcattttataacctttggaggtttcataactagggaaagcgtgctggtactgataattagtaaccttttacagtacttagtaaaaacattttaatgtcttttatttattttcttttttttttttttaacggagtctcgctctgtcacccaggctggaagtgcagtggtgcgatctyggctcactgcagctccacctcccaggttcacaccattctcctgcctcagcctcccgagtagctgggactacaggcgcccaccaccacgcccagctaatatttgg

SEQ ID NO: 45980 - DNA, 1701 bp, Homo sapiens
tcataaacactgtataatgtaaggtattattaccattcagtgccagcaccacgcctgattattattaaggctaccacactgcaactaactatgtgcaaagtcatttacaaatttctctcaatttacgtgtatccagtctttgcaagatatccccacaccaatcccccagaaaagtgaaagtgaagagattttattgtatttccatcttttatactgtacttacgggcgccatatgcaagacacatgtgaaaggcatagctatagcacaccccacatgggcattgcaagccatttacattaggttttcccattactgtagctgcaggcacataaaatgtttattactgttatattgccattgcttaccttctacatatacctgccrctgagcatctggtcttctgctgaaaagaataggaacatgttgatgttttccctggaactccagtttttttactttaatagtccctggttgtccttggccttctaccctagccagttccagagtctagacagagtaaccttggtattagctgaacaaaaattcgtggcaaagactgccctttgcttaaacaatcaaacaaaatcgggcctttccaatacctaggtaatcactttccaaagggaagtccacgaagattccccagtttactaaggagatggtaattgcaccccatatcagtccatcgtctcccaccctgagctactatacagatcatcagccccattgctgatgccctcactgttggtcatttgcctgatgcgcaacctctcagttacctaatcaatgtcttcagagaccttaaactgacatctctgtgcattaggttaaataacaaaataaaagttaaacacggtaacgggcgatcatatatccagcatattaaaaagctgcctggacttagactgagctgggtgtgaggactggctgtcacttatcagctttggtcacatcatctgacctcttggtccttttctacaaattgcagacagttcatgtatggttaagaggttgggccctgaagtcaatcagacctgggtgtcaacctcaactctgtcatttatcagctgtgtgaccttgggcaacttacaaatccattttatgccttcaattattcatctacaaaagagaaacctcctacacagagtgactgtgaggatcaagcatgatgttcataaagcacccagcagagtgcccagcccacagtaggtgctccatgcaaggtactgatcattatcgtaaagtgagaaagccttgagaagacaccggtcatctactaggattgagaaattagctgccaatgagtggtactgaccactggtaatttcagaggtgaggggcaagagtgatctctgtggcaagagatacagtgagctggcttgtgaagaaggcctagagttggaaagatgcagggtagagaggaatggcttaatcaagggcaaggaagcaggaatgtgcatggggtaatttatgaatagtcactgcagcatctgttggatcaaaagggtcacatggggtggggcaaggaagagaaaaatgggtagcaggaaatggggttgggaaggaatactgggaaaaattgtgaaagcccttccagaataatgagtttgcctaatcccaaggcaatggaatatagctgaatgtttttgagtagtaagaaggcatgattaaagaaagattatcctcataatcatgggaag

SEQ ID NO: 45981 - DNA, 2268 bp, Homo sapiens
tgtggtcccagcgtgggttctggatttcctttaccaaatgctgcagcacagatgacaaagtgcttttacgctccattataaaagaagaaatggaaatgaagtcagtaggtatcagatcagaagtcagtgggtatctctgtccatgaagatgtccacacagacattctctacctgtggacctgaaggagaacaggctgagtcccagggtagagtcgatgcgaacaagaggcccaggttggatctgtaaggtgatccatggccctgagcatcatggcagactaccctggagctaaaaccaggctgccctgaaagagttcgtgtagttgggaagtcaaaaggaaatttttctgcttttccaagagtggcaaaagtccaagataaaagaaagagtgttgagagtttatttctgtagataaaagggggagaaatggctaataaagatcagactgagtaggatttcactacatatgttaaaatatgccaactaacaatctcaaaaagtgttctgatcatttctacctttagccagtacgtcaaataagttagagtattatgaaacaacaaaaactttgttcaaataagcttcactgttctccactgtgtaactgtggaatataaatttgtatttgtatgttgtttttcttgcctatttttggtggattgagtgaaagttttagctttaaatagtggcagagcatgaaggactatattaggtatgaaaaatgaagaatgctgggaacatatgtggggggtaagaactagaagtgaggtcatctgagttggcattttgctgaacaaaagggcaatagacaccacatcccattttgttgtacagttctgaagtcttaaaccccttatttctaggatggacttgttttcattctttctgatgacaattgtgaaccagatggttaaaaacccagcactgagaaacagtcttatttagatattatgtttcttaaattcaggtacatcttgagggaatattgaagcttctagctgcaactgttatttatacatcttcttgtcaatttaaagcataaatttggtatatttaagagcattaaccctaagggccactgggatgagttccacgagatgaaagaaaaaaataaacctcaagtacatgtcagtaacttttcctgttgctgctggtagtcacctggaaactcaccatagtgtctctaccatatcgttctgtgaccctccccccacccagcacagcctccaaagcctgcctagagactcaagttcatgccagcctgactcacgcacagactcatgtggacactttaaaagtgaggcagctggagcccaatcttccttgattcatgaaaccactgttcatttagacattgatttaattatatttttcaacaattgcattaaagcccttagacttattccatataaatttttgaaaagccagtctcttcaacctaatcatgaaatttagtttagccaaatttaattcagcctgtcaagatcatctttctacttattacctattcccctctcgtgtgtatgccttctgcagaatcaataarcacaccactttgtttttccctaaaataaaaatgttgcagacacagtcggaacagggtactcctcaaattgagtaccttttattcacctatgattctgcttaacacttgtacatttagtacatagagaaatgtaaagaattttttcaaatgtctgaataacaatggagcagcagtatataaatattaataatacatttctgaataatacatttccattaaaatggaagatatctgtctttattgtctacttttattagatcccaaagaataatgtaataaactatccactgttcaacacaaatatcaaaagtttccaacttttaatgcattcaaaatttcttcagatgatatttttcctccattggcttattattttctcgttcaaattttctaaaatgaatcaaactgccttaagatgtacaatttaagatacattctggccaggcatggaggctcacacccataatcccagcactttgggagaccaaggcgggcagattacctgaggtcaagagttcgagaccagtgtggccaacatggtgaaaccccatttctactaaaaatactacaattagcctggcatgatggcacacaccggtaaccccagctactctgcaggatgaggcaggagaattgctcgaacctgggaggtggaggctgcggtgagccgagattgcaccactgcactccaccctggccaacagagcgagactctgtctca

SEQ ID NO: 45982 - DNA, 453 bp, Homo sapiens
acatgggtatccatgtgccacggtggttttctgcacctctcaacccatcacctaggttttcagccatgcatgcattagctgtttgtgctgatgttctccctccccttgcccctgcaccgacaggccccggtgtgtgatgttcccccacatgtgtccatgtgttctcattgggaaaccctattttgttaatagtaaataaggttcttggatgattrtgatttcatcttttggaatttctggtgaaggaaatgcctgtagtggtgaggcagttgagcaagaggtttagcagagagtgtgcccaggcttcgtaacatgacttctcccttagtaatctaattcttatttcaggtcttgtccagaatgccgtgtgatatcagagtttgtaattccaagtgtgtattgggtggaagatcagaataaaaagaacgagttgattgaagctttcaaacaggg

SEQ ID NO: 45983 - DNA, 588 bp, Homo sapiens
ttttaaaacagcaattttctgtgcagatattacacctgttcttgtatttttgtgattttactttttggaaagtcagaaacttgaaagctatgaattttcctaaacttaccttctccctctgttggatgtaagtaagctatcttcttacttgcttgctttgtttttcctttgtgtagctctttaaagagtgtattcattctttttgtaagtgatgtttstagaagtagcattggtgggtcgaagtgtgtatacattttacatttttgattgctaagctgcagaaaagctgtattggtatgtaagtactcgtttccttactatgctcgtcatttctagtgtctgctcttcctttccttcttcaaatgggtttggtttaattctagttgctactgttccatcagaggaattgcagagaactggtcttcaaaatagtgcagtatatactttaggtgaagatacttctaaaaacctttgtattttgaggtaattctagagtcccaagaatttgcaaaaagagtacattgtcagcaatatttttcccaatggtgacatcttaatataactgtagcacagtagcagaatcaggaa

SEQ ID NO: 45984 - DNA, 588 bp, Homo sapiens
ttttaaaacagcaattttctgtgcagatattacacctgttcttgtatttttgtgattttactttttggaaagtcagaaacttgaaagctatgaattttcctaaacttaccttctccctctgttggatgtaagtaagctatcttcttacttgcttgctttgtttttcctttgtgtagctctttaaagagtgtattcattctttttgtaagtgatgtttgtagaagtagcattggtgggtcgaagtgtgtatacattttacatttttgattgctaagctgcagaaaagctgtattggtatgtaagtactcgtttccttactatgctcgtcatttctagtgtctgctcttcctttccttcttcaaatgggtttggtttaattctagttgctactgttccatcagaggaattgcagagaactggtcttcaaaayagtgcagtatatactttaggtgaagatacttctaaaaacctttgtattttgaggtaattctagagtcccaagaatttgcaaaaagagtacattgtcagcaatatttttcccaatggtgacatcttaatataactgtagcacagtagcagaatcaggaa

SEQ ID NO: 45985 - DNA, 1374 bp, Homo sapiens
gaatccagagaagatgatgacattaatgacataaaactgacgttttctgaagtagccatgcgtaaaactccaaggaaacaaattagaaaaaaaaaagtgtaggcctttgaattattccaaagcctcaaacaaaatattgaaaagcaactgttagcacagcagagccatagctaggctgaactctcactaaagtaacttggtgacgtgtgcaagtgacggcaagattctaatgcactgcaaatgccggctgtgctgggagagcgtcattcaatccagcgcgctccaggctcytggcagaaaaggacttttataggatgtaagaaatgctgtaaatccaataccatggtctggacggggaaagggagagtgaggcaatgcaaaagtagaattcctagagccattcccgaaacacgctgggtttgggggagagaggtgtctcgagattgtttcaatgagctgttgggaaacatttcagaagcagggatgtgaagctgctctgcttctcattctggcaatgtgtggtcatctgtttgactcagaggaccgcgggaaggcccagttattctgaacacgcattttcctaactacgggttggtaaagacttcttcagtgtacacaccctgcgagatgctatgggttatgtgccatccacgttttgttttgcgtattttccctgcttatttttcctacaatatctgaaattaatggttcacacaaattagagatttgaggggatgtatttcggggaagggatgaagggaccttctcagaggagtataacctggggtggggtgacgtcggggtcctatcagtcaggggcagcaggcaaggctgacctcggaggcaggggtagggtgcaggttgggggaagagcagcaaagattaaattccacagcccacatcactcacaaaatcagagaaacagtgaactattcttctgctaggttttcctactactgtgatatttaacaaaagaggatcctactgtgaaaatatagctccagcatcaatggagtagatccgatacacttatatatgctcatggaatttgcttgttctcttcccttgtgttgaattttatagcataataaataccgagcctcagcagctttcatgtgccttgcaggagacagtggcagcaggggcaaatgattcttcctggatggtgactttgtgagtatttttggcactatatcctgcgagataggcagtggaaagggctattgatttaatttgcagacaaagagactgagctgatgcaaggcaagagatttgctttggcaaatggtgagtcacactgcaagaaaaagccatggtccctagcatcacggggccaagctgcatggaaatggaatcaagaaagagtatctttca

SEQ ID NO: 45986 - DNA, 1374 bp, Homo sapiens
gaatccagagaagatgatgacattaatgacataaaactgacgttttctgaagtagccatgcgtaaaactccaaggaaacaaattagaaaaaaaaaagtgtaggcctttgaattattccaaagcctcaaacaaaatattgaaaagcaactgttagcacagcagagccatagctaggctgaactctcactaaagtaacttggtgacgtgtgcaagtgacggcaagattctaatgcactgcaaatgccggctgtgctgggagagcgtcattcaatccagcgcgctccaggctcctggcagaaaaggacttttataggatgtaagaaatgctgtaaatccaataccatggtctggacggggaaagggagagtgaggcaatgcaaaagtagaattcctagagccattcccgaaacacgctgggtttgggggagagaggtgtctcgagattgtttcaatgagctgttgggaaacatttcagaagcagggatgtgaagctgctctgcttctcattctggcaatgtgtggtcatctgtttgactcagaggaccgcgggaaggcccagttattctgaacacgcattttcctaactacgggttggtaaagacttcttcagtgtacacaccctgcgagatgctatgggttatgtgccatccacgttttgttttgcgtattttccctgcttatttttcctacaatatctgaaattaatggttcacacaaattagagatttgaggggatgtatttcggggaagggatgaagggaccttctcagaggagtataacctggggtggggtgacgtcggggtcctatcagtcaggggcagcaggcaaggctgacctcggaggcaggggtagggtgcaggttgggggaagagcagcaaagattaaattccacagcccacatcactcacaaaatcagagaaacagtgaactattcttctgctaggttttcctactactgtratatttaacaaaagaggatcctactgtgaaaatatagctccagcatcaatggagtagatccgatacacttatatatgctcatggaatttgcttgttctcttcccttgtgttgaattttatagcataataaataccgagcctcagcagctttcatgtgccttgcaggagacagtggcagcaggggcaaatgattcttcctggatggtgactttgtgagtatttttggcactatatcctgcgagataggcagtggaaagggctattgatttaatttgcagacaaagagactgagctgatgcaaggcaagagatttgctttggcaaatggtgagtcacactgcaagaaaaagccatggtccctagcatcacggggccaagctgcatggaaatggaatcaagaaagagtatctttca

SEQ ID NO: 45987 - DNA, 1374 bp, Homo sapiens
gaatccagagaagatgatgacattaatgacataaaactgacgttttctgaagtagccatgcgtaaaactccaaggaaacaaattagaaaaaaaaaagtgtaggcctttgaattattccaaagcctcaaacaaaatattgaaaagcaactgttagcacagcagagccatagctaggctgaactctcactaaagtaacttggtgacgtgtgcaagtgacggcaagattctaatgcactgcaaatgccggctgtgctgggagagcgtcattcaatccagcgcgctccaggctcctggcagaaaaggacttttataggatgtaagaaatgctgtaaatccaataccatggtctggacggggaaagggagagtgaggcaatgcaaaagtagaattcctagagccattcccgaaacacgctgggtttgggggagagaggtgtctcgagattgtttcaatgagctgttgggaaacatttcagaagcagggatgtgaagctgctctgcttctcattctggcaatgtgtggtcatctgtttgactcagaggaccgcgggaaggcccagttattctgaacacgcattttcctaactacgggttggtaaagacttcttcagtgtacacaccctgcgagatgctatgggttatgtgccatccacgttttgttttgcgtattttccctgcttatttttcctacaatatctgaaattaatggttcacacaaattagagatttgaggggatgtatttcggggaagggatgaagggaccttctcagaggagtataacctggggtggggtgacgtcggggtcctatcagtcaggggcagcaggcaaggctgacctcggaggcaggggtagggtgcaggttgggggaagagcagcaaagattaaattccacagcccacatcactcacaaaatcagagaaacagtgaactattcttctgctaggttttcctactactgtgatatttaacaaaagaggatcctactgtgaaaatatagctccagcatcaatggagtagatccgatacacttatatatgctcatggaatttgcttgttctcttcccttgtgttgaattttatagcataataaataccgagcctcagcagctttcatgtgccttgcaggagacagtggcagcaggggcaaatgattcttcctggatggtgactttgtgagtatttttggcactatatcctgcgagataggcagtggaaaggrctattgatttaatttgcagacaaagagactgagctgatgcaaggcaagagatttgctttggcaaatggtgagtcacactgcaagaaaaagccatggtccctagcatcacggggccaagctgcatggaaatggaatcaagaaagagtatctttca

SEQ ID NO: 45988 - DNA, 1374 bp, Homo sapiens
gaatccagagaagatgatgacattaatgacataaaactgacgttttctgaagtagccatgcgtaaaactccaaggaaacaaattagaaaaaaaaaagtgtaggcctttgaattattccaaagcctcaaacaaaatattgaaaagcaactgttagcacagcagagccatagctaggctgaactctcactaaagtaacttggtgacgtgtgcaagtgacggcaagattctaatgcactgcaaatgccggctgtgctgggagagcgtcattcaatccagcgcgctccaggctcctggcagaaaaggacttttataggatgtaagaaatgctgtaaatccaataccatggtctggacggggaaagggagagtgaggcaatgcaaaagtagaattcctagagccattcccgaaacacgctgggtttgggggagagaggtgtctcgagattgtttcaatgagctgttgggaaacatttcagaagcagggatgtgaagctgctctgcttctcattctggcaatgtgtggtcatctgtttgactcagaggaccgcgggaaggcccagttattctgaacacgcattttcctaactacgggttggtaaagacttcttcagtgtacacaccctgcgagatgctatgggttatgtgccatccacgttttgttttgcgtattttccctgcttatttttcctacaatatctgaaattaatggttcacacaaattagagatttgaggggatgtatttcggggaagggatgaagggaccttctcagaggagtataacctggggtggggtgacgtcggggtcctatcagtcaggggcagcaggcaaggctgacctcggaggcaggggtagggtgcaggttgggggaagagcagcaaagattaaattccacagcccacatcactcacaaaatcagagaaacagtgaactattcttctgctaggttttcctactactgtgatatttaacaaaagaggatcctactgtgaaaatatagctccagcatcaatggagtagatccgatacacttatatatgctcatggaatttgcttgttctcttcccttgtgttgaattttatagcataataaataccgagcctcagcagctttcatgtgccttgcaggagacagtggcagcaggggcaaatgattcttcctggatggtgactttgtgagtatttttggcactatatcctgcgagataggcagtggaaagggctaytgatttaatttgcagacaaagagactgagctgatgcaaggcaagagatttgctttggcaaatggtgagtcacactgcaagaaaaagccatggtccctagcatcacggggccaagctgcatggaaatggaatcaagaaagagtatctttca

SEQ ID NO: 45989 - DNA, 587 bp, Homo sapiens
taggaagctgccctcgagctcagggccaggggtgaagctaccacatggttaccaggttatctgttgaagttgactttctgtggcatggagaaattgcccgaggtagagtcatgcccagcatttctcatgaagcacggctgcccagccaggtgactgtcaaagctatttgtgcaggctattgttccatagctgcgaaaggaaaccaacccacccctccaggtgacccttccagccccttctccattgggtataagaactaaaattggctgggcatggtggctcacagctgtaatcccagcactttgggtggctgaggcgggtggatcacctgaggtctggagttcagccgtgcccaacatggtgaaaccctgtctctaatttttgtaaaaatacaaaaattagccgggcgtggcagcacgtgcctgtaatcccaggtactcgggagactgaggcaggagagtcacttgaacccaggaggcagaggttgaagtgagctgagatcacaccattgcactccagcctgggtgacaagagcaaaattccatctcaaaaaawaaaataaaataaagaaagaaaaagaaaagaaa

SEQ ID NO: 45990 - DNA, 561 bp, Homo sapiens
tgaaggaatgaggcttctgggggaaaaggtcttgtgagagggctatgagtattgtgcatttggtaggtacgtgaattgtcagagaagagttctaaaaactatttttccttaaatgacaacattatttcctatcacaaatggtcttccagaacattggcagtctgccatcaagaggtggctagctctttctagcttttagccacacagcagccattctttgctcttagcagctccaacttctcyggtaaatttcctcacaaactgtggcagtgttaaagtttaacattacagtgtatgcgtctctgttcatctagagtgctatgatcagcttgggctacacctccttgcattccagtatacgaagtaccccaaggaagaaaaccaggggattagtaggagtctgtctgtgtgtttcccttctgtcagtgatcactttccagaactacctgttattcaaagtcagaaaaaaattgtgtcatatattttattcatttttatattgtggattgtgaaaataagaaccaagactgtgactgttggtacatagcaaaaggtctaata

SEQ ID NO: 45991 - DNA, 590 bp, Homo sapiens
ttaagtagctgggagtggtaactcactcctgtgatcccagcgatttgggaggctgaggcaggaggatcgcttgagtcctggaggcagaggttgcagtgagccgagatcatgccacagcacctagcctgggagaaagaataagaccctatctcaagaaaaaaggaaaggaaaaagacaaaagttattagggtatacaggtaacagtttttaaatgtcaagtgatttttgtgggcaaaaattcaataataaacatattgaatttttattaggaatgtaacaatgtctgtctatttcttgagaattacactttgattattgacctattactcagtaacaccattgtttcactttctattagcagttttttcagtatttaktttataatagatagctcataaatgcagaggcaatgctatatttagctgtacgctatgaatatgggtaaattcagttgttatcaatggcagattcaatctggaaattgcataacaatgtcctaaaatatatactgtttacatgtgcttcaattagaatgaagaaaaattgttgacttgtcattataaaagaaattactgggatataacacgtac

SEQ ID NO: 45992 - DNA, 567 bp, Homo sapiens
ttctccataggtaggttggaaggattgtatctgctgcattttggataaataagacaactgtatgcaccttatatcagtttattcttttgcattttccattaagtatttccagaaatgttgaaattttattaacataaagaagcaagactcagttagaaatgtcaaaactatttttattgaagtgataatcaattcctgttggcattgctaaaaacttccaaaaagtttattaattctacaaataataggttaagattatgtgacttgccaaaaaccacattattcttaagaatactacctaatcaaagaggtgcagatcccagctgctgtcttctacaagtacaccaaaaagaacagagaaactgttatttatagtcaaattgcaatttattagagctgttattttgtcaacacgttacttcagtggtttgtttgacattcttctagatggactctctctggtcctgtcaattttttcagtctttcgaaragcctgtcagtaaaaaatataaaaatcatagttgtctaatgaggtcttgccatatgcgtacatgcacatctatgata

SEQ ID NO: 45993 - DNA, 300 bp, Homo sapiens
gataagaaagtgaaaaaaaattagtagctaagatatcagtgagaagagaggctcagcgatgttaacttttcatttaattgtttgcccccaagtcaaggacagtgtaagaggcactctcaccatatggaggagataaaaatttgagtccatgacacacagaattggagtcatccacatcttcagtcgtgatccttggagggctttatcctagaaatgaaaataaatcctatgtacataaacyttagaaaacaaaacaaaagtttgcaacattacagcacagccttgaacaagttcatgtaa

SEQ ID NO: 45994 - DNA, 608 bp, Homo sapiens
gcctcctgagtagctgggactacaggcacacgacaccacacccatctgatttttgtatttttagtagagacggggtttcaccatgttggccaggctagtcttgaactcctgacctcaagtcaaagtactcagattacaggtaggagccaccatacccagctggggctattttagtagaaaacaaagcaggagtttgcacraggaaagagtgagcaccagctctgaacagccaggccagcctgggctccccctgactcccagatccccatcccaggaggcgtggctgctgtggcctcctacataggcggctcctcagctgcccctcacccctcatgccttcctctcccagcaactgatgagccttttccatgcatttcctgcatggatgaatcaacctcacaaaacagcggaagccccctccctgcagaggtgtccactattctggatttggcatgttattttctttagagttttactatgcgtgcccctcaacaaggtaagataggttctgtgtctttgagttttgtataaacgggagctcccggtttgctgttattattcattgcaatgcttgtaagatttatctgggcaggcccacactgctctca

SEQ ID NO: 45995 - DNA, 604 bp, Homo sapiens
ggtgctgtgaggaggataaataatatacttagaatacctagcacattacctatgcgtaattattactcaagaaatagaggttattggggttatttataaagatcttgcaagttcaagggatgacaaatttccagaggcagccctgctggtgagtggcagagccattgctaagcaggmgtttgaagaaatgaatgggagagtgagggaagggattcaagggcatctggcaactgggtggtgcctgtcccaaagcctccctagccagctgcaaaatctttcagggaagggacatttctctcacactcattcattcgacaactatttcttaagcacctgcgtgccaggcatttttctaggtatttgggctacgtcagtaaacagaagagagaaaaagctgcgctgtcttggaacttacattgtaatgggggaagattgacaataaacaataaacacaataaaaaattaaaatatagagtacattctaaaacattaaatgctctgagaaaaatagagctggttggggggactgggagtgctgggagcagggcagttattatataattttagagaagttatcttttgaccagaggcttgaaggaggaaa

SEQ ID NO: 45996 - DNA, 1359 bp, Homo sapiens
agtgtggcttattaaatgattcctttatcataaatattcacacatgaaaatgtgtttgctttgaattagtgcttgatagcaattttctatttcctaaaaacttgtaattgaaatgacagcgtgcctttattaaagagaattttaagaataaaaagaaataacctaatataagattgttttaatttctgcctatttcattctggatgtacccacactcatccatgcttcgcaaagagacagtcatagtatacatgccaccttaatcataaagatttctctgggtttctacatggttttcacagtgatactttttcctttcattattcatcattcttcagagaaccatcacctcctgggactcctgtgatgaaagtgccatgattgctaagctccttaagtgaggaaatcataaatttcatttttttatcccttctaatggcaaaagcagttctgagaatatgctaggcacttcagtgcttgtagccttggaaaaaggtggtgagcatgtttgtagaagataaattctgggaataaagcaccaccaaaaggctaagagatttagccgggcatggtggcatgcacctgtagtcccagccaatctggaggctgaggcaggagagtctcttgaacctgggaggtggaggctgcagtgagttgagatcatgctgctacagtccagcctgggccacagaggaagactctgtctcaaaaaaaaaaaaaaaaagaaaggccgggcacagtggttcatgcctgtaatcccagcactttgggaggctgaggcgggtggatcacctgaggtcatgagttagagaccagcctggccaacatggtaaaaccccgtttctactaaaaataccaaaaattagccaggtgtagtggcgggcgcctataatcccagctactagggaggctgagacaggagaatcacttgaacccaggaggcagaggttgcagtgagctaagattgcaccattgtactccagcctgggcaacaagagcaaaactccgtctcaaacaaaacaaaacaaaccactaagagatctaatcaattwttctggcacacaaggtaatatgaatttcctgaaaatgcaactaaaaatacgttattaaccacatttctccatattcaacccttcaaatcaaaattatgatgatacctttttttgtattctgacaattgtcatgattactcttatgaaggaaataaatagtagtaaaaaagaaaatctgtttcttgttactcttttttgtaatccatatgggaaattaaattatatagacagcaaaactggctttactattaataacacacgagcttttcttaaactctggctttgtctaacacttttcgttaagcaa

SEQ ID NO: 45997 - DNA, 506 bp, Homo sapiens
cctcctttctgagtcataccaatgtttttccttgccaccagcagagttacctttttcttcggtccatttgtgtgcacgtagactagtttgtcttttgcatgtgagatgccgagggctcttccaatcacactgttgagaagatttttgggctgtgggaactcttttaataggtccctagaagctaagaaaataagaacaaaagcattacagttgttctttttcttttaaaaactccatggggtgtgtatcagggcaaccctgggctggattctgaggatgttggctcatgaccccaaaccacccaggagcatcttggaaaagaaaagaggaatgacttcagggtttacagggaagagtggggccagacccacttgaataaccatctcctgaagaagrgccaatgacccacacaccacagaagggatcctaccagcatcctcttctccgcccaatctcctcatttcatacatcacctacaaaagcctggttggtcaataaacccccca

SEQ ID NO: 45998 - DNA, 510 bp, Homo sapiens
gaactttgcctgctgctctgcaaggggacactcttgtcacacaggtgcgtccacagtcagacaacccaataggcatcagtgacattgaatgaatcagtaaatgagctcattctctgggtggactttgcacatccatatgagggatgctcctctgaaagagcattttattttattttatttttttgagacagggtctcactctgtcactcaggctggagtgcagtggtgcgatcacagctcactgcagccttgacttccccaggctcgtgatcctcccacctcagcctccctaatagctgggaccacaggcatgcaccaccacacgcagataatttttatattttttgtagaggcagggtctctctatgttgcccaggctggccttgaactcatggcaccttggcagatcacttgcaatcccaaagtgctgagattacaggtgtgagygactgcacctggcctgaaagaacattttaacaggggacttctggagacaatttcctcatccaa

SEQ ID NO: 45999 - DNA, 520 bp, Homo sapiens
ggcgcagtggctcatgcctgtaatcccagcactttgggaggccgaggcgggtggatcacctgaggtcaggagattgaggccatcctggttaacacggtgaaaccccgtctctactaaaaatacaaaaaaaaattagccggacgtggtggcgggcgcctgtagtcccagctactcgggaggctgaggcaggagaatggcgtgaacccrggaggcggagcttgcggtgagctgagattgcgccactgcactccagcttgggcgacagagcgagactctgtctcagtaaataaataaataaataactgaggacgattttcacaccctgctgggagttctgtcttcctaactacagggccctaattcctctacccattcctcagctgacacatttcagacaacctgcatacctgccctggttacctctagagccctggtggggatcttctaagaagtgagcacaagttttagaaccagagggcctgtattcaaatgttggatttggccgcgtgaccttgggcaa

SEQ ID NO: 46000 - DNA, 520 bp, Homo sapiens
ggcgcagtggctcatgcctgtaatcccagcactttgggaggccgaggcgggtggatcacctgaggtcaggagattgaggccatcctggttaacacggtgaaaccccgtctctactaaaaatacaaaaaaaaattagccggacgtggtggcgggcgcctgtagtcccagctactcgggaggctgaggcaggagaatggcgtgaacccgggaggcggagcttgcrgtgagctgagattgcgccactgcactccagcttgggcgacagagcgagactctgtctcagtaaataaataaataaataactgaggacgattttcacaccctgctgggagttctgtcttcctaactacagggccctaattcctctacccattcctcagctgacacatttcagacaacctgcatacctgccctggttacctctagagccctggtggggatcttctaagaagtgagcacaagttttagaaccagagggcctgtattcaaatgttggatttggccgcgtgaccttgggcaa

SEQ ID NO: 46001 - DNA, 520 bp, Homo sapiens
ggcgcagtggctcatgcctgtaatcccagcactttgggaggccgaggcgggtggatcacctgaggtcaggagattgaggccatcctggttaacacggtgaaaccccgtctctactaaaaatacaaaaaaaaattagccggacgtggtggcgggcgcctgtagtcccagctactcgggaggctgaggcaggagaatggcgtgaacccgggaggcggagcttgcggtgagctgagattgcgccactgcactccagcytgggcgacagagcgagactctgtctcagtaaataaataaataaataactgaggacgattttcacaccctgctgggagttctgtcttcctaactacagggccctaattcctctacccattcctcagctgacacatttcagacaacctgcatacctgccctggttacctctagagccctggtggggatcttctaagaagtgagcacaagttttagaaccagagggcctgtattcaaatgttggatttggccgcgtgaccttgggcaa

SEQ ID NO: 46002 - DNA, 520 bp, Homo sapiens
ggcgcagtggctcatgcctgtaatcccagcactttgggaggccgaggcgggtggatcacctgaggtcaggagattgaggccatcctggttaacacggtgaaaccccgtctctactaaaaatacaaaaaaaaattagccggacgtggtggcgggcgcctgtagtcccagctactcgggaggctgaggcaggagaatggcgtgaacccgggaggcggagcttgcggtgagctgagattgcgccactgcactccagcttgggcgacagagcgagactctgtctcartaaataaataaataaataactgaggacgattttcacaccctgctgggagttctgtcttcctaactacagggccctaattcctctacccattcctcagctgacacatttcagacaacctgcatacctgccctggttacctctagagccctggtggggatcttctaagaagtgagcacaagttttagaaccagagggcctgtattcaaatgttggatttggccgcgtgaccttgggcaa

SEQ ID NO: 46003 - DNA, 625 bp, Homo sapiens
caaaccatgaagaaccacactaaggaatctgggttttattctaagtgtggccaaaacccatacttttaagcagagaactgccaatatctgacttaggttgtagaaggccaagaaggtaccaacaggtagataatggaagaaacccagcaaagaggctaatacaggaactcaagcaaaagagggctggcttacagtcaacactgtggaaacattaagtggacagattcagtgtcagaatttgtgtcagataatcttccctttgagccctttaccatttacatccttgggcaagttacttacatgctttgagcctcaatttccttacttagcaatgctcgtaaaactctatcacatagaaaatacacaagttattatgatagtattttggtaacaaaattcacttgaaggagttcaaataaattgacttccttttccctcacaccaacattagtaatgttgagcaggggttcaataccagttatatrtaagtaccacattttgcttcatcaagagacgagttcccgtttctcacagaacttacactaaaactgctcataaatatacaggaagaaaggtgtttttctcaaattaataaaagtctagttagcacattcaatctgtgttt

SEQ ID NO: 46004 - DNA, 611 bp, Homo sapiens
tggctctcattggggtcatcagaatcacttctgatgaaggtacttaaatatatagttgcctgggcccatccaggcttaacaaaaaatacatgtcctggagccttaccctctgcagcattctgatttagtaggtctagacagggtcagggcatctgtagttttaagtacctttccaggtgatactgtcatgtactcctggtaaaawccctctgatctaattccttgtattgcagatgaacaaactaaggtctagaaatgtcaatagggttatgaaaggaggcacagtgctagttgaaagcttaggtttgagtcctgactatgtgactttggataatttgtttaatccctccatgctttaccatcctcatctagaagaaggggcagtaacagcaattccaaatagttttgggagcattaaatgagctaaggcaatccaagccctctaccatggtgcctgatataaagtttctgctgaataattgctggctacattgtcatatcatcatcagcagcagcaccgtcatcattatcgccatcaccaccactgtcatcattattgtcactatcaccaccacccccaccaccaccactatcatcatcattttcatcat

SEQ ID NO: 46005 - DNA, 611 bp, Homo sapiens
tggctctcattggggtcatcagaatcacttctgatgaaggtacttaaatatatagttgcctgggcccatccaggcttaacaaaaaatacatgtcctggagccttaccctctgcagcattctgatttagtaggtctagacagggtcagggcatctgtagttttaagtacctttccaggtgatactgtcatgtactcctggtaaaaaccctctgatctaattccttgtattgcagatgaacaaactaaggtctagaaatgtcaatagggttatgaaaggaggcacagtgctagttgaaagcttaggtttgagtcctgactatgtgactttggataatttgtttaatccctccatgctttaccatcctcatctagaagaaggggcagtaacagcaattccaaatrgttttgggagcattaaatgagctaaggcaatccaagccctctaccatggtgcctgatataaagtttctgctgaataattgctggctacattgtcatatcatcatcagcagcagcaccgtcatcattatcgccatcaccaccactgtcatcattattgtcactatcaccaccacccccaccaccaccactatcatcatcattttcatcat

SEQ ID NO: 46006 - DNA, 556 bp, Homo sapiens
aagcctcgatctcctgggctcaagggatcctcccacctcagcctccagagtagcggggactccaggcatgcaaacttgcccagttaattttttaattttttggaagaaagatggcatcttgctatgttgcacaggctggtctcaagctcctggactcaagcaatcttcctctcaccttggcctctcacatgagacactgcacatagcaaagcatagcatttctaccctcaaacctttaataggaggcacaaataggtgatcacttataaaagcagtgataacagaagtttatagaccacctatgagttcacagatgggtaaacagtacacaaaaattacagaaaaacaaatttgagtcctcaaggataaatatgagtctgtctgctctactgggacagtggggtgggcagggyatttccataaaagcaccacagaagcaaaggcatagagctgtggcatatcatggtatgctcagagatcagcaactagtatgtggctagagagatggggtcttttgggggaagaggaatgaggtacctgcacagaaatgggtcac

SEQ ID NO: 46007 - DNA, 556 bp, Homo sapiens
aagcctcgatctcctgggctcaagggatcctcccacctcagcctccagagtagcggggactccaggcatgcaaacttgcccagttaattttttaattttttggaagaaagatggcatcttgctatgttgcacaggctggtctcaagctcctggactcaagcaatcttcctctcaccttggcctctcacatgagacactgcacatagcaaagcatagcatttctaccctcaaacctttaataggaggcacaaataggtgatcacttataaaagcagtgataacagaagtttatagaccacctatgagttcacagatgggtaaacagtacacaaaaattacagaaaaacaaatttgagtcctcaaggataaatatgagtctgtctgctctactgggacagtggggtgggcagggcatttccataaaagcaccacagaagcaaaggcatagagctgtggcatatcatggtatgctcagagatcagcaactagtatgtggctagagagatggggtcttttgggggaagaggaatgaggtacctgcacaraaatgggtcac

SEQ ID NO: 46008 - DNA, 778 bp, Homo sapiens
tggattctcaactctgcttccgcattcaatcccttgtaagaattttttttttttctgtcaaagtatgaaaaattgcagatgcagccacccactcataagtagctggaagaagccgcagggttcgaataatcttttcggaaaactgtggatgcaccacgtagcctctggaaactccaccgtacactcgtgagagaatgagagccagaaagacaattyctttagtattaatataaaaatagatttgtaaaatattacctattttttaatattatcattatattatatatttttgtatgttatcaagggttgaatctgtcccatgagatgtgtgtgacccgtatccttagcgggctttcttgagggcttctctgccttagaggagggaattgagggtgcccagaggcagaggccctgtatggagccagctcatgaaatcggggagctggaggctgccgcgtcgacagcacccaggatgtgtctcagccaggcccacagctcctggctgcgctgccacacgtgagcagaaagtcgcacggctcatggccttggtgccaaaatgagaactgagcactttttccagcagggctgctgggagctgcctgggagctctggcactggaggagcagacctctccttgtttgtgaagctctcagccacggccctccagccagcgctctgccacggcaggagcgggagaaagccttcaccttggccaaaaccagcgcggtttccttcccttggtttactttggtccatgtcagagagtctttatttcttt

SEQ ID NO: 46009 - DNA, 591 bp, Homo sapiens
ggaaggactatggcccactctatctgcatttcaactcatctcccccaccctcacttggcctgcctgcccaccttgttcttctctgtttgatcccatgcaacttctaccttctagcagattctataattgacttatttactgtgtttgctactgactgtctgtttaccctgtcagcacataaactccccaagggcagggttttgttttgttttttttttcccagagtttcgctcttgtcgcccaggctggagtgcactggcatgatcttggctcactgcaacctccgcctcccaggttcaagcgattctcctgcctcagcctccagagtagcaggaatgacaggtgcccaccaccacgtctggctgatttttgtatttttagtagagatggggtttcaccacgttggccaggctggtcttgaactccagggcagggatctttgtctgtcctgcccactactctatccccagcacctagaatagtacttggcacacagaaagtgctcagtgaatacgtgttgaatgtggagtgaatgacaaagcrtgtttccccctccaaagcctcacactctggtggtaaagcctgagtgtg

SEQ ID NO: 46010 - DNA, 623 bp, Homo sapiens
tttttgaaggatattacagaagacatattgtgtccacctcagtacatcgcatcaagaggcacatatgacactggcttatcccatcatcagtgatgaacctcttcttcattgaagtgtcttcatcccatggcttctgtggctttcctcctacctctcttgtgagtttttcttagtcattttcactgggctcctcttcttcttaaaacctgtaatttctggccaggcaggttcctattttaggagcctattcaaggatcttcatagtttaaactcttctagccaacttcattctcctctgtattctgaatcgaatcttttataactccaattaccacctgtgcagtaacagctctcaaactctcagctctcctcaccttggatctctctcctaaactccagaccctgacctgcttactagacagctacaccaggatgtcacctacaatgtctaagactaaatacatcatcctccactatcctaagcctgtttctcttcctcctrtgatgaatggaaacacccagagctgaagtttttcacccatttaacaaacattcattgagcacccagagcctttcaaatttaattatctagagctttgtttcctggattgtcaatttcttga

SEQ ID NO: 46011 - DNA, 596 bp, Homo sapiens
tttttttttttttccctgagacggagtctcacctgtagcccaggctggagtgcaatagcatgatctcggctcactgcaacctcctcctcctgggttcgagaaattattctgcctcagcctcccaggtagctgggactacaggcatgtgtcaccacacccagctaattttttatttttagtagagatggagtttcaccatgttggccaggctggtcttgaactcctgacctcaggtgattctcctgtcttggcctcccaaagttctggaattacaggaatgagccactgcatcyggccaatacattttttaaaatcttgtatattgatttcaggcctgttttcttaacagtagcagctatttcgcttaattctgagcagtgttttgttctctgggccagtaggattttatgcatgctttttgtgatccgtgttcaaaatctggattgccaacattgcagctccaatgtaagcttgttattcaaataaatatttaatttttaaacttgctcctgtatggctgggtgcaatggctcatgcctgtaatcccagcattttgggaggctgaggtgggtggatcacctgaggtcaggagttcg

SEQ ID NO: 46012 - DNA, 546 bp, Homo sapiens
cccagaggctctgccctgggcccagtggattccagggaccaggctacagggagggtgagagccactgcctacagcaacacagcagcccctccacacatatcccttaggattcctgccagccacagagggccctgagcaacagctrgacttgggcctctccagtgaaagccaatttaggtttcattcaaagcacagggatttgggattggatgggattgggtgaggagtggaggccaaaactgtgctcaatcatgtgttctgccctcaggactccaggatgctggggcacacgtaggaatcccagaggaaggattccctgtgtcatccgacccagggagcacccttagagcaggagcagacagtgaggacaggacaggaaggtgctgttgcaggtcccaagagtgtagagaaagacagtgggctcctttcacctcctggcacacgtatgaaggactttgtcttcaggatcacgtagcgcctatgtggggctgtgtcccaccccacactcaactttacacctgcatactcatcttgtgatctctattc

SEQ ID NO: 46013 - DNA, 592 bp, Homo sapiens
agctacatgtctgatcctgccctccacaatacccgtctacagggatgtttacagggatgtgttaatccccacgtaatggggattgcctattgaaataacctcccagtaaggatttttttgggcaaaatattctcgtttggcaatttcgacttactgattcttttgcaaagtcaacttgtttctgggcaaactttaaaaataaactcctaaggtagcatttagctagcagctagcacatcctaaatcgtgtctagatttaacttacacaatatgtgctttgcttttttcctaatttgcaacagaaaatagtaatcagctggtagtttcagaaatcacccttttgctgagtcttaawtttttttttattccagggaaacgtgaagattgtggggcgctatttttttttttaaagcaaaccacacagcatatctggccacctaaaacacaaagtgtttgaaactaaccgtaagatttcctttctgctcgcccaacctgtcactggaaacgcagtattcatttgtaaccagctttggagcagggcttttaaaaataacgttttcttgctaaagtccccaaaaatctcttgattctt

SEQ ID NO: 46014 - DNA, 682 bp, Homo sapiens
attcccataaccctaaaaggtaggcagtattgctctcaacttatggaaaaataaattgggattcagacaggtaaagaagccagccaaaggttacataagactgggatttggcctaggtctaagttcaaagtcttaccccgctgcatttttacgctattgaaaattaggacctaaaccgagcatttgacattgaattctacgacatgttaaagcatgttactatgttaagttaayggtgcaagacaagtggaatgattatctgttgagcccatggaatcttcttgggagccccttcaatttctgctgtcacattccaccaagttatgaatatgaacaattccttgggtattttcttatcctgaactctccttggaagtgagatgcttttagaaactacttttgatcactcccttgtatcaaccagaaaatgaacaaaaattcttaacatgagtggtccctcatgactctcatttggttgccttgggaaaaccttccccacctaccacaggtatttcctcctttgtgttctcatctttattaacactcttactgcctcataaagtatttgtgcctcaccagatgcaccctgagtttcttcaggtaacaactgtgttatatccatctcgacagttccagcacctaagaacaggcacttggaaggcacttgagaaacgttcagtgg

SEQ ID NO: 46015 - DNA, 579 bp, Homo sapiens
gtctcatctattccttgattcacaaaagatttatttcttgatttcctggatttacagacccagtctagtccagagtgtcaatgaggagcaatttcagytgacaaaaactcatatttgtatacaagataaacaaatagttgccgggcacggtggctcacgcctgtaatcccaacattttgggaggtcgaggcaggcggattgcctgaggtcaagagtttgagaccagtctagctaacatggtgaaaccccgtctctactaaaaatacaaaaaaaaaaaatagccgggcgtggtggcgtgcgcctgtaatcccagctacttgggaggctgaggcaggggaattgcttgaaccagggaggtgggggttgcattgagccgagatcgcgccactgcactccagcctgggcgacagagagagactccatctcaaaaacaaacaaaaccaaatagtgtggtagtcattggtgtctcttctgaatttgcttctgattgttacctcataaatagatcattaaaatgttttaatctgaagaaatggtaaagattatatatggttgtacttccatatggtttaacttgaa

SEQ ID NO: 46016 - DNA, 529 bp, Homo sapiens
gctgctgagctgatcaaggaagtctctctaggtagagatgctgactttttatttctagtagtaattaaatagaactgttatatagtcatgtgctgcataatgacatttcagtcagtgatggattgcatacatgacagcagtcccctcagattatactactatatttttactataccttttctaagtgtacatatgttaagacacacaaatgcagcctgggcaacatggtgaaaccccgtctttactaaaaaaaaaaaaaaaaaaaaaaaaaaaaaaaaawccgtgcacagtggctgatgcctgtaatcccagagctttgggaggccgaggcaggtggattgcctgagctcaggagttcgcaaccagcctgggcaatacagtgaaaccccatctctactaaaacacaaaaaattagccaggcgtggcagcatgtgcctgtagtcccagctgttcgggaggctgaggcaggagaattgcttgaactcgggaggcggaggttgcagtgagccaagatcacaccactgcactc

SEQ ID NO: 46017 - DNA, 620 bp, Homo sapiens
aagcacttccttgtaccttacagtttcttagtctgcttgggcttccataacaaaatactatagtctgggtggccaaaacaacagaagtttatcagagttctggtgctagaaagtccaagatcaaggtgccagtcaatttggttccaggtgagggctcttttcttggcttgaagatgacctcctttttactgtgtcctcacatggaagagaaaaagaggagcaagatctctctctcttcctcttcttgcaagaccacagccctatcagattaggkccccaccttatatcctcatttaaccttaattgtctcttgaagaacctatctccagatgcagtcacattgtgggtttcaacttcaacagaggaatttggaggggatataattcattccatagcagaaggccaggaaatacaacctatctgtagtctcaggagaaaaagagggaataggcttagtaaatggctactcaggctctggcacagcccaaccttctgctcattaaatatccattccactcttctttccacacaagaaacacagttagcccctcctagagggatagaagccaatgtcccatccaggtactgcctctagctccaataccagggtctttgggtga

SEQ ID NO: 46018 - DNA, 1992 bp, Homo sapiens
  misc_feature (1)...(1992): n = A,T,C or G
cattaggtatttgtcctaatgccctccctccccctgcccccaacctgagagtaattttaagaaaaaagttgatactgattttggaaacccagttggcaaggagagtatggagctgactgtacatgaagtacttgaactggattatccatatacaaagtagggtagtaagtatattggggagggtgcggggggaggaggataaaaaaggaaatagagaggagataggtgtgagaaaacagtagcggtaaaagaataaaaatagtgtctatttccagaaaagatctttcctgaaagtcatatggagctgagtgaggcagaagctattattgcccaagtccatgaggtctgtcagccttggagatgaagacccttttactgctagagcccaatcaacagatattggtaaaagtacatatactttaaaagagtcatctattctctgcatattttaagtctatttcttacccttttccttacttcaatgatacctatttttgkatctgagttcttcaagggtaagaaatacatctgttatgctttattggcacagcacctcgcccagtaaatgaggatgttaaataaatattattgaaagggagaaaatggaagaggaacagtaaagattgattaatctaaccttttgacctatttcttctcttgataaacctttcatttatgagactaagtgttaacatactagtttatcttataaaaaattttgaaactgattgaatacacataggaatattttagtcctccccaaccccagatactgcatgttgcaattgaaggacagatattttaagtgaatctctcacctaatggaaaactataattctgaatgactttgacaagctgaaaaaaataagtacgctgagctctctggggataaatgaagaagaatntgctttgtgaagaaaaaaaaagctttcagaaaggaatgcaaaaagttagtctacacagatatcgttaaatgttgtgtttcactgaaggaatcagaaaattatacccatctagagacaacanatatattctagtccaattcctatgacctacatgtaagcaaaccaggataaagataaattagatgacttacccaatacaaaacagctaataaattggaacgaggggagtagatgctacatttcctgactccaaaaccaatactcacaagagggagtgataaaatgataaagacattttaataataaacagtggaacgtgtccaatttggatctcaacaatttttaaaagacatgaaaaagtgaggataacttggcaagaacccataacaaagtaactgactaaagatttgggaattggagtttataaaggaagtttcaagaatcatgattattaaggcttcaggagaaacttaattaccaacttcaggtatatgaagttatcatatagagaatggcaatcagacaagtctcttcatcaaaatcagaaatagagaacaatttatgacacctactagttaagtataaggtggttttctgtctagttatgtgaaagttgattgttttggcgttacaaaattctattaaaaatgttgaacagaaaaaaagaccctaaaattgatgatattagatcattaatgacattacttttttttggattatttattttttattgatacaaatatttgtacatatttatagaatacatgtgatgattttttttcccctgagacaggatctcactctgtcacccaggctggagtgcagtggcatgatcttggctcactatagccttgaccttcttgggctcaagagatcctcctgcctcaacctcctgagtagcttggactataggcacacaccatcatgcctgctagttcttgtttctttttgtagagacaaggtcttgctctgttgcccaagttggtctcaaactcctgggcttggtgatcctcccaccttgacctcccaaagtgctgggattacaggtgtgaaccaccatgcttggccataatttgttacatgcata

SEQ ID NO: 46019 - DNA, 516 bp, Homo sapiens
gaaggtatgggagaatggatggatgaggagttatttaatgagtaaagatttttagtgggaattgtctgagtctgtttattatgctctaacagaatatcttagaatggtagacaatagaaatttaatttttatagttctggaggccggggagtccaagatgaaggtgctggyattgttgtgtagtgaggaactttgttctgtgtactcacatggcagaacagatggaagtgctcaagggcctaagtagttccttggagcccttctacagggatactaatctcagagtatgtcttcatgatttaatcacttcttaaaggctccacctcttactactactacattgggtcttagacttagacataggaatttttaagagacatattaaaaccacagcaggaatgctgaacatttttttcagaattggatagtggtaatggtttcaccataatggaatataattaatgccactgaactatgcacttaaaaataacaaaaatgttaaattttatgtaatgt

SEQ ID NO: 46020 - DNA, 516 bp, Homo sapiens
gaaggtatgggagaatggatggatgaggagttatttaatgagtaaagatttttagtgggaattgtctgagtctgtttattatgctctaacagaatatcttagaatggtagacaatagaaatttaatttttatagttctggaggccggggagtccaagatgaaggtgctggtattgttgtgtagtgaggaactttgttctgtgtactcacatggcagaacagatggaagtgctcaagggcctaagtagttccttggagcccttctacagggatactaatctcagagtatgtcttcatgatttaatcacttcttaaaggctccacctcttactactacyacattgggtcttagacttagacataggaatttttaagagacatattaaaaccacagcaggaatgctgaacatttttttcagaattggatagtggtaatggtttcaccataatggaatataattaatgccactgaactatgcacttaaaaataacaaaaatgttaaattttatgtaatgt

SEQ ID NO: 46021 - DNA, 634 bp, Homo sapiens
tttcttttctttttttttttgagatggagtcttgctgtgtctcccaggctggagtgcagtggtgcgatctcggctcactgcaacctccgcctcccaggttcacgccattctcccgcctcagcctcccaagtagctgggactacaggcgcctgccaccacgcccggctaattttttcatttttagtagagactgggtttcactgtgttagccagaatggtcttgatctcctgaccttgtgatcccccmacctcggcctcccaaagttctgggattacaggcatgagccactgtgcctgacctactattactatgttctattcattattacttttggttctcataactttgtaagctaccctagatatttttggcagctggcaatagggggaaaaactgagttaaacaataaaataaattttctcaaaacccaagtctagagatttcagaattgacgtaattcaggctttcaaactctacatgtgagtgtatcttatcttttctcacttgtcaatttgataaggaaatgtgtgcaattgactttagcatcacatctcctaataaaatgggaggagttttccccatccctcttacagggcatgtgacgagggtgtggctcgcttctttggtgcccca

SEQ ID NO: 46022 - DNA, 634 bp, Homo sapiens
tttcttttctttttttttttgagatggagtcttgctgtgtctcccaggctggagtgcagtggtgcgatctcggctcactgcaacctccgcctcccaggttcacgccattctcccgcctcagcctcccaagtagctgggactacaggcgcctgccaccacgcccggctaattttttcatttttagtagagactgggtttcactgtgttagccagaatggtcttgatctcctgaccttgtgatcccccaacctcggcctcccaaagttctgggattacaggcrtgagccactgtgcctgacctactattactatgttctattcattattacttttggttctcataactttgtaagctaccctagatatttttggcagctggcaatagggggaaaaactgagttaaacaataaaataaattttctcaaaacccaagtctagagatttcagaattgacgtaattcaggctttcaaactctacatgtgagtgtatcttatcttttctcacttgtcaatttgataaggaaatgtgtgcaattgactttagcatcacatctcctaataaaatgggaggagttttccccatccctcttacagggcatgtgacgagggtgtggctcgcttctttggtgcccca

SEQ ID NO: 46023 - DNA, 634 bp, Homo sapiens
tttcttttctttttttttttgagatggagtcttgctgtgtctcccaggctggagtgcagtggtgcgatctcggctcactgcaacctccgcctcccaggttcacgccattctcccgcctcagcctcccaagtagctgggactacaggcgcctgccaccacgcccggctaattttttcatttttagtagagactgggtttcactgtgttagccagaatggtcttgatctcctgaccttgtgatcccccaacctcggcctcccaaagttctgggattacaggcatgagccactgtgcctgacctactattactatgttctattcattattacttttggttctcataactttgtaagctaccctagatatttttggcagctggcaatagggggaaaaactgagttaaacaataaaataaattttctcaaaacccaagtctagagatttcagaattgacgtaattcaggctttcaaactctacatgtgagtgtatcttatcttttctcacttgtcaatttgataaggaaatgtgtgcaattgactttagcatcacatctcctartaaaatgggaggagttttccccatccctcttacagggcatgtgacgagggtgtggctcgcttctttggtgcccca

SEQ ID NO: 46024 - DNA, 566 bp, Homo sapiens
ttcctgcatatgaatatttttaaacttctcttcaagcacctaatggcattgacgttctgtaacatttacagaagatatgccatttgaatacttatcagccaccagtggttttcatctcatagatggaacctcttactcattccacaaatatttattaagcataggctatggttcagatcctgggccaagagtacagggcccagcggagagccagatggactcccttctagcctggtgtaccttartaactgccaatcgtgcaaataatgcatgatgagacagcaagatcagttagctatcacaggacaagtgaaacagccaaactgaatgtcagacacccgccagcagtgactggtgttctcctttgcactgggctctgagaaagcatcatcagaaatgtaaaacgacttctctcctccttatgtttgggggatacaacaattattctcaagaaacaattaggccagcctgggcaagatggcagaccctgtctccataaatactaaaaaaattagttagagctgggaaggacagtggggggcaaggtgggaggtgagggtggttga

SEQ ID NO: 46025 - DNA, 537 bp, Homo sapiens
catttcagtatgttctctttgatggttcagaaggcatttgagaccacgcagagcccctgggtcatgattatgaacaacaattattgtactagagatttacagatgtgctggttactggagggttgtggttaatagaatgctgaacaacaaagactttattgtataactgacgagggaaaagttccccaacagcaaaatacatagtctcaaaaagtcaggggagctggaggaaaacacatgaagttgagttttccctttatacaaaaaagttgtttccccaaattaaatggtcagttttaaaaagtcaccrtgtagtaaatactttgcttcaaagaagaaagagacaaaatgtagaggcaacaagccaaagtctcccatatgtaaattcttttccacagtgtggcaaaatctttggtgaaatctgattaactcgtcaccagggaactgttcagcggctttttacttcattacagcaattcaggtcccatgaacctcctgctgcgcatgaaatatcagacctgatctttctgtggcaaa

SEQ ID NO: 46026 - DNA, 537 bp, Homo sapiens
catttcagtatgttctctttgatggttcagaaggcatttgagaccacgcagagcccctgggtcatgattatgaacaacaattattgtactagagatttacagatgtgctggttactggagggttgtggttaatagaatgctgaacaacaaagactttattgtataactgacgagggaaaagttccccaacagcaaaatacatagtctcaaaaagtcaggggagctggaggaaaacacatgaagttgagttttccctttatacaaaaaagttgtttccccaaattaaatggtcagttttaaaaagtcaccgtgtagtaaatactttgcttcaaagaagaaagagacaaaatgtagaggcaacaagccaaagtctcccatatgtaaattcttttccacagtgtggcaaaatctttggtgaaatctgattaactcgtcaccagggaactgttcagcggctttttacttcattacagcrattcaggtcccatgaacctcctgctgcgcatgaaatatcagacctgatctttctgtggcaaa

SEQ ID NO: 46027 - DNA, 598 bp, Homo sapiens
atacaggggaggtgggagagaaggaaaataataaagaacagtggcaactgagttgattctgtataaataagcacatttgctgcatctctgttctgcagtttttatgtcccactgatgagagaactggtttgagatgtaaattgctttcctttgattgaaccagggaggagatgtcatgtaactcatctcatcagcatagagcattgtgtgcctttggtgaattataggataacggcgctagtaagaattccttaacctctctccgcagccctgttccagtgcttaataaccaccaaggggaagtacttccctacagttcacctgactaccttctgtggttttagcttatttattcatatcctgtccttaaatattttgtaaaggatcacgggaaagtgccagtgttttaccgtgccagatacaccctgcacattaaaatataaaattgsgaggagttttaatgtttgtttgttttaggtagagagcacttagaaggtggctttggaaagatgagaaaggtgatgaagacgtgatctcaaagcaatatttaccatttatctcacttgtcaagatttaggataaacctgtagaagcagct

SEQ ID NO: 46028 - DNA, 634 bp, Homo sapiens
ttacttcctgaaagctagaaagtatttgggttgttggattttaatgcagtatgtatatagttaattcacattgatagtgagccacrcattcagtcaatcaacaagtgcttactgaaggcccacagggtgcaaagaaccctggactaagtgcttaaacttgactccatgtgccttactgtgttattgcacaagtgctggagtaaggttggagttttcccagattccaggtacccaatgactacagtagattatgaaagagcagttcaggtgagagccaagctagaaacacacacatgcaaacctcagaaaaaaaaggattcccaaaagtcctctattttgtcatggagacttttttctccatttcactggtcccacgaaaaggcccttgataatctgagttttatattgcatttttggccaaaggaatttcatatgtttcacagatgaaataattaaaaatagactctcttaattcctataaaccctcttcatcccccaccctcccagtaaagcccaggataaataggccgtgttaccatttccaggaggcttttggttgatcagtgtaaatgaggcatattcaaagttggtgatcagggatatgtagtgttaggtggggagggtaactatgaag

SEQ ID NO: 46029 - DNA, 698 bp, Homo sapiens
gatcagcctgtctaagagaaatacagtgtgggttacattttttccagtatccacatgaaaaaagaaacaggtggggcaggagaaggagctaaaaaaaaaaaaaaaaaccaacaacaaaaaacaggtgaaattaagatattttatttaacccatatttccaaaatagtattatgtcaacatataatcaatgtaagaaacatttaatcctgttttaatttacaaacttaaactaattaaaattatagaaaattacaggccaggttcrgtggctcatgcctataatcccaaaactttgggaagccgaggtgggttgatcacgtgagcccaggagttcgagaccagcatcggcaacagagtgagaccccgtctctacaggacaaaaacaaaaacaaaaacaaaacccaccaattagccaggcatggtggtgcacacctgtagtcccagctactcgggaggccgagacaggttaattgcaccactgcgctccgtcctgggtgacagagtgagaccctgtcacaaaaaaaaaaaaaaaaagaagtaaaaaataaatacgagttacaaattttgttgcaggagccacctgtgaggcactcagtggccatcacactggacagctcagccacattcgtcttccctatggcactcctctaagtggcaggggtacagcaaaaacaggtccgtatgagtagctgccatct

SEQ ID NO: 46030 - DNA, 698 bp, Homo sapiens
gatcagcctgtctaagagaaatacagtgtgggttacattttttccagtatccacatgaaaaaagaaacaggtggggcaggagaaggagctaaaaaaaaaaaaaaaaaccaacaacaaaaaacaggtgaaattaagatattttatttaacccatatttccaaaatagtattatgtcaacatataatcaatgtaagaaacatttaatcctgttttaatttacaaacttaaactaattaaaattatagaaaattacaggccaggttcggtggctcatgcctataatcccaaaactttgggaagccgaggtgggttgatcacgtgagcccaggagttcgagaccagcatcggcaacagagtgagaccccgtctctacrggacaaaaacaaaaacaaaaacaaaacccaccaattagccaggcatggtggtgcacacctgtagtcccagctactcgggaggccgagacaggttaattgcaccactgcgctccgtcctgggtgacagagtgagaccctgtcacaaaaaaaaaaaaaaaaagaagtaaaaaataaatacgagttacaaattttgttgcaggagccacctgtgaggcactcagtggccatcacactggacagctcagccacattcgtcttccctatggcactcctctaagtggcaggggtacagcaaaaacaggtccgtatgagtagctgccatct

SEQ ID NO: 46031 - DNA, 698 bp, Homo sapiens
gatcagcctgtctaagagaaatacagtgtgggttacattttttccagtatccacatgaaaaaagaaacaggtggggcaggagaaggagctaaaaaaaaaaaaaaaaaccaacaacaaaaaacaggtgaaattaagatattttatttaacccatatttccaaaatagtattatgtcaacatataatcaatgtaagaaacatttaatcctgttttaatttacaaacttaaactaattaaaattatagaaaattacaggccaggttcggtggctcatgcctataatcccaaaactttgggaagccgaggtgggttgatcacgtgagcccaggagttcgagaccagcatcggcaacagagtgagaccccgtctctacaggacaaaaacaaaaacaaaaacaaaacccaccaattagccaggcatggtggtgcacacctgtagtcccagctactcgggaggccgagacaggttaattgcaccactgcgctccgtcctgggtgacagagtgagaccctgtcacaaaaaaaaaaaaaaaaaraagtaaaaaataaatacgagttacaaattttgttgcaggagccacctgtgaggcactcagtggccatcacactggacagctcagccacattcgtcttccctatggcactcctctaagtggcaggggtacagcaaaaacaggtccgtatgagtagctgccatct

SEQ ID NO: 46032 - DNA, 698 bp, Homo sapiens
gatcagcctgtctaagagaaatacagtgtgggttacattttttccagtatccacatgaaaaaagaaacaggtggggcaggagaaggagctaaaaaaaaaaaaaaaaaccaacaacaaaaaacaggtgaaattaagatattttatttaacccatatttccaaaatagtattatgtcaacatataatcaatgtaagaaacatttaatcctgttttaatttacaaacttaaactaattaaaattatagaaaattacaggccaggttcggtggctcatgcctataatcccaaaactttgggaagccgaggtgggttgatcacgtgagcccaggagttcgagaccagcatcggcaacagagtgagaccccgtctctacaggacaaaaacaaaaacaaaaacaaaacccaccaattagccaggcatggtggtgcacacctgtagtcccagctactcgggaggccgagacaggttaattgcaccactgcgctccgtcctgggtgacagagtgagaccctgtcacaaaaaaaaaaaaaaaaagaagtaaaaaataaatacgagttacaaattttgttgcaggagccacctgtgaggcactcagtggccatcacactggacagctcagccacattcgtcttccctatggcactcctctaagtggcaggggtacagcaaaaamaggtccgtatgagtagctgccatct

SEQ ID NO: 46033 - DNA, 580 bp, Homo sapiens
gctgactgtgcttgcagagtgtgaattgggaaatatctgaatgaacacttctgtatttacagaaaatgatgacgatgaggatgaagatgttaaagttgaggaggctgagaaagtacaggaattatatgcccccaggtaacgctgaataatcgggagcaagtaatgggtggtaacatatgaaaaaggtctaggaggcacaccctctctggcatctaygatgggccgaaagcctgcattcccttggccacagtatgagaaactcaagccagcttggacacagggtgtggcagctgttgtgtttctctgtgtgtggtgggtgtcatgtctgtaccgtacagggatagctgagttttcatcctcctcggctcctatctgtccagtgcaatgaacaccagttgctgtcttcctctctggctcccatggctgccatgctctgttgcagagagaagaggattgcctgttccctcttaaagggatcctcctgtttgctttcttggaccactctcttaatgcctcctgtcgaaaccagctagcactccctggtgtccaatccctctgtgtttagtcttctgtcatctct

SEQ ID NO: 46034 - DNA, 580 bp, Homo sapiens
gctgactgtgcttgcagagtgtgaattgggaaatatctgaatgaacacttctgtatttacagaaaatgatgacgatgaggatgaagatgttaaagttgaggaggctgagaaagtacaggaattatatgcccccaggtaacgctgaataatcgggagcaagtaatgggtggtaacatatgaaaaaggtctaggaggcacaccctctctggcatctatgatgggccgaaagcctgcattcccttggccacagtatgagaaactcaagccagcttggacacagggtgtggcagctgttgtgtttctctgtgtgtggtgggtgtcatgtctgtaccgtacagggatagctgagttttcatcctcctcggctcctatctgtccagtgcaatgaacaccagttgctgtcttcctctctggctcccatggctgccatgctctgttgcagagagaagaggattgcctgttccctcttaaagggatcctcctgtttgctttcttggaccactctcttaatgcctcctgtcgaaaccagctagcactccctggtgtccartccctctgtgtttagtcttctgtcatctct

SEQ ID NO: 46035 - DNA, 538 bp, Homo sapiens
ccccatctcagaataagataaaataaaataacacatacatatagccaatatgtatttgggggaaatttcatccatcctaataattgggtttgggggagtgggtggttattttgwgggtttgtttttttttttgagacagggtcttgttctgtcacccaggctggagtgatctcggttcactgcaacctctgcccctaggactcaagtgatgctcccaccccagcctcccaagtagctgggaccatgggcacacaccagcatgtccagctatttttttgttgttgttgtattttttgtagagatggggtctcaccatgttgcccaggctgctctcaaactcctgagctcaagtgatccacccacctcaaaagtgctgggattacaggcatgagacactgtacgtggccccatccaaataattgaagaaccgaatttaaaatgagatgccattatttgttatccgtttgcaaacacccaggtgtttggcacagcttggaggaatggcattcctatcattgctggtgggaatgtccccatc

SEQ ID NO: 46036 - DNA, 538 bp, Homo sapiens
ccccatctcagaataagataaaataaaataacacatacatatagccaatatgtatttgggggaaatttcatccatcctaataattgggtttgggggagtgggtggttattttgtgggtttgtttttttttttgagacagggtcttgttctgtcacccaggctgkagtgatctcggttcactgcaacctctgcccctaggactcaagtgatgctcccaccccagcctcccaagtagctgggaccatgggcacacaccagcatgtccagctatttttttgttgttgttgtattttttgtagagatggggtctcaccatgttgcccaggctgctctcaaactcctgagctcaagtgatccacccacctcaaaagtgctgggattacaggcatgagacactgtacgtggccccatccaaataattgaagaaccgaatttaaaatgagatgccattatttgttatccgtttgcaaacacccaggtgtttggcacagcttggaggaatggcattcctatcattgctggtgggaatgtccccatc

SEQ ID NO: 46037 - DNA, 1962 bp, Homo sapiens
gcttgcagttctgttggagaaattccatttctgatgccagccatgtgcagatggctgaggctcacatgagcagtgtgtgtgcaagaacagaggcccaggaagacttgtgatgcctgggacctggcggggtgacgtggctcctcacttacccatcttcagtgtgaggatgaattcctcatttctgtcagccacagctgcacactctgagtgtgtgctgatgggcccttgactcacctgatggcgtttcaccttacagctggggaaactgattctcgaagaaggcagcagcccctcgcgttgtttgactgataaccaagcagagggttccagtgatgtcgaccctaggacttctccggctctgacatgactgtctcgcttcccccatccagcgatggtaaccgctgggtcacactgccttgcctttctgttatcttgcccccaacgtcaaagctttgctgagctcattattacacctgtgatggaattccagtcaagccatctccttccctgagttgaaaattgcttctcccctgatgccagccctaattagcgctacccaattctgacaacccatgtgcccacagcatggagtggtggctctcagccctgcctgcaaattgtattctcctggggagatttaaaaactgtcccctgccaaggccccgacctagaccaattgtgataggatgcctgggctggggccaggatgtctctgtttgtcaaagcagatttctgtgtgcagctggagtgcggagtcactggcagcaggtaagcagctggcttctgcgggaacggcccacatcctttcctggtgaaacatgttgaatatcttcattacgtgtgttcctctcacttcaggtgtggaaatgccggtgttccaggaaggccaggacaaggcctttctgtttgaggtcatggcgttatgtctggtgcagagctcgacatatgacgtttgtcgctgttggttggctgattgatggggcctggggagtgtgaatgtgacatgggatgtgggagagaaacatcagaggagctaaaagccaagaaatgaccttcaaggtgctgcaaaatcttgggaagagtgtgagagttcggtgcaggaagatatgctggggttacaggtatttacatcccaggcatgtgttgaagtggattgctgtgcacttttgacctctttaagtcatttaggtgataatcagatagaacataacaatttcaccaggaaatgttggggacaacatcagagatgtccgatgcaatttaggagaaagagtacaayggacagggaggacaagaggaccctgagtgccgctctctctggtggtgggagtctgggctctgagctgacgtgtgcgcctctgtttcttcaatgacctctcttgatacgattttggatctgcctctagaatcctgacttatttagagatcagaaatagcagaatgcatgaagggtctcattaagaatttttgctttttagaattacctaagtttaaaatacagaataatgataaatggttttattttattctttcaaaatatttttcagaaaataatctctaatatcattgaatatgggagaagtacagcttctttaagaccctgttgattcacagactgtagtaggaaaaggtggcctatgtgtggtgcagcagtaagctcttgctgtgtaatgaccatccccaagcgcaacggctcagtcagcaagcatttgctcctcactcaggagcctgtggttggactggggtggggtgatattgactggcctgtgcagcttggcttccagctgtgctgtggggtcaggcccgctccatgtgcaactccctttggatcagcccctctggagaccccttcctgtcatggtgctggcagatgtgccagggtccaagtccacctgctcaagtgaacttcaaacctctgcttattgggaccctccagtcccactggcctaagcaggatccacg

SEQ ID NO: 46038 - DNA, 621 bp, Homo sapiens
agtttggagttcatattgtcagtgcctagcccccttttttaggaggcggggtctcactctgtcacccaggctggagtgcagtggctcaatcatagctcacagcagccttggactcctgagctcaagggatcctcctgcctcagcctctcaaagtgttgggattacaggcgtgagccactgcgcctggctgagggctgcattcttaggccctgcaggggtggaatgggcacagctcttgagagctctgcggccctgcagtgttttcaagctctagttcccagcatctgatgctggtgtggaaacgatgtcggggaagcataatgaggtgttatgtgaacccaaattgtgctttaaaccaaaacagccctggtcatttgggcttttgtgaatggggaggctttcgggggccctctggcctctctgcactgggaagcatgcagcagatggaagakaatttaatggggacacctgaatcactcaggcaagaaaatggattaaatatctgagctgatacctgtcccacatactgggatagagggaggccattctgatagtagtctcagggcgggtgttaaagggccatttgctccctgtgattgggctgatacacagtgtttggac

SEQ ID NO: 46039 - DNA, 694 bp, Homo sapiens
gaaaaattcaatttatgtttgaagtagaatatcaaaaatagactgaagaatggagacttttaaggtacatctccaagtacaaggaaagggagaaacattttgtaggtctttgtttctttgtgtggaccagagattgacttaaagatggaaagacattctttggctctgtttatctctgacatgtattatgtaaccctttagaatagctattggccgttagataaagtaggctgtagaatgaatttactcataactctctcctaattcacctcagaggattttggacctaacatcaaaactgattcacaaaagtctggagttaaatagaaacaatgactctgacaaggaaatatttccataaatatgagtacattttctttgatactccatgattttgactgccccaayccaaatcccagaaagaagccatactcctagaaaataataaagccggtcgtcaatcctctagggttttaggaagaggaggaggagaaggaaggggaaggaaacttacccaaccaatatatgagttaatgtttcaggataattttggtttatatttaaaggttcatctctttatttcttttctatcttatcactctacaccaaaaatgggtcaccatctatgatactctgccttgacgaagtattctgtctgaggtgaatctttcaagaaggttaaattttgaatgca

SEQ ID NO: 46040 - DNA, 694 bp, Homo sapiens
gaaaaattcaatttatgtttgaagtagaatatcaaaaatagactgaagaatggagacttttaaggtacatctccaagtacaaggaaagggagaaacattttgtaggtctttgtttctttgtgtggaccagagattgacttaaagatggaaagacattctttggctctgtttatctctgacatgtattatgtaaccctttagaatagctattggccgttagataaagtaggctgtagaatgaatttactcataactctctcctaattcacctcagaggattttggacctaacatcaaaactgattcacaaaagtctggagttaaatagaaacaatgactctgacaaggaaatatttccataaatatgagtacattttctttgatactccatgattttgactgccccaatccaaatcccagaaagaagccatactcctagaaaataataaagccggtcgtcaatcctctagggttttaggaagaggaggaggagaaggaaggggaaggaaacttacccaaccaatatatgagttaatgtttcaggataattytggtttatatttaaaggttcatctctttatttcttttctatcttatcactctacaccaaaaatgggtcaccatctatgatactctgccttgacgaagtattctgtctgaggtgaatctttcaagaaggttaaattttgaatgca

SEQ ID NO: 46041 - DNA, 597 bp, Homo sapiens
ggtggggctgatcatttatacacacaatagatgggggttgacttacaacaagaacctgaagagaccaactttgccttgcctaaatgccttcctttttgtcctsttttctttcttgcctcaccttgatgtcctgcctcctgaaaaaaggcaagctgtcgggtaagctgccaaacttgggaggcctgtaataaaataactgcctttaacaaggtctgttgattaggagacttgttacagcaataggctcagacaagagctgaaagaacttagatttcaacttcctctcactcacgaattagcctttatcgtcagcctctgtgtcctcaagagaaaatttcacatgtaagctgtttgtgtagtcttcttattaatgtaaataaacaagaccctaaatgagatgcagaaaagaagttaatcaggaccaggcaatgtttccaaatcacttacagcagttgctgggaaaacaaaattttatatttaaaacatcacacacaaaaatgtgcaacacttcagtccaagacatataaactgtgggttaggggagttcactccaccaacacttagagtgacttgaaaacatacagacatttaaaacat

SEQ ID NO: 46042 - DNA, 597 bp, Homo sapiens
ggtggggctgatcatttatacacacaatagatgggggttgacttacaacaagaacctgaagagaccaactttgccttgcctaaatgccttcctttttgtcctcttttctttcttgcctcaccttgatgtcctgcctcctgaaaaaaggcaagctgtcgggtaagctgccaaacttgggaggcctgtaataaaataactgcctttaacaaggtctgttgattaggagacttgttacagcaataggctcagacaagagctgaaagaacttagatttcaacttcctctcactcacgaattagcctttatcgtcagcctctgtgtcctcaagagaaaatttcacatgtaagctgtttgtgtagtcttcttattaatgtaaataaacaagaccctamatgagatgcagaaaagaagttaatcaggaccaggcaatgtttccaaatcacttacagcagttgctgggaaaacaaaattttatatttaaaacatcacacacaaaaatgtgcaacacttcagtccaagacatataaactgtgggttaggggagttcactccaccaacacttagagtgacttgaaaacatacagacatttaaaacat

SEQ ID NO: 46043 - DNA, 609 bp, Homo sapiens
tcctttccctttctgtaacctcaggacatgttccttttcttccatgaacacctaaaaaaaaaagagtgtcaaaaccaacacaaaagaaacagaaaatgtaacagacaaatctccatggactaaattcatataacagagaatcttcctatgtcctacctcccttcctcaaatattagacgtagacagttttatgggtaagttctatcaaacattcaaggagcagataattcccactttacaagttgtttctgagtacagaaaaagaaggaaagctgcccgtctcatttaatgacatagtatgtccttgattccagagctagawaagaacagtgaaagcagagaaaataacacgtcaatgctacctattttgaaatgtcatgatcttgagtaaaacactagataatgaaatccagtggtatgttaatgtggtaatgcgttataatcagatgatttttatcacagaaggtaaggatagtacaaaatcggataaaatctctaaatgtaattcattccatcattggtactacagaagaaaaatcatatgggaatctcaaaagatgcaatttaaataaagcatcttttgatgctttaaaaatctgttaaagttca

SEQ ID NO: 46044 - DNA, 535 bp, Homo sapiens
aagtcactcccattagaatgctggsgtcgcccatgagcctctatcattagactgcctgacgttggccaatggtctctcccattagaatgcctggggtggcccaggtgtgtctatcattagaatgcctggggtcacccatgtgtctctataattaaactgtctggatttggccctgagtctctctcattagaatgcctggggtggcccaggtgtctctatcactagattgcctgggttcagccaggagtctctcccattagaaggtctgggattgcccatgtgtatctataattagactgtatagactcagctaggagttacgcccatttgaatgcttgggtttgcccaggtttctctataattagactgtcaggggtcggcaggagtctctgccattagaatgcctattgtcacccatttgtctctatcactagaacgcctggggtcggccagcagtctctcccattagaccgcctggtgttgctcaggtatccctatccttagactgcctagggtcagccaggagtctctccca

SEQ ID NO: 46045 - DNA, 641 bp, Homo sapiens
tgatttaaaagcaagatatgtctgttaatcccttaataggatgtactttttaagtatctttaacatttaggggaattgtttactataccacagtcaatatgccaattacatattttaatccattaagagtaaatttcttaacactctaggcttaatttgatgatcaatgtatttaaaagtaataaaaacttgtatttgttcaaaaagggtatttcaaggacctaagcaggcattggaatagttgttatccacatgttcattcggtcaactagccagacaagcagactgcctttgagtacttactgtgtgttgtggtctcagtagctatttaacctattgtccaagctagaaacttctgagaatgaaagtggtgctattcttaactatgtttggggaacagttataaagcaggattgaaactccaagtatggttgctctagatctgtggtgcatgcaaatgctgtgcctgagcagttaccaggaacagcatcctaagaagttgggagaaaacaaggcaaacaaatcttttgaagttggattgccaaaataaactgggagaggttaaaaaaataaaagatgaaggcatsgtataaagccaaagaagtcagggacaagaggaatccagctcctgagatgaatat

SEQ ID NO: 46046 - DNA, 556 bp, Homo sapiens
tggtttcatgttataatgtttctatacatgttaaaaataaagacactaccataacaatataaaatgcgtacccagatgccacgtaaagtcaccttctgtaccatctctagcagcacacatggtaaacactgatctctgcaaactgcctttttaaagatctgaatccaaatttacctactctagaaaacytccccctcccttgatctacttttcatcccattttaggacttctttgctccttcatgataagtccttgcgtgtttaatttataccccatcacttttgtgtgttttaacttcactgttctcaatactttcacatctgtgctttttcttctgtactagattgtaaaataccaaaggcaaagactttgacttgtttcttttagttcctcccataggcccaactacagcacaaaaacatttactgaatggataaaaggttgactggatgttaattgtctactaaatgcttgtagttaacctatcatctcatttctaaagatagagcaaaattaacccacatcacttcctactctatatgtagctacactaat

SEQ ID NO: 46047 - DNA, 556 bp, Homo sapiens
tggtttcatgttataatgtttctatacatgttaaaaataaagacactaccataacaatataaaatgcgtacccagatgccacgtaaagtcaccttctgtaccatctctagcagcacacatggtaaacactgatctctgcaaactgcctttttaaagatctgaatccaaatttacctactctagaaaacctccccctcccttgatctacttttcatcccattttaggacttctttgctccttcatgataagtccttgcgtgtttaatttataccycatcacttttgtgtgttttaacttcactgttctcaatactttcacatctgtgctttttcttctgtactagattgtaaaataccaaaggcaaagactttgacttgtttcttttagttcctcccataggcccaactacagcacaaaaacatttactgaatggataaaaggttgactggatgttaattgtctactaaatgcttgtagttaacctatcatctcatttctaaagatagagcaaaattaacccacatcacttcctactctatatgtagctacactaat

SEQ ID NO: 46048 - DNA, 556 bp, Homo sapiens
tggtttcatgttataatgtttctatacatgttaaaaataaagacactaccataacaatataaaatgcgtacccagatgccacgtaaagtcaccttctgtaccatctctagcagcacacatggtaaacactgatctctgcaaactgcctttttaaagatctgaatccaaatttacctactctagaaaacctccccctcccttgatctacttttcatcccattttaggacttctttgctccttcatgataagtccttgcgtgtttaatttataccccatcacttttgtgtgttttaacttcactgttctcaatactttcacatctgtgctttttcttctgtactagattgtaaaataccaaaggcaaagactttgacttgtttcttttagttcctcccataggcccaactacagcacaaaaacatttactgaayggataaaaggttgactggatgttaattgtctactaaatgcttgtagttaacctatcatctcatttctaaagatagagcaaaattaacccacatcacttcctactctatatgtagctacactaat

SEQ ID NO: 46049 - DNA, 550 bp, Homo sapiens
tggagaaaaggaggcaaggtaatggaattgaaaaagatgggggaggttctgggggtggggagcagaggtcttccggatggrtaactagggtcttacgtaactctggaggtgtgtgtccagctatctgctctaccacttcttattctgttactagctgtgtgtctttgggaaagtaacttaacctctctgaacttcaggtgcttcatctgtaaagtggaaatactaatacctgtcagaggattatttgagagaaaatgtatcaaagctcattgtcagctataaagcattctatttatgtgagttgttaagatggaattacagtgcaagatcacccattcgtttattagatttcttttctttccttcaccaaacatctatcaagtgccctctacgtgtgttaaggggcaccctgttcctgatttgttattctggcccaaacatgaaaagtctggccttgttgagaatgggctggaatagttaaatgacactttaccaggggcttgagtatgacaacaggagcaaacacagtgccacttgtacattatgtgta

SEQ ID NO: 46050 - DNA, 550 bp, Homo sapiens
tggagaaaaggaggcaaggtaatggaattgaaaaagatgggggaggttctgggggtggggagcagaggtcttccggatggataactagggtcttaygtaactctggaggtgtgtgtccagctatctgctctaccacttcttattctgttactagctgtgtgtctttgggaaagtaacttaacctctctgaacttcaggtgcttcatctgtaaagtggaaatactaatacctgtcagaggattatttgagagaaaatgtatcaaagctcattgtcagctataaagcattctatttatgtgagttgttaagatggaattacagtgcaagatcacccattcgtttattagatttcttttctttccttcaccaaacatctatcaagtgccctctacgtgtgttaaggggcaccctgttcctgatttgttattctggcccaaacatgaaaagtctggccttgttgagaatgggctggaatagttaaatgacactttaccaggggcttgagtatgacaacaggagcaaacacagtgccacttgtacattatgtgta

SEQ ID NO: 46051 - DNA, 613 bp, Homo sapiens
ttatgcccatcctccgctggtccaccagggttctagcaacaggattccaagatatcaggacaaaagcttccacccacccttacttgttttgttctctatagtcacacaaaataaacaccatccccatttacctgtgacatccctctaggcagtgtttctcagccttggctgcacattagaatcacctggggggcctttaaaaatattaatatttgagtccaccccagatcaatggaataaaaattttgggggaggaggcctgggcattagtatttcctaaagattccccagatgattctaagaaggagccagggccgaraaccactattttagagaataaatgatccttagctttgccacacccaacctcatctcctgctgaattctcccaggagctacctgcaaccatcacacaattcagttttcagacctctcatcattctagtcactgtccacttcatgtagtccatcaggttaatgcacttcggaaatgtgacttcctatactgaactggactgtctaggacaagacgatcacctcctttactcatggtattatacctctattaatatgaccacaaatcaaatgagctctttctgtctataccccactc

SEQ ID NO: 46052 - DNA, 613 bp, Homo sapiens
ttatgcccatcctccgctggtccaccagggttctagcaacaggattccaagatatcaggacaaaagcttccacccacccttacttgttttgttctctatagtcacacaaaataaacaccatccccatttacctgtgacatccctctaggcagtgtttctcagccttggctgcacattagaatcacctggggggcctttaaaaatattaatatttgagtccaccccagatcaatggaataaaaattttgggggaggaggcctgggcattagtatttcctaaagattccccagatgattctaagaaggagccagggccgaaaaccactattttagagaataaatgatccttagctttgccacacccaacctcatctcctgctgaattctcccaggagctacctgcaaccatcacacaattcagttttcagacctctcatcattctagtcactgtccacttcatgtagtccatcaggttaatgcacttcggaaatgtgacttcctatactgaactggactgtctaggacaagaygatcacctcctttactcatggtattatacctctattaatatgaccacaaatcaaatgagctctttctgtctataccccactc

SEQ ID NO: 46053 - DNA, 1875 bp, Homo sapiens
actttaaaagccatttctaactaatgccactactgccaccagtactcatttttagatggtttgattttaagtttctaaaaaacacccttatgaattgatatgctgtagactcataatagttctatgatccaggtaagagttgggggaactgcagagtgacccgagctaggccagtgactttggagttagtttctttacctctttgggcattagtggcctcctctggggctggacttagagtcttgggagtcttttagtgcctactttgttttatttctgagccaaagtgatttggataatacacagtacttaaagaactgaagccaagccagcttccagtccctgggcccagtatatgtgggaaaccggtatctactgagtccccatggaatgtacacaggtactgccctgggtagtcccaggacaccatyctgcctgtcttcaggttaccttgtaagagcccagagtcctcagtctttgtgaatatagcagggactaaatctaatctattctgacactagtcttttggggatgcaaggagcatctttttattctaccactgcttttgtttatttttcattctgccacttggtgcttatatgcaacctgctcactgcttaaaaagaaggagagaggccaggcatggtggctcacacctgtaatcccagcactttgggaggccgaggtggtcagatcagaaggtcaggagatccagaccatcctggctaacatggtgaaactccgtctctgctaaaaaaaaaatacaaaaattagccgggcgtggcggtgtgcgccggtattcccagctgcttgggagactgaggcaggagattggcctgaacccgggaggcagagcttgcagtgagccaagatcgtgccactgcactccagcctgggcaacagagagagactccatctcaaaaaaataaataaataaaaaataaaaaataaaaaataaaaaaaagaaggggagactcatcagttccattatagttgggttgagtttgggggagaattttttgagtgagtgggggaaaatagtaggctggtttggctggtgtctttggaatagccatggagactttgatttcattgtttgttttcaaaagtctgattgtaatcaacagaactcatcctcatggcggcttgtccaacagttcattactacattcacataaaatggggaaaattgcagcatttttttccataggatagttgtgagaattgaatgaatgactgtaagactaagagttaggactgcttggcacattgcaagttctttaaaattatttttatttgctattacttagcaggattgggatgacaggtcaaagtctatatacaacttttccacaaaaataaacttctgaatggcatgtttgttttcttggtaatttctgataattatagtcaaagaagtgctagatcttttaaagcaagtttagaaagaccaatacctaggtataaattgtatcctatgagttttcattatttcagatatccttttttttttttaataaccttatcaggtgaaaccgacctttgctcccctatgggtctctgagtgtcctgaagcaaaagtctaggatccctgcccattttcctgaagttacacagctgtttaggtccagtatatatgactgcttgtttgcaaattttcagagaaggggcattattctccttatttattaactctcatctagtggtaacttcttttgataattcagattcttctctttactgtggagaaatagtttctccgctttgtgactttcttttcttttttagcttgattttttacagctggaagacagcaaggtggcacccttgtaaaacaaccactaatacttttatgggcattagccctgtattaca

SEQ ID NO: 46054 - DNA, 526 bp, Homo sapiens
acaatgtactgtccacctgttttcctatgcacctgtcattgctctaaaaaataaagtcttcggtcgggcgtggtggctcatgcctgtaatcccagcactttgggaggccgaggcaggcggatcatgaggtcaggagatcaagaccatcytggctaacacggtgaaaccccatctctactaaaaatacaaaaattagccgggcatggtggcgggcgcctgtagtcccagctactagggaggctgaggcaggagaatggcgtgaacccaggaggcagagcttgcagtgagccgagatggcaccactgcactccagcctgggcgacagagtgcgactccatctcaaaataaataaataaataaataaagtcttcattaaaaaagagttttctggaagtggcacatcgtatgcaaacacatgcacatgcataaggacacacgtgtctgaaaaggctgattggaaatagttttgaatgataatatgccttattgctgagataatggatggtttttttaaatgaacaccgat

SEQ ID NO: 46055 - DNA, 526 bp, Homo sapiens
acaatgtactgtccacctgttttcctatgcacctgtcattgctctaaaaaataaagtcttcggtcgggcgtggtggctcatgcctgtaatcccagcactttgggaggccgaggcaggcggatcatgaggtcaggagatcaagaccatcctggctaacacggtgaaaccccatctctactaaaaatacaaaaattagccgggcrtggtggcgggcgcctgtagtcccagctactagggaggctgaggcaggagaatggcgtgaacccaggaggcagagcttgcagtgagccgagatggcaccactgcactccagcctgggcgacagagtgcgactccatctcaaaataaataaataaataaataaagtcttcattaaaaaagagttttctggaagtggcacatcgtatgcaaacacatgcacatgcataaggacacacgtgtctgaaaaggctgattggaaatagttttgaatgataatatgccttattgctgagataatggatggtttttttaaatgaacaccgat

SEQ ID NO: 46056 - DNA, 571 bp, Homo sapiens
ttaatattggcaaagtattggaagaaaatttcaaaatataagaaaaggagccttgagaataacaggatctatggggggcggggatgtcaaatccacggatgttacttccgaagccagcaaggcctgcatctccctgagcaaacagtgggcatgcccagaactgccatcagccccaactcaagtgcatggttctcccctcgttagtggcagccttggtgggccactttcctcctctgggcttctggtcactcacttgcaaaatggggctctgtgaccaatgacctgtagggtttgtcccagtgccagaagcccatgtttctatggcacaagtgaaataaaatttttccatggaatgtagttcaaaaaaaagccatttgaaatgtcccttctggctttagcaacagtttgtgttttttgtttgtttgttkttgttgttgtttgtttgtttgttttttaactgaaatctgcacagctctttaccaatgtgctgaatgcatttcagattgtacaaaagttgaaaatgctacatatctcagtgagaagcacattaaaaatcttttaaaagtgttca

SEQ ID NO: 46057 - DNA, 3757 bp, Homo sapiens
atgcatttccaagcttttgaaaatccaacatggcctctaataaatatcttgttttaktaatggaactttgttgttgttgttgttgtgtgggtagttgttgagacagaatcccactctgtctgcctaggctgtagtgcaatggcacaatcttggctcaccgcaacctctgcctcccaggttcaagtgattctcctgcctcggccccccgaatatctgggattaaagttgaccgccaccacacctagctaatttttgtatttttagtagagatggggtttcatcacgttggccaggctggtctcgaactcctgacctcaagtgatcctcctgcctcggcctcctgaagtgctggtatcacaggcatgagcccccacacccggcctagtaacggagtttgataactgtcgtgaacattcatcattatcagggtacgtcagttattccttgggctttttctcccacaagggaaaactaatctcttcattctccatgttcattttacgccagtcactgtagccctttctccatcttctggacaaatgaagcatgacctccttgggcttgtgctgcggctgacccttctgtcttcactcttcctcctccacagtttcacacctccggcttctcatcaaatggcacttccccagacatcttgcctgaccacctattgaaattacctctcctccaccctttattatccccagtgcagttttatttcattggttgtttcatttaaagtattttactttacatgatgactttcactctctccccactagaatgtatggctcttcaaggcctgttcattgtgatgttaccagtactaggaacggtgcctggcaaggattagatgctccataaacatcatactcgctcaggttgcagacatgtacttcttgggaatgttttattcagatgcagttttcagcccgggaacagagctttctctgagtccctatttctattcttagctttaggagccaagcagtggtataattactacatatgacaccagaaaaaaattactttttaacatttctctcctatatgcaacaaaattatttgtaatcataatactaatagagaaatttgcaaacagtgaaaaagtgtttattcaattctatatataatgaaaccagcagtaaaataaaaataatgtaatgagaagaaataaaacaattacattcatatactttttagaaaagggaaaaattgtataccatggttcatattttatttcactgatttaaatgctaggcacaaaagctcttcaagtggtcacagaattgaagtaactcaaattacttcttcatcttcacaaactgtgttattattgttgatttcaaatctactatttaaatccaggaattgatagatataagctgctctcaaagtgagctgggatattctgagccatggctaatttatgctcaaaatgaacatgtgtagctgagtttgcatgtattgaggaccgactgtggaactgggaagtctctaaattagctttcatatagatagaatacagtgtgttcaaggatacatgattttaaaatgtgagaatttcaagcttacatatttattctaaaaactcaactgtaagcaactgcaacagaagatttttaaggggaagagtatgttatcaagtacctgcacatgctgattaaaacaaaaaaagcctatagattgtatttcactttattaattttgtttttgttgttgtttgtgttttgagatggagtctcgctctgtcaccagactggagtgcagcggtgtgatctcggctcactgcaacctctgcctctcgggttcaagcaattctcctgcctcagcctcctgagtagctgggactacaggcggcctgccaccacgcccgggcaaattctatgcatttttagtagagacgggggttcaccatgttggccaggatggtcttgatctcctgacctcggaatcttgccgccgcgggccctcccaagtactgggatacaagcttagccaccgcacccagctaatattttaaatcgtaacaccaacctcctattgtcgtattgggtcaggcctctccggtcatccagtccagctacaccagtgtaggttcagatacttggaatgaaacttaacatttcctttcctaacactgtcacttccacatggtacctggatgacactccatactgtcacctggctttttctccctctgatttctgtcttctgctagagtccaaaggttcccccaaagcccacattccagggcctccaaagactcacaacaccctggaaattcccaaaaggctaataagctaaaactcatgaacagcatccagctattccacagaggaatgaagagtaggaagggagagagtcattcacactctgctccaggaagagggatgtctcattttctctaattctcttgctctccctgctgggctcctcagccctgtctcctcacctcctcccactacttgcccttcgttcctaccaggggtgttaaagacaaaaacacaaagcctgtgtctccatgatttcgagtttgtacttgctattctctttacttggtattgagaagtacaaatgtaatttctacctaaataattcctatcccattattcaaaattctgttcaagtatcacctgttctgagaagtctctccctatgtctctctccttcatggcaggctccagaaagatttagccattttctctttaatgccgtttctgtacttgaaaaaacttctacaattgacatgtttttactcactgtgatttctttcagttcagagcctatgagtttactcatctttgtaattctaactcttaggttgtgttcaatttatggaaaaatgtttgattgaaacaggaaatacaagatacaaggtatgttttggagccaattgtaacttaaaattatcaaccacacctcacccctcaagctgcagaagtttgacctaaccttcagaatggctgacacactgatttccttgtgctttcactaatttattcccatgcctacttccaacaagttttctagaccagatgacattacttgccatcccttatcatgagttgatggttattatggggtaactaaaggcatagtggtcattaaaggctgtatacatggctggtgaatccaggaaatgaaatacagaaatattatttagctggttacactctatctaatttctatctacgtgaaagaaaactcatggtaattattacttatataccaatatgtcatttctgaaacacttaagaaatgaattagtgaaaattcaatattactttgtaagtgtagtattttgggttactgtcctgaatcatgtttcctctctaaaacaggattatacatctctatttattgtcaaatgacttgtcatacattctctgggaaagaaccacattcccacctcattgattctgcgcttggccaccatgtgatatgcactggccgtgtgaccaaaagaacggtgagcagacatttgccatgattaaacagaagcctttagtgtaactgtgtggatggctgaagcttttctgttcttgccctccaccatgagaatatcatgtctccagacaggggttgttgctctttcagtaaaggttccacaatgcaaagaaacatagagcagaactacactcacctagactcatgccctgaagcgctcatggtgtgtgagcatgaattaaatatttattgtaagccactcagctttatagttggtcttcacacagaacacagaagaaaaccttatgca

SEQ ID NO: 46058 - DNA, 524 bp, Homo sapiens
  misc_feature (1)...(524): n = A,T,C or G
caagtgatccacccttatgnccagcagaccctgatctaagaagctagatgattcctcatgaggtcacttataaaccttattgctgatgtatttcagtttatttattggactatcttagattttaaacaccccacccaatgccaccatctatgtagcaactagagcaggactcacaaataaaataaccttcaaggccaaacagcttccaatagccagatttgtcaagattaacttaaggttttaaaattaggcaatgcttgtagacacaaaccactgtgggcaccataaaatatcaccttatttcaaaagactgagaaaactgaaaatgacctgaaaaattcctattgagtgatctatttaatcactcaggtgggktatggtgtatctggtgcatgttcaacctcaggtgcaggtgcatgtgcatgcaaatatacacgcgccacgcttttaaccatgcatctctctttgaaaagatcattccttctttcttatctatatgtgaacaaattgtcaaaacaacctca

SEQ ID NO: 46059 - DNA, 555 bp, Homo sapiens
tgtaatcccaacactttggaaggcccaggtgggtggctcacttgagttcaggagtttgagaccagcctggccaacatagtgaaaccccatctctactaaaaatacaaaaattagctgggcgtggtggcaggtgcctgtaatcccaatactcaagaggctgaggcaggagaatcacttgaacctgggaggcagaggttgcagcaagccaacatctgaccattgcactccagcctgtgtgacaagagctagacttagcctcaaaaaaaaaaaaaaaaagaataaaagaataaaaacccttcaaaatgaaaacagacctgttaataattccttttttttttttttgccctgtaagaaagtatgttaagtttatttgtcttctggtaaattattatattaaaaaatatgacttcagggtcatccctaaatagttaaatatataatttgaaccctatatatttacctaaatatattccatttttggagtgtcaccttcatttattctagtcagggtcatcaatctccatcagggtttacyttctactctctcattgggta

SEQ ID NO: 46060 - DNA, 543 bp, Homo sapiens
cattaaaaactgcacataatgattgctacatgtgtcagaacaatgaattgttatatcaaatacctgttcagctgtaaataaggccctctgtaagtcactgacaaaaagattatattctcttgttgccgatgtataattcctattgtttaaaatgtgcagctctccaacatccatactttgtgacctgtagccatttaagttgtgtatttaatacatacacacgtacaataaggacatggcacattacaaaaagtcacaattggaggtatttttgttttcaaaggtatttttcctccaaagaagagacatacacatggagctctratggattctgtattacgtagaaaatccctttggttgcaagtaacggaaatctcacaatcagtagcttaaataaataagatttgtttttctcccataaggtgattagagataggcagttgcaagttttggttcaacagctcaatgatgtgaggacgggcatctctaaaattttggtcttcctgtcataaatgaaagatggatttttaagctccagttttt

SEQ ID NO: 46061 - DNA, 608 bp, Homo sapiens
ggagaagcagaactttttcaaacctctcctaccttgggcaaagggccaaccctagggggaaatactttgacttttttactgatgcataaaatacataaagtgcactaatcttaagtgtatagcctggtgaatttttcatatgaatacacctgtgtaatcatcttccaaataaagacatagaacatttccaccaccccagagagtttcctcattctcttttcccagtcactacctctcaccataggtcatgcgactctgagctcaacaccccagygaaaactttatatatcatttatttttgccaccctcccacctctgcttctggacccctttctgttgttatcttggaggatagaattgtcatgtttttcacagctctgtcccgacttgtcctgtctcccaaagtacttcaggggccaagtgtcccgtctcccttccctttagtcaaaactctcatccttttggtgatacagtttttcccaagcagactgtgagctcctcagggccagggactctactttccctgacttcaggcacaaacttgtttagtgtgcctgtcaaataaataaacaaatgcatatgaccttgggtaggtagaagcaggaaag

SEQ ID NO: 46062 - DNA, 612 bp, Homo sapiens
agcccctctcagcacagcaagcagcatgagatggcacgcatgagagcacggtgggggccgtgggggagagggcagaaaggaacaggggtcagaccatcgccggatctactgaagacagacactgccttcaaacgttctgaggaaaaatgcttcgggctgggacttggatacccacgtccactgtcccactcaggctgaggggagcaaggccacctgcagtgggtgtgacctcagagacgtggccacaccccctgcggaggtgcttggtgactgggcttcccaggaagacgagggtgacagccgtcaacagccgagaagaagtagtagatgcaggaacccatggccgtcacacgggagtgagtccacgggcgcttgggagggctgagaaccaggcccaggcagttcyggagggaaaagtggaacccgtcccaactcagccccagcctttctgcaccaaggggtggagcagtgccgacctcagacgccagctgccagaaatgcttccaaagcccgcctctgcgtggggtgtgtgctgaggggtctcacgtggggactcgcctcagagcccatctgagcttcactgttctaggttcttgtagttttgttttacct

SEQ ID NO: 46063 - DNA, 1853 bp, Homo sapiens
aggtggctagatggatggatgaatcaatgattctgtagaatagattcttgaattgagaggtattttccttgcaataactctggctttcattcaatacttagattctgtgatcctgtaagtctggccctattaggaaaataatccttcctacttagatagttccgtatgctgtttaaacattgtcacatccattgtttccttagttcacccacagctaggatagatagatctcatccttgtatgtaatacttggaggtggagactcaaaagctaattagtttgagagaaaggacagaattccagactcttcatttccagtccaatacgtttgttctatgttcagtcttgggcacaatcaacaattcaccaggctattaaacccacacatatgcaatgttgacagaatgtgtggatctaatgtccaaattctggttttaaaaagtggaggtagaattcttcctgaaccacaaggcaagtcccaagccccagggagggctgtgtgtttgagcaggaacatcagggtcttcagtcatctcttccaggatcgtcccttattaggcaagatctttctttacaatatagatctttttgaatatttgtatttttacaatacattaaacacgaatactatgttttcaagataagaggaagatatgtgtctaaaatatgtggttcaagggactgtagggctctaaaaatctcgaagtccaaaattatagtttctacgtgttgagggtcggtcttactggtctcaacatgtattctggcatccgccagagccactgtacagagaagagctgagcaacttaagctgagtctgagggggcactttagagaccaaaaccagaaggcattgtcaaatctagtagacagtcacgcaggttgtgtttactacatcttctttccctcaaaaaccctcacaacatatctgtacatcttagccttagtctccattatatgacttttgccttttttcctgcagttaaaaataaatacattcaggaatcattttcctgcaaagataacccttaaatgttaccatttgaaagaaggtatggttttctgtgtatccttaaaggacaacagccctcaaattctgtctttccaataggatcctggtgtaccttccctcagacccaatgagatgggcacatactcccattacacccctttctacagcaaatgcagacttgttttatgacacttgatggtattaagctttgtttcccaagagattggtattctgtgttccaagcgtctgcaccttgactaatttacaccatgtgaacttctggagacgatttgctctgtgtcgtcagattggagggtctgcaagctgctaccagaggagctcagaagcctcatggttttcctttcatagaaaaatgtacaccacaagaatgsaagcagcctgacaaatgaccaacgcttacagaaatccctgccatttgtactccaggattttggaacgtgtttattttcttgttgtttttatttcagtgtctgcttttgagagccaacctggctttcagggactattacccagggtaaaatgtttccatagaaacctcctgctgagacatattgggcaaatcctcattttgaatctagttcataaataatcattaagggtttgttttattatatttaaagatagaatagaaaaagaaacaagaggagaagaaggagaaagaggaagaggagaaggaagaagaggaggaggaaggggaagaggatcagaaaagcacacgccctcaatgtattgttggctattaagctaaattggcttgtttcaagcttcttttagcaagatctttctttaagaaacactgtaatattgattgtctgagtgt

SEQ ID NO: 46064 - DNA, 578 bp, Homo sapiens
tgggcttctgctgctggcttggagttttgcaattgtagcctggccctgggagtcgggacctcagccccacatagcttctgttgagagacaggaggactctgggcctccccaggagtcagaaattctctctggtcctgtttacatgcagccccctcctcattttcagagatcattgctgcaggggctccacccatggatgctccaagcacccactaatgttcctttattctctacaagttcttatttctcaataggtctgagaactttttctcctgacctcaggagatggagaagacctggacagagtggagatggtggaaaaggcaggggattagattcaaaattaggacaccagggtctcygagcctagctggggactctaactccagtgcaaggagaggaagggagcactttgtctctgggatccgtcacagttttgagatcccaggattcaggaaaggggctcacaggagctaactcttcagtgggaagcttaatggaggatctcactttagtatcaacttggggagaagacaagtagtggggtttcaggctgagatgggaacagcactgggcaa

SEQ ID NO: 46065 - DNA, 631 bp, Homo sapiens
gaaataattagtactatcagacatatcactggctcctggcttattgttgggataaactgccaacttttaggtgttgttgggtagaaattagcattggctgggaattgagactggaggaaggcaagatgaagtggtcagacataaacaaacatttatcaaagtcgtttttctttgagatggggttttctctgtcgcccaggctggagtgcagtggcgcgatctsggctcattgcaacctctgcttcctgggttcaagtgattttcctgcctcagcctctcaagtagctgggattacaggtgcctgccaccacagccagctaatttttgtatttttagtagagacggggtttcaccatgttggccaggctggtttcaaactcctgacctcatgtgatccatccacctcggcctcgcaaagtgctggaattacaggtgtaagccaccatgcccagcacaaagtccttaatattttaatgtacgttgttgaatcaccaagaagaggacccagcaaccaaagcagagagtttagaagacaaaaataatatcgttacttttcttaactctgtcttctcttcttctggatatcaagctcaaaaagctgtaaatccttggtgttctatgatttatttaa

SEQ ID NO: 46066 - DNA, 612 bp, Homo sapiens
ttccagacctagagaaagaaaacaagaaatggaagagttttcttcctgaataggaaagaaaatggaattatgaactgcttttgaaaaactatacttcttttaagaaggcaattgttcgtcatatttgtaccacctctaaaggagacacagattatttgttaaagtaataggattctgagcaagatgaaaccaatgataaaagtgaaggggactctctgcacaataataaaaacaataaactactgataacatgcaactaaatggatgaatctcacarccattatattgttcaaagaagatagacataaaaacctatatattgaattattcattatatgaagttcaagaacaggcataactaatctatggtgttgaagtcagaatagtggttatctcaggagattaggagtgaaacatgccttggtaagagcatgaaggaagcttctgggtatggaaatgttctacagcttaatctaggtggtggttacccaggtctgcatgtaagttaaaaaaaatcatcaaactgtataatcttaagattagtacattttgtgtacttcgtatatgctttcatatatgaaattttgaatttcatttataaatgtctcaatt

SEQ ID NO: 46067 - DNA, 612 bp, Homo sapiens
ttccagacctagagaaagaaaacaagaaatggaagagttttcttcctgaataggaaagaaaatggaattatgaactgcttttgaaaaactatacttcttttaagaaggcaattgttcgtcatatttgtaccacctctaaaggagacacagattatttgttaaagtaataggattctgagcaagatgaaaccaatgataaaagtgaaggggactctctgcacaataataaaaacaataaactactgataacatgcaactaaatggatgaatctcacaaccattatattgttcaaagaagatagacataaaaacctatatattgaattattcattatatgaagttcaagaacaggcataactaatctatggtgttgaagtcagaatagtggttatctcaggagattaggagtgaaacatgccttggtaagrgcatgaaggaagcttctgggtatggaaatgttctacagcttaatctaggtggtggttacccaggtctgcatgtaagttaaaaaaaatcatcaaactgtataatcttaagattagtacattttgtgtacttcgtatatgctttcatatatgaaattttgaatttcatttataaatgtctcaatt

SEQ ID NO: 46068 - DNA, 586 bp, Homo sapiens
cttgttagccaggatggtctcgatctcctgacctcatgatccacccgcctcggcctcccaaagtgctgggattacaggcgtgagccaccgcgcccggcctatttttatagcttctaactaaccatttctttctattataaatgtatgcaataaacctcagtagtactcatagtgcctgtgactttgtcactatagaaataagatattttcatagcaccttacagtagaaaaagatatcttaaacatcatttatatgtatgagtactttaatattactgcyggattgcaagtggttgaagccttccttcccacagatgctcaaaggaactatctgggcatttggcgctttgtagtgcagtcaacacaatgaagttgaaggttctcactctggtaacccagaaatctatgttaccttccagcacttcatacctctatttgttggtgctaatactttgaaggtagttaattaaagatctccttttacctaatattctcaatctagccttcatactgtattagaatataatatttaactttacttaaaatctatttaaatatatttaaaatatattgcctagatatttaa

SEQ ID NO: 46069 - DNA, 560 bp, Homo sapiens
ggcttctccttctaatcattacagacaaccaaattgagaagtttatatggcttctaacttcaagtctttccatttcaacatttaagttttattattgtagcgtttgcaaatggctcctcagttgagaagactgtttcatgtttcaaatctttcaaaatttttttgagttcaaatctagtcccaatctagtcaaatcaaattaagttaaatctagcctttctcagcaattccagctcacaaacatcttttctactcagaactcagagaatttaaaattttcactattcattctggcacttaatagtrtactgcctcacttttttttcttgactaattcaaatttatttaattttgtatcttcctagttagattacaaacctcaggaggaagagaccatatcataaatatctgttctaaggataaatgcttagtaaatgttggaagaataaaggaaaagagataaggacaaaaaaagggagcaagagagacaagaagaacaaaaggaagaaaagaggtcgaggaaaggaaggagggatgaaaggagggagatagagatggag

SEQ ID NO: 46070 - DNA, 586 bp, Homo sapiens
tgcattgaaagggggcagagcaaaattagaactcagactccccaactccatccagacctgtcttcacatatgcagagatgttcttcaagctgtcctgctttgaaatattgtaaaggtagaatgcagttcttctggggactgtggtgtcctggtggtcsacttccaccttataacagaagcagctatggcttaagacgtgagattttagggtctctctattcctagaacgtaggacaatgctgctcacatagtaggcccccataaatgtttgatgtgtaaatgagcgaatgaataattgaatgagtagacctcagctttctcgattcctagtcagatttgcctcacactacaccactctgcttcctgcactttcattgatctgaaaaatctaaaatcagttttcagaccttaaaaaaaaataaaaagccaatggaccttttgctgagtggaaatgcaagaagcaggtttaggaggtgggaagaggaaagagattttctacgtggaagaaattgaggcagggacatgtttgcactgcaattgaaggacacccagcccaaggagctgtccttgatggcgtccctgactc

SEQ ID NO: 46071 - DNA, 630 bp, Homo sapiens
cattacccacattgacccagggtctagagagtatgacttcaagctgggtgccaatgtgtataagtaaggaggggagagcccaagaggctgaaaatgtcagtaacaaagagaagtttaccatgataaatcctcttacaggtgtcaggttttattcatgaaagaaacagtagatgcctgggcataaaattggtgagcaaaaagaatactggtgctatctgccagtttgatgatggttagacattaggatttggtgctctcaaagtttaattttaataaaaggaaatatgtgctttgtagacactgagaatgtagagtgttttgttcacatggaaagatagttccacagacacattgaagcaactgtgagaaaatgaarcaaaatgatgaattgaggaaagaattgtcatgcagttattattaattcattaatagcagagatatttatcaaataacttttatgtgccaggcattgttctagggaaccaatgaaacaacaggcagcaacactaatgagaaggtctttggcatcaaggaactttatattcttaaggattattggcaatgaatttcaaaggagataggcagtttacagatctttccttttcacttgtctcaaattgttataaccat

SEQ ID NO: 46072 - DNA, 529 bp, Homo sapiens
gatcatgtcatcagtaaacaatttcatttmttcttttcctatttggatgctttttattcttacccaattgttttgactaggacctccagtactatgttgaacataattgatgaaagcagacatccttgtcttgctcctgatccaaaagcctttaacttttcaccactgagtatgatgttcactgtaggcttgttatatatggtctttgttgtgctgagaaacattccttctataactgattttcaaaagtttatcatgaaaggatgttaaattatttcaaatgttttttcttcatctattgaggtgattatattgtttttattcttcattctgttactatggtgaatcatatttttaattgttttttacttgcataaatttattttgtgataggtagaaaagcacatctgcagacctagaagcagagtgaatctaaaaaatattatttataattattatgagtacacaataggtatatattttcatggggtacattcaatgttctgatacaggcatatgatgtgtaata

SEQ ID NO: 46073 - DNA, 993 bp, Homo sapiens
ttccagttatatggtgaagtacctggaaggggtccatgctcaagtatgcctcagatttgtctacccatttgaagtgcatgtttgggtttttattttgcttttgatgtgtttttttttgtctttttttttgagacagagtctcattctgttgtaaaggctagagtgcagtggcacaatcttggctcactgcagcctctgcctccctggttcaagtgattctcctgcctcagcctcccgagtagctgtgactacagatgcgtaccaccattcccagctaatttttgtatttttggtagakacagggtttcatcatgttatccaggctggtctcaaactcctggactcaaataatccaccagccttggcctcccaaagtgctgggattaaaggcatgagccactgcgcccggccatgcatgttttctttcttgcctggtaggcaggaatctctcaacttatttctgactttctctcacagggaattaattgagatgttcattctgtgcatttgtgagtattgggagtgccaggagcttcctattctgccatgttgctgacatcagtctaaggaaaacagtttaaagaaagttcatcaaaaagtaacagtagacacatctgggtgtcttaaatatgaatacatttctttctttctttctttctttctttctttctttctttctttccttcttttctttcttcctttccttctctttatttctttccttctttttctttctttcttttttttttttttttttttttttggaattttgctcttgtcgcccaggctggagtgcaatggcacaatctcggctcactgcgacctccgcctcctgggttcaagtgattctcctgcctcagcctcccgagtagctggggttacaggcatgtgccaccatgccccgctacctgctaatttttgtatttttagtagagacagggtttcaccatgttggccaggctggtctcaaactcctgagctcaggtgagccac

SEQ ID NO: 46074 - DNA, 993 bp, Homo sapiens
ttccagttatatggtgaagtacctggaaggggtccatgctcaagtatgcctcagatttgtctacccatttgaagtgcatgtttgggtttttattttgcttttgatgtgtttttttttgtctttttttttgagacagagtctcattctgttgtaaaggctagagtgcagtggcacaatcttggctcactgcagcctctgcctccctggttcaagtgattctcctgcctcagcctcccgagtagctgtgactacagatgcgtaccaccattcccagctaatttttgtatttttggtagagwcagggtttcatcatgttatccaggctggtctcaaactcctggactcaaataatccaccagccttggcctcccaaagtgctgggattaaaggcatgagccactgcgcccggccatgcatgttttctttcttgcctggtaggcaggaatctctcaacttatttctgactttctctcacagggaattaattgagatgttcattctgtgcatttgtgagtattgggagtgccaggagcttcctattctgccatgttgctgacatcagtctaaggaaaacagtttaaagaaagttcatcaaaaagtaacagtagacacatctgggtgtcttaaatatgaatacatttctttctttctttctttctttctttctttctttctttctttccttcttttctttcttcctttccttctctttatttctttccttctttttctttctttcttttttttttttttttttttttttggaattttgctcttgtcgcccaggctggagtgcaatggcacaatctcggctcactgcgacctccgcctcctgggttcaagtgattctcctgcctcagcctcccgagtagctggggttacaggcatgtgccaccatgccccgctacctgctaatttttgtatttttagtagagacagggtttcaccatgttggccaggctggtctcaaactcctgagctcaggtgagccac

SEQ ID NO: 46075 - DNA, 542 bp, Homo sapiens
  misc_feature (1)...(542): n = A,T,C or G
tcaggaaacaggatagwtaaataaaatcctgggcttccactgtggatagcgaaggttacccacaatctaaagccctccaaaagctaaggcaagagccggttttacggaggggcacatgccacagttattaggccccatccttgtctagtacagtattacttgtctagtatagtagagtagtgcctactctgagagtaatggaacgcatagattgagcaggataatggtaagtttaacaatattatatgtatttataaatggccacaatgaactctagtgggcggctggatctcagtttcagtgctaccgtgggaaaaggatttctgaaccatatcctacaaccaacataattatgagagtcaaaccaagtatggcagtggtgcagcaaacatttaccttttaaattttttttccccagctctgtcaggattctctctggccagtgagtgttgcaggcagctgcataccctgtagggnagtcaggggtgaggaaaaagccaggccgaggtgggctgcatttgctccagctctgtgcagctacc

SEQ ID NO: 46076 - DNA, 588 bp, Homo sapiens
gactaagtggcaaaggtctcaccccaacttcatttcttcataccactcatatatatcttatatatatataccccactcttatatatatatataccccactcttatatatatcttatatatatctcccctacctgcaaatcccaaaacaatagtcatagcaacagaaaagcaaaaccttgtgaagcccagctctgattggttctgctgtgcagttcagtcgctagttttggacaggtgcataagcagataatttttggatgtgtaatattctcagtggggctgatgtgtgacttttgggacatagagcattcattcgttcagcagaccrtgcagtatctcttccattttttttcccttatcagttaccacaaggtaagattatgtattcagtcacttaaaaacacttgcaaagtggatttttccccatttattcctatctaaccattggaataaatgttgacagtagtaaattaccatgtccctatttttgtgttcaacatgtctaagagaatggggagctaacttccagtaagggcagtacagtcagtcatgactctttctccatgtagcctgtgcattgtgcagtga

SEQ ID NO: 46077 - DNA, 564 bp, Homo sapiens
cactgcattccagcctgggtgacagagcaagactctctcaaaaaaaaaaaaaaaaaaaaatttgttttcccttccaactccttcctgtccggcctaagcctaggccattggtttgaaaaaaaaacaacaacaacaaaataaaagttttataaagatccaagccaatatatttgcttgcaatttcttgtctgagttttctacyactgatcaaggaatattttgccaaaggattttgtgaatgatattatttgggtatctctttataaagctatggattaaaatgaaactgagcaggtgttgttgggataataatagaagaaaaaaagggaaaacctttattccactgaaactgtctaaggaataattattacccaataattagactcagacacttggatgaatattccttatctcaaaaaaaccttactttacagatttgaatgttgactcttttatgtgtctaataataataatgtgatatatttatgtcacattctaagaatataaaaatgcttaataattgtatctgaagttgatatactatttaaaattttatataccaca

SEQ ID NO: 46078 - DNA, 525 bp, Homo sapiens
ataaaagtctaacttctggcaataacttgaaattacattcatttatttcattcattattttttgcttttactaaaatgaatttagtaggaagttaggttttggatacctgccatcaacactaaaatcaacagtaaatttgttattagtgttttttaagagygtgctaatgttactcattaaacactggatggattggtttttagcccagtttcaatggcggttgcattttattatgtggatgttgcctggtgtgttggcaaatgacatatgctgtcctcctagaatactcatggaaatgaggtgtgtctactcagaggcaagctgggtgaccaaaatctggcacttaatgaaatcaacaaagaccctgtttgtcaagggtgactttatgtttacgtaaatgattctcacctccataaggatgatgaggtgttttaccatcagtgattttacacttggaagaggtgattaaacacctctggtctgctgctcccattaaggaagaatatttttacattcattcttgc

SEQ ID NO: 46079 - DNA, 539 bp, Homo sapiens
cacacatatatatacacacatacacacacgcacacacacacatacacacacacacagggtggaatactatttggctttaaaaagggggagaaatgctgtcatatctggctctttctaatgctgaagtctcagctcagtgctacttcctcagagaccttcactgaaaaaaacaactaaaataagccctcttctttattctctatcttggcacctcaatcatttaattcataacattaatcactttttgtgactattaatttttgtctgtttcttccaacagaatacacatttatagagtaaggaccaygtttgctttccccaacatctagcatatacaaaacgttccataaatattttattggacacatgaatgcataagcacagtgatggaagggagaaagggagagttagttcaggtgatatttgggtatggcttgggcaatggcagatgtttagttactcaaataatgtgggtgatggtgagttgaaactcacttgggccacttctacgtaagtaaatcaaaaatgaagaaacaaaa

SEQ ID NO: 46080 - DNA, 580 bp, Homo sapiens
gtttctcaccatgtcttctctctctcgttcatcttatttttctaaaattttttccrgtttcagtggaccagattataatgttagtgattataacgctaattcaacatcttccacatccttatgtaacaatttcttccaatagatttatatatataaatatatgcatttatgtcattggatatatatattatgcatatttggcatgtatttttaataaaatgtagatatatgctatatacatatctgcatgctcatttcatcaatatctcatgtttagtctatccaattcttttctctcatatgttcatttaatgttgagttttagaatctcctccctcccaaaacaccgcctgtatccagtctgacttccttgcctttgccttatctacctggaaactatttgtgtttattgatcctaaattttttgaatatgtttgtcagttgggatcaccttttcctcctggcaatcttgtcattactgggtgatgcatgaaaaatcaacaatacagaaaataccaaaatgtctttcctggcttccctttacccgttggactttcttattcaaggccactttccttct

SEQ ID NO: 46081 - DNA, 580 bp, Homo sapiens
gtttctcaccatgtcttctctctctcgttcatcttatttttctaaaattttttccagtttcagtggaccagattataatgttagtgattataacgctaattcaacatcttccacatccttatgtaacaatttcttccaatagatttatatatataaatatatgcatttatgtcattggatatatatattatgcatatttggcatgtatttttaataaaatgtagatatatgctatatacatatctgcatgctcatttcatcaatatctcatgtttagtctatccaattcttttctctcatatgttcatttaatgttgagttttagaatctcctccctcccaaaacaccgcctgtatccagtctgacttccttgcctttgccttatctacctggaaamtatttgtgtttattgatcctaaattttttgaatatgtttgtcagttgggatcaccttttcctcctggcaatcttgtcattactgggtgatgcatgaaaaatcaacaatacagaaaataccaaaatgtctttcctggcttccctttacccgttggactttcttattcaaggccactttccttct

SEQ ID NO: 46082 - DNA, 582 bp, Homo sapiens
ggttgggcagagctagggtccctatatccttcacctcaagctgactggaagttcaggggtgtttatttttcacttgcggatggcacttgcctcttcactcagcctgaggctcacccttcagctcatcctcctagcaggagctcagtttgcccctgggctatcaccacttaacagtccctctagactcagccatcagcaggacctgacaaagatgcccatttsatctttccttctctctctcctacagatactaaatgctgctggaacaatgaaaagaaagaacggatgtcacaaaaagcattttcatttgatgaatagaactaaaagagcaaagcaattgaaagctcaacacaacacaggagggatccatggctgaggattgtatttcagaaccactgactgctcttgacaattgttaacccactaggctcctttggttagagaagccacagtccttcagcctccacttgataccaatacttaggaagaccaaagccagatggacaaacagcattgagaggctttagccctactcctctcagcttccatcctgtagagaacaggagtcaggagctgctggca

SEQ ID NO: 46083 - DNA, 536 bp, Homo sapiens
ccataatcccagcactttgggaggccgaggcgggtggatcacctgagctcaggagttcaagaccagcctggccaaaatagtgaaacctgtctctaaaagatataaaaattggtcgggcgtggtggcgtgcatctttagtcccagctacctgggaagctgaggtgggagaatcatttaaacccaggaaayggaggttgcagtaagccaagattgcaccactgcacttcagcctgggcaacagaactagaccctgtctaaagaaaaaaaaaaagagagagagagagaaatgacacttcaggctaaccaatcagaagctgccaattaacttatagctatagtactaggagtttcccagcaggataaggtaactatatttgtatttctctaatgatcattgatattcagcttcttttaatatgcttgttggccacatatatgtcttcttttgagaaatgtctgttcatatcctttgcccactttttaatgcagttgtttgtttttctcttgtaaatttgataagttccttatagatgcca

SEQ ID NO: 46084 - DNA, 621 bp, Homo sapiens
acaatatgagccagatatgatgctggatgtttcccccaacagtcataatgctcatgacaaacaataggttttgctacctttcatttatgcaaaagaagattgagtcttagagaagttaaatgactttctaaaggctactagatggcatatgataaaatcgtgattcacactaaggtccaatgagtaacaaaacccatgatygttcaatcacacaggtgcatgaattatttcaccaacataaactgagtataaagaaattcacttggctgggcacggtggctcacacctgtaatcctagcactttgggaggctgaggcaggtggatcacctgaggtcaggagttccagaccagcctggccaacatggtgaaaccccgtctctactaaaaatacaaaaattagctgggtgtggtgacagacatctgtaatcccagctactcaggagcctgaatgcaggaggcagagactgcagtgggccgaaattgtgccattgcactccagcctggaagacaaatttgatacatcgaaaagttttatacaataagtaaaaatgttgggagatgaaaggaagtattgaaacagcagataatgtagatacatttttaaaaagtatttgatttgt

SEQ ID NO: 46085 - DNA, 621 bp, Homo sapiens
acaatatgagccagatatgatgctggatgtttcccccaacagtcataatgctcatgacaaacaataggttttgctacctttcatttatgcaaaagaagattgagtcttagagaagttaaatgactttctaaaggctactagatggcatatgataaaatcgtgattcacactaaggtccaatgagtaacaaaacccatgatcgttcaatcacacaggtgcatgaattatttcaccaacataaactgagtataaagaaattcacttggctgggcacggtggctcacacctgtaatcctagcactttgggaggctgaggcaggtggatcacctgaggtcaggakttccagaccagcctggccaacatggtgaaaccccgtctctactaaaaatacaaaaattagctgggtgtggtgacagacatctgtaatcccagctactcaggagcctgaatgcaggaggcagagactgcagtgggccgaaattgtgccattgcactccagcctggaagacaaatttgatacatcgaaaagttttatacaataagtaaaaatgttgggagatgaaaggaagtattgaaacagcagataatgtagatacatttttaaaaagtatttgatttgt

SEQ ID NO: 46086 - DNA, 621 bp, Homo sapiens
acaatatgagccagatatgatgctggatgtttcccccaacagtcataatgctcatgacaaacaataggttttgctacctttcatttatgcaaaagaagattgagtcttagagaagttaaatgactttctaaaggctactagatggcatatgataaaatcgtgattcacactaaggtccaatgagtaacaaaacccatgatcgttcaatcacacaggtgcatgaattatttcaccaacataaactgagtataaagaaattcacttggctgggcacggtggctcacacctgtaatcctagcactttgggaggctgaggcaggtggatcacctgaggtcaggagttccagaccagcctggccaacatggtgaaaccccgtctctactaaaaatacaaaaattagctgggtgtggtgacagacatctgtaatcccagctactcrggagcctgaatgcaggaggcagagactgcagtgggccgaaattgtgccattgcactccagcctggaagacaaatttgatacatcgaaaagttttatacaataagtaaaaatgttgggagatgaaaggaagtattgaaacagcagataatgtagatacatttttaaaaagtatttgatttgt

SEQ ID NO: 46087 - DNA, 621 bp, Homo sapiens
acaatatgagccagatatgatgctggatgtttcccccaacagtcataatgctcatgacaaacaataggttttgctacctttcatttatgcaaaagaagattgagtcttagagaagttaaatgactttctaaaggctactagatggcatatgataaaatcgtgattcacactaaggtccaatgagtaacaaaacccatgatcgttcaatcacacaggtgcatgaattatttcaccaacataaactgagtataaagaaattcacttggctgggcacggtggctcacacctgtaatcctagcactttgggaggctgaggcaggtggatcacctgaggtcaggagttccagaccagcctggccaacatggtgaaaccccgtctctactaaaaatacaaaaattagctgggtgtggtgacagacatctgtaatcccagctactcaggagcctgaatgcaggaggcagagactgcagtgggccgaaattgtgccattgcactccagcctggaagacaaatttgatacatcgaaaagttttatwcaataagtaaaaatgttgggagatgaaaggaagtattgaaacagcagataatgtagatacatttttaaaaagtatttgatttgt

SEQ ID NO: 46088 - DNA, 612 bp, Homo sapiens
ttttttgaaaaggagtctcacttactctgttgcccaggctggagtgcagtggtgtgatcttggcttactgcaacctctgcctcctggtctcgaactcctgaccttgtgatccacccacctcggcctcccaaagtgctgggattacaggcgtgagccaccacgcccagcctttttttttttttttgaaacggagtcttactcacttctgttgcccaggctggagtgcagtggcatgatcttggctcactgcaacctctgcctcctgggttcaagtgattctcctgcctcagcctcccgagtagctaggattacaggtgtgtgctacgacgcccagctaatttttgtatctttartagagacggggtttcaccatgttggccaggcttgtctcgaactcctgacctcaagtgatctgcccgcttcagcctcccaaagtgctgggattacaggcgtgagccaccgcacccagccccacaatatcctttaatcttcagtccatgcccatctttccctgcatgtcccaagaatgtgttttatagttatttcttttgaactctaatataaatcaaactaaggtcacatactgtatttggaagttatgtttctttactg

SEQ ID NO: 46089 - DNA, 1196 bp, Homo sapiens
tccaccttcttggaaagcaacccattcccaggagaactcactcctgagagatggcatttaatctctccatgagggtccctcgtggaccaaacacctcccaccactcaacaccattacactggggaccaagcctcagtgagttttggtgaggaccaaccataccaaaccatagcaccactggaacaacaagattgagaatggctatcacaacatggaaatcctaacccattttcctagaaatwtactctctcattcatcccaatagctctgcagtccccacaacctctacttatcgtcctctgacccacaaccccaccaccaccttcacaaggaagagcaaagcattcatcaagaattttctgaactttgaaccacaaaacctaccgtgtgttcctctctgatttccgttacattcagagggtcccatggatctcaaactaaacactctagctctgttctatatcccgtattctcctaaaagaatttgtttctattaattattccatctctgtctataaattcaactttcctcccaccactgactttttcccatgagtacttaaatatattcaagtctctcccattgttaaaaaatgggagagtgacttccagcatgacagtatgaggactcccagtactctcaaggaaaactgttgaaaattatagacaacaacaaaacatctacagtctctgaaaatggtccattggcaaacagcaaatgaagaaatatctttcaagagaagctacgaaaattcagggagacaagtacctgtgggatttgaaccaagtctgctctctcctatccctcccagctcagaaagtcaagagactccacttgggatgtcttcatttttctgctggagaagcaggacaaaagcagatggttatgggccatcgctagcattcagagccgtggaacacaatctctttccaaaggagccaaacctcatttgcacagaatatgaagaagcttaaacctaagggagctctcgggagcattggaatttgtggtgaaatgcaactgggaagagattcaagacacaggtgaacctgtaggttactggcttgcagggaagaactagggaataagacagctgggaggatccttcttgtgtcaaagcaagtatcaaacaggaacctcaaactattccttcaaagaagccacaatttgattagatttatttgtgaagcaatgt

SEQ ID NO: 46090 - DNA, 532 bp, Homo sapiens
  misc_feature (1)...(532): n = A,T,C or G
annnnnnnnnnnnnnnnnnnnnnnnnnnnnnnnnnnnnnnnnnnnnnnnnnnnnnnnnnnnnnnnnnnnnnnnnnnnnnnnnnnnnnnnnnnnnnnnnnnnacattgatcattgtgcagactctcatgcrctccatactggaatgcaacatttcagtagtccttgtgatcaatgacattagcataaattataggccccaatatttgccttcctatttctaaccattgctctacctcttccactccattccacagagctacaataaaaaacaaaacacaaaatcgtggtttagcagaaaatgacctcatgctgttcatctgacatctctattggaaaaagtggaatattccatatttgccttacaatttcatctttataaagatgtaggtccccaaattacatcatatcataattaaattatcattcaaccatatcaccaatttaacttctttttgttatcattagaacctactgatttagtaacttgaatgatcaaaggaaatgcctctcatatttgccttgaccaaagtct

SEQ ID NO: 46091 - DNA, 541 bp, Homo sapiens
aaaatactattgttgaagcttctatgcatccatgacttttgcagtataactttagaactcctcttcaaggtaggagtccttgaatataaactaaacttttcatcccctttggctgataaaatgcaatagaattcatggtgttgttaaaagataaayggagatacattaaaattttaaggagtatatttcagcaggtaacatattgtgaattaggcagaccaaagagagttttggggctctgccaaagggcataaggggaagcttttatagggtcaactcagaagcaaggcaaagaaaatatttgcatggttaaagtggagcagtagctttatttggatcattccagggcaaagtccctagttagagactggttggcagtttcttattggttaagcttaagttttgtttttctatttacactgagttgggttttggctgacttacatagggaacactgtgtcttgagtcttaggagagtttgttacgcagcaatagatagtgagacagaggtcataatcttaaaaaaacgacttaagagaga

SEQ ID NO: 46092 - DNA, 585 bp, Homo sapiens
gggactgttttccttgataggttcttagatactctgggatgtttgggttctcagggacacctgctctttggctggtcaccgtgacctcagctcaccaaccagccggctgtcaagatgcrggcagtggatatacacccttaagtaacctgatgggggatccttcacactacagtagcactggaaaagtcagtcactaagtacttatcaatgagacactagcaaggaggtaccacgatggcggaagcactcaggcagcaaggaagactgacaccaacgctgactcagcgggcttccagaagaatgtgacacgtcagctaagacctcacaaacaccaagttgaaattttcctagcaaaagtgatgagggaggcagagggagctgtgtgtgcaaaagctgtgaggagagacagacagtgatgtgtatgtgaaaaccataagtatttcattatggagagataatagcatcagagggcatggtaggtataggagaagaaaacactgaagatgtaagcaagatctagatcatgaagggccttgactgccatgtagaaagatatggaccttatcctgagagctgtggaagctg

SEQ ID NO: 46093 - DNA, 491 bp, Homo sapiens
tatgttctgatgtcagaggttgtttcaaaaagccactctatgatataaaggtagggaaatctcatacatgtcacttaggctctctgaattccaactgccttatctgtgaaagggggtgtaagaaaaaaatgtgtttacttcaaagggctgttttaaatatgatgcacatgactggrggcagtagtcggggaagagtcttctattacagtgcctggcaattggtgattgtgaagtatcattgtaactaaaaagcacgttaggctgggcgcggtggctcatgcctgtaatcccagcactttgggaagccgaggcaggtggatcaagaggtcaggagatcgagaccatcctgactaatatcgtgaaaccccgtctctactaaaaatacaaaaaattagccaggcatggtggtgggcgcctgtagtcccagctactcaggaggctgaggcaggagaatggcgtgaacctgggaagcaaaggtcgccctgcactcc

SEQ ID NO: 46094 - DNA, 491 bp, Homo sapiens
tatgttctgatgtcagaggttgtttcaaaaagccactctatgatataaaggtagggaaatctcatacatgtcacttaggctctctgaattccaactgccttatctgtgaaagggggtgtaagaaaaaaatgtgtttacttcaaagggctgttttaaatatgatgcacatgactggaggcagtagtcggggaagagtcttctattacagtgcctggcaattggtgattgtgaagtatcattgtaactaaaaagcacgttaggctgggcgcggtggctcatgcctgtaatcccagcaytttgggaagccgaggcaggtggatcaagaggtcaggagatcgagaccatcctgactaatatcgtgaaaccccgtctctactaaaaatacaaaaaattagccaggcatggtggtgggcgcctgtagtcccagctactcaggaggctgaggcaggagaatggcgtgaacctgggaagcaaaggtcgccctgcactcc

SEQ ID NO: 46095 - DNA, 2012 bp, Homo sapiens
ataaaatagaaggccttttttgcagagtcaagcaaacaaggaatgcaactgactttaagtgatgttttaaacacttttctgacaagaaattccaaatctcttcaataacaacagattacaaacaaactctaaaaaaaaaaagaagaaaatctgaagcttaaatatcagaacgtccagttaaaagcagtactaacttcccattctgtcttcatttctagccccatgactgagctccatcctcagttacgcacagttactgcagatgctgataggcattcccagtctgaaggatttataagtcatccttattcactagcctgccttttgccttgatgtaaacagttacagtggtagaactttgcaaaaatggtattaatcaggaatgaggaatactttctattagaaatacttcctgttcacacaayattttttaatcaactgagaaacgctcagtataaagaaacaacctggaagagatggtgctatgtggaacaagtcacacagcgttttcagagttaaaagcatataatacatgtcaaatagctgaaacagcagtgcttgggttcataaaagcagaatagggtgaatctcgtaagtgtggactgcctaactaggagaccttctgattttgaatgtctctggtggtgtttcttacctttgcttctcacctctttttattgtatcctttgtgctttctcaagacaaattccagagtaggcgaagaagtggtgtgacatacggaactgcaaacatctgcttatcacctacttgtccaaccatcacctggctttccagcaaaggaaagtccccactagggcttctactcacaaccaaattctgagtcactcgcctgacctccttgctaatcaacttagcatagcttctactttactactaaatgccatacatctgcttatcaattatcaagccacctgctaagaatttgtctttgcctcagggcactttctcttagtgcaagtgtggtatcgtgaaatgagctgctcaatggagaactaccccgtgcagtatctgaagttaatcattgcaatttcttttttttttcttttgagacagagtcttactctgtcgcccaggctggagtgcagtggtgcaatctcagctcactgcaagctccacctccctggttcacgccactctcctgcctcagcctcccaagtagctgggactacaggtgcccaccaccacacccggctaattttttttgtatttttagtagagacggggtttcaccgtgttggccaggaggtctcaatctcctgacctcgtgatccgcccgccttggcctcccaaagtgctgggattacaggtgtgaatgaccacgcctggccaatcactgcaatttctaatcacagctgaatgtttttaactttaaaggatgagaaaagtaaacccaaaagaaacctaactgtataaagttaaattaggcatagaagaagcttgagaaaattaaattaagctcagaactgaaaactatcaaattcctattcaagataactctcctatgctattaaaactattctctatcatttttaatgctttaattatggaatatagtcgaatgccttggctttatgatctcaataaatataattattgttgtgtccataaacctatgaaataaattacaaatgatattttataagttgtttttcttacctattcttcaactttatttacaacaacaaaacacataatctatgaaagagaggtaacaattatcctactttaaatggttgctgaaaaaagaaatgtaaaattacttagaacagtgcttgacacccaaggagcactttagaagcatttgctattgttattgttatttattcatttccctaacacaaccaataacatactattcaagatcactttacagtcactatactacatatatgcatatgtttttttctggagtgcttataaattgcaagaagtgtttcttttgacattatttaaacaattgcattttaaaagaatttctcaagtattataaa

SEQ ID NO: 46096 - DNA, 962 bp, Homo sapiens
agaatcctctcaaatatagagcattggtaaccaggtggagcaggtatgggtttgcagaaaacctggaaaagagattctgcaccaccctctggagagcacatttagcaatcccacttggacatttatgtacagaccagtctcgttcagacctcacacacgggggctgctcttcattctttctcagacaaaaattgtcaaatacactaaggaatgggtaaatttataatggatgttcgtggggaggcatgcaagtcgaaatagcatcctaatctgaatacacttgaaactgaagatatttaatcactacttgcggaaaaccaggaaaagtagactttttgaaaaattcatttaatgctaagtgttatttgctatgattgtattatccaatgctgaattcaccatttaacctagaaacttttatgccaatacaaaatcaacaggtgttctcttcagttccttgttttgactcccaagttcactcaagccttttaatgcagcaaccaaatgtcatgcatttggaaaatctgtcatagaagactgtccaactgttgctttattacttgktatattacgctagagaagtttaaagaaatatgtggaaagaaataataaagaactctcatatatggctgtctcaataaaatattatttttctaaacataggcctcttgagcctatgaaattcatataaaatgtctagcaatataatatgtatattttaaataacttaccttagataagatatattgtgtatgtttttgggcatttacttgttcttttagatgtcttctttgtcttttcataaatgcaatagagaaggagattctgtgtgatcctaatatgtgtacaacatattattgaaactcaatttcacacttaaaacaacttctttagcttataaaacttttttagtcagaaatatggaaacaattacaagtttgggcatgaattaacaaagaaaa

SEQ ID NO: 46097 - DNA, 504 bp, Homo sapiens
tccatttttttatgccaacatcagagcatacaaagcataaagaacaatccagagatagcagaggggtttctttctaaaagagcttctcattctttcaggtgaattctagcactgggtaaagagtttacacaatttatrtaaacttcccataaaagaaactgaatgttttattcttttacttaatttcttttgcctcacgcataacacatttgtctacaactctagtcgtatgaacaataaagatataataaagtatcttaacttattgttctccctggactacacattttgggaaaggttaattttcctaaaggaaattaacatgttgaatagaccccctaccaccagacacctctatctgaatgtcaagtagaaatctcaaattcgaaatgtctaacatagaactcctgatctcctctccaaatcaattgtttaggacaaaagtcaagaagttgtctttaagtcttctctttctctgttacctcatacccaattcatgggcaa

SEQ ID NO: 46098 - DNA, 504 bp, Homo sapiens
tccatttttttatgccaacatcagagcatacaaagcataaagaacaatccagagatagcagaggggtttctttctaaaagagcttctcattctttcaggtgaattctagcactgggtaaagagtttacacaatttatgtaaacttcccataaaagaaactgaatgttttattcttttacttaatttcttttgcctcacgcataacacatttgtctacractctagtcgtatgaacaataaagatataataaagtatcttaacttattgttctccctggactacacattttgggaaaggttaattttcctaaaggaaattaacatgttgaatagaccccctaccaccagacacctctatctgaatgtcaagtagaaatctcaaattcgaaatgtctaacatagaactcctgatctcctctccaaatcaattgtttaggacaaaagtcaagaagttgtctttaagtcttctctttctctgttacctcatacccaattcatgggcaa

SEQ ID NO: 46099 - DNA, 552 bp, Homo sapiens
tacatttgtgctttaatctccttmtctgtaaaatgggactaataatagtactgacctcaccaggctctgaagaagatttaaagaggctatacctgaagagcattcagccagctgctattattcaccccattatgagtaagggctccttcccaagtgtaatttgcataagcatctgccttttcccctcaaagccctgcacagtgtagacatggttcttttttctaatttcccactcctttccccaaataatcctgttcacaaatgctttaatttgcaaagaaagctcaaaatcatctgggggaagtaatgggtccaccttagatgtattcataccacaacaccctctagttacctctagacactagacactctcaattgctgcctctctctccttttcccaaattgcccccttttcctccaagatgcagagaaattcagataaaccctgaatcctctccataaactggaagtttaaactcttttgggtgctgagcaaaagccatatactagcccttcctggattgaagatatgacagtggccattattcacta

SEQ ID NO: 46100 - DNA, 552 bp, Homo sapiens
tacatttgtgctttaatctccttctctgtaaaatgggactaataatagtactgacctcaccaggctctgaagaagatttaaagaggctatacctgaagagcattcagccagctgctattattcaccccattatgagtaagggctccttcccaagtgtaatttgcataagcatctgccttttccccycaaagccctgcacagtgtagacatggttcttttttctaatttcccactcctttccccaaataatcctgttcacaaatgctttaatttgcaaagaaagctcaaaatcatctgggggaagtaatgggtccaccttagatgtattcataccacaacaccctctagttacctctagacactagacactctcaattgctgcctctctctccttttcccaaattgcccccttttcctccaagatgcagagaaattcagataaaccctgaatcctctccataaactggaagtttaaactcttttgggtgctgagcaaaagccatatactagcccttcctggattgaagatatgacagtggccattattcacta

SEQ ID NO: 46101 - DNA, 591 bp, Homo sapiens
ttcctgatggtgccgactgtggcttctcctgctgacctgggttagaagcagcattgagccaaagctctgtctgcagtgagaatccggtttcccatcttgtccatggcagcactgctcctcagaggaaaaacctgtctggatgggacaaggctgatgggctggcccctctctcagtgcctcaygggtttagagcactcagaggagcctgctacttcaatggctctcctgacctgcccatctcctcacagggccagaagccttcagtgggtgggagggtaggaaggcagggatgaaataagcagtcaccttgggagttttggtaattaggaattctgtccagaaagtttgaaaacaggagcatttggtacattttgcttccattatctccactcgattagagtattataatgaagaaattaaacacatgtacaaagtaagcaataaaagtatttttaggcagggccgcagtggctcacgcctgtattctcagcactttgggaggccgaggcaggtggattacctgaagtcaggagttcgagaccagcctggccaacatggtgaaaccccgtctctactaaaaatgcaaaaatt

SEQ ID NO: 46102 - DNA, 591 bp, Homo sapiens
ttcctgatggtgccgactgtggcttctcctgctgacctgggttagaagcagcattgagccaaagctctgtctgcagtgagaatccggtttcccatcttgtccatggcagcactgctcctcagaggaaaaacctgtctggatgggacaaggctgatgggctggcccctctctcagtgcctcacgggtttagagcactcagaggagcctgctacttcaatggctctcctgacctgcccatctcctcacagggccagaagccttcagtgggtgggagggtaggaaggcagggatgaaataagcagtcaccttgggagttttggtaattaggaattctgtccagaaagtttgaaaacaggagcatttggtacattttgcttccattatctccactcgattagagkattataatgaagaaattaaacacatgtacaaagtaagcaataaaagtatttttaggcagggccgcagtggctcacgcctgtattctcagcactttgggaggccgaggcaggtggattacctgaagtcaggagttcgagaccagcctggccaacatggtgaaaccccgtctctactaaaaatgcaaaaatt

SEQ ID NO: 46103 - DNA, 607 bp, Homo sapiens
atgtgcagtctgtgtaagtgtgtgcacataggtccaaaaactgtcacaaaagactggacatagactaatccactcctttttgggtgcaagagattcctaaaattgcctgcctaacccacctccttacttcttctaggggaggaaagatttctgctggaaggaaagttaagttaatcttcctattaaaatgctgagtgggcattagaagggaggaaagcataagaaagctaatcagactggacataaaggaggaagcttttagagaagtgaatgagttgaatgagcctgtggaggtgagagaacagtatagagcaggaaaagggattctagtaaatgttgcaaaaactgtattatttgtttttctattgctgcatcacagaktaccccaaacgtagagacttcaaacaacacaaatttattatctcacagttttcttgggtcaggagtccaggcacaccttagctggatcttctgtccagcctctcgcaagcctggaatcaaggtgcctcttgtgctacagctcccctttggagcattgggctctcttccaagttctttcaaggtgttcactgaattcagttgttgactggattccctttgtggttgc

SEQ ID NO: 46104 - DNA, 513 bp, Homo sapiens
ccaagatcacgccactgcactccagcctggtgacagagcaagactctgtctcaaaaaaaaaamcaaaaaaaacaaaacaaaagatgggtcctggcctggtgcagtggctcccacctgtaatcctaacactttgggaggccaaagtgggaggatcgcttgaggccaggagttcgagaccagcctggacaacatggcaaaaccctgcctctacaaaaaattaaaaacttagccaggcatgacggctcaaacctgtaatcaccaacatgttgggtggcccaagcaggaggattgcttgaggccaggagtttgagaccatcctgggcagcatagtgaaacttcatctctattatttaaaatgaaaaattaattaaattaaaatacaaacaaaagatagatcctttttagtgatgtctcctgagggactggggatgggggaaaggctgcccaagtcttccaagggcagtgtggcaggcccagcctgtgaccagtgcagtagctgaatccctggtgctc

SEQ ID NO: 46105 - DNA, 513 bp, Homo sapiens
ccaagatcacgccactgcactccagcctggtgacagagcaagactctgtctcaaaaaaaaaaacaaaaaaaacaaaacaaaagatgggtcctggcctggtgcrgtggctcccacctgtaatcctaacactttgggaggccaaagtgggaggatcgcttgaggccaggagttcgagaccagcctggacaacatggcaaaaccctgcctctacaaaaaattaaaaacttagccaggcatgacggctcaaacctgtaatcaccaacatgttgggtggcccaagcaggaggattgcttgaggccaggagtttgagaccatcctgggcagcatagtgaaacttcatctctattatttaaaatgaaaaattaattaaattaaaatacaaacaaaagatagatcctttttagtgatgtctcctgagggactggggatgggggaaaggctgcccaagtcttccaagggcagtgtggcaggcccagcctgtgaccagtgcagtagctgaatccctggtgctc

SEQ ID NO: 46106 - DNA, 561 bp, Homo sapiens
tgttctttttaattctttttttattatgctgttgtccttcacttagttaccccagactcacaattgtttttttttgggsatctcacctcacaacagaatgagacagaaagttctgtgcctctcccttaaaaaatatacacaaatatttttgttagagttcagcttactcatatttatattagtctaatagtatatgtaataaaatttaaaaaatactaatctgcagaaaaattaataaaggaaggggagaaaatagcatgctgaattcgaaagtttaaatcacatatgtggcctaattgtttttaaatattagttaactggctaatctataaaatattgtaaaaaggcaatgtaaaatattgtaaaaagtttaccaaatctgtgtgagtccattaggttccaatggacaccacaggattgcttgcggttgatgacttctgttcaagccaaatgagcaacctcattgttttaaagctgcctattgattgcctttgatataactgaaaatgaggcttccttgactcacttgtgatttgttttgaaatggaaggctgggaatgc

SEQ ID NO: 46107 - DNA, 553 bp, Homo sapiens
tttccccctcccccagttgaatgaggaccattgtttttagtcattttgcaaaccaagtgatttcatcagcaagcttgtgyctcactctcagcaagcatgggtcccactcacaggccaggtgagagcttctgcagtgcagaagatggcacacagggcaccctttggcaaaaacaaaaacaaataggcctgaaattctgcacttgtggaaatgacagaatccttgctgtgtttgagggatgttttactgaaggaattgaccacagtcgaaacaagaaatacaaactctttggattaataaattatttataataatttcttgagtattctcttagttttgtcaagctcttcgaaaacagtcttttccccctcattgttggtgctttctagtaaatgtgaagcaagaggacagacttaggacagataggattaactttttttgtccagcctttgtggataagagaggtcctgggtgaggcgggcacaatggactctctaaaaaataacagaatggaaattcccaaagcgtgtagacacagcatgctgctgtcgaaag

SEQ ID NO: 46108 - DNA, 599 bp, Homo sapiens
aaaggaagaaagtcttcttaaagaagagattggacctgggcataaaggctggacttggggagtcagataggtgtcaggaggatgtttttcaagggtggatattaaaataagaaccaaaaataaggatgagcacaggggatgtttggggttcacccagtgctctagcctaaggggaaaggaatggacatttgttgagccctatgtaagtgccgtatgctttactcagtggtgaatacatgtcatctcacattctcagctctagccctgttagactccggcggctcttcaaacaactagaccttcagatttgcacatctcttggccacaaagacttcttaccactgtcttttcctgaagaaaatctgtcaactgwtgcaagaaatctgagcggaccttttgcagctattacttctttttgctcctttagcattctctcacatagcacttattctaccgtataaaaattgtctgcttcttgtttttccttgcaaactgccacttttctatgcatttctccttgcatatttggcacctagttacacatagtagacaatcactgaatgtaaacattcttttatggccaaaatgcttaaagccac

SEQ ID NO: 46109 - DNA, 621 bp, Homo sapiens
tgcggtggtgtgatctcggctcactgcaggctctgcctcccgggttcacatcattctcctgtctcagcctccccagtagctggaactacaggcgcccgccaccgcacctggctawctttttgtatttttttagtagagacggggtttcactgtgttaaccaggatggtctcgatctcctgaccttgtgatccacccgcctcggcctcccaaagtgctgggattacaggcctgagccaccacgcccagccacaaaaactttttatatatttagaattacacagtttcgaaccatattaaatccattttatagcagtatgaaatgagacgaggataatgtgtattgaaataccctgcgacatttgtagaataatatggaagtagcctagagatacctcgttcctcagtgagatgcattgccatttttgtttattaacaaaatcctcctggtcaccatttcagctcacccagaagttaaactccttattctgtatgtttgttcatttgtaattaatgataagtgttttttagtgttagcgtcttcgtagttagcacgaaggagctttacagaagcctcaacttgtttctcgaattttagtaaagttgatttcaccatagagcaa

SEQ ID NO: 46110 - DNA, 656 bp, Homo sapiens
ttttttgagacacagtctcacgctatcactctatcatccagactggagtgcagtgacacaatcatggctcactgcagcctcggcctcccaggctcaggtatcctcccgcctcarcctcccaagtagctgagactacaggaatgtcccaccacaccaagctaattttttttttaaaaattttacagagacgaagtttcgccatgttgcccaggctggtctcaaactcctgggctcaagtgatccgcctgccgcccaaagcgctgcaattacaagcatgagccaccacgcccagccgtgaaaaattaattcttaaaaaaggtaaggatcagcgttgagtgtgcatttacagaacagaattcaacagatacctttgtttctttttttctttttctttctttctttttttttttgagagagtctcactctctcacccaggctggagtgcagtggcgcgatctcagctcactgcaacctccaagttcaagtgattctcctgcctcagcctctcgagcagctgggactacaggcgcatgccaccacgctcagctaatttttgtattttttggtagagacagggtttcaccacattggccaggtgggtctcagaattcctggcctcaagtgatcctcaagcctcagcctcccaaagtgctggg

SEQ ID NO: 46111 - DNA, 656 bp, Homo sapiens
ttttttgagacacagtctcacgctatcactctatcatccagactggagtgcagtgacacaatcatggctcactgcagcctcggcctcccaggctcaggtatcctcccgcctcagcctcccaagtagctgagactacaggaatgtcccaccacaccaagctaattttttttttwaaaattttacagagacgaagtttcgccatgttgcccaggctggtctcaaactcctgggctcaagtgatccgcctgccgcccaaagcgctgcaattacaagcatgagccaccacgcccagccgtgaaaaattaattcttaaaaaaggtaaggatcagcgttgagtgtgcatttacagaacagaattcaacagatacctttgtttctttttttctttttctttctttctttttttttttgagagagtctcactctctcacccaggctggagtgcagtggcgcgatctcagctcactgcaacctccaagttcaagtgattctcctgcctcagcctctcgagcagctgggactacaggcgcatgccaccacgctcagctaatttttgtattttttggtagagacagggtttcaccacattggccaggtgggtctcagaattcctggcctcaagtgatcctcaagcctcagcctcccaaagtgctggg

SEQ ID NO: 46112 - DNA, 539 bp, Homo sapiens
attagatccccagaacttattcatcttataactgaaagtttgtaccctttgaccaacatagaagtttcttaggaaaacctgccaaagtaagatggaaatagaatctattacataaattcacagtgtccataagaaaaaagacaaagggccatttgttcgggaaatactcagcgcttccctaatacattatgcaatgtgaatcatggcctcaaaaatgttcctatagtgaatagaaatatggctctgagcttccaggaagccacaacaataaaggaaatasgattattaatgatttattgtgtcctcaagattaagtgagtttcttggaagcacaccttcctggagctgagacttgatttttctttcataaagaggacactataacatactgaacaccattttattcccaaatatagtaagtttcttagagcagtgtttccttctagagggaaaacatgaaagcccagagtagagggtggagaccagagaaagttcttttccctaattttaatttagaccacaatgacaaatcctagcga

SEQ ID NO: 46113 - DNA, 560 bp, Homo sapiens
cagccagggtgacagagtgagactctgtctcggaaaaaaaaaaaaagaaaccattctatgaccatgggctttcattcctttaatattcttccatatttcatttgctaatattttatttaagatttttaggtctatagatcttaacaataacagccaagcattaatgatctagggtacttagatagaagtagcctgctaactttttgtaattatgttaccaaaagtaaccaagacattggtacctaaatccaaaatactgggttatattcaagttatattcttgatatatattaatataatcctacttgatatttttgctgtaattcacatctttyccaacaaaagacttgatgtgaagtttcaccagaaaataaaagagaatttcagttatcttcactaccaattacataattatatattttaaatccctgacatataaaaattacatattttgtccaattttactcagttttaaaaataaagattaggagaagagaagggaattactaatggtttgttaatcagctttggcaaaccatgcttgtcaaatgatgacttaa

SEQ ID NO: 46114 - DNA, 560 bp, Homo sapiens
cagccagggtgacagagtgagactctgtctcggaaaaaaaaaaaaagaaaccattctatgaccatgggctttcattcctttaatattcttccatatttcatttgctaatattttatttaagatttttaggtctatagatcttaacaataacagccaagcattaatgatctagggtacttagatagaagtagcctgctaactttttgtaattatgttaccaaaagtaaccaagacattggtacctaaatccaaaatactgggttatattcaagttatattcttgatatatattaatataatcctacttgatatttttgctgtaattcacatcttttccaacaaaagacttgatgtgaagtttcaccagaaaataaaagagaatttcagttatcttcactaccaattacataattatatattttaaatccctgacatataaaaattacatattttgtccaattttrctcagttttaaaaataaagattaggagaagagaagggaattactaatggtttgttaatcagctttggcaaaccatgcttgtcaaatgatgacttaa

SEQ ID NO: 46115 - DNA, 1778 bp, Homo sapiens
cattaaaatacaatttcaaataatacaacacagcagtataaaatttaccaaaagttggaaaattacttgttttctgcaagtcatttcgagcaaagacacttggcacccgggaggtaacaaagcaggcctttaaacagataggtcttagaataataattttacttcgttaatgagttctatcatatttaaattagaatggtagatctattatttcaaacagaatcatctatagacacatgattttctgaagtgttttctgcagcatgacagtggtcattgaatcactttttacaaggagagtcctttttactgtttttgctagtctttcgggttaaatcttattatatttttactaatagacatcctacatggaatataatacttaaatgttggctgggagtggtggctcaygcctgtaatcccagcactttgggaggccaaggtgggtggattacctgaggtcaggggttcaagaccagcctgaccaacatgatgaaactctgtctctattaaaattacagaaattagccaggaatggtggaagatgcctgtaatcccagctacttgggaggctgaggcaggagaatagcttgaacctgggaggcggaggttgcagcgagcagagatagcgacattaaactccagcctgagtgacagagcaagactctgtctcaaaaaaaaaaaagaaggtaaatgttaattgatgaagtaaacatgcaagtcaatcagcaacaataaaaccaatatgactttagcctacattatgaaaagtggaagaatgagaagttcaaatataatatgatctatggtgaagcaactagagatactgcacccaggcagaaaagatttataaggggacatgatagttgtactcacatatttaaaatgacttcatcagaaattggaattaaatgctttatatgaccccgaagaataaaacaagtttgtgcttgagagttatagattggtttcagtaaaatatgtgtaagaactttgaacaaatatgaatgaaatgattttcatcatgtgatattcatgtctatatttctgaaagctcgaaaaaagttgaatgatcgcttttctgggttttgtagaggtaacacactccaacttgttccaaggggctccatcactcaccaggaaacacctgacatatgttacatccctttggagcttcttattcattgtaaagctgaaataatattacatatcctgcaggggcattgtgaagaatataaatgtttggcaaatcagaaaatgactaacactaaatgggcatttaacacaggctagttgaacgtgaatatgaaagattcaactgggtttatgaaaagcaccacagttaaaaaatagctcaaagaataaagccgtcaggtttaaaaatacctattaaaacactgggatatagagaaatccatatatgccttattttatgaaaatcctttatgtctttcatgaagctttatagttatatatacaccgaaagacaccagtctttcctcaccacaatagaaatctggagcagaaggagtataatatcaataaacattaagttcacctgcatacaggaacaacaataaaataaattagttaaataaggtagtagtttatttctctcttagataagaagaaactctgagaagatagtccagttctggtgtggcagctccatattcttcagggtcccagcttcctcccctcttgctgttctaaccatctttattgtcctgccccatgctgcaaaataagtgttcattttccagtcataattttatgca

SEQ ID NO: 46116 - DNA, 1778 bp, Homo sapiens
cattaaaatacaatttcaaataatacaacacagcagtataaaatttaccaaaagttggaaaattacttgttttctgcaagtcatttcgagcaaagacacttggcacccgggaggtaacaaagcaggcctttaaacagataggtcttagaataataattttacttcgttaatgagttctatcatatttaaattagaatggtagatctattatttcaaacagaatcatctatagacacatgattttctgaagtgttttctgcagcatgacagtggtcattgaatcactttttacaaggagagtcctttttactgtttttgctagtctttcgggttaaatcttattatatttttactaatagacatcctacatggaatataatacttaaatgttggctgggagtggtggctcatgcctgtaatcccagcactttgggaggccaaggtgggtggattacctgaggtcaggggttcaagaccagcctgaccaacatgatgaaactctgtctctattaaaattacagaaattagccaggaatggtggaagatgcctgtaatcccagctacttgggaggctgaggcaggagaatagcttgaacctgggaggcggaggttgcagcgagcagagatagcgacattaaactccagcctgagtgacagagcaagactctgtctcaaaaaaaaaaaagaaggtaaatgttaattgatgaagtaaacatgcaagtcaatcagcaacaataaaaccaatatgactttagcctacattatgaaaagtggaagaatgagaagttcaaatataatatgatctatggtgaagcaactagagatactgcacccaggcagaaaagatttataaggggacatgatagttgtactcacatatttaaaatgacttcatcagaaattggaattaaatgctttatatgaccccgaagaataaaacaagtttgtgcttgagagttatagattggtttcagtaaaatatgtgtaagaactttgaacaaatatgaatgaaatgattttcatcatgtgatattcatgtctatatttctgaaagctcgaaaaaagttgaatgatcgcttttctgggttttgtagaggtaacacactccaacttgttccaaggggctccatcactcaccaggaaacacctgacatatgttacatccctttggagcttcttattcattgtaaagctgaaataatattacatatcctgcaggggcattgtgaagaatataaatgtttggcaaatcagaaaatgactaacactaaatgggcatttaacacaggctagttgaacgtgaatatgaaagattcaactgggtttatgaaaagcaccacagttaaaaaatagctcaaagaataaagccgtcaggtttaaaaatacctattaaaacactgggatatagagaaatccatatatgccytattttatgaaaatcctttatgtctttcatgaagctttatagttatatatacaccgaaagacaccagtctttcctcaccacaatagaaatctggagcagaaggagtataatatcaataaacattaagttcacctgcatacaggaacaacaataaaataaattagttaaataaggtagtagtttatttctctcttagataagaagaaactctgagaagatagtccagttctggtgtggcagctccatattcttcagggtcccagcttcctcccctcttgctgttctaaccatctttattgtcctgccccatgctgcaaaataagtgttcattttccagtcataattttatgca

SEQ ID NO: 46117 - DNA, 575 bp, Homo sapiens
tggcccttctgcaagtgccaggcctaatgatgtttggggacccgcctcctccttgctgaatgctcatttctgtctggactctatttaatgcttctgggtcctacactctttcgcttcttttttttggctctggcctcctttctaaatgtgtacccctttcccagaagggactcccaggtctttctgtggctcttgttaatgagcacactgctgctgctgctgcagctgctgcagctgctgctccctccaccactccgccagcctcttcagtcattttattctccacattttctatcactagattatctttattttgtctttgagacagggtttcactgtgtcgcccaggctggagtgcagtggcatgatcatagctcactgcaacctcygcctcctgggctcaagcagtcctctcccctcagccaagcaagtagcaagggactacaggtgcaggccagtatgcccagctaatttttttttttttttgagacagaatctcgctctgttgcccaggctggagtggtgcagtggcataatcttggttcactgcaacctccgcctcccaagttcaagtg

SEQ ID NO: 46118 - DNA, 575 bp, Homo sapiens
tggcccttctgcaagtgccaggcctaatgatgtttggggacccgcctcctccttgctgaatgctcatttctgtctggactctatttaatgcttctgggtcctacactctttcgcttcttttttttggctctggcctcctttctaaatgtgtacccctttcccagaagggactcccaggtctttctgtggctcttgttaatgagcacactgctgctgctgctgcagctgctgcagctgctgctccctccaccactccgccagcctcttcagtcattttattctccacattttctatcactagattatctttattttgtctttgagacagggtttcactgtgtcgcccaggctggagtgcagtggcatgatcatagctcactgcaacctccgcctcctgggctcaagcagtcctctcccctcagccaagcaagtagcaagggactacaggtgcaggccastatgcccagctaatttttttttttttttgagacagaatctcgctctgttgcccaggctggagtggtgcagtggcataatcttggttcactgcaacctccgcctcccaagttcaagtg

SEQ ID NO: 46119 - DNA, 549 bp, Homo sapiens
gcaagtgccctaccagcaacattttacttccatctcctgcttctatctggttctttcaggttgtccttattgacttctgctttttctagaaggagattcatggattgcctttctatatctccttcagtccagtcctgttagtatctgacagcattgtgataaaacttcttgcttgtgcctgttaaaaatatagccttttccacatwgtgttttctatacaattttattaggaatctggaagacagaaaattaggcaactgtattggtgtcatcccaaagactctgcagagccttttctaattgccttggccaattgtggtgttgcttggaagaggagaccaggcaccactgtggtccttcctgatcttgacatttcagaaatagaatatcccttattagaagcatggcatatacaacttgttttataagatgaactttttttcccttctagtcagatgtcagctggatccttgtattttcataaattacacagtttatttgacaaaggctaatcaatactctttcagaatcctaatttctatctatacc

SEQ ID NO: 46120 - DNA, 541 bp, Homo sapiens
tgcatggacacagcaaatttggtgaaatctatcaaattcatgacatttttgtgtttttgagtagatttctcagggaaaccaccaaggaactgaaattggtagctaggttatcagtggggccrctggagaagcacgtttagacccggaacccaggaggctgaagccattcgtggtatggttaattaatgttaatggtagcagtgagaaggaagagaagatgagggtgaagaaggagggagaactctgagaaggtcacttttgcacagcctgtaatttttgtggctcatttgtaggaaagtgagcttgcatgatgtgctcatgtaacgtgtaacatttcaggacacgttctcattgttttcttaagttcctaagccataagaaaaatcacggaaaaatggaggatttgaatatctgaaagctgttagtccaatttggccgaggcagcttttgggtgcaaaatttataaaatgccttgaaagtattttccacagcacattcggtgacttcactcaagtcctgcttaaatggtctattttggttt

SEQ ID NO: 46121 - DNA, 541 bp, Homo sapiens
tgcatggacacagcaaatttggtgaaatctatcaaattcatgacatttttgtgtttttgagtagatttctcagggaaaccaccaaggaactgaaattggtagctaggttatcagtggggccgctggagaagcacgtttagacccggaacccaggaggctgaagccattcgtggtatggttaattaatgttaatggtagcagtgagaaggaagagaagatgagggtgaagaaggagggagaactctgagaaggtcacttttgcacagcctgtaatttttgtggctcatttgtaggaaagtgagcttgcatgatgtgctcatgtaacgtgtaacatttcaggacacrttctcattgttttcttaagttcctaagccataagaaaaatcacggaaaaatggaggatttgaatatctgaaagctgttagtccaatttggccgaggcagcttttgggtgcaaaatttataaaatgccttgaaagtattttccacagcacattcggtgacttcactcaagtcctgcttaaatggtctattttggttt

SEQ ID NO: 46122 - DNA, 541 bp, Homo sapiens
tgcatggacacagcaaatttggtgaaatctatcaaattcatgacatttttgtgtttttgagtagatttctcagggaaaccaccaaggaactgaaattggtagctaggttatcagtggggccgctggagaagcacgtttagacccggaacccaggaggctgaagccattcgtggtatggttaattaatgttaatggtagcagtgagaaggaagagaagatgagggtgaagaaggagggagaactctgagaaggtcacttttgcacagcctgtaatttttgtggctcatttgtaggaaagtgagcttgcatgatgtgctcatgtaacgtgtaacatttcaggacacgttctcattgttttcttaagttcctaagccataagaaaaatcacggaaaaatggaggatttgartatctgaaagctgttagtccaatttggccgaggcagcttttgggtgcaaaatttataaaatgccttgaaagtattttccacagcacattcggtgacttcactcaagtcctgcttaaatggtctattttggttt

SEQ ID NO: 46123 - DNA, 597 bp, Homo sapiens
tgataatagtttgttggaagtttctctcagaatgtattttccagtttataacattcatctrctagatgatattaacaaataaagtagtactagttctattcttgctgcagaagaaaaaattacagaaccccaagtttctcatcagtaaaatctgagcaaacattgatcactggaggtaaaaccatgggtaagaagtaataaacattgattaatttatttcactgccaatcttccgggtccagggccaagcgtcggtgggatgatcaactccagcagagtttccagcaggcttctccttttccataaaatggatatcaacagcactctgtacctaaataatgtctaaattacagaaggcctccctcagacagcacttgataagggacataggaaactcgaccctggcactgctggctatatttgtcaaaagcgtagtgtgcagccaagatacctgtggtaattttgaagatattctgtgtattaattgctcagagtttcctttagtgtgatctctatagaagaatatatagaatatcatttcttttatattctatatgataaagggctctatggtcagattaatttacgagacgctac

SEQ ID NO: 46124 - DNA, 593 bp, Homo sapiens
catgaggtctttttagactataatgagaaaggtcttcttatgacaaagaaatgatcattttcagctataactgtgttttctcttaaaatggttttatcctgtattttaattttcaaacaatccaaaagtatttttagtaagtaaattatgaataaaaatttatttttatgctattgtattttaaaaattagttaataaagktagcattatttttgatagcttccacggagaattttaatacatcaagtacattctattataatagtcacaagaggatattcagtttgtaaaattgttgaaaagctgagttatagtagaaaaaaccagaactttaattttcaaatttgccactaaactgttgtgtgattgaagacaaattgtttaactgccctgaacctcaacttccttatttgtaaaaaaggcaatctatctcaaaagtctcctgtgttgataagcgaaatactcttgtaaaggtattttataaacaacaacattatatatgaaagaaaaatacaataaatcaaggaatactatccctattcttttagtaaatgtcatgtatctcatactcaagaactcatggcaaatggcaa

SEQ ID NO: 46125 - DNA, 600 bp, Homo sapiens
tgcatctttgagcaggagtgggatgaagggttgggaaaaacagcaagtaggatccaaccactgatttgggaaggaattatcattcccaaggtgaagaagcaagcctgggtgatgtgcacaagcagacaggaagtccacaggaaataggaaggaaaacatccttcttcctgtcctaaccccatyatttctctttagtgccctttattggcagactctaacatgaagccagcaaataaggcacaaatgtggttttcagagtcccagatccagtaccacaaagcaaagtacagaaaggtggatttggagttgagaaaaaagttgtaactggcaccgtgtatgtggcagatttgaactgtgtctatttagctaagctagaactaatttccccaaattctcttctctgcaatgttccagattagtatcagctaaaaaaacaaacaaacaaacaaacaaaaaacaaaacaaaacaaaaaaacaaaaaaagacttttgtgagcaatttgaaggatggaagtgaaaaaaaaaaccggctttatttttctcatcctctgaagattgaaacagggaaaggagtgctttcacatctcacatatgtggtcct

SEQ ID NO: 46126 - DNA, 600 bp, Homo sapiens
tgcatctttgagcaggagtgggatgaagggttgggaaaaacagcaagtaggatccaaccactgatttgggaaggaattatcattcccaaggtgaagaagcaagcctgggtgatgtgcacaagcagacaggaagtccacaggaaataggaaggaaaacatccttcttcctgtcctaaccccattrtttctctttagtgccctttattggcagactctaacatgaagccagcaaataaggcacaaatgtggttttcagagtcccagatccagtaccacaaagcaaagtacagaaaggtggatttggagttgagaaaaaagttgtaactggcaccgtgtatgtggcagatttgaactgtgtctatttagctaagctagaactaatttccccaaattctcttctctgcaatgttccagattagtatcagctaaaaaaacaaacaaacaaacaaacaaaaaacaaaacaaaacaaaaaaacaaaaaaagacttttgtgagcaatttgaaggatggaagtgaaaaaaaaaaccggctttatttttctcatcctctgaagattgaaacagggaaaggagtgctttcacatctcacatatgtggtcct

SEQ ID NO: 46127 - DNA, 600 bp, Homo sapiens
tgcatctttgagcaggagtgggatgaagggttgggaaaaacagcaagtaggatccaaccactgatttgggaaggaattatcattcccaaggtgaagaagcaagcctgggtgatgtgcacaagcagacaggaagtccacaggaaataggaaggaaaacatccttcttcctgtcctaaccccattatttctctttagtgccctttattggcagactctaacatgaagccagcaaataaggcacaaatgtggttttcagagtcccagatccagtaccacaaagcaaagtacagaaaggtggatttggagttgagaaaaaagttgtaactggcaccgtgtatgtggcagatttgaactgtgtctatttagctaagctagaactaatttccccaaattctcttctctgcaatgttccagattagtatcagctaaaaaaacaaayaaacaaacaaacaaaaaacaaaacaaaacaaaaaaacaaaaaaagacttttgtgagcaatttgaaggatggaagtgaaaaaaaaaaccggctttatttttctcatcctctgaagattgaaacagggaaaggagtgctttcacatctcacatatgtggtcct

SEQ ID NO: 46128 - DNA, 533 bp, Homo sapiens
ggtagagggggcatcaatattatgaagaaggaaattgagttccacrgaagttgaatgatttaatccgaactcaaagagtcaattaattctgctcttgatttttccagtgtttatttatttcaaaaacctaagttaagttacacaaaaccgaacaatataagtagcctcaaaatagtgcactgtagtcagcttgtacctgattttccatttgtatgtgcatttcttcccaacttcaagttcagtggcagctcactggcagcttggagttagccttggtgggagtatttagaccatgaatattagcaaatgctatataattcagggttttatttacttatttattggtgtttcttggacagcctaattaccagcatactggaaattacaagtatgcagggtattttttcaacatatattatctaaacttttacataaaaaaggagcattctaatgcctttttttttgagacaaggttttgttctgtcacccaggctgactgagtacagtggctcaatgacagttcaggggagcct

SEQ ID NO: 46129 - DNA, 599 bp, Homo sapiens
ttagagatttgaggtggggtaaggggcatggtgttyggggacaacattgtcctctgggagctcagcatcttcttgatagatgagtcatgcacatggagaaaattgaatatttttcttttcttttttttttttcttttttttgagacagagtcttgctctgtctcccaggctggagcgcagtggtgcaatctcggctcaccgcaacctccacctcccaggttcaagagattctcctgcctccgcctcccgagtagctgggactacaggcgcttgccaccatgcccggctaattttttggggttttgttcagcagagacagggtttcactctgttagccaggatggtctcgatctcctgacctcatgatccacctgcctcggcctcccaaagtactgggattacaggcgtgagccactgcacctggcgaaaattgattaattttcaacatcaacgtcaacagcacaactctgctacagcgaagagctacagcaaatgaagcatcaataattttcaatgcgttcacaatgcaagaggcatcactaagccaaatgagtgagaaaacaccctaatgcattagagttctgaggaggaagaggtct

SEQ ID NO: 46130 - DNA, 599 bp, Homo sapiens
ttagagatttgaggtggggtaaggggcatggtgttcggggacaacattgtcctctgggagctcagcatcttcttgatagatgagtcatgcacatggagaaaattgaatatttttcttttcttttttttttttcttttttttgagacagagtcttgctctgtctcccaggctggagcgcagtggtgcaatctcggctcaccgcaacctccacctcccaggttcaagagattctcctgcctccgcctcccgagtagctgggactacaggcgcttgccaccatgcccggctaattttttggggttttgttcagcagagacagggtttcactctgttagccaggatggtctcgatctcctgacctcatgatccacctgcctcggcctcccaaagtactgggattacaggcgtgagcsactgcacctggcgaaaattgattaattttcaacatcaacgtcaacagcacaactctgctacagcgaagagctacagcaaatgaagcatcaataattttcaatgcgttcacaatgcaagaggcatcactaagccaaatgagtgagaaaacaccctaatgcattagagttctgaggaggaagaggtct

SEQ ID NO: 46131 - DNA, 599 bp, Homo sapiens
ttagagatttgaggtggggtaaggggcatggtgttcggggacaacattgtcctctgggagctcagcatcttcttgatagatgagtcatgcacatggagaaaattgaatatttttcttttcttttttttttttcttttttttgagacagagtcttgctctgtctcccaggctggagcgcagtggtgcaatctcggctcaccgcaacctccacctcccaggttcaagagattctcctgcctccgcctcccgagtagctgggactacaggcgcttgccaccatgcccggctaattttttggggttttgttcagcagagacagggtttcactctgttagccaggatggtctcgatctcctgacctcatgatccacctgcctcggcctcccaaagtactgggattacaggcgtgagccactgcacctggcgaaaattgattaattttcaacatcaacgtcaacagcacaactctgctacagcgaagagctacagcaaatgaagcatcaataattttcaatgsgttcacaatgcaagaggcatcactaagccaaatgagtgagaaaacaccctaatgcattagagttctgaggaggaagaggtct

SEQ ID NO: 46132 - DNA, 530 bp, Homo sapiens
tcctaggtgacctgttgatatgtctacctccaacagctacatattttcattgattatatgtttaaaccatatgttctcattttcattcaggtatctttcttttaaaaataaatmctggagagtggagaggaggtatagcaaaatggcagaatagaagactccactgatcataccccaacaaggacaccaatttaacatctatctacacagaaaaaacaccttcataagaaccaaaaaccaggagagcactcatagtacctgattttaacttcatattgctgaaagaggcattgaaaacatagtaaaaatagtcctgaatcaccaacaccaaaccactctttcccaactccctggcagcagcaaccagggaggtgcagagaacatcttagggccctgggggagggagagcacagcaattgtaaggcattaaactcaatgctgtcctattagaagagaaagaaaaaacagatcaaactcagctaactcctacctgcagagggagcatttaaaacagccttagcaagagggga

SEQ ID NO: 46133 - DNA, 907 bp, Homo sapiens
gtggagtgggaacagagggacatggtgggtgagcagctggccaaggcctttgcaagcatagcagcttgctcaattctaggcatactcaagacccattattcttcctttcgcttctgaagtcctaggatactgaggttcagagaaggtcaatgacttgcccaaggtcacacgttaatagacaaattatcaaatttctctctcaacttgataagttccaaagctcaggtcaggactcactctctccaaccaccttcccasatgaggtcgaagcccccatgataggtacagtcttgtgtgtccccctcctccttcccatgtaccatggttgcaccattccatttcttcctttgaaaatttgatgggtgccaggagcggtggctcacacctgtaatcccagcactttgggaagctgaggtgggtggatcacctgaggtcaggagttcaagacaaggctggccaacatggggaaaccttgtctttaccaaaaatacaaacattagtcaggtgtggtggcatgtgcctatgggctgaggcaggagaatcgcttgaacccaggaggcagaggttactgtgagccgagatcgcaccactacactccagcctaggtgacacagcgaaagtccatctaaaaaaaaaaaagaaaatttgatgatgggcctctaaagtcacagaagccccagtgtctccttttgcccactcctctcttcccaaccgtagcacagttccttgcccccagttagagctccataagcatttgtgaaaaagagccacagcagtgcagagcagcagccccagccacaaagattccagaaagcgccccttcattcatctgcaaagagcaggagaaactttaaggctatagtgcccaaaccgtttgtaacactcaagtgaactggcattcacatca

SEQ ID NO: 46134 - DNA, 579 bp, Homo sapiens
agtacaggagctcagaaaagtcacccgtgggttcctttctagctcaatcatgctgagagtccagtccatttataacataattcataaaggaacattctatttagttctcagaactctgtggcaggggactgttgttattcctcctttacagaggtgggtctgaaggtacagagtggataagtcattttctccgggccagccacacagcgaatgaatggagaytccttgtgtgtagtaaatggctgcagccctataagctataatcatatatcatcaacacctttaccctgttattaacgtgtctgaaattagggaacaccacgtacaaaagggatcagggtccacctttctgaagaaaactgcagagcttttgcagttattaaactagcaacagatgtaaagtccaactgttagagtttttctttaaagcagaagttagcagttacaggtgcttgtgatgtcatcacttagatgatcttataaatgccttttttttttttttttttttttttagtcggagtctcactctgtcgccaggctggagtgcactggcatgatctcggctcactgcaacctctg

SEQ ID NO: 46135 - DNA, 579 bp, Homo sapiens
agtacaggagctcagaaaagtcacccgtgggttcctttctagctcaatcatgctgagagtccagtccatttataacataattcataaaggaacattctatttagttctcagaactctgtggcaggggactgttgttattcctcctttacagaggtgggtctgaaggtacagagtggataagtcattttctccgggccagccacacagcgaatgaatggagactccttgtgtgtagtaaatggctgcagccctataagctataatcatatatcatcaacacctttaccctgttattaacgtgtctgaaattagggaacaccacgtacaaaagggatcagggtccacctttctgaagaaaactgcagagcttttgcagttattaaactagcaacagatgtaaagtccaactgttagagtttttctttaaagcagaagttagcarttacaggtgcttgtgatgtcatcacttagatgatcttataaatgccttttttttttttttttttttttttagtcggagtctcactctgtcgccaggctggagtgcactggcatgatctcggctcactgcaacctctg

SEQ ID NO: 46136 - DNA, 560 bp, Homo sapiens
cagagagtatcctaggtgatgcataaattatgaaattgttatgaaaactttgactagaagggcttaacccctttcttattgatgaggtgatatccaggcatttttattgtccttaarctatagaaatataatttgggctctagaagtgttctgttgtaacaaaaatgaaataatccaaactttttccctctcttaataaaaattccccatgacctgaaatagtcacatttccctatggtggaactagcatgaaggtcaagagttagaacctgagagatggtgtgggagggagtgaggcaggtagagaaagaaagatgtgtttaggtcttttgtctagctcatagtacagtacggccaggactagggtaaagcaaatgagatccttgccctgggcaggaaatgcaaagcaagtctaggaaacttagtaattattatagtattttaaattaatattaaaaatatgttaattcacttgattcaatcattccataatgtatgaatatatcaaaacatcacattgtgctttataaatgtaatacaattatgatttgtcagttaaa

SEQ ID NO: 46137 - DNA, 560 bp, Homo sapiens
cagagagtatcctaggtgatgcataaattatgaaattgttatgaaaactttgactagaagggcttaacccctttcttattgatgaggtgatatccaggcatttttattgtccttaaactatagaaatataatttgggctctagaagtgttctgttgtaacaaaaatgaaataatccaaactttttccctctcttaataaaaattccccatgacctgaaatagtcacatttccctatggtggaactagcatgaaggtcaagagttagaacctgagagatggtgtgggagggagtgaggcaggtagagaaagaaagatgkgtttaggtcttttgtctagctcatagtacagtacggccaggactagggtaaagcaaatgagatccttgccctgggcaggaaatgcaaagcaagtctaggaaacttagtaattattatagtattttaaattaatattaaaaatatgttaattcacttgattcaatcattccataatgtatgaatatatcaaaacatcacattgtgctttataaatgtaatacaattatgatttgtcagttaaa

SEQ ID NO: 46138 - DNA, 560 bp, Homo sapiens
cagagagtatcctaggtgatgcataaattatgaaattgttatgaaaactttgactagaagggcttaacccctttcttattgatgaggtgatatccaggcatttttattgtccttaaactatagaaatataatttgggctctagaagtgttctgttgtaacaaaaatgaaataatccaaactttttccctctcttaataaaaattccccatgacctgaaatagtcacatttccctatggtggaactagcatgaaggtcaagagttagaacctgagagatggtgtgggagggagtgaggcaggtagagaaagaaagatgtgtttaggtcttttgtctagctcatagtacartacggccaggactagggtaaagcaaatgagatccttgccctgggcaggaaatgcaaagcaagtctaggaaacttagtaattattatagtattttaaattaatattaaaaatatgttaattcacttgattcaatcattccataatgtatgaatatatcaaaacatcacattgtgctttataaatgtaatacaattatgatttgtcagttaaa

SEQ ID NO: 46139 - DNA, 583 bp, Homo sapiens
gaaacatttaaatctaatttttcttttttctttttttttttgagacagagtttcgctcttgttgcccggactggagtgcaatggcgcgatcttggctcaccgcaacctccacctcccgggttcaaacgattctcctgcctcagcctcctgagtagctgggactacaggcgtgtgccaccacgcccggctaattttgtatttttagtagagatggggtttctccacgctggccaggctggtctcgaactcctgacctcaggtgatccacctgcctcggcctcccaaagtgttggcattacaggagtgagccaccgtgcccggycaaatctaatttttcaataactgaaacacaaagggaatttggactagtgaagcttatcaaaaactaatcccaacctcaaggtcttcagagagaagagaagaatgcgttgccttttgagccatttcctgaagctgtagttgggtcttttggagagctgtttggcattccatttgattggattcaagagcttttaccttcttcgtgagtgacctgattatttcagttcttttatgtagttcacctgagggaagttcatcaata

SEQ ID NO: 46140 - DNA, 530 bp, Homo sapiens
ggtaattctggttaggataaatttgaggggaataaaatgtttgcaccagcaaggaggcttttgtagcaatttaggtatgaacagagaggaatagatcaacctgatagacatttcaaaggtataaacagccagggttagtgctgggttatgtaaaaatgtgatggttaatactgagtgttaacttgattggaytgaagtatacaaagtattgatcttgggtgtgtctgtgagagtgttgccaagagagattcgcatttgagtcagtgggctggggaaggcagatccacccttaatctggtgggcacaacctaatcagctgccagccaatataagcaggcagaaaaacattaaaaggagagatgggcttagcctccctgcctacatctttctcctgtgctggatgcggactccaacttcttcagttttgggactcggactggctctccttgctcctcagcttgcagacagcctattgtgggactttgtgatcatgtaagttaatacttaacaaactcccgtatacatataca

SEQ ID NO: 46141 - DNA, 530 bp, Homo sapiens
ggtaattctggttaggataaatttgaggggaataaaatgtttgcaccagcaaggaggcttttgtagcaatttaggtatgaacagagaggaatagatcaacctgatagacatttcaaaggtataaacagccagggttagtgctgggttatgtaaaaatgtgatggttaatactgagtgttaacttgattggactgaagtatacaaagtattgatcttgggtgtgtctgtgagagtgttgccaagagagattcgcatttgagtcagtgggctggggaaggcagatccacccttaatctggtgggcacaacctaatcagctgccagccaatataagcaggcagaaaaacattaaaaggagagatgggcttagcctccctgcctacatctttctcctgtgctggatgcggactccaacttcttcagttttgggactcggactggctctccttgctcctcagcttgcagacagcctattgtgggactttgtgatcatgtaagttaatacttaacaaactcccgtatamatataca

SEQ ID NO: 46142 - DNA, 514 bp, Homo sapiens
gtgtgtatggaggcaaacaagtgtattgcattatcattttatttttgagataatattttttatttaaggtattactattctaattaactttttaatatttctgcaataactacacaaacttcttaaatgtctttcactaatgtaggtgaaatattgctaccaaataatatttatgcctttttatttttattttttgaagtaggatctcactcagccaccctgactggagtgcgcaatcttggctcactgtagccttgaactcctaagctcaagggatgctctcatgtcagctccctgagtagctgagactataggaacacaccaccaagcccagctttttttttttcttttaatttttacttctaggagagataaactcttaccatattgcctaagytagtctcaaactcctgggctcaagcagtcatcctgcctcagcctcccaaagtgctgggagtactggcatgagccactgtgtctggccaatagtcatgcctttaaaaacaagaacaaa

SEQ ID NO: 46143 - DNA, 551 bp, Homo sapiens
cagataaaatgccagtagtagatccaggatggggcttgagatagttcagagagtgaaagtaggctgcatggcacttatttccatgtcacatgctagtgtttcaccattgcctctttctcagctcacagctatggtctctggggctttcttttcagtggccaatggaagaggcaagagcctgagctgggttcatgaatcagtcatgttggtatgtgggtataagctaataaygcactgccgctctactacagtcacatagaaagtgacagtggtgagagataactcttcaaatgggcagctcttcagtgagtgatctgttttagttcctttgttggaatgggacgtggactaggattaagatatctctagacccgtaggcaatggtgaatggcttagctggttgaatatacataaactcatggacagtggtaaatggtttagttggttggtgaggagcttggaaggaaccagactggaaggtcaacaataaggatgtctgaggaagaggcatggggtttgacctatagaagtaagcacaaagtatgagtaac

SEQ ID NO: 46144 - DNA, 557 bp, Homo sapiens
atcagaaagcagtgggcctgaatatgtctctttccctgtcacattcttcaagagaaatattcttcaaaaaatttttttcttcaagaaatatggtggcctactttttttccaccatgagagaaatgagtgaggaagatacatacagtttatatgtggcacccgaccctcgtgattgccatacacaatcgtttccgcagggcgtggtcgctcatgcctgtaatcccagcactttgggaggccgaggcgggcggatcacgaggtcaggagatcgagaccatcctggcyaacactgtgaaaccccgtctctactaaaaatacaaaaaattagctgggcgtggtggcaagcgcctgcagtcccagctactcgggaggctgaggcaggagaatggcgtgaacctgggaggtggagcttgcagtgagccgagattgtgccactgcactccagcctgggcgacagagcgagactccatctccaaaaaaaaaaaaaaaaaaaaaaaaaaaatcgtttccacctcttcttttatgaaattagaataaaggtcccttgggaatatttc

SEQ ID NO: 46145 - DNA, 557 bp, Homo sapiens
atcagaaagcagtgggcctgaatatgtctctttccctgtcacattcttcaagagaaatattcttcaaaaaatttttttcttcaagaaatatggtggcctactttttttccaccatgagagaaatgagtgaggaagatacatacagtttatatgtggcacccgaccctcgtgattgccatacacaatcgtttccgcagggcgtggtcgctcatgcctgtaatcccagcactttgggaggccgaggcgggcggatcacgaggtcaggagatcgagaccatcctggccaacackgtgaaaccccgtctctactaaaaatacaaaaaattagctgggcgtggtggcaagcgcctgcagtcccagctactcgggaggctgaggcaggagaatggcgtgaacctgggaggtggagcttgcagtgagccgagattgtgccactgcactccagcctgggcgacagagcgagactccatctccaaaaaaaaaaaaaaaaaaaaaaaaaaaatcgtttccacctcttcttttatgaaattagaataaaggtcccttgggaatatttc

SEQ ID NO: 46146 - DNA, 829 bp, Homo sapiens
gttgggtcaatatggccatgatgaccacttattttgttaattaagaataatgtctagtgtgcagtattgcatgctgtgctttcaaggtcacagaaatacagccttcaaaataaaatctaagaaaatatagaaagaagaacttagcatggaattcatgtcatgcattagaaggaatttattctcaatcaatttaggaaacatgactcgccatgaaaacacagactaaaaaatacaaattaattaattatctattaagtgttagtcaatacastaaaaaatgttccccagagaactgttccttgtggtggatctggatttgttcatactgaacaaaggcacttaaacttggtctgaatttttaggtccttttcacaccttacatggcctactttgtaagacaccattcattcatgggtttgttccttgaatacacatttatttaacacataacttatttcagtcactttgaaagacattaaatataaagactgtatgtaataaatgcagagcttgctcaaaaggagtgtttaacacaatggacattgttatcagttcaatgaaagaggtattaagtgttattttatgctgcaaaagcatgtgagccatcacatatatagaagtgaaaagaaaagcagataatctttctattttaggtattaaaaggtcattgatttttggggggttgcatacactagacactcaatatatgttttaataactcactacaattttccaactagtgctatgatacacaaccatgtttaaatctttagttctaacaaaacaagtggagtgtaggttacatgccttgcctgctttaattattttt

SEQ ID NO: 46147 - DNA, 629 bp, Homo sapiens
gagcaaagcaaatgcaatatacaaaacaagaaaaccatatagaaattgcttattttttaaggaaagaggacagaaaatgaaatagatraaattactagtcaaaattgtttatttaaaatactaataaaattaattaaaaaatgatttgagaaagaagaaatacaaaatctcaacatcattaatgaaagaaaggaagtcattacagattctaccagttttgaaatgttaagatcatattaacaaatatatttcattacaattgactttgtagatgaattagacacatttcttaaaagacacaacttcccaaaatttatacaagaataaatagaaaatatgaaaaatctacatccattaaataaacaaacaaaaataaccctattacacaataacttttcactagtgggtatagagtttcagttctacaggatgaaaagtttggaaaatggttagtggtgaggatggttgcataacaataagaatatacttaatacaactgaactatacttttaaaaaaaataatttatattaagatacatgtgcaagatgtgcaggtttgatacataggtaaacttgtgccttggtgttttgctgcccctagaaacccatcacctagatattaagcccct

SEQ ID NO: 46148 - DNA, 629 bp, Homo sapiens
gagcaaagcaaatgcaatatacaaaacaagaaaaccatatagaaattgcttattttttaaggaaagaggacagaaaatgaaatagataaaattactagtcaaaattgtttatttaaaatactaataaaattaattaaaaaatgatttgagaaagaagaaatacaaaatctcaacatcattaatgaaagaaaggaagtcattacagattctaccrgttttgaaatgttaagatcatattaacaaatatatttcattacaattgactttgtagatgaattagacacatttcttaaaagacacaacttcccaaaatttatacaagaataaatagaaaatatgaaaaatctacatccattaaataaacaaacaaaaataaccctattacacaataacttttcactagtgggtatagagtttcagttctacaggatgaaaagtttggaaaatggttagtggtgaggatggttgcataacaataagaatatacttaatacaactgaactatacttttaaaaaaaataatttatattaagatacatgtgcaagatgtgcaggtttgatacataggtaaacttgtgccttggtgttttgctgcccctagaaacccatcacctagatattaagcccct

SEQ ID NO: 46149 - DNA, 629 bp, Homo sapiens
gagcaaagcaaatgcaatatacaaaacaagaaaaccatatagaaattgcttattttttaaggaaagaggacagaaaatgaaatagataaaattactagtcaaaattgtttatttaaaatactaataaaattaattaaaaaatgatttgagaaagaagaaatacaaaatctcaacatcattaatgaaagaaaggaagtcattacagattctaccagttttgaaatgttaagatcatattaacaaatatatttcattacaattgactttgtagatgaattagacacatttcttaaaagacacaacttmccaaaatttatacaagaataaatagaaaatatgaaaaatctacatccattaaataaacaaacaaaaataaccctattacacaataacttttcactagtgggtatagagtttcagttctacaggatgaaaagtttggaaaatggttagtggtgaggatggttgcataacaataagaatatacttaatacaactgaactatacttttaaaaaaaataatttatattaagatacatgtgcaagatgtgcaggtttgatacataggtaaacttgtgccttggtgttttgctgcccctagaaacccatcacctagatattaagcccct

SEQ ID NO: 46150 - DNA, 629 bp, Homo sapiens
gagcaaagcaaatgcaatatacaaaacaagaaaaccatatagaaattgcttattttttaaggaaagaggacagaaaatgaaatagataaaattactagtcaaaattgtttatttaaaatactaataaaattaattaaaaaatgatttgagaaagaagaaatacaaaatctcaacatcattaatgaaagaaaggaagtcattacagattctaccagttttgaaatgttaagatcatattaacaaatatatttcattacaattgactttgtagatgaattagacacatttcttaaaagacacaacttcccaaaatttatacaagaataaatagaaaatatgaaaaatctacatccattaaataaacaaacaaaaataaccctattacacaataacttttcactagtgggtatasagtttcagttctacaggatgaaaagtttggaaaatggttagtggtgaggatggttgcataacaataagaatatacttaatacaactgaactatacttttaaaaaaaataatttatattaagatacatgtgcaagatgtgcaggtttgatacataggtaaacttgtgccttggtgttttgctgcccctagaaacccatcacctagatattaagcccct

SEQ ID NO: 46151 - DNA, 629 bp, Homo sapiens
gagcaaagcaaatgcaatatacaaaacaagaaaaccatatagaaattgcttattttttaaggaaagaggacagaaaatgaaatagataaaattactagtcaaaattgtttatttaaaatactaataaaattaattaaaaaatgatttgagaaagaagaaatacaaaatctcaacatcattaatgaaagaaaggaagtcattacagattctaccagttttgaaatgttaagatcatattaacaaatatatttcattacaattgactttgtagatgaattagacacatttcttaaaagacacaacttcccaaaatttatacaagaataaatagaaaatatgaaaaatctacatccattaaataaacaaacaaaaataaccctattacacaataacttttcactagtgggtatagagtttcagttctacaggatgaaaartttggaaaatggttagtggtgaggatggttgcataacaataagaatatacttaatacaactgaactatacttttaaaaaaaataatttatattaagatacatgtgcaagatgtgcaggtttgatacataggtaaacttgtgccttggtgttttgctgcccctagaaacccatcacctagatattaagcccct

SEQ ID NO: 46152 - DNA, 534 bp, Homo sapiens
tggggttgtcaataagggaaacatttactaacttccagcctgccctgtctcgttacaaccaaaagctctaaggtcctacggcaaaaagagactcttagcaaaagcatttaaaaaattaacaaatctctttaaatgcccagaaatactgatctttaacaaaattcaagcaccaaaaggtaaaggtacaactaggaaacatttcaggttttaatcacaaagttgagaccaaacatgccaggcacagaggctcacgcctgtcatcccaccactttgggaggctgaggtgagaggattacttaagcccaggacttcgagaccagcctgagcaacatagcaagaccctgtctctacaaaaaaaaawttttttaattacccagacatggtggtggtcgcctgtagtccaagctatttaggaagctaacgtgggagaatcacttgagcctgggaggttgagattgtgccactgcactccagcctgggcaacaaagtgagaccctgtctccaggaaaaaacaaaaacaaaaacaaaaacaaa

SEQ ID NO: 46153 - DNA, 595 bp, Homo sapiens
agacatttgacatgggcttcctctgttcaggcgctgcctggactgccacagagctagaccctccagatacatttttctcctcacaatcagggacatgattcatcacactagagggcactccttttttgttcatccctctttagagttaccatgtaggagctcttcctcagggcaagcagtaattttggagttttcagaacttttaccaatattcagcttgaacttgtttgtaatgaattttaaagaaagtcatgaatatatagatagattccctttatcacrgttcttacccagttctggttcttgagacttttttggggggggtcaggtgcaaaatggaaaacaaatttgcttgttttgtttctcagatgtcttttctgtcagagtgcatgttttaaaattagctttaatcaagtataaacaaagaaatattagaaaataattaaaatttaactgtgaaacttaatctatgtgttgctactcttaaattatgggattgtatctaaaaagtgaaaaataatttgccttggcttaacataggacagaaacatgaaccagcaagctgaactctcagtgtctgtttggactaaactta

SEQ ID NO: 46154 - DNA, 2945 bp, Homo sapiens
tctgcatgaactaaagacatcttcattgctaaaggcagcatcttcacgatgtgtctgattttcttttggttcctgatggactttccttttttttttttttttttggagacagagtctcgctctgtcacccaggctggagtgcagtgacacgatcttggcccactgcaacctctgccttctgggctcagggaattctcttatcttagctttctgaatagttgggactataggcatgaaccacaatgtctggctaattttttgcattttttgtggagacagtgttttgccatgttgtccaggctggtcccaaactcctgggctcaagcgatccacccatctcagcctcccaaagtgctgggattacaggcatgagccaccacacccagccttattctaatttttaaaaatatgtaacgagtattttgtaggcaccatgctaagcacagttcctttaccatcatgggaattccttgggaataaatctgagaattgttatcatgcttcacatttgggtggaattcaaaacaactaaggtcatgccaaagaacttcaaataaataccactttgagacaccattttcaatgaactcatataagacagtatattttgtgagtgttttggcaaattatatagtttcatttaccaaaagcagtcactttaaggtgcaatgtctccaatgtgaaagggctttatcttgaagcaaatcttcactgtaagcattcccctcatcctgtaagttaccaacactagaaccatggctttatgctaatgaaaatggtaaaaatactaataagtcctgtcaagattatttaacatggagactacaatacaatttggatgttcatcactaaagacaaatatgtggttattttgacacttttgcccaagtcggtctctgggctgcactggcagcactgatagctaatccccattctctcttcatgatcacagtgaaatctagtgaagcttcctccctgcttcactagattttattaaaattgatattaatcaaaacatacagtgttaagaatgtgcaaaaaaagattaacctccataaagcttattctgaatgaaactaaacatacactaccatttttccagagacgtgcggagaaatgcacctctctaaatcacagagcagagaaattgagtacctggcagtatttgggagatactcaattatagagtatcatatgtacgttttcatatttgggctaaaaagatagctaccaaatttagctgaggacaagttcttgtttctaaacttcatgcattccaaaataattaacatcctttgcttagaaaaaaaagcaacaataatagaactatagtgatatagtaacattattgagattatttattacagctctttccaaatattttctgtaaatctaattccaagaaatttgatgaaattcctaagaatttaagtattataccttaggtgccctaagaagttgttgattttctgaaaattaggagaaataatattatttctctctccagtaatgttttgtttttwatatcaaaagtatacttgctttttaacatattttgtgagctattttccctataatggcacatatttttccatatgcaattatgttacttgagtatatacaggaacttcagaaagtaaataataattggaagaaaacagttaaagtgcttcaacctatcattgaaaattatattaatgtgttttttgtaacatatctagatgacataagttatataatactctaccttactcaccaatattttatcaacatcatttaattttataagccatgctctttaaaatgtatcattggctttaaaaatgtataaaattctcttctttattaattgcctttagatattgttagatttaacaaattatgttttctaatatcaccaaactttttaaattaaaaaaattaccactaaaactttcaaattcagtttgttttcttctactaagatagagcagacacttttaggtttctgactcaatatccatcctatctccttcttcttacctaacaaaattcacagagccaccaattccccataatggcaatgggtcaggggaaatggatcccatcttagggattctatgttgtctaagctaatcataaaaattccactgtctttgctagtgattggtctagaaatgtgcaaagccagctaactaggcattcaggctagtcttcactatgtcttttaggaaagtgacacaggaagatctggcctcttctttaggacattggtgtggttggatgaaatgtcttgaagtgttatgacaatttatacttgagtcttaaagtcatagcatggagtaaggcatatccaagagaatctggaactgcctcctctacctctgtactttcagtataagacaacgataagccaggtttctttagttgtgactttaacaaactcataccctggatgaagagatggtttgagactactttaagcatataaattatggatctagggtagataaaagcatgcaatacaaaaaatattggttaaaaaatgaatccttgaatatatttgtgtttaaataattattgatgaataatatttttaaaaagtcattgtaaaacaaaattctatgtgaccaaaatccatagtattgaaaatgggatagaaagagaagttaatgtgtatgtaaatcttttatatcttttgtctttattaaagtcttatctgaacataatctgaatataccctgtggagtcttgggaatgcctttaattgtctgatcctatggaattgctgcaggtggccacacattttcaaatctagatcaaataggtgatttcataaaaaagtaaaattaaccaaaatgactaaagaggagagaatatatctaaaccttcaacctcccttaaaaacaatcagatgacaattgtgcaagatttaaatacattcagatgagattccatcactttca

SEQ ID NO: 46155 - DNA, 2945 bp, Homo sapiens
tctgcatgaactaaagacatcttcattgctaaaggcagcatcttcacgatgtgtctgattttcttttggttcctgatggactttccttttttttttttttttttggagacagagtctcgctctgtcacccaggctggagtgcagtgacacgatcttggcccactgcaacctctgccttctgggctcagggaattctcttatcttagctttctgaatagttgggactataggcatgaaccacaatgtctggctaattttttgcattttttgtggagacagtgttttgccatgttgtccaggctggtcccaaactcctgggctcaagcgatccacccatctcagcctcccaaagtgctgggattacaggcatgagccaccacacccagccttattctaatttttaaaaatatgtaacgagtattttgtaggcaccatgctaagcacagttcctttaccatcatgggaattccttgggaataaatctgagaattgttatcatgcttcacatttgggtggaattcaaaacaactaaggtcatgccaaagaacttcaaataaataccactttgagacaccattttcaatgaactcatataagacagtatattttgtgagtgttttggcaaattatatagtttcatttaccaaaagcagtcactttaaggtgcaatgtctccaatgtgaaagggctttatcttgaagcaaatcttcactgtaagcattcccctcatcctgtaagttaccaacactagaaccatggctttatgctaatgaaaatggtaaaaatactaataagtcctgtcaagattatttaacatggagactacaatacaatttggatgttcatcactaaagacaaatatgtggttattttgacacttttgcccaagtcggtctctgggctgcactggcagcactgatagctaatccccattctctcttcatgatcacagtgaaatctagtgaagcttcctccctgcttcactagattttattaaaattgatattaatcaaaacatacagtgttaagaatgtgcaaaaaaagattaacctccataaagcttattctgaatgaaactaaacatacactaccatttttccagagacgtgcggagaaatgcacctctctaaatcacagagcagagaaattgagtacctggcagtatttgggagatactcaattatagagtatcatatgtacgttttcatatttgggctaaaaagatagctaccaaatttagctgaggacaagttcttgtttctaaacttcatgcattccaaaataattaacatcctttgcttagaaaaaaaagcaacaataatagaactatagtgatatagtaacattattgagattatttattacagctctttccaaatattttctgtaaatctaattccaagaaatttgatgaaattcctaagaatttaagtattataccttaggtgccctaagaagttgttgattttctgaaaattaggagaaataatattatttctctctccagtaatgttttgttttttatatcaaaagtatacttgctttttaacatattttgtgagctattttccctataatggcacatatttttccatatgcaattatgttacttgagtatatacaggaacttcagaaagtaaataataattggaagaaaacagtkaaagtgcttcaacctatcattgaaaattatattaatgtgttttttgtaacatatctagatgacataagttatataatactctaccttactcaccaatattttatcaacatcatttaattttataagccatgctctttaaaatgtatcattggctttaaaaatgtataaaattctcttctttattaattgcctttagatattgttagatttaacaaattatgttttctaatatcaccaaactttttaaattaaaaaaattaccactaaaactttcaaattcagtttgttttcttctactaagatagagcagacacttttaggtttctgactcaatatccatcctatctccttcttcttacctaacaaaattcacagagccaccaattccccataatggcaatgggtcaggggaaatggatcccatcttagggattctatgttgtctaagctaatcataaaaattccactgtctttgctagtgattggtctagaaatgtgcaaagccagctaactaggcattcaggctagtcttcactatgtcttttaggaaagtgacacaggaagatctggcctcttctttaggacattggtgtggttggatgaaatgtcttgaagtgttatgacaatttatacttgagtcttaaagtcatagcatggagtaaggcatatccaagagaatctggaactgcctcctctacctctgtactttcagtataagacaacgataagccaggtttctttagttgtgactttaacaaactcataccctggatgaagagatggtttgagactactttaagcatataaattatggatctagggtagataaaagcatgcaatacaaaaaatattggttaaaaaatgaatccttgaatatatttgtgtttaaataattattgatgaataatatttttaaaaagtcattgtaaaacaaaattctatgtgaccaaaatccatagtattgaaaatgggatagaaagagaagttaatgtgtatgtaaatcttttatatcttttgtctttattaaagtcttatctgaacataatctgaatataccctgtggagtcttgggaatgcctttaattgtctgatcctatggaattgctgcaggtggccacacattttcaaatctagatcaaataggtgatttcataaaaaagtaaaattaaccaaaatgactaaagaggagagaatatatctaaaccttcaacctcccttaaaaacaatcagatgacaattgtgcaagatttaaatacattcagatgagattccatcactttca

SEQ ID NO: 46156 - DNA, 587 bp, Homo sapiens
gcaactttaggattaaaagacaatgaagaaagtgaattatcaaggttgaattacttgtcacttttcacacttgtaatttattacacaaacatgaacttagacatttctgagctacatataaggagaaaatyctaaactattatccctttgctccttaagtgaaaacttattcagtgtttatcaactgtaggtttttcccaatatgaattcagaaatgcaagaaagcaaaacaggtgaaaattaaatttacattttcaaatgacattttcccattatacaatatttccttatttaaaagaaaacttaatcatttgactcattctaaaagaattcaaggataatgctatggtttgaattatgatagtttttcaaaattaatgttgaaacttcatccccaatgcagcagtattaagaaatgcagagtttgggatgcctttggtggaacactcattaatgggattagcacccttaaaactgggattgaggttgaagggggttgtctcttgtccttccacctttcatcgtttgaggacacagcaacaagttgtcatcttggaagcagaaagcagacctcagcagacactatt

SEQ ID NO: 46157 - DNA, 898 bp, Homo sapiens
ccttggttcactcaagttgacacaaaattaaccatcacagaaggagactggccttactctgaaattaggaaactaaagaagtgaccagaatggagactaggtagagacaactagttctctaccaaacatgtacagttattcgttggtatctgaaggggattggttccaggaactctcagggataccaaaatctgcaggtgctcaagtcatttatataaaatattacagtatttgcatataacctttgcacatcttccatatactttaaatcatctctacattacttataataatgaatgtgtaaatgctatgaaaatagttactacactattgtttatttgtatttttattgaattgttttggggtggggggcagctgtatctttcttagtaatagaacccctggttttagctgggcacatgactgccctcaataaagattaaagtaccccagccttccttgagattgtggccatgtgactgaactttagacagtgagatataagcagatatcttctgtggcagtgttaggaaactattaaagacagtaagaacattgccctttgccttctttttcctttcttcatttttctgcctggaatgcaaatgtgatggctaacaccctagcagccattttagattatgaagatgagagtcactccccaggaagggtggacctgaaagctggattctagatgtggaatgacaataccagccctggactacctacctgtaggctgtgtgtgtgtgtgtgtgattgacagagagagagagakatagataccacaagtaacacaaagcatcatacctgggactgggaaggttaatgtttaaacattttaaatgtggcattggtttgttgaagacagtcaagcagtaggtgctgcaggctttgttga

SEQ ID NO: 46158 - DNA, 586 bp, Homo sapiens
tgttttggaactgaatgagaccagagaggatcacaaacacaaatgaagaaatgtcatttctgacattgtgtttattatatcaaagcattcatgccattttaagcagctcacacagaaggaacacaattgtatctttgatctgttaacacagttaggaaccaatwtgtggattacctctcagcgcagaggcagctgctagagatgggtaaataattgatgctagcggcaggaggcgttcccgcttctctgatgttcctccaaccagagatgcaagagtggtctccatcgactgagctgtctgtgtcaaaacaattaaagtgcacttttccactagaattacctaatttttttcctagaattaccagacaaggaaggcaggttggagacagttatgaagtagaagtcatcgtttttctcttaccctgcttctagcatgaggtgagagtccacttactcagatagtctgaagtcgttcttcccttttgtttaggagtggggaaggaatggagatctgcaaagttaagatttttgctttggacggagcatctagctgaagaataaaggatgcaatattagctttctatgg

SEQ ID NO: 46159 - DNA, 1786 bp, Homo sapiens
atagagcagtggttctcaaccttgactgcacatttgagtcacccagcatgcttaaaaaaattctgatgactgaggtcctctccagcatctccagaggtgggtacaagcatgggtattttaggcactttttaggtgattacaatgggcctcatggattgagaactggcttggagtgtggaatgagtctcatgtgtttggaggacaaaggaggtcagtttgaagagaatggaagttcttcatcctacatgcagagcagcctgaggagaggcagggaatatcttgaagaactctgaagactgatctcacctgaagattgatgggaggccattattattattattattaatattattgagcagtaataaagatggataaagcagtattttgttcagtctgtggtcaggggttcttagagttgatatagaatgaagataactcaggcatgaggtaacaaggccttgggcaggagctgttggaatagaaacaagagcatagagaggaagaaactcggaaaagttgaaataataaattaggctcttagcaaagtaggtacttaaaacttgtggaataaatgaatgaaagtgctaaggggataaaagtaccaaggaggactttaaaatatgaaaaccatcaaaataacattgccatgataacagatggggaaggtaggagggaggaattgctttaggttaaaagatggatttcattttagatatgttaaatttgtggggatggtaataatgacaacaaccaacctctgtgtgactgctctgcctgcaagatgaaacctctgcctacttctctagccacttttgtactcagcatctctggccatggccactccttccagctttagggtttcccatgagcccttccccaaccttgcttggggtcttgttcccactctttccttggcccccgttctactcagacttaaagttttcttgaggaagattttcttgccaagtttccaccaaaattaatttccttgctacattgttctgcacccctccagatggttccttcataggatgtatcactcttggactttagcaatgacttgttcaagaactcactccccattggatagtaacatccatataggcagagatctcatctgttttgctcattgctgtattcccagggtccagcactgtgcctgttgcaaagtaggtgcttgaataactgaatgaataagtgtcaagcattctgcatgtaatatctctacaaccctgtgaggtaggcactattattaatctcattttacagataaggaaagataacttacctgaagttacacagcttttatgtagcaggattgaaccttgaatcttggtttttctaatgccaaaggctgtgcttcttaacctctgatctattatgcctctgccagatgattataaatacaggagcatgggagcacaaacacaactgtaagaagacagaaaggaggagatataaaagaacataaaaagtctcaggcaattggagatgtttgaatagaaataatcttaaagttaatggagaatggagacaaaacccttcattggcattgggagagaaaattggtccaggaagttaaaagactgccccaagatcatagmattgattcttgtttgagagtgtgctagatccaggctctcaacttccggatctccctttctataggcatggcagatgggggcaagttgtttgggatctataagtaggcaattctctttgactcctatagccccaacttggagacagagggaaaacagactgggaaggacctgcaatgagtatt

SEQ ID NO: 46160 - DNA, 590 bp, Homo sapiens
cctgttctgttttgcaatttacagtttgcttgtttcaagaataaaaggaaattgccacatttgaaacaatgttgttttattgctaaactaggaagaacacaagaagcccacccagggtgacaggttaaaatatattttatttctcccattccttgtttagacaaagacttacatcttggtatckcattgctgactaatgcatagacaaaactaggaatttttttttaaaggataaaagaggcatctcttaatcagaagatgacattttctcctggctgtctttgattaatagcaataataaaggatggaaacattttaaagtggttgaagccagtcatattccagtttccaaatctaaagaaatgtgtcactgttttcagagaggttgctttcctctgtctctatctaggaagcaccgactccctctgagaagaaccacaatgtgctatgacgagagatggttcagcatccttgtccaagagtaaggccatctaccaagtatagacatggatataaaagggctcagaatacatttgtattgatcttttgggctcatagtaggtgttcaatgaatactcattgaatgaatc

SEQ ID NO: 46161 - DNA, 590 bp, Homo sapiens
cctgttctgttttgcaatttacagtttgcttgtttcaagaataaaaggaaattgccacatttgaaacaatgttgttttattgctaaactaggaagaacacaagaagcccacccagggtgacaggttaaaatatattttatttctcccattccttgtttagacaaagacttacatcttggtatcgcattgctgactaatgcatagacaaaactaggaatttttttttaaaggataaaagaggcatctcttaatcagaagatgacattttctcctggctgtctttgattaatagcaataataaaggatggaaacattttaaagtggttgaagccagtcatattccagtttccaaatctaaasaaatgtgtcactgttttcagagaggttgctttcctctgtctctatctaggaagcaccgactccctctgagaagaaccacaatgtgctatgacgagagatggttcagcatccttgtccaagagtaaggccatctaccaagtatagacatggatataaaagggctcagaatacatttgtattgatcttttgggctcatagtaggtgttcaatgaatactcattgaatgaatc

SEQ ID NO: 46162 - DNA, 590 bp, Homo sapiens
cctgttctgttttgcaatttacagtttgcttgtttcaagaataaaaggaaattgccacatttgaaacaatgttgttttattgctaaactaggaagaacacaagaagcccacccagggtgacaggttaaaatatattttatttctcccattccttgtttagacaaagacttacatcttggtatcgcattgctgactaatgcatagacaaaactaggaatttttttttaaaggataaaagaggcatctcttaatcagaagatgacattttctcctggctgtctttgattaatagcaataataaaggatggaaacattttaaagtggttgaagccagtcatattccagtttccaaatctaaagaartgtgtcactgttttcagagaggttgctttcctctgtctctatctaggaagcaccgactccctctgagaagaaccacaatgtgctatgacgagagatggttcagcatccttgtccaagagtaaggccatctaccaagtatagacatggatataaaagggctcagaatacatttgtattgatcttttgggctcatagtaggtgttcaatgaatactcattgaatgaatc

SEQ ID NO: 46163 - DNA, 590 bp, Homo sapiens
cctgttctgttttgcaatttacagtttgcttgtttcaagaataaaaggaaattgccacatttgaaacaatgttgttttattgctaaactaggaagaacacaagaagcccacccagggtgacaggttaaaatatattttatttctcccattccttgtttagacaaagacttacatcttggtatcgcattgctgactaatgcatagacaaaactaggaatttttttttaaaggataaaagaggcatctcttaatcagaagatgacattttctcctggctgtctttgattaatagcaataataaaggatggaaacattttaaagtggttgaagccagtcatattccagtttccaaatctaaagaaatgtgtcactgttttcagagaggttgctttcctctgtctctatctaggaagcaccgactccctctgagaagaaccacaatgtgctatgacgagagwtggttcagcatccttgtccaagagtaaggccatctaccaagtatagacatggatataaaagggctcagaatacatttgtattgatcttttgggctcatagtaggtgttcaatgaatactcattgaatgaatc

SEQ ID NO: 46164 - DNA, 548 bp, Homo sapiens
tttttgagatggagactccttctgtcgcccaggctgaagtgcagtggcacaatctcaggtcactacaacctctgcctccagagtaactgggattataggtacctgctaccatacccggctagtttttgtatttttagtagagatgggttttcwccatgttggccaggcttgtaaaggagaacctgcaagctattacttagcaggtataattaaactgcagggaaattaaatgtttctccagatagaaacagtgtttaagaagaatgatatatgtagaatttcatttagttcacctaatagggatttaaaggcaagtggtacattgataatgacatagccctatttgaagagtcaaccatcttgattattgtgatgtactaactgttttaaaaggtgatgggggagcccaaggtggagtccaaatctgtactcctataacttccattcatttgtcaagattgtgctttctatacacaaataatccatttccttagatcaatatgtatactttaagtactgtgtaagtaacaatttaacagagggttgac

SEQ ID NO: 46165 - DNA, 545 bp, Homo sapiens
ttgaatgaaataaaaaagttgaatatctattcttaytatgttgaacaaattaaaaaaaattacatggcataaagttccatttatatgacattccagaagaggcaaaactaatccatggttatgaaaataagaatggattaaagatttgatgtgtgagtgagatttaagtggaaaggcatgaaggaatttttgaggtgaggaaaatgcctgtagcttgaatcggtattgattatatgggtctttgtatttgtccaaagttattgaattgtaaactttagatctgtgcatttcacagtttaaaaaaatttgcctcaccagtgaaactctgtctacctaaagtctgcagaaagcataactcaagaatttaacataaggtcccctaatcacatgaaggtaagaaacagccatcttttaaacatttaaaaagtcaggggaataaaaaatccaggagtttttttttttttaataactattaaacttatgccagtgaaagaaaataaaattaattttcacaaaagttgatacacatgactgaggataaatct

SEQ ID NO: 46166 - DNA, 545 bp, Homo sapiens
ttgaatgaaataaaaaagttgaatatctattcttattatgttgaacaaattaaaaaaaattacatggcataaagttccatttatatgacattccagaagaggcaaaactaatccatggttatgaaaataagaatggattaaagatttgatgtgtgagtgagatttaagtggaaaggcatgaaggaatttttgaggtgaggaaaatgcctgtagcttgaatcggtattgattatatgggtctttgtatttgtccaaagttattgaattgtaaactttagatctgtgcatttcacagtttaaaaaaatttrcctcaccagtgaaactctgtctacctaaagtctgcagaaagcataactcaagaatttaacataaggtcccctaatcacatgaaggtaagaaacagccatcttttaaacatttaaaaagtcaggggaataaaaaatccaggagtttttttttttttaataactattaaacttatgccagtgaaagaaaataaaattaattttcacaaaagttgatacacatgactgaggataaatct

SEQ ID NO: 46167 - DNA, 603 bp, Homo sapiens
agaacagtatacacagttggatatctgatgtgataaacataggaaaaaaattctcaattctatatgccaggtgctggcaaactatggcccacaggccaaatctgtcctgccacctgtttttgtaaataattggaacatggccacactcattctttatgtattgtttatggttgtttttgcattacagcagcagaattgaatatgtgcaatggataccctaggtcctcaaagtccaaaatatctgccatctagctctttagagaaaaagtttgctgactgtgctstgtgccaattttgtaaatgcagaatgatatttttgaaaaagcgttgttatatttatcttttattttcttaatgggtatgtattatttttatattgcataagaaaaggctatttaaaaatatctggctgcaaacgaaaacaaaacgcccagtatgattttgttcagttttgagttcaggtatgcaaagtggggccgttgtgcttacgttgctctgagatttaggaaatcccaaagctaagccccaggggtgatgatctgccacacatttatagtaaactcttcaaaagtgggtgtgggaaggaactctgtgttttccaca

SEQ ID NO: 46168 - DNA, 598 bp, Homo sapiens
attagggtatgcttacctaaaatgtatcatttttaggtgcacagttctatgaactctgacaaatgcatgcagtcatgtaaccattacaaccaacatataaaccatttccatcaccccaaaaagttatctcatgctcctctctaatcattctcctccctaagcctatagaaattgttgatctgatttccgtccctataattttgttttccagaacgtgctatgtcatactgtatgtagctttcagagtttttctttcacttagcatgattcttttgtgttgttgcgtgcattagtagtgccttttttattgctgtgtgctattcctttttgtgagtgtaccatagttgcttatgtctccaccagttgatggacgtttgggttgtttacagttttgcatagttaggaatacaacttctacaaatactagcagatagcttgttatgtgggcctaaggcttcatttctcttgggatgatacctaggtacagaattgctggatcacatggcattcccttagttttttgaaaacagggtatcttgctttctgacacaagaatgtctcagtckcggtaatttcccggcctcagacctccatcagc

SEQ ID NO: 46169 - DNA, 564 bp, Homo sapiens
ttgtggttatttatgtccagagctggctccccaactacgctgtcagctagccagtgcagagggtgtgtgttagtcacatttgtatcatcagcccccgatgggccatggctacatacttgttgaatgaataacacaaggaggagctttagcatttctttgtggggccccattttctcaacgaaggtacagggaattctccacactaaccaggccagctagatctgggtggcattttatgcactttgttgttgttgttgttgtttcttatttttttatttttattttttttgagacggcatctcgctctgtcgcccaggctggagtgcaatggcgtgatctcggctcactgcaacctcygcctcctgggttcaagcgattctcctgcctcagcctcccaagtagctgagactacaggcgaccgccaccacgcccagctaatttttatacttttaatagagacagggtttcaccatgttggccaggatggtctcgatctcttgaccttgtggtctgccctcctcggcctcccaaagtgctgggattacaggtgtgagccaccgcgcc

SEQ ID NO: 46170 - DNA, 328 bp, Homo sapiens
ccgggttttgctggggcggtttattctgtttccaaactgcagtagagggaggcaaacggcccttggaccctacaagccactcctgaaatacgataggtggcctgtcctctctcccgcatggtcccaaaggctcagggaagagaggcagggcaggtscgggccataccccgccctcctggttcccgccggtggctccgggtgtagacatttctagaaacgctcccctgcccaaggctggctagaccttcgcgttggggagctgagctgctgcaggtttgattgtcttcccctgcttccaaactagaaagacgaatgcccactttcggat

SEQ ID NO: 46171 - DNA, 567 bp, Homo sapiens
gtcaacaatgagaataggattgcttcgctgggtacgctggctcatgcctgtaatctcagcactttggggggctgaggcaggtggatcacttgaggttaggagttcgagaccagcctggccaacatggtgaaaccctatcgctactaaaaatgcaaaaattaaccaggtgtggtgtcaggtgcctgtaatctcagctacttgggaggctgaggcaggagaatcgcttgaacccaggaggcagaggttgcagtgagccgagattgcgccactgcactccagcctgggtgacagagtgagactccatctccaaaaaaaaaaaaaaaaaaaaaaaaaagaataggatcacttcttatattacataaagttgaattttaacttgtraaagattgataagtggcaaataaattttgacaagtagagatacagaacttttctatttagcagtaaaacaaaaacaaaaactcaaaggttttgggtttgttgctttatagggcattaactggttttgaatctactttagatgtcttatttcagctttgttctttcattgtccatatatactttaat

SEQ ID NO: 46172 - DNA, 605 bp, Homo sapiens
atgcctcccagctgagaaagcaagcagactcacagttcctggctgtcccacagagcctggaggcagtccatctcctttaaagggtctgtggattctcttggctttcctggtatgttcctgcagtagttcttggagcaaaagttcacgatgtgggcctccacacactgctctgtttgcctgagtggaagctgcaagttagtccttccttctatttgccattttcaggttcagggctcactcctcacttcttctaagttctccaattgcaaaagcacattcaatatttttaataaaaaacatatgctttaaatattatccaattaattactaacagtacccgaytaaaatatgtaacctggaggaaaaagaaagacagtctgttggtagttcagtgctgtatgtatcccaagatgtgttttgatggccttttgtcaccaactgggacagcattgtgtcacttgagttctagatttgcgaaaatattgactggctgccgtgtgtgctcaggatcctgtagcatagcagtgaggaatgttcaatgatgttttcatcaacctgtatttagtgatcagtattggttacagggactgccactcaggaaggga

SEQ ID NO: 46173 - DNA, 598 bp, Homo sapiens
taaatgttaagctataaattatrtttcaaactgtgaaaaaaaaaagttttaaagaatgaatgaaataaaacctgaaaataaagccctggtcctttgtgtgtgtgtctgctcctgccaagaaatcagaggctctgggtgctgtgtcctgtcaggctgagcataaacaaaacccttaatcacagtcaggtctggcacatattttaagtgacaacgcaactaattacactggttctaacagtaaacattatttagcaattcagaaaaactacaccttatcagcaccaccattctcccccaattgtagccagaagaccaatttgaaatttatgctttcagaatattaactgtaattcaatagcattcttcctgcttctggaatgggccaaaagtaggatgtgataattgtaccacttgttcagcagtggataagataccctacagaacacacatgctttgtcaacagaatgtcctttcagaggttatgatcttagaaccccaaaaggtatatactgtactttctcatttcatggtgttccgtgtatgcaaggagagctcatgtcctctgaaggccacataagatggtaaatacctgagagca

SEQ ID NO: 46174 - DNA, 242 bp, Homo sapiens
ttggaccaaagctattctagtgtgaaactagggttgggccaggaatctatgaataaatggktcaccagctaccaatacacattttctcttccttttcctatacaggtaacatgcaccctgattctgtcccccaaattaaagcactcagcttaaactagcatgctccatgccataaaaagttataaggacagtgaggagattccccggaccaaccagaacaaaactcaaattggagcatgacc

SEQ ID NO: 46175 - DNA, 595 bp, Homo sapiens
cgcctgccacctgccctccggcttcccacgggctcccgtgtgcagcagcccctctgtccccagagggcagggccgcaggggcatcgtgtcaggtccttggctgccccccgtcctctgccgcttccgcctgacgctcggctgtgtctgcaggggtgggtgccggaggcggggccggggcccctggagctggggtccgaggtgagcacgtctgtgatgcggctgaagctggaggtggaggagaagaagcaggccatgctgctgctgcagagagcgctggtaacgctgctggcactgctaatcccgggccctgctagcctcctacctgctgaggccaggcccaccggtcctagcgcttccctcctctgcccacaccctgcaggcgcagcagcgagacctcacggcccggcgggtcaaggagacagagaaggcrctgagccggcagctgcagcggcagagggagcactacgaggccaccatccagcggcacttggccttcattgaccaggtgagcggcccggggagcgcagaggcccggacccagcgcgtggctcatggagacttccagagccaggggcttcccactgccagggagctt

SEQ ID NO: 46176 - DNA, 784 bp, Homo sapiens
cggatggaatttagaatcttccaattcaaagtactccttgaatacagactccccagtgtcttctatcgattcagctgtcctttcacctgatactgtcccactgggaacaggaacttccatatgatctaaacaggttcaacataaaccaaaaactggtcgaagtttattaggaggaccagcagctgttagtccattaaccccaagtgttggcattttgccattagaaaccccaagtcccggagacggaccctattgacaaaactgcactggtatgagacaccgtctgtcattgacgtgccatccaccggagccccttcaraaaagcctgttgccagaatcggccaaaccggaacaccgtctgtcttctcgcagaggggaaagagccgaaaggtaactccagtccttgcaaaaacacaaagttctggtccgccgacaagggcaacacctcaggtattgagccccactatggcatctcccccaaatgcaccgcctcgaagaaattcacgactcttgactagtgacagctccacaaccgaggagaataggagaaaattaaaaatgaagtttccacctaaaatcccaaacagaagaaccaaaagtaaaactaataaaggagcaataactccaccgaacataagtgatagcctggaagtgacaaaattggactcttccgtcatttcagaagggaaaatagccgcaatcgcgcctcagattcaggcttttaatctacaaaaagcagcagcggaaggcttgatgagccttcttcgtgaaagggggaaaggtt

SEQ ID NO: 46177 - DNA, 565 bp, Homo sapiens
actccagcctgagcaacgaatgagaccctgtctcaaaaagaaagaaagaaagaaagaaagaaagaaagaaagaaagaaagaaagaaagaaagaraaaagaaaagaaaagaaaagaaaagaaaagaaaagaaaagaaaagaaaagaaaagaaaagaaaaaatgatgtcctaggagaaaactgtccctggatgatcagcagggaaagaaaaactgaatacagttgaagttttaaaagtctgagattgaactacagaagaaaatgtgattcagtggcaaaagactcttgaaggaaatgacgctcaagagattaaaatgaaattctatgttatttctccataaggaggaaagggaggaagaatctagagaaagcaatgtaactacatagcctaccttctcacaaactcatatatatacaacctaactatgtacatattatggaaaaaagagatcaatgaacaaggaaaaataaaagaatggcatcaacttatacatagagttatatgcaggctaacacctcaatgctaccgattgtaaaaaaaaaaaagtgctaaagttaaaaaaatgg

SEQ ID NO: 46178 - DNA, 565 bp, Homo sapiens
actccagcctgagcaacgaatgagaccctgtctcaaaaagaaagaaagaaagaaagaaagaaagaaagaaagaaagaaagaaagaaagaaagagaaaagaaaagaaaagaaaagaaaagaaaagaaaagaaaagaaaagaaaagaaaagaaaagaaaaratgatgtcctaggagaaaactgtccctggatgatcagcagggaaagaaaaactgaatacagttgaagttttaaaagtctgagattgaactacagaagaaaatgtgattcagtggcaaaagactcttgaaggaaatgacgctcaagagattaaaatgaaattctatgttatttctccataaggaggaaagggaggaagaatctagagaaagcaatgtaactacatagcctaccttctcacaaactcatatatatacaacctaactatgtacatattatggaaaaaagagatcaatgaacaaggaaaaataaaagaatggcatcaacttatacatagagttatatgcaggctaacacctcaatgctaccgattgtaaaaaaaaaaaagtgctaaagttaaaaaaatgg

SEQ ID NO: 46179 - DNA, 565 bp, Homo sapiens
actccagcctgagcaacgaatgagaccctgtctcaaaaagaaagaaagaaagaaagaaagaaagaaagaaagaaagaaagaaagaaagaaagagaaaagaaaagaaaagaaaagaaaagaaaagaaaagaaaagaaaagaaaagaaaagaaaagaaaaaatgatgtcctaggagaaaactgtccctggatgatcagcagggaaagaaaaactgaatacagttgaagttttaaaagyctgagattgaactacagaagaaaatgtgattcagtggcaaaagactcttgaaggaaatgacgctcaagagattaaaatgaaattctatgttatttctccataaggaggaaagggaggaagaatctagagaaagcaatgtaactacatagcctaccttctcacaaactcatatatatacaacctaactatgtacatattatggaaaaaagagatcaatgaacaaggaaaaataaaagaatggcatcaacttatacatagagttatatgcaggctaacacctcaatgctaccgattgtaaaaaaaaaaaagtgctaaagttaaaaaaatgg

SEQ ID NO: 46180 - DNA, 493 bp, Homo sapiens
atggatttgctacactgaagttgaagttatcatcactgacaaatgctagggattatttgggatggtttattcctcttgtataaggtaaataacatcagycagccatagcattactggaagtataaaaaggtgccatcaaattttatcaggtatggaaggatccagtatcaaacagcacctgataatttctgctttttcagaattcgtaggcattgtgtagactattttctgacaactttccaaatcaattaacgaatcacagcatggaaagatctctttccctctctttgttgtatcacacctggaaagcaccatatgggagaatgcccccaatggagtcaacaaagtggaaagatcaagtgcacaggaacacccctcatcagtgaaccaagcccaccatacctgcaccttgatgatgcttgggattccagcttagccttaaaagtaacctgggttaaaagtaacattccttcaagtaagacagaggaggggc

SEQ ID NO: 46181 - DNA, 493 bp, Homo sapiens
atggatttgctacactgaagttgaagttatcatcactgacaaatgctagggattatttgggatggtttattcctcttgtataaggtaaataacatcagtcagccatagcattactggaagtataaaaaggtgccatcaaattttatcaggtatggaaggatccagtatcaaacagcacctgataatttctgctttttcagaattcgtaggcattgtgtagactattttctgacaactttccaaatcaattaacgaatcacagcatggaaagatctctttccctctctttgttgtatcacacctggaaagcaccatatgggagaatgcccccaatggagtcaacaaagtggaaagatcaagtgcacaggaacacccctcatcagtgaaccaagcccaccatacctgcaccttgatgatgyttgggattccagcttagccttaaaagtaacctgggttaaaagtaacattccttcaagtaagacagaggaggggc

SEQ ID NO: 46182 - DNA, 1630 bp, Homo sapiens
caagtactgggcacagaaaggaagattttaaaatatcctaaatttcacataataaatgatcattgatcctattatctaagatggagagatgaccctggaaggtaatttattttctataaaattctattctgaaatcaggaaatgatattacagttttgcttaaaatttgtctcttgaatctcccaagattttcagtatggaattttacatatacggctaatctaaattatttcattgaactcaattcttctctcattggcccatttaatagaagacaaagacaataataactgctctataaaacccagatgtaatcatcttgaataccttttaaagtggtctccttcctgtcttaggtagaaatcaaagcaaaacaatttcttataactatggaagtctgtggattgttctggtgatttcaaaggcagagcaagggcagtattttctgtatatttaatttcagttgtgggaaaagattggaagggttaagaagtctctggtcagaaagattcacaaatggaacagtaaggcatcctttatcactcaccactggagcacctgggccagtctcttccccatctaggtttggtggtttatttgcttgactgttttctctaaatagagaaaataggaatacttgcctgcttcttctcactttcaaatctgaaaaggtacatgagggaacacagtaaattatagaacactgcataaggcgttatctttttaaattatactttctaaaaatgacccccccagtttctgtagtcacatatagtaggcaaaaacacactggatatccttcaataattgaagctgtttactcaatatgattcgaggagtcatcagcaatacttttccagaaatcaccataattttaaaggcgttttaccaatatctcacaactactagtaggtatttatgtttccagtacccaattattttcttggatcaatggttagagcctctgtgttttcccataaatgaacatctatgtaggaattgacagttgtttgcaacttactaaaatgaagctaatggacctttttctacataaattttgaaaacgggatcatgggactagcatgagtgtcctgcatgtctgattacatacatgatgctttatatgagggatggcagggagataggataaaggagaaccataaaataagaaagaaagcaacatgatctccaaaaagaaccctgatttggtatcatagactggatgtgtaaagttaaacaatgttattgaatctctctgaattttagtttctccattatttaaaaaagacatatgaacatatatttcaaaaaaggatgagatcactaaataagataaggtttgtgaagtgcttacctaaaactaaaatatttactataacctgcaacatagtacrtacttaaaaattttggattccctttcccctaccaaaatggtatgggtatgttcacttaagattcatctcctactgatgactttacttaaaatttatctagaagttttcatttatgagaaatcagtttttttaaaaaataaatcatcggttttcatagccaaatttttctgtaactaagtttcatatacattaattaatcttttctatatttaatgtctgataagttatattgacat

SEQ ID NO: 46183 - DNA, 1630 bp, Homo sapiens
caagtactgggcacagaaaggaagattttaaaatatcctaaatttcacataataaatgatcattgatcctattatctaagatggagagatgaccctggaaggtaatttattttctataaaattctattctgaaatcaggaaatgatattacagttttgcttaaaatttgtctcttgaatctcccaagattttcagtatggaattttacatatacggctaatctaaattatttcattgaactcaattcttctctcattggcccatttaatagaagacaaagacaataataactgctctataaaacccagatgtaatcatcttgaataccttttaaagtggtctccttcctgtcttaggtagaaatcaaagcaaaacaatttcttataactatggaagtctgtggattgttctggtgatttcaaaggcagagcaagggcagtattttctgtatatttaatttcagttgtgggaaaagattggaagggttaagaagtctctggtcagaaagattcacaaatggaacagtaaggcatcctttatcactcaccactggagcacctgggccagtctcttccccatctaggtttggtggtttatttgcttgactgttttctctaaatagagaaaataggaatacttgcctgcttcttctcactttcaaatctgaaaaggtacatgagggaacacagtaaattatagaacactgcataaggcgttatctttttaaattatactttctaaaaatgacccccccagtttctgtagtcacatatagtaggcaaaaacacactggatatccttcaataattgaagctgtttactcaatatgattcgaggagtcatcagcaatacttttccagaaatcaccataattttaaaggcgttttaccaatatctcacaactactagtaggtatttatgtttccagtacccaattattttcttggatcaatggttagagcctctgtgttttcccataaatgaacatctatgtaggaattgacagttgtttgcaacttactaaaatgaagctaatggacctttttctacataaattttgaaaacgggatcatgggactagcatgagtgtcctgcatgtctgattacatacatgatgctttatatgagggatggcagggagataggataaaggagaaccataaaataagaaagaaagcaacatgatctccaaaaagaaccctgatttggtatcatagactggatgtgtaaagttaaacaatgttattgaatctctctgaattttagtttctccattatttaaaaaagacatatgaacatatatttcaaaaaaggatgagatcactaaataagataaggtttgtgaagtgcttacctaaaactaaaatatttactataacctgcaacatagtacgtacttaaaaattttggattccctttcccctaccaaaatggtatgggtatgttcacttaagattcatctcctactgatgactttacttaaaatttatctagaagttttcatttatragaaatcagtttttttaaaaaataaatcatcggttttcatagccaaatttttctgtaactaagtttcatatacattaattaatcttttctatatttaatgtctgataagttatattgacat

SEQ ID NO: 46184 - DNA, 593 bp, Homo sapiens
ggaaagagccagcccaaatatcaacagctatttctgaatttttactaatgtgcacaaacgtaatttctctagtcctggcctgctcatgtatcaatgaaagcaacttkttgtaagactcaaagcaaaggaaggaaggggaaatccaattttgttgtattaagcgtagcaactttcacaatgaattaattaaataaatgttttccaagctgattggattctttggtctaaatagtttttgctcagtatttggcacaggtcttcatgcaggattctaggtgaatagagaaagcaaataaatgtgacctttgtaaggctggtatgctttttatgaagccaaaaggtgcacaaatacacaaatattagcccagtcttattttttgtcctagaaaacttttcactggctggcggcatctctgtgttcagtctttggcatcattactgctcatcttggttccctgcaggctttgccatctgtttaactggtaaagggccccgtctcatcaggatcccttccatccaattggaaatagagccctctgattggcctttttcctttcctttgtcccccctgtttatttggaaccagcgccaat

SEQ ID NO: 46185 - DNA, 620 bp, Homo sapiens
atctcttcaactttttttttattccaaaaggagggttcagaatttccagtctagcagtaccataatgtgaatttttatagttattgtccatctcaataaaaatttagtcttccacaaaatcgtacatataatatcctaatataaatgtaagctttatgacttgtccacatatctctcataaaacaatttattgctgtgtttcaacaatagttacagattacagccaagtttgcatctttcatgtsctttttctcttctggctatttgatctgtcttgggaattcaaacccttttatgcaaaaggtactaaacagtatattttataacttgtatctccatagattctaatataatgatttgcacaaggggtctcatcaagttatcattaataattgtgttccttcaaataaatattttaataatattcagtatttttggaaggtggtagagtttgttaaataaaattccattccctttaattttgcaaattgagatgtattatacgtgcagctcaaaacttaacattctaatttgattagtggattctcattgctatttctttattataataaatgaattttacattcataatcaagactgaatcaactttgtaagataca

SEQ ID NO: 46186 - DNA, 497 bp, Homo sapiens
tttttttttgagacggagtctcgctgtgtcacccaggctggagtgcaatgacacgatctcagctcactgcaacctctgcctcccaggttccagcaattctactgcctcagcctccggagtagctgggactacaggcgtgtgccaccacgcccggctaatttttgtatttttttagtaragacagggtttcaccatattggccaggctggtctcaaactcctgacctcgtgatccgcccaccccggcctcccaaagtgctgggattacaggcatgagccaccgcgcccagcctaagccttctttcttaatgactgttgtctatgctattggtttggagtcccactggctccctataggagagtgaagatgcaactatcaaaaaggaaacatagtcctacctttcagaatgtggaaaatctaaaaggagtagcttctagctgacatattccactcattgacactatctctaacaattgaagctaataacagcaactgtt

SEQ ID NO: 46187 - DNA, 1172 bp, Homo sapiens
cctctggttaaaatggaaattctcacttaattgatatttttctacgttaaacagaagttaaagttttgtactcaaagtaagaatggatattggtgagaaggcttgaagagagtgaaaaagtctataataattatttgggttaactaaaagaggaaatgattaaagaacattaaaaagattgataagcagctcctagcagctctgatgtgccagttgttatttgaaaaaaatattttgtagaaaaactaatttgcacatttgcacaattataaacacctaaactccttgatataggagaagagaagacaaattttaagactttttccaaatttagtgactaataaggtaaacatgatagaaagaacacgatgctactcaaaagaatattttggcaattgaccattgcattcatagtgggagaaagcaaattcagttcagagctgatggactaagataaagaaaatcacaatagcctcagggagctggtgtaatgggagggagcgatttggaaaaaagtaggagatcatgatcacatagtaagatactgaacttcagccatcctgtggtgtagccatgggagtagcctgcttacatccaatacaggtgaatgtttgggaagtcaaggacctgtgaggaaaatgagtggtttatggactttaaagtcatccaagaaaatgggtaaagtaaaaacagaggataattgacaaataaggaagaatatcctttagattgacagatcatcaccatcaccatcatcatctgacaaacactaatatagctctttattaagtactgttctaagcacttcacagatattatgttayataatgctcaaaatctccctattaaaaatatagtattgttgaacttcatacattaggaaacagagacacaggaatattgaataacttgtatagaattacactgtaaataagtaaaggaattgagattgaagtacaaataatatgtttccataattcattattttgctactacaccgtggtacctggacattggacaaagaaaaggagagggtagactatggggactactaacaatataaagtattaagtgtgtgagccatgagattagtaacagccatttgagaaggccaaaagtaaaatggtgtttcttgaaaagatctgggtttcaattaagacaaggaactggta

SEQ ID NO: 46188 - DNA, 1172 bp, Homo sapiens
cctctggttaaaatggaaattctcacttaattgatatttttctacgttaaacagaagttaaagttttgtactcaaagtaagaatggatattggtgagaaggcttgaagagagtgaaaaagtctataataattatttgggttaactaaaagaggaaatgattaaagaacattaaaaagattgataagcagctcctagcagctctgatgtgccagttgttatttgaaaaaaatattttgtagaaaaactaatttgcacatttgcacaattataaacacctaaactccttgatataggagaagagaagacaaattttaagactttttccaaatttagtgactaataaggtaaacatgatagaaagaacacgatgctactcaaaagaatattttggcaattgaccattgcattcatagtgggagaaagcaaattcagttcagagctgatggactaagataaagaaaatcacaatagcctcagggagctggtgtaatgggagggagcgatttggaaaaaagtaggagatcatgatcacatagtaagatactgaacttcagccatcctgtggtgtagccatgggagtagcctgcttacatccaatacaggtgaatgtttgggaagtcaaggacctgtgaggaaaatgagtggtttatggactttaaagtcatccaagaaaatgggtaaagtaaaaacagaggataattgacaaataaggaagaatatcctttagattgacagatcatcaccatcaccatcatcatctgacaaacactaatatagctctttattaagtactgttctaagcacttcacagatattatgttatataatgctcaaaatctccctattaaaaatatagtattgttgaacttcatacattaggaaacagagacacaggaatattgaataacttgtatagaattacactgtaaataagtaaaggaattgagattgaagtacaaataatatgtttccataattcawtattttgctactacaccgtggtacctggacattggacaaagaaaaggagagggtagactatggggactactaacaatataaagtattaagtgtgtgagccatgagattagtaacagccatttgagaaggccaaaagtaaaatggtgtttcttgaaaagatctgggtttcaattaagacaaggaactggta

SEQ ID NO: 46189 - DNA, 467 bp, Homo sapiens
gcccggctgattatcaaatttatttactgatctactaatcatcatggtacaagtaattcaaaatgaaaatatcatctattaacaaattgttttgtgaaaccaaaaaaaargggggggtggtcagggggagacactgggtctaggtgcagctcacaggattagaggtagctagagttatgacattggcaggaacagggctctcatggtcagtggaatggggcagagtcattgcaagtgggaaacagagacatgggagttggggatcacttcagtagatttagggatgttccagtcagttaaagcagagaaccaagtacagtgggaaagaaggagtcacaaggcctgtagaaaagggaagcagggtgatggattctagaacaacatcaaatcacatgaataagttgtgagttacttacatgtggaatctaaatttgaaatcatagaagtagaaagtagaatgtttgtgg

SEQ ID NO: 46190 - DNA, 467 bp, Homo sapiens
gcccggctgattatcaaatttatttactgatctactaatcatcatggtacaagtaattcaaaatgaaaatatcatctattaacaaattgttttgtgaaaccaaaaaaaaggggggggtggtcagggggagacactgggtctaggtgcagctcacaggattagaggtagctagagttatgacattggcaggaacagggctctcatggtcagtggaatggggcagagtcattgcaagtgggaaacagagacatgggagtkggggatcacttcagtagatttagggatgttccagtcagttaaagcagagaaccaagtacagtgggaaagaaggagtcacaaggcctgtagaaaagggaagcagggtgatggattctagaacaacatcaaatcacatgaataagttgtgagttacttacatgtggaatctaaatttgaaatcatagaagtagaaagtagaatgtttgtgg

SEQ ID NO: 46191 - DNA, 534 bp, Homo sapiens
ttggaagatgtgttaatctacgtttatgctatacaattcctaatggtacatttaacataaccagcaaataaattatttattcacatttttctgtatacttaagatgagccctgcatttgtgtacatcattaaaaaccagtatttgtagcggtaccatgaatgctgaagcatcacgagtaatgatgtaaccagtgttaagtaaatagtattaggaaactgctgaggcaagaagacctatattgtttcattacaaatatgccccaaaaagccatgcattgtgagtaataacagtagtgctagctttttctgcatgtgggagatataaaattgtctycagaaactatgcatttgacaacaaagaatatgaaaagatggctccggatacttcacatgcactcattgaacaataaacaaatacctaagtatcttctctacacattattctacatcttcatctaaattcatggacctcacatgaggtctataaatatagacacatgaggtctataaattttgtaatacaatttttaatca

SEQ ID NO: 46192 - DNA, 493 bp, Homo sapiens
tactccggaggctgagaccagaggattacttaagcccaggaagtctaggctgcagtgagctgtgatcgctccactgcaccctaggtgacagagtgagaccctatatcttaaagaraaaaggaggaaattgaggcacaggaaaggtttagtaatttgctcttagccatgtatatattaaataatggagcttggtttcaaacccaggcagtctaaatctacaatttattctctaaaccactagaccaggggtcagtaaccatatcttgggctttatgagccataaaactctatgtggggtagtgggaagaggctgggtttgacttataagctgtagtttgcaaaccctacactaggctgtatagcctcactggggcacatccattaatatcaatgtatcccacagctgcccatgaagagtgaagctctaattttgaaaaggattttaagtcaggaattaaattaaaatgtacttttttggtgttccttttgggtg

SEQ ID NO: 46193 - DNA, 493 bp, Homo sapiens
tactccggaggctgagaccagaggattacttaagcccaggaagtctaggctgcagtgagctgtgatcgctccactgcaccctaggtgacagagtgagaccctatatcttaaagagaaaaggaggaaattgaggcacaggaaaggtttagtaatttgctcttagccatgtatatattaaataatggagcttggtttcaaacccaggcagtctaaatctacaatttattctctaaaccactagaccaggggtcagtaaccatatcttgggctttatgagccataaaactctaygtggggtagtgggaagaggctgggtttgacttataagctgtagtttgcaaaccctacactaggctgtatagcctcactggggcacatccattaatatcaatgtatcccacagctgcccatgaagagtgaagctctaattttgaaaaggattttaagtcaggaattaaattaaaatgtacttttttggtgttccttttgggtg

SEQ ID NO: 46194 - DNA, 588 bp, Homo sapiens
gagagcactagtaaatctatttctttttgatgcttgaatgttttctatgctggaatgttcttggtacatattaggttataaaatgactcatctttaggacatttcagtgcctgagggtattttctttgtaatccatgtattgaaatttgactcttgatagcacatgccaagcacatagttccataatatgattttttaaaattacagataatgaatatcagatgaacacaacagaagacacttagaaataaatcacattttgaccacttttaacaaatactcttagatcagtgtcagatatgagtccttaaagtttggccacaaagataataaacactttatcaaatctctatcttcataatgtgtgctcttctgaagaattattgtctctaacaatgctctcraagagctaccagaaaggttattaaaatgaaacctatggtcactgtagtcagaatacaaaacaaacacgcatagtcacagttcatttgcatccatttgcacagtgcatttgtttgattttacaaataactgatagatgagtggaaataatattcaatgtcttgcaatttgcagaaaagagaagtg

SEQ ID NO: 46195 - DNA, 522 bp, Homo sapiens
cagtgagaagaggccaggcccggcacgcagagggggcctgcatccatggcctgggcggcaaacgggcctggagcagaaacccagcctggggctccctgctcaggcccaggacctctggaagaagagacagtgatgggccacgtgtcccctagcggggaaggtactagagggtggcagtcctggcctctggggtctggtttctcagtcacttgactccaggccaggatgcatgggaaaggcctgggctggaggagccaaaagcgacaggtgaagtcccaccgaggycactgcgcgggagtctgggggcggagggctgtgaatatccagaacgcacagcctctgcccaggccccacctctcctgctgggcggagggcctggcctacgtgacccagccctgacactcgctcacagctgcaggcgaggcctcgggagacgggttgttttccggccacaccggcccagcgaaaggaagggacgtggtgagcaggggatgggagggtggaagtcagggtggggatgag

SEQ ID NO: 46196 - DNA, 1740 bp, Homo sapiens
  misc_feature (1)...(1740): n = A,T,C or G
atatcactattctaataagccacattttttaacaacgggaggggcttcagctactcttgcaagcgtgaaaatttccaggaattatccttactgctattataaatgaataarttttagtagtgccacactgcaaatctttggcactgacctatatagaaacattaatatcttatgatattgatttcaaagataaagtccagaaccttatggtaaatctagaggaagtttgtctctcatgatagatgctgccataagattcacctaataatatctgagtaaatcataatctccaataagctcaagacgggatcactgagcatgtatatcctctccaggggactctgggccctcatgtgctctgggcacatttcctataaatggccacctaaaacattgctagttccttgttctttgtgactgtcactggtagattgagttataatccagtcaagctatattcacaccattcattccattttaagggtttcagatgtgtcccccaaaacaaggacatttgcaatgagataaagttagtcaagaactattagaaagagattgggaaaaacccagacagggccatgaaacaagtgtgccttgggctttggtaggtggacaggctgagctctgttcttccagattccctgttccttaaacaggaatgaccagcccttcaacaaataaataaactgtggaatacaccagtagttggggaaagcaatgcttcctctcctagcccctgtaccaagtttactactttgaaattttattataatntacaagttgctaatatattttccaagcatggtcccttataagtattaaaactagatagctgcctatgtgaataatgagaaccgctgacaggaaccatcagtaagtaagccagactctaanaagtccccttaatgtctgggggtagggagaagagggcagggaacctcacccttccagcatctctagctatcagccctataggccattattccaaaattgccagcctgggtaaacactggagacagatgttttccagtttgtttatcttcttcctgtcattttcactaatactctctgctcttcttggcaggtgacctttcacaaatggtggctttgttttaaaaatgtcctattgtaaaaaagagggcagaattcacagagcaaaggccaatgtagctggaaggctttgtgggggccatggaggcttgtttcctctgccaaaggccagcgttaacctgctcccagccatgaggaggaagggggtcagccctcacttcccaatgcttcatcccattcaagcttcgtttcttaacatttccaaggagaacatacttaacagtatggaactgttggttggctaatctatttgctgtggtggtatcttaggaaaataagagtcagcaaatatctgggtgacttttataaggagatagagaaacaaatcaatattcaacagtacaagtgaggactggaaaatgtcctagtgaagacatattttcagtattggttagttctttctactcagaatctctagaggaaaagaactaatcttacatgtaatacagatcgttggactagaaatcatagataacctggatttatgccccaactctatttctatgagagctgggattcttgttggtggatcaaatgacttctttgggcaattccctctttggcaataaaataaggataacagtccctctccacctgcctcgaaagagtgctaaatctcaagtaagatta

SEQ ID NO: 46197 - DNA, 613 bp, Homo sapiens
gcatgcagggcttaaaacctagatgatgggttgataggtgcagcaaaccaccatggcacatgtatacctacataacaaacctgcacgttcagcacatgtatcccagaacttaaagtaaataataaaaaaaaagaatcaatcattatgggattatgactgattttcactttcttctttgtaccttgctagaatgtctaaacgtgtgttgctttttatgttaaaacaaaatggaaaaaataaaaattgaaaagttacatggttcagaacatcagttgcctgaaagacgagagtggggaagacgcagaagtctctctaggccttttattctataaggaaaaagctcttccacaaattattttccatgtcaaaaatttctgatgaaatattaattattaatacaaaatttaagaacataaatatactcaattggttcttcaacatckaaataataactaatgtagttctcttaactgttgaatttcttgatggtaatttaacttctttagcaataattatggatgctagagaaagggtgatagtagtattttccccccttcaaaataaaaatatacaaaaaaaaacctaattaataagctacatcatactgatcatt

SEQ ID NO: 46198 - DNA, 594 bp, Homo sapiens
agtccattaggccactggtgtgtggaagtgatctgtaaagaaataaattccttcagttcccacatcagcatatcacaaaaaaccatattgtgggtcrtttggaattttacagatctcttcaaggagcagttcagaatggtttctaagagtgctaaatctgtatcttggtgcatgggtttggctggcatggatttggacagagtgggccaaacagagctaattgaggtagggaaaaaaacaggccataatggtgaatagagttatttgtcaccgagtttgtaatgggattttcaattaattcatgcaggcttccaatgccttacattagccctgtcaagatgaactacagccacatctaaaatgccatcccctattaaacggtacatgtcagtgaatttgtaatttcttctgttcaaccagaagatgaatggattctactcagaaaacaaatgtgtgcttcagaaatgcacatttcaaaatcctgaacacttcctaggaggaacattctttgcattgttatacagtgaatatgtattaaaaatgtaattgctatgtgaattcatctaaaagggaaagcatccagctgtggagaga

SEQ ID NO: 46199 - DNA, 562 bp, Homo sapiens
tgaaatctgtcctacattaatacacaaatcagtagatttgtaagagaggtaacattgttttaatgactccaaatagtttgtgcaattcaaaatcctttggctttctttcatcttgactgtgttttcaccaataaatttctatctctcttaagttgtggtttgcacacatttcagcccacagaaatacctcatatccttactggttttcaagaaaaataactattaataaggcagtgatggtttcaccaatggatcctaggtttagcatagctaaaaatagaaagagaaasgtgaaaatttatataaactattttatacccaaccatgttaaaataaaattcggtaatctgaatgctaaagtccttaatataaatgccttaatataaataagatatcatgagaaaaaaaaaaaagactcagcatcttttccctgggttttgctcttgattctaagacaaagatgtagtcaaagttccaaccttgggatggacaaaattcaggatggatggaatgaaaaagagcccttcataactatatcctcaccaatttggggtccaccttt

SEQ ID NO: 46200 - DNA, 626 bp, Homo sapiens
agggaagatcatatcagtcttttttttttttttaaccaaaggcttgaatggtttagaaggtactgcaaggatttttggtctttgtcttcctcaactgccagatgtcacacaaacctgacttctcctttaaaaaaataccatcatggagagaaacaaaggactgaatttaagaaacagtgctttgacataaaagagaggaatccatgaaaaagtaaccattgagactgggaggcactaaaatcttatatatttcaaaatttgactgattgtatttgtttctctgataaatagccaagtgctggmctatgagtaatcaacatagctatgagaatttttaaaaaagtggtatttattttatatacctcagtatagcgtgaataagagttgtagcatggctgtgtgtatttcagcaattttaaattttaggaaataccattctggacattggcaataggctaacagtcaaaaaatatatatggctcaagatcccaaaacaattgcaacaaacacaaaaattgacaagcaaaacccaattaaactaaagagcttttgtgcagaaaaaaaaaaaaaaaatttcaaaagtgtaaagaataaatagtccccatacagaatgaaagaaaatatta

SEQ ID NO: 46201 - DNA, 519 bp, Homo sapiens
ataggatcccaagagggtagagtgggactctgacactgagatcaccgactgtgagcttgctcttgttgtggaattagctcttgctccctgccttttggcagctcttgcagcagccgtgcttcctctccctgtggtcgcagaaggagcaggaaggcaatgtgcagaacatctgcttaatggaagaaatggaacactctgattttgcccattattttgaagatgaattttaaaagggaagttaaattaattaaatgcaatcagacttgctactttccttacagatcaggtatttacttttgtaagtcactgggccctgaatatttacagcctgccttttctattcatgtgtacgtgaaaggcagtgtgcatggtggttccaagtgattgtggagtcagaracttatgtttgcatccagctctgtcagttacttgccataattgaactagtaattgactagccaagtcccttttttaagcctcagtgtacttggttataaaatagagctaacatcctcctca

SEQ ID NO: 46202 - DNA, 565 bp, Homo sapiens
gcttggtctgggacaatacctcagtgagaaagaaagggaaaattctgatacctattcttcagggtccagattctacaataaattcaatacaagaagtggtgttacagaaagctctgcttcactggttgtcaccagcaccaggcaacgtcagagagtcctggagcactgcaaccagctttggcagagagatggtgtgagatctgaagcctcttccgagggatctgcacctccatctcaggtgtctgtggcctcagcagctgtcagagaggagctcagagaatcagcagacaccacctgcagttagagagatgtttgtaatcacacgaggacagaggcacaaaaactctgttctgtgactgccatagaacaggctaatggagagtgagcaacacagcttactgttttktttgtttgtttgtttgtttgtttttgagatctcactcagtcgcccaggctggagtgcagtggcatggtctcggctcactataacctccacctcccaggttcaagcgattctcatgcctcagcctcctgagtagctgggattacaggcgcaagccaccac

SEQ ID NO: 46203 - DNA, 564 bp, Homo sapiens
aggctaaggtttttctgtttgtttgtttgtttgtttttgcttattctagcatggaggccaagaaaactatgagaagaatttagttgatagttaaactttgagacaaggaaaactgataccccttcttgttcagagattgacgccacattcacaagaaaaggtagaattatggtagaggcttgaactttgctaaagaataggcataaacaatgacctgccactgcctatcttgtttttctgtaagttgcttactgtccccagaggtgcataaccagaggttgcaaaatttataacttccccaactactcctatagataacatcactattgtaaaacctaaagaactggtcttggaaatatttttcagagttggcatttcagcagaccaagagatgcctctagtcctaagacccccctcccaggaactaactcagttgcatgaagacagtttagatacccctgtggtttcatccctggccctttgatggtttcagttccctaaccccctgcccaccaaagtayccttaaaaactctagcctctgaattcttggagagtcagatttg

SEQ ID NO: 46204 - DNA, 571 bp, Homo sapiens
aactccatctctcctaaaaatacagaaattagctgggcgtggtggcgggcccctataatcccagctacttgggaggctgaggcaagagaattgcatgaaccggggaggtggaggttgcagtgagccaagatcatgccattgcactccagcctgggcaagagtgagactctgtctcaaaaaaaaaaaaaaaaaaaaaaaaaaaatcttcattatagtgaaaccttttggttctgtttaatgtacgattttattttatgagtattatttttaataccttattagaaggtttctattttatttttattrtatatgtgattttaaaaatgtgatgtttttataatactgcatttattctgatcattagatcttatactctcatgccaatttttaaatttctttttggcaacggggacctttttacaagtgttttatgtaaaacctgacataaagtatgaaacctgtgcttcttgggttgaagtgaggatgggaaatccagatgtcaactcctccaccactactaccagcttagcttgtctatctcctgtaacatcaccagaggacccgcaggagc

SEQ ID NO: 46205 - DNA, 536 bp, Homo sapiens
gggcagaataaccatcaggaaggggtaaaggagggtgtctgctgaagctgaaacaactgggtatcctcaacagtcaagggyctgcaggagaaggcactcaaggggcgtcgtcagttctttctcttcttctgcatgaaggaggtggctggggaagctactgtggtttgtttcagatgcaggcaacaagagcacagaaaatggtatctgttgatgaagtgtggctatattgggcctatgagtcaggagtgttccagaaactttgaaccacagaaccagtgtgacagtgactcaactcgattaactaggaagagtctttaaactgtaggatgtgggtagggagattttatccttttttattttttaaatgctctatgggaaaatactgttttgtagtactgcttttggaataataatatttttaaaaattatataagttttcagtttattctgttgaaataggctagtgacatatccccctaactccaagaaatatttgggtagctgtagctcaacccaaagctaaaagttgttggaaa

SEQ ID NO: 46206 - DNA, 567 bp, Homo sapiens
ggccagcccagagaggggctcccacagtgcagcggcgggctgaagggctcctcaagcatggccagagcggacacggaggccgaggaggcgccgagagtgaacgagggctgctagcacgttgtcacctctcagtaggagagcsattgtagcagcagcagattcctgaactccatgatttcgatggtgtgatcctgaagtcagttgttcagaggcagttctctaacatttccagctttctttcaaagaaactaagagggatttttgttttcttcactgaaatttggctaatccaatattccacaactcttaactatttttatttcagtttccttccccttagctaatcaattaagttaatccactaagttcatcagtgccttccagtccactgattctctctcaacattcacttttgaaagggccatggaggaaaatgaaccaggaagatcctccctggggcagagctaccacactagaggcacacagtattgagtataatgagacttacagagaagaatatagcaatctggggaagcagaccacacttactgaaagtagcactgcaga

SEQ ID NO: 46207 - DNA, 567 bp, Homo sapiens
ggccagcccagagaggggctcccacagtgcagcggcgggctgaagggctcctcaagcatggccagagcggacacggaggccgaggaggcgccgagagtgaacgagggctgctagcacgttgtcacctctcagtaggagagccattgtagcagcagcagattcctgaactccatgatttcgatggtgtgatcctgaagtcagttgttcagaggcagttctctaacatttccagctttctttcaaagaaactaagagggatttttgttttcttcactgaaatttggctaatccaatattccacaactcttaactatttttatttcagtttccttycccttagctaatcaattaagttaatccactaagttcatcagtgccttccagtccactgattctctctcaacattcacttttgaaagggccatggaggaaaatgaaccaggaagatcctccctggggcagagctaccacactagaggcacacagtattgagtataatgagacttacagagaagaatatagcaatctggggaagcagaccacacttactgaaagtagcactgcaga

SEQ ID NO: 46208 - DNA, 602 bp, Homo sapiens
tatgcccaggagtgaacaaggacagattggaagttaaaagcaagatggagttggctagttcggatctctttaactgcaataattttctcagttaaaattttgcaatggcagtttcacaatgcaagtagtatatgttattaaacttttttcaacatttaaccactgatcttggttaccaaaagtatagaatayagtctacaaacaaaagaaattcttttctcaaaatttcaacctgccacagagctgtgtctaagcagtgcaaatttcaaaacctcaagatgaaagtagacttgccattggtatccactcatcagctcagttcatatttgcctctccatttatcagtggtatggagtacaggaaataaaacaaatctggctgggttcgctttcttcctccacttccttttatagctctcaaatagtcctctatctctactattgaaaaatacatgtgtatgtttgcactaggacatatttatctgaccccaatggcctttctgaatatgtatttccatacaaataaatgcttgttggaaatactgcatatttgacagaatcattttgtttgcatatgattttcataaaaatgaatttgggcag

SEQ ID NO: 46209 - DNA, 623 bp, Homo sapiens
aggtgactgaaactggagaagacaaaaccatggataagtggagactactgtattataaaaatataatcagaataaatgagccctttcaatgagctccaaaaatataattgataagaaaccattgggttatagttcagttggcatcattttctttgctttataaatggcacataaaataaagtgtctcttaaaatgaatsgcatcttgatgtgataaaatatagcatgtgactcagctacatgagactgcttttccagccaatggctagctgtaaaatactggctgtattctttaccttctccattcctaagatttcatgtctctatattgggtctatttctatggatcctcttggctctgagatattctagttctaattcaaatttttattcatgtctggtgggaaatttatcatttattattagatcctgcatcagatcacaggcttaaaacataaggaaaagagaaaaaaaatcatacccatctaaatttatcttttactgaaagaaacatgcaagaagaaagaggtaaaatgatttcttgcagttttccctctaattatatgtagagtttcacttcttaatcctctctgaatctcagatccccagagacgtgaagatgca

SEQ ID NO: 46210 - DNA, 1825 bp, Homo sapiens
cattctctttccctctggccatgtgatatcctcgccatgttattctgcagcaaacggcactcactagatgctggtgttatgctcttggacttcccagcctccagaactgtgacctaaatatatttctgttcattataaattatccagtctcaggtatttcgttatagcaacagaaaacaatctatgacaaccatggatcaatctcaatccaaggcaaagcgtgargtcaactgaaaccaaaatggcccttttccttggcactggccctcccaacatatagacctatagactcgaatagaataaaagaatgtttgtggaagactgaattagtggccccaattcttcattctttccaggagcctagaacataaataagaatcaccctatctgagtgttctaaacaactattttatacaaattgttattactttttctatttctacaagcatattgatgtagcaaacatcagagagcatgcattaatgatcgtgaatctatccatccaaccagcaaatgagtaactttatggagccttttactatgtgccacataccgtgtgaagaagttcatatacacacataatgaagacgtggctgctgctttcatggagctctaagtctaaatggaaacttttgagtaatgccgaaagccactaagataaacatgatagcagaaacttagaaacatttctttgggaatacagagaaaggactttataaggactttatacagctcggagggtctagaaaggtttcatagtggaagtggcatttgatctaaacctcagttgcttagaggaatggaaagatcccctaaaatataattttccactttccggattctcaagatactactatatgcctccagttgaaccagatgaaatctgatatatttagcctctgtggtaaaacactggagctgtgtcggaaaacctaggttcaagtctcagcatggccacctgagagtgagaaagtaccaccaacagggtttggcacattgtaaacccacagaatctcagtgtgccttccccagtaactcgggttattcagcttcacctactgtgaggcaacaggatcaatgaagttataaaatatgtagccaatgccaaaaccaggcattgattaagatataacatcgagtgtcttattcaacacataaagttcattttgggatatgcagatggctcccattttcattcagtgtgtcattatttatttattaagctcacttgccatattccaggcactgaaaatacaaagatgaagatgaaccaacccttgctcttaaggtccagaaagtcgtaactcagagtccaaaatataggtaattcataattaagagaaaagcaaacttttataacacaccactgtactgatactgtctctaatataataatcatgaatattcattgagctcttgctatatgccagatactgctcctaaaagctctttgaagatgctctcgcttaatcttcacagcaggtctatgccaaaacactcttatccccattttatagatgagaggctatgagaactgcctagatatagcagagctgggatttgaactcaggaagctcactctagagcctatgctcttaatgataagttaatggatcatgaggcgcattgccacacccatctagacttgggacttggttttctctgtgtataattctgcttttgtacactttagcaatgaatctgattttgaaacagttactacacaagatccatctagtttcatactctgtgtcttcaattttattaaatcccaaactaaacataaaattacatgtgggtaccactgaaacctgtacccaggaag

SEQ ID NO: 46211 - DNA, 1825 bp, Homo sapiens
cattctctttccctctggccatgtgatatcctcgccatgttattctgcagcaaacggcactcactagatgctggtgttatgctcttggacttcccagcctccagaactgtgacctaaatatatttctgttcattataaattatccagtctcaggtatttcgttatagcaacagaaaacaatctatgacaaccatggatcaatctcaatccaaggcaaagcgtgaggtcaactgaaaccaaaatggcccttttccttggcactggccctcccaacatatagacctatagactcgaatagaataaaagaatgtttgtggaagactgaattagtggccccaattcttcattctttccaggagcctagaacataaataagaatcaccctatctgagtgttctaaacaactattttatacaaattgttaytactttttctatttctacaagcatattgatgtagcaaacatcagagagcatgcattaatgatcgtgaatctatccatccaaccagcaaatgagtaactttatggagccttttactatgtgccacataccgtgtgaagaagttcatatacacacataatgaagacgtggctgctgctttcatggagctctaagtctaaatggaaacttttgagtaatgccgaaagccactaagataaacatgatagcagaaacttagaaacatttctttgggaatacagagaaaggactttataaggactttatacagctcggagggtctagaaaggtttcatagtggaagtggcatttgatctaaacctcagttgcttagaggaatggaaagatcccctaaaatataattttccactttccggattctcaagatactactatatgcctccagttgaaccagatgaaatctgatatatttagcctctgtggtaaaacactggagctgtgtcggaaaacctaggttcaagtctcagcatggccacctgagagtgagaaagtaccaccaacagggtttggcacattgtaaacccacagaatctcagtgtgccttccccagtaactcgggttattcagcttcacctactgtgaggcaacaggatcaatgaagttataaaatatgtagccaatgccaaaaccaggcattgattaagatataacatcgagtgtcttattcaacacataaagttcattttgggatatgcagatggctcccattttcattcagtgtgtcattatttatttattaagctcacttgccatattccaggcactgaaaatacaaagatgaagatgaaccaacccttgctcttaaggtccagaaagtcgtaactcagagtccaaaatataggtaattcataattaagagaaaagcaaacttttataacacaccactgtactgatactgtctctaatataataatcatgaatattcattgagctcttgctatatgccagatactgctcctaaaagctctttgaagatgctctcgcttaatcttcacagcaggtctatgccaaaacactcttatccccattttatagatgagaggctatgagaactgcctagatatagcagagctgggatttgaactcaggaagctcactctagagcctatgctcttaatgataagttaatggatcatgaggcgcattgccacacccatctagacttgggacttggttttctctgtgtataattctgcttttgtacactttagcaatgaatctgattttgaaacagttactacacaagatccatctagtttcatactctgtgtcttcaattttattaaatcccaaactaaacataaaattacatgtgggtaccactgaaacctgtacccaggaag

SEQ ID NO: 46212 - DNA, 1825 bp, Homo sapiens
cattctctttccctctggccatgtgatatcctcgccatgttattctgcagcaaacggcactcactagatgctggtgttatgctcttggacttcccagcctccagaactgtgacctaaatatatttctgttcattataaattatccagtctcaggtatttcgttatagcaacagaaaacaatctatgacaaccatggatcaatctcaatccaaggcaaagcgtgaggtcaactgaaaccaaaatggcccttttccttggcactggccctcccaacatatagacctatagactcgaatagaataaaagaatgtttgtggaagactgaattagtggccccaattcttcattctttccaggagcctagaacataaataagaatcaccctatctgagtgttctaaacaactattttatacaaattgttattactttttctatttctacaagcatattgatgtagcaaacatcagagagcatgcrttaatgatcgtgaatctatccatccaaccagcaaatgagtaactttatggagccttttactatgtgccacataccgtgtgaagaagttcatatacacacataatgaagacgtggctgctgctttcatggagctctaagtctaaatggaaacttttgagtaatgccgaaagccactaagataaacatgatagcagaaacttagaaacatttctttgggaatacagagaaaggactttataaggactttatacagctcggagggtctagaaaggtttcatagtggaagtggcatttgatctaaacctcagttgcttagaggaatggaaagatcccctaaaatataattttccactttccggattctcaagatactactatatgcctccagttgaaccagatgaaatctgatatatttagcctctgtggtaaaacactggagctgtgtcggaaaacctaggttcaagtctcagcatggccacctgagagtgagaaagtaccaccaacagggtttggcacattgtaaacccacagaatctcagtgtgccttccccagtaactcgggttattcagcttcacctactgtgaggcaacaggatcaatgaagttataaaatatgtagccaatgccaaaaccaggcattgattaagatataacatcgagtgtcttattcaacacataaagttcattttgggatatgcagatggctcccattttcattcagtgtgtcattatttatttattaagctcacttgccatattccaggcactgaaaatacaaagatgaagatgaaccaacccttgctcttaaggtccagaaagtcgtaactcagagtccaaaatataggtaattcataattaagagaaaagcaaacttttataacacaccactgtactgatactgtctctaatataataatcatgaatattcattgagctcttgctatatgccagatactgctcctaaaagctctttgaagatgctctcgcttaatcttcacagcaggtctatgccaaaacactcttatccccattttatagatgagaggctatgagaactgcctagatatagcagagctgggatttgaactcaggaagctcactctagagcctatgctcttaatgataagttaatggatcatgaggcgcattgccacacccatctagacttgggacttggttttctctgtgtataattctgcttttgtacactttagcaatgaatctgattttgaaacagttactacacaagatccatctagtttcatactctgtgtcttcaattttattaaatcccaaactaaacataaaattacatgtgggtaccactgaaacctgtacccaggaag

SEQ ID NO: 46213 - DNA, 564 bp, Homo sapiens
aagaagacggaaactaaaccttacgaagacctattacatttctaaaatttctgggcctccagtggtgtaaggcacacagggacatatcgtcattaatgtgaagaacatagtcctgttacttacccatcataccccttggaaggtggtagaaggatcagtgtaactttttggattttaacaacttataaacgccatatgaatgaccttctgcaactcatttatcatatagccagaaaagttgcttactccaataaagagagatctttatagtttcaatagtgcttgaagtgtctgaagcagaggtgggtacaatttgaggcctgtaacaaaactagcaggagaatttcaagaaagatctcttggaggatttagagcaaagccatgttttctttagtacataaataattatcattttgaaacagagaatttccttgctgyaggaatctagtggagtctaaatacttgaccactgatttccaagagtttttgcaatgcaggccacatattaaactggcaaataaattatctgtcttgcaacaaagttgatttggccccataaagtaa

SEQ ID NO: 46214 - DNA, 590 bp, Homo sapiens
aagtgcagttcatatttgctttagtaatactggcagagagataacatctatttgagacttacaaatggggtttcatttccttcagctacatcatactgtattttgaaggagagtgatttcagcaggcttttgtcttatgcaagcaatactagcaaacccagcaggatgatgagtgctagatagttgcaaaattgatattaggagaaatttaagtaattaaactttaacaccttartattgacttttgtctggccttttacatgtaatacatttattatgcacaagcagatgctgacattcatgttaggaaggtaaaaatctttggaaaactaaacttgagagctccctgatcactatttaatagtagcatccttttttgtttgatcattatctacaaatgactttaaagaatattatttgtcttaatttgctttaaaaactctgaagtttttatccctatgctggttttgatattatgccacttcagccctatcttcagcctgacttccttctcttccataagaaataagtactgagtcaagggaaactgatcatttgcctctgttttaggatagatttataggcaggtc

SEQ ID NO: 46215 - DNA, 541 bp, Homo sapiens
tgcccaggctggagtacagtggtacaatcacagctcactgcagccttgacctctcaggctcaagagatcctcccacctcagcctccyaagtagctgggaccacaggagcacatcaccatgcctggctaatttttttgaaaaaattttatgtagagacaggacagggtctctgtatgttgcccaggctggtctcaaactcctggcctcaagcaatcctcctgcctcacttggcctcccgaagtgctgggattacagttgtgagccaccatgcacggcctctaaattttaaagttagatgatatgttgatatgaaagaaaaggactctgataaacccacagtttagcttcactggagggactgaggggatgggagcaggaaggctgggtttcaagtaaccttgaataaatactctgtatgaattaataaaatggaaataaaagtttctcactgtccacagcttaaaaagatgagatgatatatatgtaaataaagcaagacacaagtggcaggggttgcaaaatgccttggggcttcctgaaa

SEQ ID NO: 46216 - DNA, 541 bp, Homo sapiens
tgcccaggctggagtacagtggtacaatcacagctcactgcagccttgacctctcaggctcaagagatcctcccacctcagcctcccaagtagctgggaccacaggagcacatcaccatgcctggctaatttttttgaaaaaattttatgtagagacaggacagggtctctgtatgttgcccaggctggtctcaaactcctggcctcaagcaatcctcctgcctcacttggcctcccgaagtgctgggattacagttgtgagccaccatgcacggcctctaaattttaaagttagatgatatgttgatatgaaagaaaaggactctgataaacccacagtttagcttcactggagggactgaggggatgggagcaggaaggctgggtttcaagtaaccttgartaaatactctgtatgaattaataaaatggaaataaaagtttctcactgtccacagcttaaaaagatgagatgatatatatgtaaataaagcaagacacaagtggcaggggttgcaaaatgccttggggcttcctgaaa

SEQ ID NO: 46217 - DNA, 595 bp, Homo sapiens
tttttttttagatggagtcttgctctgtcgcccaggctggagtgcagtggtgcaatctcagcgcgctgcaacctccacctcccggattcgagcaattctcctgcctcagcctcctgagtagctgggattacagcatgcaccaccacgccmagctaacttttgtatttttagtagagacagggtttcaccatgttggtcaggctggtctcgaactcctgacctcaagcaatccagctgcctcagcctcccagagtgctgggatgacagacgtgagcccccacgcccagcctgctacctggggttctttcatgagtgtccctgcccgtaccctttagcccacgtgggtgtgcgtatctgtcagaactgcatgtgaatgaatggctggcccaatgacttggcctctcatccctcacgttctcagtttgtggatgacaacagtcagagcgctggcttcacggggtgaggatgaatgaagtcctaccgtagtgcctggtacacgggaacccccatcagtgttagctggggaggggaaaagcagctggaatggggagggggagaataaggggcctgtgcagccaggggaggctggtcagcc

SEQ ID NO: 46218 - DNA, 467 bp, Homo sapiens
gaaaaccatttccttgwctggtaaatgcggctgtaatgaaatcgaccccattcactgttgtgaggattaaatgagatgatgtatgcagagcaactaggacagtgcctgggaaagtgctactcatgatcatttatcttcagtttagaacaatatatacttgcttatttaaaaaaggagataatagagaaaaggtattgagaaaaataggagaggagaaaatcactcatattctcaccattcagtgattcagcccagtatcatcaatgttttgtttggttgtttttgtaggtgtaggatttttttttttttttaacgtaattttcctgcataagcagtttcgcatttttaacccaaacttaatgttctttttaatgttcttgtacttacaaagatttatcttgtttttagattgatatctcaccttggcagaaatgagataaaattttaaaatattcatttggtggctt

SEQ ID NO: 46219 - DNA, 467 bp, Homo sapiens
gaaaaccatttccttgtctggtaaatgcggctgtaatgaaatcgaccccattcactgttgtgaggattaaatgagatgatgtatgcagagcaactaggacagtgcctgggaaagtgctactcatgatcatttatcttcagtttagaacaatatatacttgcttatttaaaaaaggagataatagagaaaaggtattgagaaaaataggagaggagaaaatcactcatattctcaccattcagtgattcagcccagtatcatcaatgttttgtttggttgtttttgtaggtgtaggattttttttttttttwaacgtaattttcctgcataagcagtttcgcatttttaacccaaacttaatgttctttttaatgttcttgtacttacaaagatttatcttgtttttagattgatatctcaccttggcagaaatgagataaaattttaaaatattcatttggtggctt

SEQ ID NO: 46220 - DNA, 530 bp, Homo sapiens
gatccttctgatgggcaaggaaaggtatygcacctttctgtccctacaagaacatgaaggaaaaagtgacaatcctgaaatctaccagagccaaacaaaaaattatatacaaatgacagtcagatagaaggtagacttctcatctgcaacagtgtacttcaaagttatacggaatacttatattcaaggaaagatggaagggagaaaaataaaactatcaacatagaatatatgcttaactaaaatgttattcaagagtggaggcaaaatagaaatgttttctgacatataacatctaagatcttttacccagtagttattctccaaaagaaaatttatccatgaactatatcaaaggaatagtgaaagaggaggtaagtcagaatattagtcaggataaacaaaaccaacaggatattttatatatatacatataaacacacatacacacatacatgaatatacgacacatatatatgtgtgtatatagctatacaacagaacatatgtgtgtatatatatatatgtat

SEQ ID NO: 46221 - DNA, 601 bp, Homo sapiens
atcatgcttgtcagcaggctgcttctgtgagtaccatgacatttgatgtacgaacggctacattttgctatgtctttatgtaattatatttcttacagagactataagactaggaaaacatgcctctaattaaacaccttgatggttaatattttaacttataatcagttagggtcaaaaaaaaaaaaaaagcaagagcatactaaaagtaagttttcttaaaatgagttctggctagtgtagtatctacaacattaggaaacatccaaaatccttgttgaatacaggaaaatgtcaattatttggatgtttttctggtgaatgttaaaggayatataattattttatcaccaaatattgccctccttcttgattccttaaggagagccccattaagaggtcctgcccagtgtgctttcaccattccaagagaagctgagtggtctcagaaaaattaggagtttaattctaaccattgaaaatgaccgtccttattatacatacctacggttgtccaaacggttacagctaactaagaaagcaatgagccaaaaactgcgctgaatttcatcaaattgaaggtgtcattgattgtaagatg

SEQ ID NO: 46222 - DNA, 688 bp, Homo sapiens
cagttgctgttgatctctaactgtgcctaatttataaattaaactttatcatagacatgtgtatgtacaggaaaaaaacagtatatagagagcacagtactacctgcggtttcaggcatcccacaggggttttggaacatatcacctataaataaaggggggcgggagacgctaatgtaatttgctatacatcaaaaaccgacaaatacattctgttaactttagagaaataaactatcaaggtgtcataacatggaacacgggaaattggtgaaaaatgaataaaatgtagttatgtgtgtctgcatgaacaaataccccaaacacaacattatatacaaaagcaagttttagtataatataatcgcattcacaaaaagttttaaaataaaaataatacctatatgtggtagaagatgttagaaaacgactagtgatagttataccttgggaaaatgaatcattcaggagttggtgatcggggatttaggcatcgtgccaatgttttatttttcaagctgtgtgataagcctataggttatcatgttattattcttgtgcatgttatactcttcaatattacatamtgaattttgaaatataagaatgtaagtttttgagataagttttatgcctatgaagtgttatccaaatgttaatcatacatgttatttttgagtcttggtca

SEQ ID NO: 46223 - DNA, 530 bp, Homo sapiens
  misc_feature (1)...(530): n = A,T,C or G
aggcttccaaagaccagtgatgctgagtaattaaaactattcagttttataaccctattaaaatggaaaagtgtttctttcaaacccagtgttagaaagaatgttgagaaactggcatttttatatactgctagagaaaaacattagcaaaattttccttttcaaaaaatttgaagtactgcactatcttgttttcctgtgaaatctctttccttctttccttctttccttccttccttccttccttctttctttctttgtttctcaatagttatatatctaggagattcattaaaaatactccaagatttcaacagaggttattatctaggaatratgaaaacattnataaatacacacacacacacacacacacacacacacacacacgttacatttnttccaatttgtagattcagcatcctacattaacatgaaaatcacattcttcaatcctaagataccatgtattttcatatncatgaaatcagcacagtcataaaattagtatcatcttagattcaaagaaa

SEQ ID NO: 46224 - DNA, 530 bp, Homo sapiens
  misc_feature (1)...(530): n = A,T,C or G
aggcttccaaagaccagtgatgctgagtaattaaaactattcagttttataaccctattaaaatggaaaagtgtttctttcaaacccagtgttagaaagaatgttgagaaactggcatttttatatactgctagagaaaaacattagcaaaattttccttttcaaaaaatttgaagtactgcactatcttgttttcctgtgaaatctctttccttctttccttctttccttccttccttccttccttctttctttctttgtttctcaatagttatatatctaggagattcattaaaaatactccaagatttcaacagaggttattatctaggaatartgaaaacattnataaatacacacacacacacacacacacacacacacacacacgttacatttnttccaatttgtagattcagcatcctacattaacatgaaaatcacattcttcaatcctaagataccatgtattttcatatncatgaaatcagcacagtcataaaattagtatcatcttagattcaaagaaa

SEQ ID NO: 46225 - DNA, 563 bp, Homo sapiens
tttttctagagtatgccccgtcatgactggctgagcttgttttctggtgaaatgccccacaaccagcatttgcctgactgcttccttgagttgtcagttcactggttgctgtcctcccctgtatgtttttttattttattctatttatttttttgagatagggtgtcattccatcgcccaggctggagtgcagtggtgcaatcacggctcaatgcaaccttgcctttctggacttagatgattttcccacctcagcctcctgagtagccaggactacaggtgtgcaccaccatccctgattaattttttgtatttgttttttttctttkggtagagactggggtgggggctgaatctcactacgttgcccaggctggtctcaaactcctgggatcatacttggccttccaaagtgctgagattacaggcgtgagccaccctgcctgatcctactctgtatgtcttttaaatggcaagttggatctacacctttgattagattcagtttcaccatttttggagagtacacttcctaggtgacgtgcacttcatattacatcaca

SEQ ID NO: 46226 - DNA, 539 bp, Homo sapiens
aaattcctactcatcgttcaagtctttcaacaatcctcctctgagaaggcttctccaacttacgttgacagaatgaggtcccatcctttcacatttgcatagtatattctattttccttgttcatagcacttttcaccttgaactgcaattattattactgataattactgagaatttattaaattacaaacaatggactaaatacttcatgtatttgcatacattaccttcctaagttctcacaataacccagtaaggtatgtaattttagtgtctccattttacagatgaagaaataggctcagattagttgatcaagctgagaacaaaatagaagttattgtaccgacgcttttctttttctttttttcttttgacggagtctcattctttygcccaggccggactgcagtggcgcaatctcggctcactgcaagttccgccttccgggttcacgcctttctcctgcctcagcctctcgaggagctgggactacaggcccccgccaccgcgcccggctaattttttgtatttttag

SEQ ID NO: 46227 - DNA, 528 bp, Homo sapiens
cacayatatatatatccacccacccgcccacttagttatgtttacaactcatttgaaaaacctcagtttttcaaaattttgcatactgcttttgtaagtaacatgtcaatgatcagtttaacatttcaagagggttttttttgtaaaagattttccaataattgcatacacttgtatataaatgtaatataattaacacatttcccttttattggccgttctagattttctaatttctcaaaatgtaaatagtactgcaataagtgtgcaaacagttgtttgaattttgtattcttttttggaaggattcctgaaagtgaaataagtgggttaaaaggaataaacaacccaagaactcaagaattactcaatggtcaaaactttgttaactactcaacggtcaatgagactactcaatggtcaaaactctgttaaccgaacccattaaaaatattttctgtaacctcccagaagtttttgcctttctccactctattctgcctcttcaagcactgttcatgcttcaag

SEQ ID NO: 46228 - DNA, 409 bp, Homo sapiens
agagatatttaaaatagtccaacaggtcaatgggaagatatgatgattaatttacatgtcaacttgactggaccaggatgcccagacatttggttaagcattattctgcttgtatctgtgagattttctggatgagatgaacatttgaatgggtggactgagtaaagagtgccttccttaatgcaggtgggcctcatccaacaattaaagacctgggtagaacaaaaaggctgagtaatagggaactcctcctgcctgattgcttgagctggaacattgtgccttcaaacttgactgaaaaatrggcacttcttggatcttgagcctgctggcttttggactggaacttttaccatgggctctcctgggtctccagctttccaattgcagaacttgggacttcttagcc

SEQ ID NO: 46229 - DNA, 540 bp, Homo sapiens
ttttttagtatgtcttttatttgtggaagaacccatgaaagtttagtttaaagctggagtttttaaaaaacattggggggaacttaattttgtcctaaagctggagtttttaaaaaacattggggggaacttaattttgtcctgttcatagtgtcttagttgagaatttaaggtgtgcaaagaggaaaaaaaatctagtcaggagtcagataaaccaagaaaagtggactgaagatgactagctaaaatcagagcaggagcactgtagctttgcttgaaatcaggccaccatccatgaatttcattcctaaggtcattaaatggctgcttgagctccaactcttacatccacattccagctagcaggaaggacgaaaggtgaagggcatttcttcatcactttatgtacaccacagctcttatrttccagttcctagaacttaatcttatgaccataccttttacaaaggaggctgaaaaatgtcatctttattctgattggacatgtgcccagttgaaagtcacaaattctgttacaaa

SEQ ID NO: 46230 - DNA, 579 bp, Homo sapiens
tccactaaaaatataaaaagttagccgaatgtggtggcaggcgcctgtagtcccagctactcgggaggctgaggcaggagaatggcatgaacccgggaggtggaggttgcagtgagccgagatcacaccactgcactccagcctgggcgacagagcgagactctgtctcaaaaaaaaaaaaaaaaaaaaaaaaagaataagtacagttaagctgagctcaaatttccaatatggggtttcyctatgaatgggaaagagtctaatctataaatcatcatccgaaagctaaggctcaagttatctgacttaacattcacgctgtttttgcaaaacagaaaaccacattttcataatgtataatgcagtgtctgtggctctgattgagaggaagggggacttgagaaaggggatggggcgaggaagaagaggggctaaggtttagtcagctatagccaggagaagagtggaggaggctgacccacagtgtcaagggatgaacaaaggggaacttagtccttatttaagatgaaggtggggctgtggttgagaggtaagggacccctcaaactatatggacaa

SEQ ID NO: 46231 - DNA, 592 bp, Homo sapiens
aaaaaaaaaatgtttcaagattttataatcatcatctccagaagggttagttcaccacttactctgttctcattccttcctctttcatgaaagcaggtcttttcctgggtattatgacaccacatcctgctggctctattctcttttccctgtaagctcctaattctcagtttccttgttggctcttctctacctcaactttaaatagtgaaattcctaagggattgttcacagtccactttgtgtctcattgtaccctttctcattacgctytcttccacttttatagcttcaaatgccatttctaggttgaagacttccaaatttatattgttaaactataattcctttctgaactccagcccaattatattcaagtgacatcatcaacatcatatatattcaattcttaatcttttctccacattttcttcagctctaatcttatgtatcttggtaaatagaactaccagggcttgtgacagaaacctaggtgtcaatctttacattctcctctgcctaaccaactcccacatcacattagattctagctggaaaatatcaagagattctgtttttttctctatccact

SEQ ID NO: 46232 - DNA, 537 bp, Homo sapiens
gtcggtagagggtagacagtttgtgaggctataaatccatgaccggaacacaagagcatagtgattcttcataagcaaagccctcatgttggttctctgtttttgagatttgttcaggcaatgacagatccgggttagcacactaatcaccaacccagatgaaatgacctaataccaataagtagttcctttcgtcattatggcccttaaacttgacygtaagtctgcaatgggtcacattccaaatattttggagagtgaacaatattttgttgatgatgatgattaaaacaaataaaaataatagctaccattttagcacaagagttggttctggaattttccaaagtataaaaatgtgagtctctgaagtctctttttacagaagctgttatggtatatatggattgtcagaatacagtcagcttgtgcttactgatgagggaatcataaatttgaatttcctcacatatggtcacataaaatttcaaaataatactatactcatgtaaaaaccttaccatttgttaatgcaac

SEQ ID NO: 46233 - DNA, 619 bp, Homo sapiens
attaattaattttgatattaattgctgtctttttctcaataaatagaatcagaactttttatgccacaaatgatcagtgttattaratctgcagaagcccaaatctgcatattaatgaacacaaagctgatatattgaaacacatttggtttggaaaattttacttcctgtgctcttaagatttttaatattttaataactggggagattatttctctacttagcaatgctgagctcagaatggtaaatcaatgaaaaaatggtgtttaatacaagtaactttggaattattgtgtaatatactattactaaagagttatctaaaaatagatattaattttcaagtaattttaaataaaattaaattatttatttaatttttggagacaaggtcttgtgatgtcacccaggctaagtatactggcatgttctcagctcactgcaacctggacctcctgggctcaagcgatcctctgcccttagcctctttagtagctggaactacaggagtcaggagtgtgccaccacacccagataatcaagtaatttatgatttttttctaactcacagaattctgaattttatgcctagaaagaatttgatgatctgtcaattgta

SEQ ID NO: 46234 - DNA, 539 bp, Homo sapiens
gtgatttgtcggaggttataacaatcytgcttctctgcacatcctagggaagttatctgaataagatcgtgtagtgtgtagtaaaggaaaatattgacagtttaccctcatggttgaattaatttttcaattatgttgtcaaatagtcactttttctgtcaagtggaatcttctctctttcaatgtcgtctgaattttttaccggacatggtaaccttatagtatcttttcagtgtcttccaattcataaactaggcagcagaatgatatagtgacatattttgctaacagcttctaatttggaaaacaagtgacattagctttaaaattgcacatctggaaaagttcacagatgaacagttttttttttttttctttaagtggccagattaaggagacacatccccactgcaagctatggagtgatcacatcactgtttattacttttcaaacccataattagccataaagaaacatgtacaaataaaatactgtatttatatttcccatataaaagactctgttgttcagtcataaa

SEQ ID NO: 46235 - DNA, 539 bp, Homo sapiens
gtgatttgtcggaggttataacaatcctgcttctctgcacatcctagggaagttatctgaataagatcgtgtagtgtgtagtaaaggaaaatattgacagtttacccycatggttgaattaatttttcaattatgttgtcaaatagtcactttttctgtcaagtggaatcttctctctttcaatgtcgtctgaattttttaccggacatggtaaccttatagtatcttttcagtgtcttccaattcataaactaggcagcagaatgatatagtgacatattttgctaacagcttctaatttggaaaacaagtgacattagctttaaaattgcacatctggaaaagttcacagatgaacagttttttttttttttctttaagtggccagattaaggagacacatccccactgcaagctatggagtgatcacatcactgtttattacttttcaaacccataattagccataaagaaacatgtacaaataaaatactgtatttatatttcccatataaaagactctgttgttcagtcataaa

SEQ ID NO: 46236 - DNA, 539 bp, Homo sapiens
gtgatttgtcggaggttataacaatcctgcttctctgcacatcctagggaagttatctgaataagatcgtgtagtgtgtagtaaaggaaaatattgacagtttaccctcatggttgaattaatttttcaattatgttgtcaaatagtcactttttctgtcaagtggaatcttctctctttcaatgtcrtctgaattttttaccggacatggtaaccttatagtatcttttcagtgtcttccaattcataaactaggcagcagaatgatatagtgacatattttgctaacagcttctaatttggaaaacaagtgacattagctttaaaattgcacatctggaaaagttcacagatgaacagttttttttttttttctttaagtggccagattaaggagacacatccccactgcaagctatggagtgatcacatcactgtttattacttttcaaacccataattagccataaagaaacatgtacaaataaaatactgtatttatatttcccatataaaagactctgttgttcagtcataaa

SEQ ID NO: 46237 - DNA, 539 bp, Homo sapiens
gtgatttgtcggaggttataacaatcctgcttctctgcacatcctagggaagttatctgaataagatcgtgtagtgtgtagtaaaggaaaatattgacagtttaccctcatggttgaattaatttttcaattatgttgtcaaatagtcactttttctgtcaagtggaatcttctctctttcaatgtcgtmtgaattttttaccggacatggtaaccttatagtatcttttcagtgtcttccaattcataaactaggcagcagaatgatatagtgacatattttgctaacagcttctaatttggaaaacaagtgacattagctttaaaattgcacatctggaaaagttcacagatgaacagttttttttttttttctttaagtggccagattaaggagacacatccccactgcaagctatggagtgatcacatcactgtttattacttttcaaacccataattagccataaagaaacatgtacaaataaaatactgtatttatatttcccatataaaagactctgttgttcagtcataaa

SEQ ID NO: 46238 - DNA, 2357 bp, Homo sapiens
aattgttatatcaaatacctgttcagctgtaaataaggccctctgtaagtcactgacaaaaagattatattctcttgttgccgatgtataattcctattgtttaaaatgtgcagctctccaacatccatactttgtgacctgtagccatttaagttgtgtatttaatacatacacacgtacaataaggacatggcacattacaaaaagtcacaattggaggtatttttgttttcaaaggtatttttcctccaaagaagagacatacacatggagctctaatggattctgtattacgtagaaaatccctttggttgcaagtaacggaaatctcacaatcagtagcttaaataaataagatttgtttttctcccataaggtgattagagataggcagttgcaagttttggttcaacagctcaatgatgtgaggacgggcatctctaaaattttggtcttcctgtcataaatgaaagatggatttttaagctccagtttttccatctattttcatggaagaagtgggacagaggcagctcctcctggtattcgtccctttcatcaacaaattcaacgcatttccagcagccacccacttatttccacttatgcccaattgcccagaattatgcacctggatacctctagctacggaaagttgaggaagttggccctgcaatggaagcaaggaagaagagtattgggaatggctattggatgagccagttaatacactctgccataggtgccaataacaacttataaatagggtagaggccgggtgtggtggctcacacctgtaatcccagtactttgggaggcagaggcaggcagatcacctgagtttgggagtttgagaccagcctgaccaacatggagaaacctcatctctactaaaaatacaaaattagccaggtgtggtgacacatgcctgtaatcccagctacttgggaggctgaggcaggagaatctcctgaagtggggagacggaggttgcagtgagccaagattgcatcattgcactccagcctgggcaacaagagtgaaactccatctcaaaaataataaataaataaataaataactagggtagaaagcacagaataaggaaggctttaaaaatggtaagcccatatgggaaaaaatattatttattttttgagacagggtctcactctgttgcccaagctacagtgcagtggggtaatctcagctcactgcggcctccacctcctgggctcaagtgatcctcccacctcagcctcctgagtagctgtgactatacgcgtgtaccaccatgcccagctaatttttgtacttttttatagagaaggggttttgccatgttgcccaggctggtctcaaactcctggactcaagccatctgactgctgagattacaggcatgagccactgcactgggccagaaaaatatttaatattaacttctaccccataccatacacaaacatgaattctggatggaatgtagatctttttatgtgtgtgtgtgtgcacttttattcaactggtctcaagtcagtgcacaggtaagccctggctgccttcacccactcccagggacaccaaaagccttcatacatctcaagctgggggacaaaaaagggggggggggcacgaaggctcatcattcaaaataaaaaaaataagaaagtattaaggygaagattaaaaaaattttgcattccataatttacacgaaagcaatgctatcacctcccctgtgtggactcggtagacgactgggccattctccttagacagaagtggggtggcttttaggatggcaagggacttcctgtaacaatgcatcccatgatatttggaatgactattaaaaaaaagaacaatgtacaatcaaagtcctcggccacactgtagaactttgggggatgctcgctccaaccgactgctgtcaccttcactgttccagtttttaaatcctgagtcaagccaaaaaaaaccaaaaaaacaaaacaaaacaaaaaaacaaataaagccatgccaatcttatcttgtttcctgcacaagttaggttttgtcaagaaaaggtgtaacacaactaagtcacagtccgcctagaagcatttgcggtgaacgatggagggccagactcctcatactcctgcttgctgatccacatctgctggaaggtggacagcgaggccaggatggagcctccaatccacacagagtacttgcgctcaggaggagcaatgatcttgatcttcgtcctgctgggcgccagggcggtaatctccttctgcatcctgtcagcaatgccagggtacatagtggtgccaccagacagcactgtgctggtgtacaggtctttgcg

SEQ ID NO: 46239 - DNA, 1053 bp, Homo sapiens
ggagggtacttggactctctcaaggaacacagtgggggtgggtgttcaggttctctgaagtgttcctatctttctaagctttcagtcctttcttctgttttatgccaaggaagttctgacatctcatcacgattgaattgaattgcctttcagtctacatgtcagataatcagccagcctgctggaaacccacacagttcctttattctctggtcaggtaaaccgtaataatacatttgatttgatccaacattatattttatccttctgggtctcatagccatagaaaccactctcacatctatttatgttctcaccagacttccatttaaagaatgtttaatgctaaaataaatttagtagacacaattaggaatttaatggaaaaaaattagaaactagcaagtgggtggcatttttcaattcctcttctgatttataagcttccatctggtctgtccttttctttcctggacagactgtgaggaaggcagaacttgtctttgtctctgtcttacttttccttttagggattttccttatgttttggccaatgtatattttgaaaatcttgctattcttttggagtacaaactctcttcccccagctatgacaggccacttttctctttggagcaggttgagatctgactgtcattataggtcttgaggcagtgaaggtagtggggagaataggcaccctttgtgaaggcagcaaccttacatgaggttatcacaagatattcaagaaaggggaagctactcttttcaacatattgggggccgcttctgctgacaagtgaggcacagggatattagattgaaaatactcaaacttgactgagtctaacaaaatgtcttcctctcaagtcttaggcacctattccttccaaataatgtctgaactttcacacagaaacttagtccatctgtaaattcatcttatattgtaatcctgcaattcacatgattgtattttgggtttgatttttagtcatatctgctytatgactccagaaaataagaggttcttaaaagttaccaaagacattt

SEQ ID NO: 46240 - DNA, 523 bp, Homo sapiens
gactccaagttcttcagttttgagacttggactgtctctccttgctcctcaagcttgcagacagcctattrtgggaacttgtgatggtgtaagttaatacttaataatcagttgggccaccaagcagctggttggcttctgttcatcttcactttttaatctaggagtatctttagttaatagttgcgtggaaaatgagccaactgcaaatatttagaggcaaattttaggggcactagtaaagacatattattaaacgtggttatgtgccaggtaatacagaattgacacaaaaggaacctaagtgttggggtcattgggcttagcagaagacacacatggtctctttttgtcctcatgacacttagtgtgggagcaaatatcttcatgtcatatatgaggcaactgaggtttagaaagggtaaagaactttcttaaagttccagtcctggtatgtgaaggagtcagacttaactgagatccatggtttagccaccaccgagcttgcctcagtgtgaattta

SEQ ID NO: 46241 - DNA, 511 bp, Homo sapiens
aatagcagaacacactggcttgtgcaagtmtggatggtactttccagagataggaaagtagggaagtggaagggtgcacttcagtttaaactgctctcactcttagtaagtgaaataatcataatttaatgaagtacctcataaactgtgggctatattccaatacagggcactagcatttaatgatatactgttgatcatttctctagacacaaattgataaagataagttcagtggttcagattgtttcccgaaattgagacttcaaaagaaatactatattttaagctgctgttaccaaaagttgggcattttcctaaaatatagttttatatttatataggcaatataatttatcttaagcccctgaccctaaagaaatttaccaaaggattattttcataaaatcacacgcaaacacacataagcaaaacttaaaaaggagttagactgcattacaaaagatgaaacagaggaagagactgaaaaatggagttgtgaagagggaaa

SEQ ID NO: 46242 - DNA, 511 bp, Homo sapiens
aatagcagaacacactggcttgtgcaagtctggatggtactttccagagataggaaagtagggaagtggaagggtgcacttcagtttaaactgctctcactcttagtaagtgaaataatcataatttaatgaagtacctcataaactgtgggctatattccaatacagggcactagcatttaatgatatactgttgatcatttctctagacacaaattgataaagataagttcagtggttcagattgtttcccgaaattgagacttcaaaagaaatactatattttaagctgctgttaccaaaagttgggcattttcctaaaatatagttttatatttatataggcaatataatttatcttaagcccctgaccctaaagaaatttaccaaaggattattttcataaaatcacacgcaaacacacataagcaaaacttaamaaggagttagactgcattacaaaagatgaaacagaggaagagactgaaaaatggagttgtgaagagggaaa

SEQ ID NO: 46243 - DNA, 532 bp, Homo sapiens
tgactgctatttgtgtgttaatgacttaactcttaaaagacccttatcttgaccaggcgcggtggctcacacctgtaatcccagcactttgggaggccgagccaggtggatcmccaggtcaggagttcgagaccagcctgaccaacatggtgaaaccccgtctctactaaaaatacaaaaattagccgggtgtggtggtgcacacatgtagtcccagctactcaggaggctgagtcaggagaatcacttgaacccgggaggtggaggttgcagtgagtggagatccggccactgcactccagcctggtgacagagcaagactccatctcaaaacaaacaaacaaacaaacaaacaaacaacacccttatctcaaatctcaagattatactagggtttttgcaagttcctaaagattatgaaaataaaaaccaaatcaattagaacaaaaaccaaaaacaacccatttctttttttttttcttttttggagagacaaaaaaaattcatttaatttatatacattttattatat

SEQ ID NO: 46244 - DNA, 532 bp, Homo sapiens
tgactgctatttgtgtgttaatgacttaactcttaaaagacccttatcttgaccaggcgcggtggctcacacctgtaatcccagcactttgggaggccgagccaggtggatcaccaggtcaggagttcgagaccagcctgaccaacatggtgaaaccccgtctctactaaaaatacaaaaattagccgggtgtggtggtgcacacatgtagtcccagctactcaggaggctgagtcaggagaatcacwtgaacccgggaggtggaggttgcagtgagtggagatccggccactgcactccagcctggtgacagagcaagactccatctcaaaacaaacaaacaaacaaacaaacaaacaacacccttatctcaaatctcaagattatactagggtttttgcaagttcctaaagattatgaaaataaaaaccaaatcaattagaacaaaaaccaaaaacaacccatttctttttttttttcttttttggagagacaaaaaaaattcatttaatttatatacattttattatat

SEQ ID NO: 46245 - DNA, 589 bp, Homo sapiens
taatttataccagaaagtcaaatcaacttatgtcatgtcaaaatgcggggagaaaaaaaagagagaggttaagggttgatgcacttcgctcaaaagactcattgcaaaagaatatgcctggctccaagagtgtttggatacattcagtggaaataaggcgaaagcatatggtttgcatttcctctataaagaaatatgggtgggaaccttgtgggacccaagatgcaataacaaatacagatacttgacaaggcttggcaggcgaagacagaatatttctgtgtttacctgacaatgtgactggagtccagcccactggggagcaatccatttggttgtgacctgtcgcaccctggcagaatgtccttgcagagacatcaatgtcagcccgggaagcatcgctccctccccctttccaggcaagcagcccctccagtgagaaatgctgatcctgtaacacgggctaatgatgcagttataccgcttggacactgggtgatactgtatcgtattactgtgtaataacaggcagaaaggaaatgtggactctggtktttaatcttcccattccagagtctttttttaaaaa

SEQ ID NO: 46246 - DNA, 623 bp, Homo sapiens
aacagaactatttctagatttcaggatagagttttcttgagcaaataattatattggtttaatcacacgtacgaaatggatggcatgtataagcacaaagccacgtgtcaaataacaaataagagagagttaacggagtaagtaaaaataggtaaaaggtctaaatttctagttcttaaataaaatatagcattgtttgaattagtaaaatacgttttgatcttcactgacagtaatattttgatacaaaatttggggacaagattctttagtactcaaaaatagtgtttctaactggttattgctttttaacattttgtaaaaaaaaagaccttattgtcctctctcatattaaataatttttgtaaagaaatatttgtaatgattccaaatttgtcccataattattaaaaaatacagtaattaagctgttaaaatgttattctgcttttattattaaatgtggaatattacaaacacataaacttacagacagtatatgatagatccttaggtacytactagagttgaaaaattctcaaaatctgttcttatatgtctcagatctttttcactctcagaaataataatcgataggtataatttgtttatatttatgtatg

SEQ ID NO: 46247 - DNA, 538 bp, Homo sapiens
ctaacacctacttgccttcttggggatagactaggaatgttgctttgggtctgagaaatgaacaggtctgtgaactgaggtcttgatactaagtgaagagagaagagataagcaggggctggcacagctgatagagtgaggtccctgaggagtgggaagagactagtggagagatctgtgttgggggaagaatctttgctcagaatccgaaagtaattccatcaggatgggagagatgatgacagttgtgatgtgcaggagagaggggctttaggctacaacattctcagtgaggtaggaggtcatcgcagttgaaagcaagaaagtaggggttgttccataggtcaaagagagtgatagtagcacctgtcaccacctgacataatactggtgtggcatttggctgtttttttctcagtaggatatatctcagcayttagaatcatgcctgacacgaagtagggcttgataaatattgagtggatgaaaaaatgaacacggaggagcaaaatgactggtgagcatcacagagggccca

SEQ ID NO: 46248 - DNA, 538 bp, Homo sapiens
ctaacacctacttgccttcttggggatagactaggaatgttgctttgggtctgagaaatgaacaggtctgtgaactgaggtcttgatactaagtgaagagagaagagataagcaggggctggcacagctgatagagtgaggtccctgaggagtgggaagagactagtggagagatctgtgttgggggaagaatctttgctcagaatccgaaagtaattccatcaggatgggagagatgatgacagttgtgatgtgcaggagagaggggctttaggctacaacattctcagtgaggtaggaggtcatcgcagttgaaagcaagaaagtaggggttgttccataggtcaaagagagtgatagtagcacctgtcaccacctgacataatactggtgtggcatttggctgtttttttctcagtaggatatatctcagcacttagaatyatgcctgacacgaagtagggcttgataaatattgagtggatgaaaaaatgaacacggaggagcaaaatgactggtgagcatcacagagggccca

SEQ ID NO: 46249 - DNA, 832 bp, Homo sapiens
tcctggtgttaatgacattaagcatcttttcctatttttatatcccattcaggttttctattttgtggtgcctgcttttttttcccccctcatttttctcttgggctttttgttttgtgagaattcctgtaactgtagtatctaatctcattaggaattattctatctcctacaacttctaagcgcagtaacagtgcaagtctgtgataatccttcacaggaaaaaagaaaaaaaaaagggcactgggaaggttttgctttgctgtttcgtattattaattgggatagtttcaactcccacaaagagaaaagcaaggcatgagcactcacccatgcttattgacttcctaggctctaagtgcagtgggtattaactgagcggattgactacaagattgcagccttctctcgccttgcacttcatcactccaaacgatgtcattcccaatgcaggactgacaggcactcatgtccagcctcggctctatatccctaatccattagtattggctcgaggtcagctttttgaagacaagatcaattctaatayagttacattgacttctttgtctatcagggagtagatagaaagttgagagggatcaataaattccaaacaacaaatcagaaaatacatagcatatagaagccagttagcatgcatggatttctctgtgctagtcattgattaaaatataggtagtccagaaataatgagtttggatccatacctgaaagccaaaatggaaatcaactgttcaagctacgtctttagccgaatagaaaataggaaatgacacaatccttggccttgggatcaaaatcttacatt

SEQ ID NO: 46250 - DNA, 556 bp, Homo sapiens
agtcttgaaattgttcaacttttaaactagtaatcccatgactatgaacttctcttcaggaaatacaccaaaactgttgcccaacacggtagccacaagccacatagagcacatgaaatgtgattagcctacgttgacatgtgctattagtgtaaatacctcattttaatgacaatataaaaaatgtgaaatatatcattaatgatttttactttgatcacagtggaaataaaacattttgaatatatattatataaaatatgtcataagaattaactttgcctgtctcttttcactttttattttttttcttttgagatggagtctcactctgccactcaggctggagtgcaatggtgcaatctcggctcactgcaacctcygccttccaggttcaagcgattctcccacctcaacctcccaagtagctgggattgcaggcacccaccatcatgcctggctaatttttgtatttttgtagagatggggtctcactacgttggccaggctggtcttgaacttctgacctcaggtgatcttccctcctcagcttccc

SEQ ID NO: 46251 - DNA, 522 bp, Homo sapiens
catttaatcttaccaatgcaatagtacagcttaggtactattaatacctccacttgacagaaaagtaacccagggctcagaaaggttagacaacttggctgaggttacacagcatgtaaaaggtcaattgtgttccmaaactggacttttattgaactacagactatgctgttaaccattgaccaagttatttcccaaagtatgacccgcctatactcaaatcttaccccattctttaacagatgatactttatccattgcaaccacttcctgtcaggattctgagttgacatagagtgtttcagcagtgattatttaagccaattacatcaggatctttaggtgtagacctgggaactgatatttttatcaagctcatgaggtgttccatagcatgttaatgactgagagccactgtcaatagaattcaccactgttttctaaatgtggtaagtctctgcatatggcaacaggtgtattatacattatttctctagaatctacactctacaaaataaatag

SEQ ID NO: 46252 - DNA, 2592 bp, Homo sapiens
gtgataagctcaagagacattttctactctaaggatgataaaatttagagggagaacaaagcaccagtatcagattagtagctaccttagcatgggagcaggctcacggaagcttctcatgacatatgtgttaacccatgggagttttaaggggaagagctccagggaaggggtaaagttgcccagggaggatcaacatgtagaaggctattttcaactggtaatgacattttttaacatttaggagcaagcatgataatcttatatgttctcactgaacattaaatctggatttatgtgaaatgactggtaaatcaagtcatgacttaattgctttgacttacattgtagcaattcaacatccccactcccactgtgagtgtatgtgtgtgagagtgtgtgcatatgtccattctggagcatgtacttatgggtgtttctcacaggacttactttgcagctgtccacagataggtcaaatgttcaaacagtgtatgttacctgacaaaattaaatgcacaagaatttagtgactttgacatttaggatttgaatttaggattttgacattttccaagcacttttgcagtatttgatctacagaacaacattaaaaagtaagcagtgtaggaagctaataacttactaattatcttcaggttattttcctcaggtgcaaatattaccactgagcaaaaaggagcaggtatgacaattgcctcttctttaaatattagaaaagtcagaagtagaaagatataataccttgacaaaacttaaaatgagtctcaatacccctgtactgcaaaaaaaaagtttatttgaacataacattttaaaataaaagatctttcatttgttgagttaaaaattcttattgcaatttttatggcaaaaatctgtaaaatattattccctaacagtgggaaagtacacaaataatggaatgaaattctcatcttaaaaaatttatttcagttgactgttttctgtggaattacagataattagattttggctttagactcactgactaaaatatatctatttaattaagcttaaactggaatccacaaagtacgtctggcattagagaaaacaatggcaagccttccaaatgagaaatagagaagaatagaaatagaaataatgcttatgttagcatgatgtacagatccaaaatgcttaaacaacttttaagaattactacctattttgaatgtacagttggccttccttatctgcaggttctatacccatggatccaactagaagaggattaaaaaaatgcattttaaaaaattgcatctgtactgaacacgtatagactttttttcttattattattccctaaacaatgcagtataacaaatatttacactgtattaggtattatgtaatctagggatgatttaaagtatacaagatcatatacatagatatatgcaaatactataggattttatatcagggatttgagcatcctctgatattggtttctgtggaaggtactggaaccaatcacacataaatactgagggataactgtactaactataatttttatactactactttttcctataatgtggtctaaaaagctctagcattcttttcatgagattaaatgtcaggaagcccaaataactgagttatttaaaaaaaatgtgccagtgtctttcaagtatatggcactgggataggtattttaaggataagaaaattctggtctcctttctaaaggatttgggagtctagtacagcagatgctacaaatgtatgtaaaagaaatctgatttaaaatgctaagttggcctctggcagggtgacatacacccataatcccagtattttgggaggctgaggcaggaggattgcgtgaagccaggagtttgagaccagcttggacaacatagcaagatactgtctctacaagaaataaagaaaaataattagccaggcatggcggtgcacatctgtagtctcagctactcaggaagctgaagcagggggatagcctgagcccaggagtttgaggttacagtgagctacgatcatgccattgcactgcaacttgggtaaaaaagcaagacctatctcaaataaataaataaataaataaataaataaataaataaataatgctaagtggttagaattacaaaaataaatacataagaatttttcagtaatatagtgaaaacttctagctgaagcatgatggcaagtttcacagagaaattttcattttataaatgaaaaattgcataaataacccaaggatgctcaataatcagtggtataaaattaggcgtattccgtttccaaaacattggcatagaggtccttgtccctgtttctcccagtaaatacaactaaaagccctggccattatatataaaacaaacacaaaactctgaaaggtgaagggaggaaagcagaccgactgatgaatctagaactcaaggaagtaaatgctgygtaattgtttaagctttctttttgtctcatgtatctcagacttggaattgaagaagatacaacttagaaacttgtaatatatagacaagtagaagctccaacagaagcatg

SEQ ID NO: 46253 - DNA, 588 bp, Homo sapiens
cttaattgcattttcatctcttctattacataattatagcataatgtttctaggtaatatttaaaatggagtcaggaaacctcaatacttcatttagagtcaaatataaacacccctctctttagcctactattaattgaataatatatgtgtcaagaacatagcacacagtatgccattcaaaactgaatagtttttttgtttgtttgttttaaaggtagtcaatgttcattgtgamgtttaaaaaacatagaaacacagaaaacaaaaaacaaagttcacacataatcccacctcccaaggtaacctctattatctgttttctttcagacttttaaaacattcacacataaggacagatattattttacaaaaatggaatcctaatacagtattttgtaagctgctatttttcctttaaattgtatttttcagagtgagcacctgcttagtaagaattagccagcagcagtggtagtagtaatagtggttatggggagaaagggaaaatcagtaaaggtttccaaagtctagagcagtattcaacacacagaaggcattcagtaaatgtttaactgcatagatcat

SEQ ID NO: 46254 - DNA, 605 bp, Homo sapiens
aagagtacgaactgatttctgggctcttgctctgaagaaggctgttgacttagcaagaacttaagggttttattttcagaataatcacacacacacacacatgcacacacacacacacagacacacacacacagtctctctatcaggatgtactaatcccccaaaagacttcttgttttggtcacttctcaaagaattgctaggttgctgtgagaaaactgtataacattgttcatcttcatttacttcctgattttttttgtacagtagagacatgttctctaagtagagacggaaattattatgytattaggattagataaagagcatgactctgactctgaggatgatttctgtgtagttgaggtatgcaaatataattttaggtctaagttgctcttaaaccccaaagatgggaaaggtattaaggatgatttacaagtttcttttattcattgggaaaaaacaatgttcttctgtctataagggtagactacatgtagtctaataattaatctagttccaataatgataaaagcaaatttcttcagataacaatattgttatcttacacttctattactagattttttttattttggaaa

SEQ ID NO: 46255 - DNA, 603 bp, Homo sapiens
ataatacagagggtaacttccaatccaacacatcatgcgctctctgtgctggataaacacctatgttcttactcaaaattatatttacttctgttagcaactttcaaaatatccactctgattccttagagcttccacttgatgttcaattcttacattgtcagcagataaccccaagctataaaatgcasgccgagtagaaaagttattaccaaaactaaattttgtacatgcttagcagtagaatgccctcatcattagactctcatacttcctcttgcatttggccaatagtaaccccgtctctctcctccaagctagttacccatctgctcccccaacttttgattcaaaatgacagaatgactttttaaagctttgcagtgatatattttctgtgttatatgggataacatatacagtgcacttatctagacacatgagtaaaatatacactgcagcctggaatggggattatagtttacttttggatcctgcatacacaaaagaagtgagtggagttttcccttacgtcatttttcatctatgtgtgctgaaaagacttcactccccccaaaaaagatgaagaactagatatatgca

SEQ ID NO: 46256 - DNA, 603 bp, Homo sapiens
ataatacagagggtaacttccaatccaacacatcatgcgctctctgtgctggataaacacctatgttcttactcaaaattatatttacttctgttagcaactttcaaaatatccactctgattccttagagcttccacttgatgttcaattcttacattgtcagcagataaccccaagctataaaatgcacgccgagtagaaaagttattaccaaaactaaattttgtacatgcttagcagtagaatgcyctcatcattagactctcatacttcctcttgcatttggccaatagtaaccccgtctctctcctccaagctagttacccatctgctcccccaacttttgattcaaaatgacagaatgactttttaaagctttgcagtgatatattttctgtgttatatgggataacatatacagtgcacttatctagacacatgagtaaaatatacactgcagcctggaatggggattatagtttacttttggatcctgcatacacaaaagaagtgagtggagttttcccttacgtcatttttcatctatgtgtgctgaaaagacttcactccccccaaaaaagatgaagaactagatatatgca

SEQ ID NO: 46257 - DNA, 603 bp, Homo sapiens
ataatacagagggtaacttccaatccaacacatcatgcgctctctgtgctggataaacacctatgttcttactcaaaattatatttacttctgttagcaactttcaaaatatccactctgattccttagagcttccacttgatgttcaattcttacattgtcagcagataaccccaagctataaaatgcacgccgagtagaaaagttattaccaaaactaaattttgtacatgcttagcagtagaatgccctcatcattagactctcatacttcctcttgcatttggccaatagtaaccccgtctctytcctccaagctagttacccatctgctcccccaacttttgattcaaaatgacagaatgactttttaaagctttgcagtgatatattttctgtgttatatgggataacatatacagtgcacttatctagacacatgagtaaaatatacactgcagcctggaatggggattatagtttacttttggatcctgcatacacaaaagaagtgagtggagttttcccttacgtcatttttcatctatgtgtgctgaaaagacttcactccccccaaaaaagatgaagaactagatatatgca

SEQ ID NO: 46258 - DNA, 591 bp, Homo sapiens
ggttgactccagaaaaaagtagagaacagaagataaatgagtaagagatcaggtaagtggaagcccattctgtacagaatattttagtaggtcatgcttctgctccttctaaccttagaatgaggtaaatataatctgcacatacaagtgatatattgaggcccagaggccagacaatgacagccaacatctaagatgacaccaaggagcccttccttctggtgtttatgcccttatgcaatcccctcccactttggcctgtatggccaataggatacaacagaagtgatgatatgtcacttccaagattgttacraaagcttgtagcttctgccttggcattgtctctctttcatgccctctcgttacttgttctagaggaagtcaacttccatggcatgagaacactcaggcagtccatgtagatatagaggcaaagaatttgaacttccagcacacagccaacgaggacattcactgaggctgtttaccatggttggtaaagttgataacctagaacatgtatggtgtgggcagattttggggatggagatcactaacgggtgctgaagtatatgtccaggtgataca

SEQ ID NO: 46259 - DNA, 591 bp, Homo sapiens
ggttgactccagaaaaaagtagagaacagaagataaatgagtaagagatcaggtaagtggaagcccattctgtacagaatattttagtaggtcatgcttctgctccttctaaccttagaatgaggtaaatataatctgcacatacaagtgatatattgaggcccagaggccagacaatgacagccaacatctaagatgacaccaaggagcccttccttctggtgtttatgcccttatgcaatcccctcccactttggcctgtatggccaataggatacaacagaagtgatgatatgtcacttccaagattgttacawaagcttgtagcttctgccttggcattgtctctctttcatgccctctcgttacttgttctagaggaagtcaacttccatggcatgagaacactcaggcagtccatgtagatatagaggcaaagaatttgaacttccagcacacagccaacgaggacattcactgaggctgtttaccatggttggtaaagttgataacctagaacatgtatggtgtgggcagattttggggatggagatcactaacgggtgctgaagtatatgtccaggtgataca

SEQ ID NO: 46260 - DNA, 591 bp, Homo sapiens
ggttgactccagaaaaaagtagagaacagaagataaatgagtaagagatcaggtaagtggaagcccattctgtacagaatattttagtaggtcatgcttctgctccttctaaccttagaatgaggtaaatataatctgcacatacaagtgatatattgaggcccagaggccagacaatgacagccaacatctaagatgacaccaaggagcccttccttctggtgtttatgcccttatgcaatcccctcccactttggcctgtatggccaataggatacaacagaagtgatgatatgtcacttccaagattgttacaawagcttgtagcttctgccttggcattgtctctctttcatgccctctcgttacttgttctagaggaagtcaacttccatggcatgagaacactcaggcagtccatgtagatatagaggcaaagaatttgaacttccagcacacagccaacgaggacattcactgaggctgtttaccatggttggtaaagttgataacctagaacatgtatggtgtgggcagattttggggatggagatcactaacgggtgctgaagtatatgtccaggtgataca

SEQ ID NO: 46261 - DNA, 591 bp, Homo sapiens
ggttgactccagaaaaaagtagagaacagaagataaatgagtaagagatcaggtaagtggaagcccattctgtacagaatattttagtaggtcatgcttctgctccttctaaccttagaatgaggtaaatataatctgcacatacaagtgatatattgaggcccagaggccagacaatgacagccaacatctaagatgacaccaaggagcccttccttctggtgtttatgcccttatgcaatcccctcccactttggcctgtatggccaataggatacaacagaagtgatgatatgtcacttccaagattgttacaaaakcttgtagcttctgccttggcattgtctctctttcatgccctctcgttacttgttctagaggaagtcaacttccatggcatgagaacactcaggcagtccatgtagatatagaggcaaagaatttgaacttccagcacacagccaacgaggacattcactgaggctgtttaccatggttggtaaagttgataacctagaacatgtatggtgtgggcagattttggggatggagatcactaacgggtgctgaagtatatgtccaggtgataca

SEQ ID NO: 46262 - DNA, 591 bp, Homo sapiens
ggttgactccagaaaaaagtagagaacagaagataaatgagtaagagatcaggtaagtggaagcccattctgtacagaatattttagtaggtcatgcttctgctccttctaaccttagaatgaggtaaatataatctgcacatacaagtgatatattgaggcccagaggccagacaatgacagccaacatctaagatgacaccaaggagcccttccttctggtgtttatgcccttatgcaatcccctcccactttggcctgtatggccaataggatacaacagaagtgatgatatgtcacttccaagattgttacaaaagyttgtagcttctgccttggcattgtctctctttcatgccctctcgttacttgttctagaggaagtcaacttccatggcatgagaacactcaggcagtccatgtagatatagaggcaaagaatttgaacttccagcacacagccaacgaggacattcactgaggctgtttaccatggttggtaaagttgataacctagaacatgtatggtgtgggcagattttggggatggagatcactaacgggtgctgaagtatatgtccaggtgataca

SEQ ID NO: 46263 - DNA, 538 bp, Homo sapiens
caaacaaacaaacaaacaaamaaaaaaaaaaacctgtctaggaagaggcagtgacccactcagtaaaatgctgctgatgggtcaagaaagattaggactgaggattgaccactggctctcacccctgaaatggatattccacccattttaaggtgaggaaaaggaatcgcagagtgaggaagtaacttgcccaaggtcacaagctgcaagcaacagcgctaggatttaaactcaggtctgtgcaaagccaggggccttggcacttctcaaactcaccccttgggctccaagtgttccataggccaaggaaggcagctctgagaggcaacaattcatgttcctgctaggtattcgtactcaggaagcctgaggggaggggaaactgcaggtgaatatgggactgacagcgcaatttttaaaatcttctcaatccagggcaaggtgtgagaggcacgctcagtgctgggccttcttttcttgcaaatgaccatcccacccaggtaactaggggcttgaccctggaaggcacttccagtta

SEQ ID NO: 46264 - DNA, 538 bp, Homo sapiens
caaacaaacaaacaaacaaacaaaaaaaaaaacctgtctaggaagaggcagtgacccactcagtaaaatgctgctgatgggtcaagaaagattaggactgaggattgaccactggctctcacccctgaaatggatattccacccattttaaggtgaggaaaaggaatcgcagagtgaggaagtaacttgcccaaggtcacaagctgcaagcaacagcgctaggatttaaactcaggtctgtgcaaagccaggggccttggcacttctcaaactcaccccttgggctccaagtgttccataggccaaggaaggcagctctgagaggcaacaattcatgttcctgctaggtattcgtactcaggaagcctgaggggaggggaaactgcaggtgaatatgggactgacagcgcaatttttaaaatcttctcaatccagggcraggtgtgagaggcacgctcagtgctgggccttcttttcttgcaaatgaccatcccacccaggtaactaggggcttgaccctggaaggcacttccagtta

SEQ ID NO: 46265 - DNA, 604 bp, Homo sapiens
ggcaagccacataacacaggtttccctttctgccccacaagaagctaaagacccaccattctccaggctccctgccagccactgaatagacaaattagctcagtcccactctgtctcacaggaaggagctaaaggttcccatttatgcctcagatccaagacacattgtccaatccatccttatctgagagtctgtgttgggggkttggtcttcaactgactgtcagacccctgtagccactccctccatcagttagcatcttatggaaaggaggggtgagtcccagcccaccctattcccacttctccaacctccagtagggtaccacagaatcaagatctgaactcaggtcatatttcttcaagctctttcttacccctccactgtgaaacgaccacccaatcagatggacaaacctaaaccagttttcagtttccatgtcacttattcctgcttgtcattattattattactgctgttgttgttgctataattatagttattattagcagtacaaatttcagctctacgtcataacaactatggggctcgggtaaagtatttaatctctgtatcccccagtttccccatagatgaaataag

SEQ ID NO: 46266 - DNA, 390 bp, Homo sapiens
  misc_feature (1)...(390): n = A,T,C or G
annnnnnnnnnnnnnnnnnnnnnnnnnnnnnnnnnnnnnnnnnnnnnnnnnnnnnnnnnnnnnnnnnnnnnnnnnnnnnnnnnnnnnnnnnnnnnnnnnnntactgttgtaattccagaggctacattttgttctcaaatggtgactgtccctgtttgatctctggagtccaattagaacccacctgtgttggcattgcctattttaactaacagaagtccagctctagaattagtacaaacactgctcttttgacttaaatttctacagtcttactatgctcsaggcacatggtcctcttttcaaccatgatgtatataattgcagttttacaggttaaaaaactgaggttcggacaaagtagcatacaagaattaaatttaatagcca

SEQ ID NO: 46267 - DNA, 536 bp, Homo sapiens
ttatcatatggagaatgaatcacggttacatgtcattggggccaatcttttattttccccgtttgggggctctctggtgggatgctttggtcacacacaagtagggtgtgaccacagttgttcttagcaggggaatcaggagataaaataatctgatatggcactgatatatatttccgtgggtagactgataatttatcattttttaatttaatgaggttttttaattttttaattttttaattttttttaaagacagggtctcgctstgtcgcccaggctggagtgcagtggcacaatcacggctcactgcagccttgacctgccgggttcaagcaatcctcccaccctaacttcctgagtacaggcatgcgccatcatgccctgctaatttttatattttttgtagagacagggtttcgccatgttccaggctgatcttgaactcctcgcactggtctcccaaagtgctaagattacaggcacatatcactgtgcccggcctaatttttacacttacaaaacacagcatcata

SEQ ID NO: 46268 - DNA, 626 bp, Homo sapiens
acactgcatacactcaacaccattgccaaaattttgacaacttgccctcagaaagattagctactttgttaaattttgattcttccctttttttaatttagtttctacccttgaatcacaggatttcacacatacattgctatacatatcagagttcagtacaagatagaaaaacaactccaaatattttaagcagaaagaaatttaacagggaattaatgcttgattaactctttttccttgttattcatagtcatccttagagaggtagcataattttaccacattaggataatctgcactttcggtgtcttgtctttcmatatcttaaatgtttcaaaatgttctgtactatacatttgatgatatttatcatacatggtatcattaattgattcaatccttgagtcaataaatatttgtgaaataactactattcaccagacacttttttcactcactcttgatatcacagtaaggaaatctgcctccaaaaagtaattaatttgtgacatagcaaaccccagaagggaaaatttgaggtaacacaatgagttcacttgtacacatggtcaactatgtgtcactgagatatccaagtaaagacaaccagtcagcgattggac

SEQ ID NO: 46269 - DNA, 607 bp, Homo sapiens
ggtcaggaagctggctgttttgttgttgtcattcatttttgttatcttttaaaaaaatcaccgtatcctcagcaccaagacaccagacacataggatgaattgaattgacataataagtacaggaagcttttttgttgttttgttgtgacacatatagtatatattgatttggtataataaatatagtagacttttttgtttattgtaagattttcagttgttttgctttggtttatttttgtttgttgtttgttagcttgaaatttcatctgaaggttgaacatacttgttataaaaatgaggacactgaaccccagagaacttatattaatcatccaggtttaaacattycaagcactacaacaatttgatctaagctctcagtatgttatcttacagggaagttatgtgtcctgaatttcctttcaaaatccactcctgacttcactcctcttcatgtaataataatatgttttataagcaatatatgcaaatattttaataaatatcaatttaaatattattgtttttattattttactattttaaaccattattttaattgacagaatttttctggaaataatacagttaattaaataagta

SEQ ID NO: 46270 - DNA, 558 bp, Homo sapiens
tgaatatwtttattttttgagtttttctacctttaaggacaaattcactttccctagctatctttgattacatgaaataactgcgcaatgttactaagaagtttctgagctaactcacgagttgggactacttggaattggaagggttctgtccaatcagtgctcagtaagcaggtcccgaatgggtgggagaagggagtagtatacccccagcatggaagtcttatgtaagcaactttaaaacactgggtttttatgcataaccatcttcaattagacacagttgctgttttccaagcagacccatcagaagatcacacacacacacacacacacacacacacacacttctcatgaaaatggagtatgacaaatcctgtactaggaaggtgaataacatactatagggtaaaggagaggcctaagaagatgggaatgtgatctttgatctggatcttgaaataaggtcacagtggtaaagatattcactagtagagaaaggacttccttgaaagataaaacaaagccatcagattagggacagtttatgaaagattt

SEQ ID NO: 46271 - DNA, 558 bp, Homo sapiens
tgaatatttttattttttgagtttttctacctttaaggacaaattcactttccctagctatctttgattacatgaaataactgcgcaatgttactaagaagtttctgagctaactcacgagttgggactacttggaaytggaagggttctgtccaatcagtgctcagtaagcaggtcccgaatgggtgggagaagggagtagtatacccccagcatggaagtcttatgtaagcaactttaaaacactgggtttttatgcataaccatcttcaattagacacagttgctgttttccaagcagacccatcagaagatcacacacacacacacacacacacacacacacacttctcatgaaaatggagtatgacaaatcctgtactaggaaggtgaataacatactatagggtaaaggagaggcctaagaagatgggaatgtgatctttgatctggatcttgaaataaggtcacagtggtaaagatattcactagtagagaaaggacttccttgaaagataaaacaaagccatcagattagggacagtttatgaaagattt

SEQ ID NO: 46272 - DNA, 558 bp, Homo sapiens
tgaatatttttattttttgagtttttctacctttaaggacaaattcactttccctagctatctttgattacatgaaataactgcgcaatgttactaagaagtttctgagctaactcacgagttgggactacttggaattggaagggttctgtccaatcagtgctcagtaagcaggtcccgaatgggtgggagaagggagtagtatacccccagcatggaagtcttatgtaagcaactttaaaacactgggtttttatgcataaccatcttcaattagacacagttgctgttttccaagcagacccatcagaagatcacacacacacacacacacacacacacacacacttctcatgaaaatggrgtatgacaaatcctgtactaggaaggtgaataacatactatagggtaaaggagaggcctaagaagatgggaatgtgatctttgatctggatcttgaaataaggtcacagtggtaaagatattcactagtagagaaaggacttccttgaaagataaaacaaagccatcagattagggacagtttatgaaagattt

SEQ ID NO: 46273 - DNA, 309 bp, Homo sapiens
cttattttcacaagtttgcaaatatggggctcacaaggaactagagtttagaaaccattgcctttaaatctttaaacggtggccaggtgtggtggctcatccctataatcccagcacttcaggaagccaaggtgagtgaattgcttgagctcaggagttcaagaccagcctgggccacatggygaaaccaaaattagccaggtgtggtggctcatgcctgtggtcccagctactcgagaggctgaggtgggaagatcacttgagcccagggggcagaggttgcaatgagtccagatggcaccactgcac

SEQ ID NO: 46274 - DNA, 309 bp, Homo sapiens
cttattttcacaagtttgcaaatatggggctcacaaggaactagagtttagaaaccattgcctttaaatctttaaacggtggccaggtgtggtggctcatccctataatcccagcacttcaggaagccaaggtgagtgaattgcttgagctcaggagttcaagaccagcctgggccacatggtgaaaccaaaattagccaggtgtggtggctcatgcctgtggtcccagctactcragaggctgaggtgggaagatcacttgagcccagggggcagaggttgcaatgagtccagatggcaccactgcac

SEQ ID NO: 46275 - DNA, 391 bp, Homo sapiens
tggcaaatttcaaatcccagccacaattcccctttctaccacaatgcatctggctaccccatccagtctcaggatgtcttcaaaaggcaaacaatgatttacctataggagttataattaggagaaaaacctaccrcagatataaaatcaaaatgaatttgaggctaaattatgtattggattatctgagttcaaggaatgaaccatggtttgatactaggaaacctattcatataattcactaataagataaaaaaatgtacgattgataaatttgaaaatttgaaatgttgataaattcaacatcctttcctgatttttttttaatccctagcatctaggattaaaagaatagttttttttttttgagatggagtcttactttgttgcc

SEQ ID NO: 46276 - DNA, 410 bp, Homo sapiens
acttactagtcattaatagtcctaataagccataaagcaagagtaatatcttttgtctctggcttgtgatggtattaaatttcaaaataatgattttgttttgggttaaaactaacttcataggttttctcagagtaggtcatcttactcagaarttatagaggaaaatgaaaataaagaaaaacctattatgaaatttgccccaggttaacctttgcagagagactaagagaaggataccatttaaatgatcctattaatagcattaaaatatttaatttgctaggcaaatctaaaatcaaccttttctctagaatttgaaggaagacaattatatatttagagaatttgacttgagtgtccttgtgagtggctgacagacaaacagaccagatgaatgttggtgcagt

SEQ ID NO: 46277 - DNA, 410 bp, Homo sapiens
acttactagtcattaatagtcctaataagccataaagcaagagtaatatcttttgtctctggcttgtgatggtattaaatttcaaaataatgattttgttttgggttaaaactaacttcataggttttctcagagtaggtcatcttactcagaagttatagaggaaaatgaaaataaagaaaaacctattatgaaatttgccccaggttaacctttgcagagagactaagagaaggataccatttmaatgatcctattaatagcattaaaatatttaatttgctaggcaaatctaaaatcaaccttttctctagaatttgaaggaagacaattatatatttagagaatttgacttgagtgtccttgtgagtggctgacagacaaacagaccagatgaatgttggtgcagt

SEQ ID NO: 46278 - DNA, 410 bp, Homo sapiens
acttactagtcattaatagtcctaataagccataaagcaagagtaatatcttttgtctctggcttgtgatggtattaaatttcaaaataatgattttgttttgggttaaaactaacttcataggttttctcagagtaggtcatcttactcagaagttatagaggaaaatgaaaataaagaaaaacctattatgaaatttgccccaggttaacctttgcagagagactaagagaaggataccatttaaatgatcctattaatagcattaaaatatttaatttgctaggcaaatctaaaatcaaccttttctctagaatttgaaggaagacaattatatatttagagaatttgacttgagtgyccttgtgagtggctgacagacaaacagaccagatgaatgttggtgcagt

SEQ ID NO: 46279 - DNA, 564 bp, Homo sapiens
aataaaaattcagaagttgtaccccagtccttatttatgaataaagatgtgtggtcattatcacaccgtttggtttaatatttagccaatgtcttggtcagggagcctcgtacaatggctctccacaatccarcactacgatgacatgtctttctaactttccaaaccacactggatatatgctttgcagagttcactcattgtagcccaaagccacaagctaagcagtactgggaaatatccaaggcaagtaatgggcatcagagaggacactgggtggctgagagactcctagagagaagagcctgaaggtggaggagaaggggcagaagtcataaggaggacaaaatcaagagaaggccagcagcagagccagagccttcagtggcgcagggggtaggctgtaggcacagggggtaggctgcatcctctgccaactgagggtgaagtgacacatgtttctgctttaagtgatcagtttttacttttaacgttgaagattaaaattaagtgcattactgtagatcagtttacagggatttggtacatctgttttggaaatga

SEQ ID NO: 46280 - DNA, 593 bp, Homo sapiens
aaaagccatgccggtggcagtcttccggacgtgctgtccaaaataggaggccatgctgtgcttgacttcaagtaacaccttgtaggctgatgaagtttggcctcagcagcatgccgtcactaacacatgaaaataaaatgctttcctaatggtgcctggcacagcgtcaggaaaatacctcatctgaatttttattcagctgacaaatgacgtgcatctctgcctttatctggctgcttatattaaatatctgagtgcagcaaagatttcttaatttgctcgtttctctcggcaccatgtagaatgagggcttagaatgaaatcgtatcaagaggcaagagagatgtctacctgctcacagcaaacccctggaaattgctgggcctcyctggatcatatcacataatcatctcagctctactttgatttgtctctcaatatactgtttaaaaatgtaacccaatcgcccagcccaacaagcagtctgtttattattacttttgatagaaaggttcataacatcctataatgtgtgtgcattttttatttcgtttggctactagacattgaaaccatttgggacatttattaaa

SEQ ID NO: 46281 - DNA, 593 bp, Homo sapiens
aaaagccatgccggtggcagtcttccggacgtgctgtccaaaataggaggccatgctgtgcttgacttcaagtaacaccttgtaggctgatgaagtttggcctcagcagcatgccgtcactaacacatgaaaataaaatgctttcctaatggtgcctggcacagcgtcaggaaaatacctcatctgaatttttattcagctgacaaatgacgtgcatctctgcctttatctggctgcttatattaaatatctgagtgcagcaaagatttcttaatttgctcgtttctctcggcaccatgtagaatgagggcttagaatgaaatcgtatcaagaggcaagagagatgtctacctgctcacagcaaacccctggaaattgctgggcctccctggatcatatcacataatcatctcagctctactttgatttgtctctcaatatactgtttaaaaatgtaacccaatcgcccagcccaacaarcagtctgtttattattacttttgatagaaaggttcataacatcctataatgtgtgtgcattttttatttcgtttggctactagacattgaaaccatttgggacatttattaaa

SEQ ID NO: 46282 - DNA, 529 bp, Homo sapiens
gggaaagaaagaatagattatataagaaccaaatcaagcaaatcaagaacccaggaaaaaacccagagccaacctactcctaagtaatatccatcctggaaagccagagcatcctaaaacactccaatagtgagtttattttcaacatcgacatgcactcaaatctactcacatttgaacctagtattacattatgattgctcaatgttggagccaaaatcaaactgcttacttttgaactagctctataatattgcagacataggcgaatgaagaaacaaaacaatgactttgtttaagaaggagtaggtcctgaataaatgcttctaactcagtaatttcacctactaagaaaacaccttggctgggcgtgrtggctcagtcctgtaatcctagcactttgggaggccaaggagggtgtgatcacctgaggtcaggagttcgaaaccagcctggccaagatggtgaaatcccatctctactataaatacaaaaaattagccaggcgtggtggcgagcacctgtaata

SEQ ID NO: 46283 - DNA, 529 bp, Homo sapiens
gggaaagaaagaatagattatataagaaccaaatcaagcaaatcaagaacccaggaaaaaacccagagccaacctactcctaagtaatatccatcctggaaagccagagcatcctaaaacactccaatagtgagtttattttcaacatcgacatgcactcaaatctactcacatttgaacctagtattacattatgattgctcaatgttggagccaaaatcaaactgcttacttttgaactagctctataatattgcagacataggcgaatgaagaaacaaaacaatgactttgtttaagaaggagtaggtcctgaataaatgcttctaactcagtaatttcacctactaagaaaacaccttggctgggcgtgatggctcagtcctgtaatccyagcactttgggaggccaaggagggtgtgatcacctgaggtcaggagttcgaaaccagcctggccaagatggtgaaatcccatctctactataaatacaaaaaattagccaggcgtggtggcgagcacctgtaata

SEQ ID NO: 46284 - DNA, 506 bp, Homo sapiens
caccttttcattcatttcaggaaactcagacatgacacttctgaagatcccaggttgtctcacttttatgccctagagacagattcaggccctaccatggccacgaaagtcagaagtgtataaaattccagttagacaggaggaatgagcttttgacatctgttgcacaaaagtttaagtatgtgaagagacggctatgtctatyagcttgacttaatcattccacaatgtacacatatatcaaaacatcacactgttcctccaaaatatctacaattattatttctccattttttatttattatgttttgagatgaagtctcactctgtcacccaggttggagtgcactggcgcgatctcagcttactacaacccccacctcccaggttcaggcgattctcctgccttggcccaccgagtagctaggattacaggcacctgccaccacatgtgactaatttttgtatttttaatagagacgaggttttaccatgttggccaggct

SEQ ID NO: 46285 - DNA, 506 bp, Homo sapiens
caccttttcattcatttcaggaaactcagacatgacacttctgaagatcccaggttgtctcacttttatgccctagagacagattcaggccctaccatggccacgaaagtcagaagtgtataaaattccagttagacaggaggaatgagcttttgacatctgttgcacaaaagtttaagtatgtgaagagacggctatgtctatcagcttgacttaatcattccacaatgtayacatatatcaaaacatcacactgttcctccaaaatatctacaattattatttctccattttttatttattatgttttgagatgaagtctcactctgtcacccaggttggagtgcactggcgcgatctcagcttactacaacccccacctcccaggttcaggcgattctcctgccttggcccaccgagtagctaggattacaggcacctgccaccacatgtgactaatttttgtatttttaatagagacgaggttttaccatgttggccaggct

SEQ ID NO: 46286 - DNA, 366 bp, Homo sapiens
gagaatgaactaatatgggagggagggagcggacgggagagagggagggaaggagggaagkaaggaaggaaggaaggtaggtagggagggagggagggagggattatacaagaatcacaggatcgtgacagttgcagaatcttggtgtggatacatgtgtactatttgtgtaatttttctgtatgtttgaaatattttataatacaatgttgggaagataaaaaggtatcagaggctaagggcagtattcaagtctcacccaaaccaagtttccttattcctttgtgtgtgggtgcatcctccctggaggaggaaaagcactactcactaatcatgaaagcttcatcaccagcacacaacggcagg

SEQ ID NO: 46287 - DNA, 366 bp, Homo sapiens
gagaatgaactaatatgggagggagggagcggacgggagagagggagggaaggagggaaggaaggaaggaaggaaggtaggtagggagggagggagggagggattatacaagaatcacaggatcgtgacagttgcagaatcttggtgtggatacatgtgtactatttgtgtaatttttctgtatgtktgaaatattttataatacaatgttgggaagataaaaaggtatcagaggctaagggcagtattcaagtctcacccaaaccaagtttccttattcctttgtgtgtgggtgcatcctccctggaggaggaaaagcactactcactaatcatgaaagcttcatcaccagcacacaacggcagg

SEQ ID NO: 46288 - DNA, 566 bp, Homo sapiens
gacttaaatactttaatrttaaatatatctaatgttaaaacattttattgtatctagaggcacatgaaagaaaaaatatttcaaaattactgtgaatgtgtgactattctgaaaagattgaaccaagtatcttatgcctacttatatattgctgtaagtacttttttctttacattgacaaataaaattgtatgtatttactctgtaaaacatgatggtttgaagtatttatacattgtgggatttgtaagtatttttaaaattcgaaataaaggccgggcatggtggctcacacctgtaatcccagcactttgagaggctgaggcaggcggatcacctgaggtcgggagttcaagaccagcctgaccaacatagagaaacctcatgcctactgaaaaaaaaaaaaaaaaattagccaggcgtggtggctaatgcctataatcccagctactcgggaggctaaggcaggagaatcacttgaactcgggaggcagaggttgtgttgagccaagattgtgccattgcattctagcctgggcaacaagagtgaaactccatctcaaaaa

SEQ ID NO: 46289 - DNA, 505 bp, Homo sapiens
tacagtgaaatgacaagggcctgtctcaaaaagtgacagtagaaatgagaagaatgaatagatataaraagcagggggaattgacaaggttagtgatagattgaccaagtggttcagatggcttaaaaaagatatagtagcaaaaaccagctctgaatcttgtaccactgtcaccctgatataaccataccagactgtcaaaactaaaatttcatatgctgatggacactaaattacaaatttccttcaaggaaacaaatggttggagttagcaatagaaacatacagatctgtgtctttatttttattatgttaataactttgttattgccaaataaagtaggcactttgcatgaattagtataaaataatacataaaaagggcaataatatttgagatatgaacatgcagatttattatttcaaacctaggggatgtactacaataagagactataatatggcatatggcatacatatatattatatgatacacatataagta

SEQ ID NO: 46290 - DNA, 505 bp, Homo sapiens
tacagtgaaatgacaagggcctgtctcaaaaagtgacagtagaaatgagaagaatgaatagatataagaagcagggggaattgacaaggttagtgatagattgaccaagtggttcagatggcttaaaaaagatatagtagcaaaaaccagctctgaatcttgtaccaytgtcaccctgatataaccataccagactgtcaaaactaaaatttcatatgctgatggacactaaattacaaatttccttcaaggaaacaaatggttggagttagcaatagaaacatacagatctgtgtctttatttttattatgttaataactttgttattgccaaataaagtaggcactttgcatgaattagtataaaataatacataaaaagggcaataatatttgagatatgaacatgcagatttattatttcaaacctaggggatgtactacaataagagactataatatggcatatggcatacatatatattatatgatacacatataagta

SEQ ID NO: 46291 - DNA, 1762 bp, Homo sapiens
gcatttcaattcatttgtattgagtgatagaatgagtgactgcattttatagagaatgaaatgaagcatcagtgtttagtaacaaaagttaacaaaggagcagaggtacatttgaaacagagatacagttacggatatggtgaatttttttaccaaagctgaagaatctaaggtaggggtcttgataagttaaattgtttatatgaatggttgaattaatgatgatgaaactaagaaaacagttttgattgacaattacttgagggcacttataagaaaaaaaaaagtatagttttgtaaaagtaaccaggatttgtttcaatcagctatagtaagacatgcagacaggaatattactgttatgaagaaagaagtctattatactcatagtttcctagagacaggaggcaacaccacatcacacaggatggggggcaggaaaagggaaggtaccaggatccgttgggaggcagaaggagcaagagaacatgtgggcaagtaactttattttgattttctcaggaagggatgagcaaggcagtttaggattggctagtttgaataacttcaatggggtctggggcatagaagctgtcccttttgttaggtacttggtcctgggatgattagagtcagtggatagtatcctggagtatgagtttttaaaggagcttgttgaggatatgtactctggattacttgaattgcatataaaaggtgcactaccaatgagttatctctctctaggaattggctaaccctaggaagggtagtccctccagggtaagcaatcccccaagacctcaaagcatcagaataaagaaaaaaacatagtaaaacaattagaaataggataaagctttatgaaatgactctcaaacaatgatgaggtaaccaataatgaatatttatcacttcctccttgctttgaaacatgaaaaaaatgaaaaagaaaaatctttatttataactctttgcccattgtgaacttacgaagtatgtcagttagtacctgtagctgagagaaagagccctgaatgcagaggctttgtttgcaaacagctcaaatagcaagattttatgattgaaaaattgaaagcactctctatataaagcacagccagagcaaacagctccagcagtgagtggcaaagaaagcatatttcatccacagaaaatgactgtgatgcattagtcaatgctatcatggcaaaggtccctgagaccctgggagacaatagggagggagcaggggctggatgacrtttgtttccaaacctttcgggatctgaaaagtcatttctatcaaattagtggctatggtgtggcacatccacttctagtttgcaagagataaagactgatgaattaaaactttaaagcaaggtagagtgaaagacagaaaaatatttttcagccactgtagttcaaatccatttataagcactgcctgtctggactgttaccccatccatcttccttttgtgcaattcatcaatcctcttttactcagggataagtagtaacctttcatttacactcaactgaggcgttagtgccagggacatcggaggtcagctggtggattctttcctgttaatggccaaatgagggacatggattgaaggaaccacaggaagccaagcttctctagcttaaaggatgctttcttaaatccttaggtaggtagtttggtgagaaaacaagtatgcccttattttaaaagtgattcactaactctggagacctgtttctgttaaaa

SEQ ID NO: 46292 - DNA, 549 bp, Homo sapiens
aagccaaaagatccccaaagagggagcagcttcaagaaaggacttagtcctttcttggatggaacaagggagccaaagaaatgcaaagggcttacctgttccagtcggacttgcacaccgcagggaatcaccacctttcaaagagagaagaaacagataagcaaatggattctccaggaaaaaattagcataataatcaagccaggctcccaaagactgaatgaaactgtctctaacctcactcyggctacaaagctgtagcagatcaagactgacaagatttagagttaagagagtccagggttttgttcacttttggaaagtccctgtcatttttgctaatgtcatggaaaccatggggcctccccttccagaaaaatgcaaatcactcatagatacaaaatttagcccccactttcacaaagaactggtagacctcaaggatggaaacctctgagtcggtccgtgcttggggagcttgggagcggggcccagagaaggaggtggaaggctctgcctggtggtcttcaagaccccactcctcccatc

SEQ ID NO: 46293 - DNA, 586 bp, Homo sapiens
aggaatgcttgtcaaaagatggygcctaattgagtggccagatcctttcatgcctttcagtgacagtgcctttgtagtgtcctggatgtcatgtggtgatgtgtgaattgcctggctcagctccactgctgtctgaaatagctcctcacacatggtccgcagggtcagttgccacagagaccacattgcaagagggattttccacgtctgtttaaaagctggaattaatattgttaggtgagaggtgaagcaactcctcttattgtgtcttttaaactcttatcagggccagaaaacaacagcctgcagattcaatccagctcactgcccagtgtaaataaagttttattggaacacagccactcacccactcattcacagtttgtgttggctgctttcacaccacaacaaagctgagaggttgcaacagagacctcagtggcctgcagcacctaaaatattcaccttctggctcttctcagaaaaagtgtgccaactcttggactctatcactgattctgagatgtgttctttttttttttttttttttttttgagacggagtctcgctctgtcgcccaggctgg

SEQ ID NO: 46294 - DNA, 580 bp, Homo sapiens
ctccacaggctggtcctcccacggggctggtcttccacggactggtcctcccacggggctggtcctccacgggattggtcctcccacggggctggccctcccggggctggcagtggtgctgactgtcgactgggagctggctggggctcccgacsgtagtcagtgcccacgcgagccgctcctgtggctgtgctcctccagggaggaccctaaaagccagtgttgaggaggggagaagaggaagttcctccgcaaggcaagacccagataggcacagagccactgccgcagactcctgctgacctctcagggccaggccgacccaagggcaggaaaacagatgccgcctcttggagagagggacgaggaatttggcggccggctttaaccttccctagagcttgatgtctccgggcctcggtttcccgtccgccaaatggagccctatgctacgagagctaccacttattccaccagacttttacagatctttacaacccccaggagagggtcagaggcagagagcaggcttcgagggagccagggaggctcttgcttaggtagctggctaggagttaac

SEQ ID NO: 46295 - DNA, 595 bp, Homo sapiens
caaggaaattcatatatatgccccaagggggaaaaatagaaaatrtgtcttcctttcaccgtctatctctgtcttagcttaaatttgtgattattctcctaagagaagactaagcatgaatgattttccttataacacaaaacattctgatttaattgtttttagtagttggttctgatttctgacttcagttgtattcttcctgacaaacctctatttcctgatccccttaactttctgtcctgtagcttgacaggaaaacattaaaagactgatgaaaaactgctgtatgcctctagcattctttattttaccttcacagttactcaaaacttatttgttgaatgaaagcttaattttcctttttatgcaagatttggtgtgtggcagaaggcagtagcctggaggtggcggcatacatagacattgaggggctggtgaaacagtgtcccagtcaccagggaggcacaggaagagaggcatgaaaactgctctgcccctgactgtatgggaaaccccaagagcatcatctcgctgtccatgaccactggatttgtaagatccaagggggcctgactcttcctttgttcttagt

SEQ ID NO: 46296 - DNA, 556 bp, Homo sapiens
tgttaaaataattatacaacttaaaaacataaactttaattacctgattcatttctgtgctttgcatttcctgatcattagaaattaaatgtgatgattgtacacatgacagaaaaatggtcacattttacaactaattctgccttaactaattggtaacagtgaaacagtagaaaaactaacataactaactccattttttgttwaaggggtctttacctattcctgctcacaggctaattttagagcactgagaaaaaattcaaagaaaacagtcatgtagttttcttaactaactctgtgattaaaggaaaagtatgtaaacagctatgttttgttaaagatttgcagaagcaaacaccgcatgttctcactcacaggtgggaattgaacaatgagaacacttgaacacagggctgggaacatcacacactggggcctgtcaggaggtggggggttgggggagggatagcattaggagaaatacctaatgtaaatgacaagttaatgggtgcagcaaaccaacatgacacacgtatacctatgtaacaaactt

SEQ ID NO: 46297 - DNA, 728 bp, Homo sapiens
tcaccccagctcctgcatccatttacctgtgtgctccccctccaacaaggggttcaagcatggcggccaagtaaatgagccacccctgtcacaagtcccacgaggggatcaggggaaactctcctgtctcagtgctagataggttagctgacctrattttcacagctactttgtgccaatatagccctctgtctcaaatctcttgaattcctcacaaaatttccacatccattcagcaaacatttatagtctgtctgtctgtgatgtgctacaaagtgtgttaagattttaggatacaaaaaaaaaaaattgtctctaacaccaaggagagactgaaagacatctgatgattacagagcaatgtgataagggccagaacagtagtaaaataccatacagatcccctgctgtatctggcactcaggaagagctaattaaattcctaagttgaacgaatgttaatatgactcacatttccatgagcttgacattggttttctcatgtgaacttgttctttgggaaatacactatgtatttctttagggtataacagaatcaggcaatatgtacttgtccttaatagcagccagatagtttctccttggctgtgggtatgctcatgtcattgaacttggttttctcacctattgatgtcataggatttctctgagaattaaatctctctttctcacacagactcataaaatctactcaaacttaagaaggc

SEQ ID NO: 46298 - DNA, 556 bp, Homo sapiens
ttggtagagactgaaagacaggtcaggaaatggtaaagctttatagcaaaaaaaataaaaaagaagaaaaggaggactgtatgtgtgctgtgattagaggtagttggcacagaaaagctgaaggtgtgctaattagaaatgtggcattttgtatgattggtttgggaaatatgtttgccattctgtgagttgttctgagttggagacagaaaaaattagggaatctggcagttgttgagcaagtcttgaccattttgggccatgcaattactgcaaaaatcatggtgtggcttcttgaactggttgttgcagaggctgctggtcagggttctattttcatacatggtctggtcactgtcagtctgtatatacaatgtgcatttgatatgcacattactttgcaataggtgacatattaagctgttrtcagtcactttaaacatataaatttaaaaaatgaataaaaatataatacaaatatgaagataatataggacacttctaagaaataagttggccaagagaaataaagagaggcctagcttggatgtgtcaa

SEQ ID NO: 46299 - DNA, 556 bp, Homo sapiens
ttggtagagactgaaagacaggtcaggaaatggtaaagctttatagcaaaaaaaataaaaaagaagaaaaggaggactgtatgtgtgctgtgattagaggtagttggcacagaaaagctgaaggtgtgctaattagaaatgtggcattttgtatgattggtttgggaaatatgtttgccattctgtgagttgttctgagttggagacagaaaaaattagggaatctggcagttgttgagcaagtcttgaccattttgggccatgcaattactgcaaaaatcatggtgtggcttcttgaactggttgttgcagaggctgctggtcagggttctattttcatacatggtctggtcactgtcagtctgtatatacaatgtgcatttgatatgcacattactttgcaataggtgacatattaagctgttatcagtcactttaaacatataaatttaaaaaatgaataaaaatrtaatacaaatatgaagataatataggacacttctaagaaataagttggccaagagaaataaagagaggcctagcttggatgtgtcaa

SEQ ID NO: 46300 - DNA, 556 bp, Homo sapiens
ttggtagagactgaaagacaggtcaggaaatggtaaagctttatagcaaaaaaaataaaaaagaagaaaaggaggactgtatgtgtgctgtgattagaggtagttggcacagaaaagctgaaggtgtgctaattagaaatgtggcattttgtatgattggtttgggaaatatgtttgccattctgtgagttgttctgagttggagacagaaaaaattagggaatctggcagttgttgagcaagtcttgaccattttgggccatgcaattactgcaaaaatcatggtgtggcttcttgaactggttgttgcagaggctgctggtcagggttctattttcatacatggtctggtcactgtcagtctgtatatacaatgtgcatttgatatgcacattactttgcaataggtgacatattaagctgttatcagtcactttaaacatataaatttaaaaaatgaataaaaatataatacaaatatgaarataatataggacacttctaagaaataagttggccaagagaaataaagagaggcctagcttggatgtgtcaa

SEQ ID NO: 46301 - DNA, 501 bp, Homo sapiens
catgcacacacgtatgtgcagacctgtgtgtgcctatgcacagatatgcatctaggatgtgtgcacacatgttcacatagaggatacaatgaactgctacatgtttcygtgtatatatattacatatagatatttactggtttgcatatatgtgtatatatactggtatatgtgtgtgtagactatcatgcatgtatgtgtgtatacatatactagtatgtatgcgtgtgcatatatagaggtatatacatgtgtgtgtacccgtatctatttactagtatatatgatgtgtgtgtgtactggtatggatgtgtgggtatgtgcacttgctggtatgtatgtaggtgtttgctaacacatacgtgcacacgcagaatgcttccaggggactgcacagcctctagttcgcagcccccacccctccctttgcccctgcactctcccctctctgagctgcattcgcatgaaagggtgcaggttctgaccccgcagcgccacctc

SEQ ID NO: 46302 - DNA, 545 bp, Homo sapiens
ccgcgagggactggggcgttttccaccgggcgcgtgtctggggctgtgactcagaatcctcaaactcagagttcgcagacggaggaactcatgctcaaacgtctgaacaaaaatatacagagcatgaaatttttactccagaaatagtgcacctctctcccccttggggaaaagcgttttccctacttccgtaggagttaactcgccaaggcttttaggagacgccgcacagctgtgctcccgctcgttgwaaaaaagatgccaaaagtgtagaatttgaccacaaacaaccgagcttcacaacggagtgtggcttgtgtgccaggccctgtgctgggggtgcaaaaggccccccgtgtccagcctggcagcagtgacttcggggtccctcctgcaagcttggctacaggtgttcaatcttactgacatattttacaaatatagctacatttttccagcccaaattcagtacacatgacctagcaaagcattccagaggcaaacggctttctaggaagtgtagcttaggcacctaaatgctggca

SEQ ID NO: 46303 - DNA, 571 bp, Homo sapiens
atcccacacgggataggatgctgggggggccttctgagtaaggaaatgggagaaagttgcaaatttgggggaaagatgattatttctatttttgacattcaagtttcagggtgactgcaggccacgaggtggtgacctccaaaagggagctggatcttagaggggacgtctcatcctgagatgcatcctgggagccatcagcaaatgtgtggaggttcagtcagttgacgtttgaattatcccaggagagtgaggaggggaaggagagagggccaaagacagacccttccctaaggagggggcaaatgaaagaagtgggaracttagaagacagtctaagatgtgggaggaaagcaagagagaccacggaacctcgtgcaatcgcccgttacccagagagctgcacgcagccgtgacaggaggaaagaggactgcaagcaggactgtttcagggagtggggcgtggcggggtggagcacagttcagattgcaggcaactgagtcacaaataagagaagctggaggtgtagaccagagcgtagacttttaagaggttcgaacaaaaagcgga

SEQ ID NO: 46304 - DNA, 560 bp, Homo sapiens
gaaatataaaaactttaaaaaccctgcaagtattaaggaatttgacattttaaaaaaaaatacatgtcaagaggagtaagttccccgtgacgtttgatgccagctgcatttctctgcacctcccagtgctttaaaaggtgtgaagcacaggctttacatccrgcacaatgccaatttattttagtctgcaatactgagtattgagcaagtaaaggaaaaacatcttcctctccaaggtgggccttaattccttggtgacaattaccggtctttcccaaaagccaaaagtgcaatatttcagggtttgtcatcaagaattttcttttaacccacccttcacatctttactgcctcctgctccccacccactttcagcacatttaaaatcagtcccaaacttttcccagccttcaagtgtctgagacctgattcatttcatggacatattaaaacacacttggacccagccaatgtgtgaccagttttacttgtctttcttctatgcttgtaatagaatttgtatagtacaataaaatatctggaatcacatcacatttttt

SEQ ID NO: 46305 - DNA, 560 bp, Homo sapiens
gaaatataaaaactttaaaaaccctgcaagtattaaggaatttgacattttaaaaaaaaatacatgtcaagaggagtaagttccccgtgacgtttgatgccagctgcatttctctgcacctcccagtgctttaaaaggtgtgaagcacaggctttacatccggcacaatgccaatttattttagtctgcaatactgagtattgagcaagtaaaggaaaaacatcttcctctccaaggtgggccttaattccttggtgacaattaccggtctttcccaaaagccaaaagtgcaatatttcagggtttgtcatcaagaattttcttttaacccacccttcacatctttactgcctcctgctccccacccactttcagcacatttaaaatcagtccmaaacttttcccagccttcaagtgtctgagacctgattcatttcatggacatattaaaacacacttggacccagccaatgtgtgaccagttttacttgtctttcttctatgcttgtaatagaatttgtatagtacaataaaatatctggaatcacatcacatttttt

SEQ ID NO: 46306 - DNA, 560 bp, Homo sapiens
gaaatataaaaactttaaaaaccctgcaagtattaaggaatttgacattttaaaaaaaaatacatgtcaagaggagtaagttccccgtgacgtttgatgccagctgcatttctctgcacctcccagtgctttaaaaggtgtgaagcacaggctttacatccggcacaatgccaatttattttagtctgcaatactgagtattgagcaagtaaaggaaaaacatcttcctctccaaggtgggccttaattccttggtgacaattaccggtctttcccaaaagccaaaagtgcaatatttcagggtttgtcatcaagaattttcttttaacccacccttcacatctttactgcctcctgctccccacccactttcagcacatttaaaatcagtcccaaacttttcccagccttcaagtgtctgagacctgattcatttcatggacatattaaaacacacttggacccagccaatgtgtgaccagttttacttgtctttcttctatgcttgtaatagaatttktatagtacaataaaatatctggaatcacatcacatttttt

SEQ ID NO: 46307 - DNA, 1722 bp, Homo sapiens
tttagaaattattgctgtatattttcaattttctaagcctgagtgtatcttaaattagaaagcttaaatgtattctatttccattgccattatctcaaaatctttccaaaatctattttttaaatgcagaatcttaagctagtttgaaacacgattccttatttctcaatatttgcctcttgaggtactttctgtgatgaagcatttccaatattttctcatatttgtgttatttttctttacacmtttgatgagctcaagtaaaatgagtgattgaggttacaaaattaccactttgtcacaatcatttttacctacttatcaatagaattaccattagcatgcttctgcccttttttgctgacaatttactcattaaatttgatccatgtcatatttgtgaccattaaaatgaagtatactttctgtcattcagtgaagatatgactttagagccctaatatctttccaagtcagttaccacaaaagtgacaatactgaagatgtgttttgaatggatagtgcatttgtctttctgatacagttctccacacttcataaatatttacagtctctgttgtttgtcactagaaattatggtactcatccaagggtttcatttatttaaaatgacaataattgtacagttttttattcttccctgcatttatgaaagtttgtaagtagaaatattaatgcaatgctgtattaaagctggctcatattggctctaaatagttgatttagtatacctattccaaaccctacattcagtgatttcacactgatagcttaaaatcatggtagtgtgcatatctataatatgtaaactggtgaatgaaagcaatcagccatctcttctccccacaatcagggtggtatttactaaatttaccagcactccactcctctaatgttcctgggaacatgggacattctacattgataaaactttaattggagatttggaaatattgaataagagttagctagttgaatgtgggtactaaagggtaatgggtggataaaacacatgcttagaatccacatacatgaaggaaaagacaaacgtatgtcatacagaaaaaagtgaaaaatgctatggtaaaagtatgactcacaaaattatacaaaatttaggtatagaagtggactgaagaaatattattgtaaccacgtaagaattatggactttggataaggacaagaatttggataaattcttgaaagatgaatatcataaacatttaatcatgtctattcagttgttaatggattagataagagacatcaattaaagatgtcattggggccatggaatatcaagcagctggatctgcctacaccagctaatatgcaacatacaattgtgacccctgaaagagggaaaatagtgagatgagccctatgatcactctggctggctgtctacaaccaatttttagaatgtgagtctgggaaaggaacccagtcaaaacttggcattctcacttggttgagaaggcaagagttcagggttaggaaatacttagctgtctagaatttatgggtcatatttgcagcaaggtaggagcagaaaaggaggtctaaaaatcttatatggaatcatgttatctcttcagttgaataatattttaaaagcttgaaattaaaacccatgtggttcagctaggaataaattattaggaaagaaccaatcaatatcagaaagctacaaacaaa

SEQ ID NO: 46308 - DNA, 588 bp, Homo sapiens
aaagtcctgaagttggccctcgggacctgcatatgagatgagccagccctccgtatgcacaggtggcgtcgaggtggacccaagcagttcaaatctatgttgttcaaggatcaactacactcatgattcagaccaaaatagaaataaacaaagtgaaaatatccgtaacaacaaggataaagcattctcagtcaaaaaagactatatagaggaacacaagccagatatctgttttatatttctcaacatattttctgcacaataccagctccagcggatgttacttcttacatatgcacacacatacacacacacataaagattcttcagtcaataagtttgaaaaatgcttggttaaacaaagctcaccacggctggtagtgatggctcatgcctgtaatcccaaaactttgggaggctgagatgcaaggatcacttgaggtcaggagttcgagaccagcctggccaacatggcgaaaccccgtctctacaaaaattacatgggtgtagtgrcacacgcctgtagtcccagccacctgggaggctgaggcaggagaatcacttgaacccaggaggtggaagttgtag

SEQ ID NO: 46309 - DNA, 588 bp, Homo sapiens
gaaaaagcacctaacaaccctactataagtatttcaaagaaaaccattcagattttctccaaggcttgtctgttgctgcttactgttcgtgagaatgctttctaagcagcaatagatttgagaatgtcattagccactactgtttgttttccttctmatgtcccgcattaaccaaaaccacaatgaaaccaacaaaaagccttcccggatatagcttttgtatataggcctagctggctcgcagtaacatttggactttaaattgagtcttgaatgatcttcagcggttacccagatagctcttggcatcaaaccccttggcatctcttccattccttttcctattcaaaatattgaggttaaaatacatcaaagtacagagggaaaaaaatcttaggtcttctaaaaataattgtttcatttagaaatctgaatgatggagtgttggcagagggccaccagaattcaaaagaggttgagtttaatcctccagcccaactgtccacatttagaaatgacaacattcacgaactaagtcaatataatttgcacagatcttacccaacaaaccctaagctgcaaaaacaa

SEQ ID NO: 46310 - DNA, 588 bp, Homo sapiens
gaaaaagcacctaacaaccctactataagtatttcaaagaaaaccattcagattttctccaaggcttgtctgttgctgcttactgttcgtgagaatgctttctaagcagcaatagatttgagaatgtcattagccactactgtttgttttccttctcatgtcccgcattaaccaaaaccamaatgaaaccaacaaaaagccttcccggatatagcttttgtatataggcctagctggctcgcagtaacatttggactttaaattgagtcttgaatgatcttcagcggttacccagatagctcttggcatcaaaccccttggcatctcttccattccttttcctattcaaaatattgaggttaaaatacatcaaagtacagagggaaaaaaatcttaggtcttctaaaaataattgtttcatttagaaatctgaatgatggagtgttggcagagggccaccagaattcaaaagaggttgagtttaatcctccagcccaactgtccacatttagaaatgacaacattcacgaactaagtcaatataatttgcacagatcttacccaacaaaccctaagctgcaaaaacaa

SEQ ID NO: 46311 - DNA, 558 bp, Homo sapiens
gcaggtggatcacttgaggtcaggagttccagattagcctggccaacttggtgaaaccccgtctctactaaaaatacataaattggctgggcttggtggcgcacacttgtagctccagctactccagaggctgaggcacgagaatctcttgaacctgaaaaacagaagttgcagtgagccaagatcatgccactacactccagcctgagcaacagagcaagacttctgtctcaaaaaaaaaaaaaaaaaaatatatatatatatatatacacacacatatatgtatatatacacacacacgaataaacaaataaatttacaaaaaaattgttaattctcaaaaaaatgacctatgtagtccatgaaacttttgtagggattgataaactacatrtaagatttacatagatatgcctactagctggaataaataaaaccattttagaatggaaggaaaatgactactagctggaataaataaaaccattttggaatggaaggaaaaagttttaatatttgcaagacatgatttcaagacttttcataagcctacagcag

SEQ ID NO: 46312 - DNA, 558 bp, Homo sapiens
gcaggtggatcacttgaggtcaggagttccagattagcctggccaacttggtgaaaccccgtctctactaaaaatacataaattggctgggcttggtggcgcacacttgtagctccagctactccagaggctgaggcacgagaatctcttgaacctgaaaaacagaagttgcagtgagccaagatcatgccactacactccagcctgagcaacagagcaagacttctgtctcaaaaaaaaaaaaaaaaaaatatatatatatatatatacacacacatatatgtatatatacacacacacgaataaacaaataaatttacaaaaaaattgttaattctcaaaaaaatgacctatgtagtccatgaaacttttgtagggattgataaactacatataagatttacatagatatgcctactagctggaataaataaaaccattttagaatggaaggaaaatgactactagctggaataaataaaaycattttggaatggaaggaaaaagttttaatatttgcaagacatgatttcaagacttttcataagcctacagcag

SEQ ID NO: 46313 - DNA, 558 bp, Homo sapiens
gcaggtggatcacttgaggtcaggagttccagattagcctggccaacttggtgaaaccccgtctctactaaaaatacataaattggctgggcttggtggcgcacacttgtagctccagctactccagaggctgaggcacgagaatctcttgaacctgaaaaacagaagttgcagtgagccaagatcatgccactacactccagcctgagcaacagagcaagacttctgtctcaaaaaaaaaaaaaaaaaaatatatatatatatatatacacacacatatatgtatatatacacacacacgaataaacaaataaatttacaaaaaaattgttaattctcaaaaaaatgacctatgtagtccatgaaacttttgtagggattgataaactacatataagatttacatagatatgcctactagctggaataaataaaaccattttagaatggaaggaaaatgactactagctggaataaataaaaccattttggaatggaaggaaaaagttttaatatttgcaagacatgatttcaaracttttcataagcctacagcag

SEQ ID NO: 46314 - DNA, 558 bp, Homo sapiens
gcaggtggatcacttgaggtcaggagttccagattagcctggccaacttggtgaaaccccgtctctactaaaaatacataaattggctgggcttggtggcgcacacttgtagctccagctactccagaggctgaggcacgagaatctcttgaacctgaaaaacagaagttgcagtgagccaagatcatgccactacactccagcctgagcaacagagcaagacttctgtctcaaaaaaaaaaaaaaaaaaatatatatatatatatatacacacacatatatgtatatatacacacacacgaataaacaaataaatttacaaaaaaattgttaattctcaaaaaaatgacctatgtagtccatgaaacttttgtagggattgataaactacatataagatttacatagatatgcctactagctggaataaataaaaccattttagaatggaaggaaaatgactactagctggaataaataaaaccattttggaatggaaggaaaaagttttaatatttgcaagacatgatttcaagayttttcataagcctacagcag

SEQ ID NO: 46315 - DNA, 1822 bp, Homo sapiens
ggacaagtgggacaggggctccaacaaatagtagatatagttggtccttgaacaacatggaggttaggggcactgactccaaaaccctgcacagtccagcatccacatgcaaattttgtctccccaaagacttaaatactaatagccttctattaaccagaagccttgtcaataacataaacagtccattaacacatattttgtatgttatatgtattaatatactgtatccttataataaagtaaactagagaaaagaaaatattattaagaaaatcataaagaaaaaatgtttactatttactaagtggaagtggatcatcataaaggtcttcatcctcatcgtctccatgttgagtaggctgaaaaggaggaagaggaggggttggtctttgctgtctcggggtggcagaggcagaagaaaatctgcctatacctggacccacacagctcaaatctstgttgctcaagggtcaattgtataggcaatacctatacctccttttctactccaaaaaaaaaaaaaaaaaaaaaaagccctatcaataagaggagtcaatggcatccatttttatcagtttaaagtatcctggctataaaacaggtgaaatagactctgcctaacttaacggaaacattcctggagttcagaaaattaaagaaagatttggataaccaggctttggacaatacatgaaccagagatactctgagcattggttcattcatttgcttgtccattccacaagtatttttgagtgcctgcattacctggaattgctctaggtactaaaaatgtaccacatccagtggtgatggatgtggttgcaaaaactaatgagcacattttcaggacataactgctgtatgctcaaattccagtgcctgccatcactgtaaggctctgctcaagtttccgttctcatgaaagagtctgaacaaactaacctggatcagtgcctacttccttggctagtgttggaagggccaggcggagttcttgcagagaaactggatgaacactcccaccatgaacacatccagaaacaatgaggaaagggtacttaaccagaggaaaattgtgatgcttttaccaaaaaaaaaagggggggaaagggatgctgagaaaataaaaacaattcttgtctactcttctgagaagatagcataagatcagacatgtgaagatgttggcatagtccctagcacaaagtaagcgcttgatgaataaacaacaaaaatgattaaaaattcatctactatgtgatgagacatcagagcatgtgaagtaattaattaggctattgactatggctttacctacaaatatatagtcaacatgtcagcactaagatgtcagctttaaattatttatgaaatttggaaaagcattaataaaagtatctgaagtgaggaaagtgttggtcctgctttcctggtgctggtcagacttcaatttgattgaacatataattaagcacatattatatatcaaatccttggagcagtgtacacagattttaagaggactcagcaaacagggaactatgaccacagcctgggtgacagagagagagactgtatctcagaaaaaaaagagagagagagaaaatggatagtggtaatagttgtacaacattgtgaatatccttaatgctactgaattgtacatttaaaaatgattaaaatggtaaatattacatatattttacaattaaaaaaatcaaagaaaaaaagtaaaaacaatctgaaaactatgacatatgtgaaatggttgaaaagatgagagcatttggcctgaggtcatggtacttaatatgca

SEQ ID NO: 46316 - DNA, 1822 bp, Homo sapiens
ggacaagtgggacaggggctccaacaaatagtagatatagttggtccttgaacaacatggaggttaggggcactgactccaaaaccctgcacagtccagcatccacatgcaaattttgtctccccaaagacttaaatactaatagccttctattaaccagaagccttgtcaataacataaacagtccattaacacatattttgtatgttatatgtattaatatactgtatccttataataaagtaaactagagaaaagaaaatattattaagaaaatcataaagaaaaaatgtttactatttactaagtggaagtggatcatcataaaggtcttcatcctcatcgtctccatgttgagtaggctgaaaaggaggaagaggaggggttggtctttgctgtctcggggtggcagaggcagaagaaaatctgcctatacctggacccacacagctcaaatctctgttgctcaagggtcaattgtataggcaatacctatacctccttttctactccaaaaaaaaaaaaaaaaaaaaaaagccctatcaataagaggagtcaatggcatccatttttatcagtttaaagtatcctggctataaaacaggtgaaatagactctgcctaacttaacggaaacattcctggagttcagaaaattaaagaaagatttggataaccaggctttggacaatacatgaaccagagatactctgagcattggttcattcatttgcttgtccattccacaagtatttttgagtgcctgcattacctggaattgctctaggtactaaaaatgtaccacatccagtggtgatggatgtggttgcaaaaactaatgagcacattttcaggacataactgctgtatgctcaaattccagtgcctgccatcactgtaaggctctgctcaagtttccgttctcatgaaagagtctgaacaaactaacctggatcagtgcctacttccttggctagtgttggaagggccaggcggagttcttgcagagaaactggatgaacactcccaccatgaacacatccagaaacaatgaggaaagggtacttaaccagaggaaaattgtgatgcttttaccaaaaaaaaaagggggggaaagggatgctgagaaaataaaaacaattcttgtctactcttctgagaagatagcataagatcagacatgtgaagatgttggcatagtccctagcacaaagtaagcgcttgatgaataaacaacaaaaatgattaaaaattcatctactatgtgatgagacatcagagcatgtgaagtaattaattaggctattgactatggctttacctacaaatatatagtcaacatgtcagcactaagatgtcagctttaaattatttatgaaatttggaaaagcattaataaaagtatctgaagtgaggaaagtgttggtcctgctttcctggtgctggtcagacttcaatttgattgaacatataattaagcacatattatatatcaaatccttggagmagtgtacacagattttaagaggactcagcaaacagggaactatgaccacagcctgggtgacagagagagagactgtatctcagaaaaaaaagagagagagagaaaatggatagtggtaatagttgtacaacattgtgaatatccttaatgctactgaattgtacatttaaaaatgattaaaatggtaaatattacatatattttacaattaaaaaaatcaaagaaaaaaagtaaaaacaatctgaaaactatgacatatgtgaaatggttgaaaagatgagagcatttggcctgaggtcatggtacttaatatgca

SEQ ID NO: 46317 - DNA, 1822 bp, Homo sapiens
ggacaagtgggacaggggctccaacaaatagtagatatagttggtccttgaacaacatggaggttaggggcactgactccaaaaccctgcacagtccagcatccacatgcaaattttgtctccccaaagacttaaatactaatagccttctattaaccagaagccttgtcaataacataaacagtccattaacacatattttgtatgttatatgtattaatatactgtatccttataataaagtaaactagagaaaagaaaatattattaagaaaatcataaagaaaaaatgtttactatttactaagtggaagtggatcatcataaaggtcttcatcctcatcgtctccatgttgagtaggctgaaaaggaggaagaggaggggttggtctttgctgtctcggggtggcagaggcagaagaaaatctgcctatacctggacccacacagctcaaatctctgttgctcaagggtcaattgtataggcaatacctatacctccttttctactccaaaaaaaaaaaaaaaaaaaaaaagccctatcaataagaggagtcaatggcatccatttttatcagtttaaagtatcctggctataaaacaggtgaaatagactctgcctaacttaacggaaacattcctggagttcagaaaattaaagaaagatttggataaccaggctttggacaatacatgaaccagagatactctgagcattggttcattcatttgcttgtccattccacaagtatttttgagtgcctgcattacctggaattgctctaggtactaaaaatgtaccacatccagtggtgatggatgtggttgcaaaaactaatgagcacattttcaggacataactgctgtatgctcaaattccagtgcctgccatcactgtaaggctctgctcaagtttccgttctcatgaaagagtctgaacaaactaacctggatcagtgcctacttccttggctagtgttggaagggccaggcggagttcttgcagagaaactggatgaacactcccaccatgaacacatccagaaacaatgaggaaagggtacttaaccagaggaaaattgtgatgcttttaccaaaaaaaaaagggggggaaagggatgctgagaaaataaaaacaattcttgtctactcttctgagaagatagcataagatcagacatgtgaagatgttggcatagtccctagcacaaagtaagcgcttgatgaataaacaacaaaaatgattaaaaattcatctactatgtgatgagacatcagagcatgtgaagtaattaattaggctattgactatggctttacctacaaatatatagtcaacatgtcagcactaagatgtcagctttaaattatttatgaaatttggaaaagcattaataaaagtatctgaagtgaggaaagtgttggtcctgctttcctggtgctggtcagacttcaatttgattgaacatataattaagcacatattatatatcaaatccttggagcagtgtacacagattttaagaggactcagcaaacagggaactatgaccacagcctgggtgacagagagagagactstatctcagaaaaaaaagagagagagagaaaatggatagtggtaatagttgtacaacattgtgaatatccttaatgctactgaattgtacatttaaaaatgattaaaatggtaaatattacatatattttacaattaaaaaaatcaaagaaaaaaagtaaaaacaatctgaaaactatgacatatgtgaaatggttgaaaagatgagagcatttggcctgaggtcatggtacttaatatgca

SEQ ID NO: 46318 - DNA, 1822 bp, Homo sapiens
ggacaagtgggacaggggctccaacaaatagtagatatagttggtccttgaacaacatggaggttaggggcactgactccaaaaccctgcacagtccagcatccacatgcaaattttgtctccccaaagacttaaatactaatagccttctattaaccagaagccttgtcaataacataaacagtccattaacacatattttgtatgttatatgtattaatatactgtatccttataataaagtaaactagagaaaagaaaatattattaagaaaatcataaagaaaaaatgtttactatttactaagtggaagtggatcatcataaaggtcttcatcctcatcgtctccatgttgagtaggctgaaaaggaggaagaggaggggttggtctttgctgtctcggggtggcagaggcagaagaaaatctgcctatacctggacccacacagctcaaatctctgttgctcaagggtcaattgtataggcaatacctatacctccttttctactccaaaaaaaaaaaaaaaaaaaaaaagccctatcaataagaggagtcaatggcatccatttttatcagtttaaagtatcctggctataaaacaggtgaaatagactctgcctaacttaacggaaacattcctggagttcagaaaattaaagaaagatttggataaccaggctttggacaatacatgaaccagagatactctgagcattggttcattcatttgcttgtccattccacaagtatttttgagtgcctgcattacctggaattgctctaggtactaaaaatgtaccacatccagtggtgatggatgtggttgcaaaaactaatgagcacattttcaggacataactgctgtatgctcaaattccagtgcctgccatcactgtaaggctctgctcaagtttccgttctcatgaaagagtctgaacaaactaacctggatcagtgcctacttccttggctagtgttggaagggccaggcggagttcttgcagagaaactggatgaacactcccaccatgaacacatccagaaacaatgaggaaagggtacttaaccagaggaaaattgtgatgcttttaccaaaaaaaaaagggggggaaagggatgctgagaaaataaaaacaattcttgtctactcttctgagaagatagcataagatcagacatgtgaagatgttggcatagtccctagcacaaagtaagcgcttgatgaataaacaacaaaaatgattaaaaattcatctactatgtgatgagacatcagagcatgtgaagtaattaattaggctattgactatggctttacctacaaatatatagtcaacatgtcagcactaagatgtcagctttaaattatttatgaaatttggaaaagcattaataaaagtatctgaagtgaggaaagtgttggtcctgctttcctggtgctggtcagacttcaatttgattgaacatataattaagcacatattatatatcaaatccttggagcagtgtacacagattttaagaggactcagcaaacagggaactatgaccacagcctgggtgacagagagagagactgtatctcagaaaaaaaagagagagagagaaaatggatagtggtaatagttgyacaacattgtgaatatccttaatgctactgaattgtacatttaaaaatgattaaaatggtaaatattacatatattttacaattaaaaaaatcaaagaaaaaaagtaaaaacaatctgaaaactatgacatatgtgaaatggttgaaaagatgagagcatttggcctgaggtcatggtacttaatatgca

SEQ ID NO: 46319 - DNA, 544 bp, Homo sapiens
cactactggccaaggtttttatatcctgttaagtaaggataatatataaatattatccttataaatcctatatgtaataggagatatatatatattgtaataggagatatatatatatctcctatatgtaataggagatatatatatattgtaataggagatatatatatatcctattatgtaatagattatatatgtcctatatgtaatatcctacatatatgtacatatatacatatatatcctatatgtaatatatatatcctatatgtaatatatatataggatatatatatcttatatatatccatccacatacacttatattcattcattataaggttaccattttacaaaatttctgacccatgaaaatccaacagagaacatattaggtggtgatcatagatacatcgtcacagttacacatttagtaaatgaacgtgcaacatttagtgtttgataatctctgtaataaacttrcagggaattcagagtactgagaatagctttgtgttaatggattttagtaaagataaccaca

SEQ ID NO: 46320 - DNA, 569 bp, Homo sapiens
tcccatttggtgcacattcctctgattgatccccagccttcacctgttttacatatgcctacccttttctaattggtcttctacactgccgtgcccacctttgagtggtacctttgctttagctttctttgcatattcacaaaccaatcagagtggactcctgtattctgagcccataaaagtcccrgactcagccacactgagagagaaaccacccaactgagggggtgagggaccacgtcgcatcccctctcactgctgagagtgttccatcactcaataaagttatgctctgccctcctcagtcttcaatcgtcagtgtattctcattcttcttggatgctggacaagagctcgagaaccactgaacatgggtacaagctataacacaggcgagctggggcacaccaggcccagccatgggctaagccagtgtgcaagttagacttgacccaggcgggctgagtagatggggtgcccccgctgtgagcccagcaaaagggccaagaaaaatcctgtgtcatttgaagagcagattcattaattttatcagttacaaaaggcctttc

SEQ ID NO: 46321 - DNA, 607 bp, Homo sapiens
tgtgaaaagtggccctaagatgttaggctgccactgcttggggtggtctggagtcagaaataaagtttccagatacagaaggattagatggaagcatacttccgatgtttttccttcctttagcccctctgagtgtgtttcttttttatttatacattctatttagcatggtatcttccatgctaacagtttctctgttggccttcgtgatgtcaatttctgttgctttatgttgtgctgtgtagcagacacttggttttcttcccaaggagcccgtttccttattatagaacttatatttgatgcaggtattattagagttctcagagaagwccagtcctgctttagtctcagcccagatggaaccttaattatcctctaccaatcataacacagtacaggaattgcatttcccttgccagtttgaggttgggttgcaaagaggttcctgatccaattctaagtagtaatacatgagtggacattgaaatatatggggtattttttggggaaagattccaagttcttaaaaagagatgtgtgtgtgtgtgtgtgtgtgtgagagagagagagagagagaaagagagagagagagggagcacccttt

SEQ ID NO: 46322 - DNA, 607 bp, Homo sapiens
tgtgaaaagtggccctaagatgttaggctgccactgcttggggtggtctggagtcagaaataaagtttccagatacagaaggattagatggaagcatacttccgatgtttttccttcctttagcccctctgagtgtgtttcttttttatttatacattctatttagcatggtatcttccatgctaacagtttctctgttggccttcgtgatgtcaatttctgttgctttatgttgtgctgtgtagcagacacttggttttcttcccaaggagcccgtttccttattatagaacttatatttgatgcaggtattattagagttctcagagaagtccagtcctgctttagtctcagcccagatggaaccttaattatcctctaccaatcataacacagtacaggaattgcatttcccttgccagtttgaggttgggttgcaaagaggttcctgatccaattctaagtagtaatacatgagtggacattgaaatatatggggtattttttggggaaagattccaagttcttaaaaagagatgtgtgtgtgtgtgtgtgtgtgwgagagagagagagagagagaaagagagagagagagggagcacccttt

SEQ ID NO: 46323 - DNA, 532 bp, Homo sapiens
ttaccctgaatcatagtgcagtaaattttaatatattttaaagtggaaaacactgtaataaggaataaaacaatatttcatttgagttttctctggaaatctaacaaagccccttaagaagatattttaatgaagtaaacttggaaaaagttacagtaaagtgagaccaccaaagcccatgtctaatttctttatttctttttctgaagtgcttacttgcatataatttayatgttaatcagttattaataaataaaccataggaaatggaattcctttgtgtaagagctataccaaatgaattctgctttaaaaaccagtgggacgatggtgattctttccagcaaaattaaattctagcattataaacttccagttattctgtcataaaatgttaattcaaacacagagtagctccttaatgggaggttaaggtaaaattcctgatggcttcaaaattttctgtaaattagtatctttttggacagttggtcaattctacacgtatcctcttggtcacttatctattttg

SEQ ID NO: 46324 - DNA, 562 bp, Homo sapiens
tgggtctaactaatatcgtagccaggattctttgagcagtaccatgggcactaaggtaagctctgtagaatctcatttgatcaattacgaaacaggcatatgatgcaacgccatgcagctgtttaaaaatgagatattacatagaaagatttctttgagaagtgggaaaaaaagcagacaacaaatatgtrgtataaaatcctgtatcatcagggtggggaaatgtacattttaactgagtgatgtcttgatggtgaatgggaaagctattgagaggagagaaggagtctgttgttttcctgggttatctcagcttgaatcctatctgatgcctgagaggagagaggagagggcacccgctcctccaggggaagcctccaggggtgggaggggccccctagaaggcctggctgcaggcttgagtcagaagccagggaagggacctagcctttgttttttattttccttttgagataagagtctcaatctgttgcccaagctggagggcagtggcacgatattggctcactgcaacctccgccttccaagttcacatgatttt

SEQ ID NO: 46325 - DNA, 562 bp, Homo sapiens
tgggtctaactaatatcgtagccaggattctttgagcagtaccatgggcactaaggtaagctctgtagaatctcatttgatcaattacgaaacaggcatatgatgcaacgccatgcagctgtttaaaaatgagatattacatagaaagatttctttgagaagtgggaaaaaaagcagacaacaaatatgtagtataaaatcctgtatcatcagggtggggaaatgtacattttaactgagtgatgtcttgatggtgaatgggaaagctattgagaggagagaaggagtctgttgttttcctgggttatctcagcttgaatcctatctgatgcctgagaggagagaggagagggcacccgctcctccaggggaagcctccaggggtgggaggggccccctagaaggcctggctgcaggcttgagtcagaagccagggaagggacctagcctttgttttttattttccttttgagataagagtctcaatctgttgcccaagctggagggcagtggcacgatwttggctcactgcaacctccgccttccaagttcacatgatttt

SEQ ID NO: 46326 - DNA, 525 bp, Homo sapiens
gcagtcaccctggttaagatgtccctgacaataggacaccaggtgagttgattctaaggccagcctatagcctagaccaagaaatgatccttcagtgagctgatcatgcccctgctgcactccaacctgggtgacagagtgagaccctcaaaaaaaaaaaaaaaagaaattaccctttattttatgtctgatattaactaaccaaaaaagttaataaaatagacagcaaattagccaarataaaatgccagtacaattaaaaacatgccttcgagactgaggtgggcagatcatctgaggtcaggagtccaagaccagactgaccaacacggtgaagccccgtctctactgaaaatacaaaattagccaggcatggtggcacatgcccgtaatcccagctacttgggaggctgaggcaggagaatcgcttgaacctgggaggtggagattgcggtgagccgaggttgtgccattgcactccagcctgggcaacaggagtgaaactccttctcaaaagaaaaaaaa

SEQ ID NO: 46327 - DNA, 547 bp, Homo sapiens
catcaaagtattataggtagtattatgctcatcataaaatttattttgaaattttaacactatgacttgcatttttcattcctatggcctaagggaatagtaaggtttgctatcatagcatttctgatgctgatgctcttctgtttagccataactacagctcaagagagagagacagatgggacacgtagaaataatggaggtgccaagagagtcaggcttcagtagttagttaccatacagaaatggccatctccagtcccttcttccccaatatcagccatggggacttgacccccgctgggatcaaggggcctaaagacagccttgtttcctgcctgccctccttagaatggcaacaacaacaacaaaaaaagagtagcgattgggatgccataaaatgagcaaatggcagcaaggctatattaaggacatattyaatgcaaagcaccccatgtttgtcacggctcttgtttattaacaccacccagggaattgagggaatagaggtgggaaaaggaaatttaggatgtgatatagggaaggc

SEQ ID NO: 46328 - DNA, 575 bp, Homo sapiens
tggcactggtgggagtgtcttttagcatgctaatacattataattagcatataatgagcagcgaggrtgaccagaggtcaccttcctcaccgtcttggttttgatgggttttggccagcttctttactgcagcttgttttattagcaagctttcttgatgagactttctgtctcatcctgtaacttagaatgcctgacctcctggaaatgcagctcagtaggtctcagccttattttacccagctcctaaacaagatggagttgctgttgttcaaaggcctctgacacaggtgtctctatcggccatcttgctgccatccctcctctccttacttctttgtaccttcactagctcatccggaaaatgaaatactgaggttcatttgatcctagatctaaatctagatcatagattagacccttctcaactctgaagatctagaattccatgatatatgtcattttgtatatttctgtttttcccatttttaaagtaatcatattaatggcaatttacataagctgtaataagtaatgttaaaataattgtggaaaatgacattgttttttgttgg

SEQ ID NO: 46329 - DNA, 575 bp, Homo sapiens
tggcactggtgggagtgtcttttagcatgctaatacattataattagcatataatgagcagcgaggatgaccagaggtcaccttcctcaccgtcttggttttgatgggttttggccagcttctttactgcagcttgttttattagcaagctttcttgatgagactttctgtctcatcctgtaacttagaatgcctgacctcctggaaatgcagctcagtaggtctcagccttattttacccagctcctaaacaagatggagttgctgttgttcaaaggcctctgacacaggtgtctctatcggycatcttgctgccatccctcctctccttacttctttgtaccttcactagctcatccggaaaatgaaatactgaggttcatttgatcctagatctaaatctagatcatagattagacccttctcaactctgaagatctagaattccatgatatatgtcattttgtatatttctgtttttcccatttttaaagtaatcatattaatggcaatttacataagctgtaataagtaatgttaaaataattgtggaaaatgacattgttttttgttgg

SEQ ID NO: 46330 - DNA, 575 bp, Homo sapiens
tggcactggtgggagtgtcttttagcatgctaatacattataattagcatataatgagcagcgaggatgaccagaggtcaccttcctcaccgtcttggttttgatgggttttggccagcttctttactgcagcttgttttattagcaagctttcttgatgagactttctgtctcatcctgtaacttagaatgcctgacctcctggaaatgcagctcagtaggtctcagccttattttacccagctcctaaacaagatggagttgctgttgttcaaaggcctctgacacaggtgtctctatcggccatcttgctgccatccctcctctccttacttctttgtaccttcactagctcatccggaaaatgaaatactgaggttcatttgatcctagatctaaatctagatcatagattagacccttctcaactctgaagatctagaattccatgatatatgtcattttgtatatttctgtttttcmcatttttaaagtaatcatattaatggcaatttacataagctgtaataagtaatgttaaaataattgtggaaaatgacattgttttttgttgg

SEQ ID NO: 46331 - DNA, 594 bp, Homo sapiens
aggacctaaaaatatacttgtgaagatataattcctagcctcaggaagttacagtctactggaggacacattataaacaagcaaataaatacaaaaacatcatcaactgtgttaactgcaatgaaaaaaactagtgggcattagagagatggtaaagggtattagtaatacattgtatgctcttttattatagataaggtggtccaagaagacctctctgagtattatttaagctgcaacctagaaggtgaagaggtctcagccatggtaaaagcagggagaagataatttcaggcagaaaaacagaactgtgcaaaggctcacataatacccataattaaagtaaagcaaataaattgaaactgaggaagacaaatacacataaggaaatggttttgtggggggaaaagtaatttactagttgtggttatttacacaaagtaagagagggaatccagtccttaytttcttatctgggactacagtaaaaaacatggggaaagaaacataatcatggatgccattctgagcagaagactaagaagcaagaagattatcagacatcaataaatattctttaaatactctcatgaa

SEQ ID NO: 46332 - DNA, 640 bp, Homo sapiens
cacttagtagccatcatggatcaaatagaaaaatggcagtgtatatacggtgtggctccatctgtggttccagacctccactaggagtcttgcaacacagtcctcccttgtgagtgtgggggtggagggaagtggtagagggaggtcagtgtacctctgacaagccccatctccaaatacaatcacatgctgaggtactgggggtaggagtacaatgtgaattttgggggcacataattcagcccatgacactttccaatctgtgtgtttttattttttttttcttgactaattgcagaggccaggactttcagcaagttgtggacagtggtgagaaccaatggccgtgccacaatcttggtcttggaggggatgcgttgggttctcatgatcacatgcgatgycagccctggatttctcagatgctcttcaccaacctgagggatcgtcattgcctgagaaattttataatgaatgggtgttgggatttgtcaaatgctttttctaaatcactccatagagccacatattttcttcagtctgtttatatggtggattacctggattgatttttgagtgttgaaccagccttgcatacctgggaaatgtacgatttgattgtagtgtgcagtaattttat

SEQ ID NO: 46333 - DNA, 554 bp, Homo sapiens
agatctcaatgatttaactgcaatgaaattgcaatgaaacttcccagtggctaaaattttgtggttcacatttgcactgctgttagcacaaaaggtaattatgatgtgtgtgaaaaatggtagtctgattagttgttcacacacacaaaggagtgcttttcacacatcttaattgcttttctgctaaagaaagtgtaactgcaagtcataaaattataacagcctctaacacgttaattccatttcatcagcggatgatgtatcttgaattttggtgaaaagtgactttagaactcatattgatgaggaaagttgaggttaagatactgctctcatagaagacaattataaaaaattatagttcatactcataaatacacacgtctctgtacagaagtatcgtgaattactattttgggatagtgtcttaggttttactttcttgcatttcgttacccacatggaccagtagattaacagaaaatatggccccagaaagaargaggatacaggctaaagaagtaaatcaaagaactcgatagcttttctgaagg

SEQ ID NO: 46334 - DNA, 573 bp, Homo sapiens
ctgtgcatgagaatgtgccttctgtgctctagtggagaaggttaggaactgggggactctgtgtcctatctaatcatcattaatgggatgaaaggaagcctagtaaggtccagcagtagaggctgtagctgttggagcagggaggaggaagaaggggaacaactgtgaaaacctctccaattcccctaacgcccccyccagactctctttgatcacttgcagtggtgggaaatgaagcaacctgttccatggtccattctgtcgaaaagttttcccttttgttaaacaaacttggctgaagacttttagaaagctgtcctctagggccgggtgtagcggctcatgcctgtaatcccagaactttgggaggctgaggcaggcagatcacctgaggtcaggagttcaagaccatcctggccaacatggtgaaaccccatctctactaaaaaatacaaaaatttgccaggtgtggtgatgcgtgcctgtaatctcagctactcaggaggctgaagcaggagaatcacttgaacccgggaggtggaggttgcagtgagccgagattgcgccattgta

SEQ ID NO: 46335 - DNA, 489 bp, Homo sapiens
aatgtgtcatgactgaagtaggaagtgtgtcatggtcgcagtaggaaatacgtcatgaggctgtatcatatccatctgagatcacagtaggaagtgtgtcatgatcatagtaggaagtrtgtcatgatcacagtaggaagtgtgtcatgatcgtagtaggaagtatgtcatgatcacagtaggaagtgtgtcatgatcgcagtaggaagtgtgtcatgagactatcatatctgtctgagatcgcagtaggaagtgtgcatgattgcagtaggaagtatgtcatcgcagtaggaagtatgtcatcgcagtaggaagtatgtcatgatcacagtaggaagtgtgtcatgatcacagtaggaagtgtcatgatcgtagtaggaagtgtgtcaggaggctgtatcatatctgagatcgcagtaggaagtgtcatgatcgcagtaggaagtatatcatgattgcagtaggaggtgtgtcatgatcgcaatagga

SEQ ID NO: 46336 - DNA, 489 bp, Homo sapiens
aatgtgtcatgactgaagtaggaagtgtgtcatggtcgcagtaggaaatacgtcatgaggctgtatcatatccatctgagatcacagtaggaagtgtgtcatgatcatagtaggaagtatgtcatgatcacagtaggaagtgtgtcatgatcgtagtaggaagtatgtcatgatcacagtaggaagtgtgtcatgatcgcagtaggaagtgtgtcatgagactatcatatcygtctgagatcgcagtaggaagtgtgcatgattgcagtaggaagtatgtcatcgcagtaggaagtatgtcatcgcagtaggaagtatgtcatgatcacagtaggaagtgtgtcatgatcacagtaggaagtgtcatgatcgtagtaggaagtgtgtcaggaggctgtatcatatctgagatcgcagtaggaagtgtcatgatcgcagtaggaagtatatcatgattgcagtaggaggtgtgtcatgatcgcaatagga

SEQ ID NO: 46337 - DNA, 1428 bp, Homo sapiens
tttacttgtgcactagccctttgtaagtctgtgtaaattaatgctcctcactttctgtctccatatcgcaaggatgataataagccaagagttaaacagaagattcatacttggcataacctacctacctgccaaattcttcacaatgctgacgttttaatgtctgagagaaatgaatattaatgatttccaatttctttctttgaccttcatgactaaccttatagcatccaaataaagtagagatgcaggaagattaaactgatttcattttttaaatagcaattcaaaaaataaagtgtcttactattggtagaatctagaagggacttagaaaaataaataaagtatgtcatcccatcattagtggaaaggttaaggaaaaactctgcaaaccactaggctgtaagaaattgctcacatgctaaaagtaataatggtaattttcaaataagatgccaaaatagttgaactgtcaacttctgggaaattgtatgttaccactgacagtaattcctaatgctgaggagaaaaagaaaatgaagtgacaggcttgtttgactttgctaatttcaaaggttgaggcttatctcttgggtgtgtctgagaaccagggtcactgtgaccccagctactgattaaggcagtagactccagaatttaactcaaacacttataatttgtgttgacagtagtgtttgcatttcctttattcttatatctccacaacagcatctggcacatatgtagtaggtgctcagtgcaagtatgaaaaatgaataaatgtggaaatagtgacccaaatgaatgtatgcattacacactaatactttctagtgttttagatttataaagaatttccatgcaatttcactcgattctcataatatccttgctgatgcctgaatttctttagctcagaaagcctgcccaggacttgcaacttcaaatcatgaatgctgtctctcctgctactatccttggacttggcactgtggagaggcattcgacctgcaatcatattatttcctatttctcatatttattctcaatctcctccactagtccgtaagccaagtgaaggcagagctcctgtctgacttattctttgactaccaaatccctggagctaaaaaaatttgttttytaaatgaatgaattggagccttcccacattagaaaatacagggtcatgctttaacgtggcagtcatgttcttcactgtcatcatgttggaattggtttgaactctgtttacctatttgttttcctaaggagcaaattactcttcatattatttgtgcctcatgggctcattcagctctgaatccacgttcatgactcaggacactggggactttattctttgactgactgaaaaacatacatgtgggtacaagagctctgttttgcctgtatatgcagagg

SEQ ID NO: 46338 - DNA, 1428 bp, Homo sapiens
tttacttgtgcactagccctttgtaagtctgtgtaaattaatgctcctcactttctgtctccatatcgcaaggatgataataagccaagagttaaacagaagattcatacttggcataacctacctacctgccaaattcttcacaatgctgacgttttaatgtctgagagaaatgaatattaatgatttccaatttctttctttgaccttcatgactaaccttatagcatccaaataaagtagagatgcaggaagattaaactgatttcattttttaaatagcaattcaaaaaataaagtgtcttactattggtagaatctagaagggacttagaaaaataaataaagtatgtcatcccatcattagtggaaaggttaaggaaaaactctgcaaaccactaggctgtaagaaattgctcacatgctaaaagtaataatggtaattttcaaataagatgccaaaatagttgaactgtcaacttctgggaaattgtatgttaccactgacagtaattcctaatgctgaggagaaaaagaaaatgaagtgacaggcttgtttgactttgctaatttcaaaggttgaggcttatctcttgggtgtgtctgagaaccagggtcactgtgaccccagctactgattaaggcagtagactccagaatttaactcaaacacttataatttgtgttgacagtagtgtttgcatttcctttattcttatatctccacaacagcatctggcacatatgtagtaggtgctcagtgcaagtatgaaaaatgaataaatgtggaaatagtgacccaaatgaatgtatgcattacacactaatactttctagtgttttagatttataaagaatttccatgcaatttcactcgattctcataatatccttgctgatgcctgaatttctttagctcagaaagcctgcccaggacttgcaacttcaaatcatgaatgctgtctctcctgctactatccttggacttggcactgtggagaggcattcgacctgcaatcatattatttcctatttctcatatttattctcaatctcctccactagtccgtaagccaagtgaaggcagagctcctgtctgacttattctttgactaccaaatccctggagctaaaaaaatttgttttttaaatgaatgaattggagccttcccacattagaaaatacagggtcatgctttaacgtggcagtcatgttcttcactgtmatcatgttggaattggtttgaactctgtttacctatttgttttcctaaggagcaaattactcttcatattatttgtgcctcatgggctcattcagctctgaatccacgttcatgactcaggacactggggactttattctttgactgactgaaaaacatacatgtgggtacaagagctctgttttgcctgtatatgcagagg

SEQ ID NO: 46339 - DNA, 785 bp, Homo sapiens
gtctgcgcagaaaccactctggaaaacttctgtactcttagtctctagaggcatttccaatccgcctccccaaatccaggtaagagcctcgttacttcctcctggactggggcaggagctccygattgcgatgcaggcgcggctctgcctcctttcatttccgtcctgcagggaatacagcaggattttccaacactcgaccccagcccgatgcttccctggcttgaggccttctgggcgccttgctgcttacacttttaagcccaggctcctaagcctgagctccagaacgcctccccatctgtgccgtctttgcaggtccttccccatgcacccagccagctttctcttctctgcgtttctctgcctatctgtcttctcctacctttcgctgtcctgtctaaatcccccttcctccaggaagcctttcatgatcctgaggagggctgtcagatatagcaggtaagaaatacagaccatcagccgggtgcggtggctcacgcttgtaatcccagcactttgggaggctgaggcgggcagatcacaaggtcaggagtttgagaccagcctgaccaacatggtgaaatcccatctctactaaaaatacaaaaaatgagcctggcatggtggcgcacgcctgtaatcccagctactcaggaggctgaggcaggagaatcacctggacccgggaggcggaggttgcagtgagctgagatcacgccattgtactcgagcctgggcaacagagtgagactccatctcaaaaaaaaaaaaaaaaatagaga

SEQ ID NO: 46340 - DNA, 785 bp, Homo sapiens
gtctgcgcagaaaccactctggaaaacttctgtactcttagtctctagaggcatttccaatccgcctccccaaatccaggtaagagcctcgttacttcctcctggactggggcaggagctcctgattgcgatgcaggcgcggctctgcctcctttcatttccgtcctgcagggaatacagcaggattttccaacactcgaccccagcccgatgcttccctggcttgaggccttctgggcrccttgctgcttacacttttaagcccaggctcctaagcctgagctccagaacgcctccccatctgtgccgtctttgcaggtccttccccatgcacccagccagctttctcttctctgcgtttctctgcctatctgtcttctcctacctttcgctgtcctgtctaaatcccccttcctccaggaagcctttcatgatcctgaggagggctgtcagatatagcaggtaagaaatacagaccatcagccgggtgcggtggctcacgcttgtaatcccagcactttgggaggctgaggcgggcagatcacaaggtcaggagtttgagaccagcctgaccaacatggtgaaatcccatctctactaaaaatacaaaaaatgagcctggcatggtggcgcacgcctgtaatcccagctactcaggaggctgaggcaggagaatcacctggacccgggaggcggaggttgcagtgagctgagatcacgccattgtactcgagcctgggcaacagagtgagactccatctcaaaaaaaaaaaaaaaaatagaga

SEQ ID NO: 46341 - DNA, 785 bp, Homo sapiens
gtctgcgcagaaaccactctggaaaacttctgtactcttagtctctagaggcatttccaatccgcctccccaaatccaggtaagagcctcgttacttcctcctggactggggcaggagctcctgattgcgatgcaggcgcggctctgcctcctttcatttccgtcctgcagggaatacagcaggattttccaacactcgaccccagcccgatgcttccctggcttgaggccttctgggcgccttgctgcttacacttttaagcccaggctcctaagcctgagctccagaacgcctccccatctgtgccgtctttgcaggtccttccccatgcacccagccagctttctcttctctgcgtttctctgcctatctgtcttctcctacctttcgctgtcctgtctaaatcccccttcctccaggaagcctttcatgatcctgaggagggctgtcagatatagcaggtaagaaatacagaccatcagccgggtgcggtggctcacgcttgtaatcccagcactttgggaggctgaggcgggcagatcacaaggtcaggagtttgagaccagcctgaccaacatggtgaaaycccatctctactaaaaatacaaaaaatgagcctggcatggtggcgcacgcctgtaatcccagctactcaggaggctgaggcaggagaatcacctggacccgggaggcggaggttgcagtgagctgagatcacgccattgtactcgagcctgggcaacagagtgagactccatctcaaaaaaaaaaaaaaaaatagaga

SEQ ID NO: 46342 - DNA, 645 bp, Homo sapiens
aactttctatagtaaaattcatttgatattgcaagattaaagttatctagtccttaccctccctttccccaactaacaattgtttggataaaacacaatttcttaggtatgcaacttttacattattaaactgaacatataaaaataattacctaaaatttttggtacaaaacgcaatactttacaaagaaaaagcattacactttaagaaatggcttgaactttactacttttttaggagtaaaggaagtctttaaaccaagtgagtcatattttatgttttattccttagaaaaacaattcttgatgttgcacaaaaacatctcatttgccatttttatttcctgttcttccaacatatttttattttttacattttagaaataaaatgtcaacctctgakgttacttgaataataaaatagaaaccattatattaaagacaaagaacacttaaatgccgattgttaagtgcaataatccaaaatgaaaaggctatatgtctccaaccatatgacattctgaaagaggtgaactctggagacagtaaacagatcaactatttcaagtgttttggaaaagggatagaggacagggcatttttagggcagtgaaactactctgtatgatactgtaatgttagatg

SEQ ID NO: 46343 - DNA, 538 bp, Homo sapiens
tgtagttccgcaggccattattgagttcactattaatcatttgagtgttttcatctatattttggtaaaattcctaattgtatatgcgtatcttgagcagcctttaattgtcattgaaagaataattgaagagaaagaattatactattgaaagaatagtagaaaaattatcttcaaaaggcttcatatatccactatgtgcagagaaaccattttcatgaagactttgtgttcatgataagaaaattcttcatttatattyattttttgcaacttatttctttcttgtacctaatttcccaagaagttatttaggtaacatacatgttatacatacatatactcacacacacacaaatgttgtacatgtgtttttgttaaatcgtgtgataacttaagcagaaaactatataatgcctttctcaaaagaaaaatgtagaagatagaatcaaacttttgtaatattagttgagaagtaaaactgaatataataacattataaataaattggagaaaaagaaatattaaaataagcaca

SEQ ID NO: 46344 - DNA, 538 bp, Homo sapiens
tgtagttccgcaggccattattgagttcactattaatcatttgagtgttttcatctatattttggtaaaattcctaattgtatatgcgtatcttgagcagcctttaattgtcattgaaagaataattgaagagaaagaattatactattgaaagaatagtagaaaaattatcttcaaaaggcttcatatatccactatgtgcagagaaaccattttcatgaagactttgtgttcatgataagaaaattcttcatttatattcwttttttgcaacttatttctttcttgtacctaatttcccaagaagttatttaggtaacatacatgttatacatacatatactcacacacacacaaatgttgtacatgtgtttttgttaaatcgtgtgataacttaagcagaaaactatataatgcctttctcaaaagaaaaatgtagaagatagaatcaaacttttgtaatattagttgagaagtaaaactgaatataataacattataaataaattggagaaaaagaaatattaaaataagcaca

SEQ ID NO: 46345 - DNA, 605 bp, Homo sapiens
caagcacttcattgtggtagctacagaaatctctaagaatggtgaagttttatgacctccagcctcattcttttatactcgtcccttccaaccatgaatttgtgttaagcactatcctctactcacatayctgcttccaacccttgtcaaaatctgctttctgattacacttcatgggtaatggctatgagagcagagcagtgtacacttctttcctagggccactgactctatttagatggaatttatgggaagttcacttagagaagactgttcgagcaaagactgagatgaggcagggctccctggatcccctaacctcccaaaaaatgagcgagcaggtggctattccacctacgcataaggtcagccctgacagcagtcaggctttttttgtgtcctggaaccattttctcagagtgacattgacatatgtccccataaataaattagcaaccccatctcagctgacatggttggcagaaacaagaagctcatgtgccagtgtgtgggttaattcccgtgcccattccactgggaaagatcaagtgtatcaatgtgtgctcatcctgcaagccctgggatgcagaaagcttttcctttct

SEQ ID NO: 46346 - DNA, 2130 bp, Homo sapiens
gttagatgtaagaaacagttcattaacagtgttaggttaacacattaatggatagatcatttattcactcaacgaatcctaacagaatgctcattatgggccaggtcctgctgtgtgtgctggggaaagggcagtaggcaaagcacacacacatccctgccatgatggggtttgcattctacagaagtcaagaaacacacaaaatgaaaaaggaaaagtatagcacattactatagacaaatgctagaaagaaaccgaaagtgggaaagagggagatcgtgtacatgggtgatgtggcaggcatgtggccaaggaagaccctcagagtggaaagactgagaaaagtctaaagagtgagagatctgagatcactggtrtctggagaaagcgtggtctgggtagagagaacacgggtgaagccttggaacagcaacatgtgggatgtgcttgagaaacagcagggagattagtgtggagggagtggagtgaacaatccatatggtggtctgagctgaggtcaaagaagtaaaacagaagaagtcaaatcagtagggtcttaaaggtttatctttgattctcaaagagatgggaaaccaatagaggcttttcagcagagaaagaacttcatatgaattgttgtttgttttttaattcattacattgaaattatgttagagggaggcaaggaaagaagtaaaaagaccaattaggagccaaacttcaattttcctcctctcattctatctcaaacattttactgtgacagtctcaaaacataaaacaaagatgaaataatttcgcatctttatgtccaccacgcagattacatcagaaacatttcactacagtttatcatgcatccattcatccatccagttatcccttcatcccatttccttgatgagactcaaaccaaactccagtcatcaacccattttgttcagataatacagcatacaaccagagttcaactctgccattttttattcaatacaaaatccatattcaaagcaatgcacaaaccttaaaaaaaatttcactgagttttgataataaacacatacctccatataacatataattctatcaaaatataaaatattcatgatcatctcagaaagttcctttatctctcttcccagtgaaagcctgtctttatcctccagagataatcactaacctgatttttccataatagattagttttaccagctatagaatttcatatcaatggagacataaaatatgtattcatttctgtcagctttgtcaatcagtgtgtttttgagatttattaatgtgtttccatgtagtagtaacatggtcctttttattgctaagtaatattccattaaataaatacctcaacttttgtttatccatcatctgataaacacttagggtgttttcagatttttattatgagaaaagtttctaggattttttttttttgagacagggtctcactctgttgcccaggctggactgtagtggcatgaacatggctcacaatagccttcacctcctgatctcaagctatccttccacctcagtctcatgggaccacaggcatgcaccaccacactcagctaaatttttaattttgtagagatgaggtcctgccacattggctaggctggcctcgaactcctgggctcaagcaatcctcttgccttggtctcctgaagtgctgggattacaggcatgagccacaacacttggctaaaaattctatacaataatttttgtggttatatattgtcatttatcttgaattaatatgtggagataaattactaggctatagaaagatctatgcttggtttttatttagtttgcctaatagatattcttatatatcctattgtaaagtattttatttgcccaattccaatggagttgcttggcctttaattattgagtcgtaggagtattcctgaatattagactttacagtaaatatctttaaaaaaatacaatagggacagatttataggtataagctaccactaaagccatcagcagctgctctgctacttcacagtgacagtgaccagaaattttattttaaaacattaaacctgtctttattattttcaatatgcattaatttttctaggataaatggaa

SEQ ID NO: 46347 - DNA, 2130 bp, Homo sapiens
gttagatgtaagaaacagttcattaacagtgttaggttaacacattaatggatagatcatttattcactcaacgaatcctaacagaatgctcattatgggccaggtcctgctgtgtgtgctggggaaagggcagtaggcaaagcacacacacatccctgccatgatggggtttgcattctacagaagtcaagaaacacacaaaatgaaaaaggaaaagtatagcacattactatagacaaatgctagaaagaaaccgaaagtgggaaagagggagatcgtgtacatgggtgatgtggcaggcatgtggccaaggaagaccctcagagtggaaagactgagaaaagtctaaagagtgagagatctgagatcactggtatctggagaaagcgtggtctgggtagagagaacacgggtgaagccttggaacagcaacatgtgggatgtgcttgagaaacagcagggagattrgtgtggagggagtggagtgaacaatccatatggtggtctgagctgaggtcaaagaagtaaaacagaagaagtcaaatcagtagggtcttaaaggtttatctttgattctcaaagagatgggaaaccaatagaggcttttcagcagagaaagaacttcatatgaattgttgtttgttttttaattcattacattgaaattatgttagagggaggcaaggaaagaagtaaaaagaccaattaggagccaaacttcaattttcctcctctcattctatctcaaacattttactgtgacagtctcaaaacataaaacaaagatgaaataatttcgcatctttatgtccaccacgcagattacatcagaaacatttcactacagtttatcatgcatccattcatccatccagttatcccttcatcccatttccttgatgagactcaaaccaaactccagtcatcaacccattttgttcagataatacagcatacaaccagagttcaactctgccattttttattcaatacaaaatccatattcaaagcaatgcacaaaccttaaaaaaaatttcactgagttttgataataaacacatacctccatataacatataattctatcaaaatataaaatattcatgatcatctcagaaagttcctttatctctcttcccagtgaaagcctgtctttatcctccagagataatcactaacctgatttttccataatagattagttttaccagctatagaatttcatatcaatggagacataaaatatgtattcatttctgtcagctttgtcaatcagtgtgtttttgagatttattaatgtgtttccatgtagtagtaacatggtcctttttattgctaagtaatattccattaaataaatacctcaacttttgtttatccatcatctgataaacacttagggtgttttcagatttttattatgagaaaagtttctaggattttttttttttgagacagggtctcactctgttgcccaggctggactgtagtggcatgaacatggctcacaatagccttcacctcctgatctcaagctatccttccacctcagtctcatgggaccacaggcatgcaccaccacactcagctaaatttttaattttgtagagatgaggtcctgccacattggctaggctggcctcgaactcctgggctcaagcaatcctcttgccttggtctcctgaagtgctgggattacaggcatgagccacaacacttggctaaaaattctatacaataatttttgtggttatatattgtcatttatcttgaattaatatgtggagataaattactaggctatagaaagatctatgcttggtttttatttagtttgcctaatagatattcttatatatcctattgtaaagtattttatttgcccaattccaatggagttgcttggcctttaattattgagtcgtaggagtattcctgaatattagactttacagtaaatatctttaaaaaaatacaatagggacagatttataggtataagctaccactaaagccatcagcagctgctctgctacttcacagtgacagtgaccagaaattttattttaaaacattaaacctgtctttattattttcaatatgcattaatttttctaggataaatggaa

SEQ ID NO: 46348 - DNA, 610 bp, Homo sapiens
tgccacctgcctccgaggggcagagaaagtgggagggccgggccagaatccctcccgccaaaactcctgcccggtgcggagagrtgcccggagcccagggcgctgtgcggagcgggtgtaactccccaggcctgccccgccgcctgcctccaccgtcccgcggacgcctttcctccctcccgcggcgtgggagccttcgccgcgctccggaactctgctgctccagcgaagttcccggccggccgctggagctgccggaagcggaagtgctcgttgggggtgcacaaggcgcgttcgagcagcggcgaccgacgcggcgaaggagcgcgccatggagcatgtgacagagggctcctgggagtcgctgcctgtgccgctgcacccgcaggtgctgggcgcgctgcgggagctgggcttcccgtacatgacgccggtgcaggtatcggttccctggcgtgggggagtgaggctgggagaggggcaggcacccgctgcatcggacccacaggaggtgatcggacagatctgagccctggggcgctcatccctccagctggggctcttgccttgtctccagctgcccagactggcggaatgcggagctgcccgg

SEQ ID NO: 46349 - DNA, 610 bp, Homo sapiens
tgccacctgcctccgaggggcagagaaagtgggagggccgggccagaatccctcccgccaaaactcctgcccggtgcggagagaygcccggagcccagggcgctgtgcggagcgggtgtaactccccaggcctgccccgccgcctgcctccaccgtcccgcggacgcctttcctccctcccgcggcgtgggagccttcgccgcgctccggaactctgctgctccagcgaagttcccggccggccgctggagctgccggaagcggaagtgctcgttgggggtgcacaaggcgcgttcgagcagcggcgaccgacgcggcgaaggagcgcgccatggagcatgtgacagagggctcctgggagtcgctgcctgtgccgctgcacccgcaggtgctgggcgcgctgcgggagctgggcttcccgtacatgacgccggtgcaggtatcggttccctggcgtgggggagtgaggctgggagaggggcaggcacccgctgcatcggacccacaggaggtgatcggacagatctgagccctggggcgctcatccctccagctggggctcttgccttgtctccagctgcccagactggcggaatgcggagctgcccgg

SEQ ID NO: 46350 - DNA, 546 bp, Homo sapiens
cttgtaatgatgactgtctttaagamtatctggaatatggacaaaggtagattctgttgggaagtcaaaccaaacacctgtgtaattcttactctttgttttgcaacaaaactgccctatgctggtaagattcaactactgtatgtaaagaagtcttatgataatactgatatcgataaacaaatgtattgggagatagagttaaaacctccttgggacatcatagctatggaaaatgactggcctgagcaggttagataatgcaggccagataatctagctaaccatcactttctatgttaaacagctctgcacaagctaaacataaggtacaaatatcagtagattaaggagaaaaatgaataatcaaattagtgcaagaacaaaaaaatgtataatggtttcacagggcaaactagttgtttctttaaatttacccctacccctctctggcttctcaaaatgttaggcatatttgtgttggtactatgctttatctgttgtacaaatgctacatcaaatgtcaatgctcagacagatatgagc

SEQ ID NO: 46351 - DNA, 607 bp, Homo sapiens
taagcctactccggccaaccttttcaccctctccccgcttttctcccttccctcctttccttattcgctcaattacagacacagtaatcattctcttgctcttctcacactatgaacctcagcacttatgaatttactattcattccttccyattccttatctttactggccaaaatctttgtctgttttatgtctcatccctacacctaaggagttaccccttcaaggaggcccttccttaccatgaaaccacagtaccactcctcaatcaccctgcacttcactgttctaactttatttcttcacaccacatatcactatctacaattatcttgtctttttctttgtctactatgtgactgtctccccagaactagaaactaagctccacaaaagagaaagtttgtctgtctttttcaccaatgtactcccaggtctaaaaacattgcctggtacatctaccaaatcctaagacatggggcctcaaaacattgcctggccttcaaaaatattggtctaaaaagtgaataaatttttcttaacatcaggaactgaaagatgatgtttgacattactactatttaatatgttctggaagtactatgc

SEQ ID NO: 46352 - DNA, 521 bp, Homo sapiens
aattcaatctgatacaaaaaagtcagaggcaagacaaaaatagtttataaatataaaataaggaatcaaatctaagcttgtgcatgaataagataaaaaaattatcaaattcatgttcagtctggtaggagtgacctagacaaaacatgaggaagaaagagggactatctcagtaattttatgggattattatgacttttaaaaatatttgatcttttgaacatctcacaggataaaatattgaattaattagaatatttagttgactgaaacacccattttcctactcattttaaaaaactgaattttaatgtrtataagtatagattaatgaacgtatacataaacagagaaagagagagagggaaaaaaacattctctgcatattgtttcttcttgcaagaatgttaagaacaaaggtttttctttatgtctctctccaattaagttaaagatggtggagctgcatactagttgctattataatagcttttgcataacattttattcacagttgggaa

SEQ ID NO: 46353 - DNA, 527 bp, Homo sapiens
agaaagtggcaaatttagctacaggatattcaaggcatggagggtggagagtaaaggagacacggcacaaattgtaaaygacacccttcagcacagtcatgtcttttgcattttatcccttattttgaaataatctcaaactatagaaaattttcaagtaacttaaagaagattctgttttgttcctaagttatttgaaagttgcctgtgctctatcactcctggatacattagtgtatatttcttacaaacgaagactttctccttcgtaaccacaacacaaccaataacatcaggaaaatggcatccctacatcactctcacccaatcttcaaagcccactgaagcttcaccagttgtcttgataatatcctttacaaaaagtatcattttaaaatcatatgttgcatgtagctgtcatgtcaccttcatctccttcaatctggaacagttcctccatctttacttgactttcataactttaaaagattatagagcagtcattgtgtaaaatggttctcagtttg

SEQ ID NO: 46354 - DNA, 580 bp, Homo sapiens
ctgcagagggaataagctcaatacctatctctacagagttaataatttcatataaggataggacaagtagacacacagtaggctacaggtgtcattaagaaaaacaaaatctcaggccaggcatggtggctcacgcttgtaggcccagcaccttgggaggctgaggcagacggatcgcctgaggtygggagtttgagaccagcctgaccaacgtggagaaaccccgtctctactaaaaatacaaaattagccaggcgtggtggtgcatgcctgtaatctcagctacttgggaggctgaggcaggagaattgcttgaacttggaaggcagaggctgcagtgagccaagatcgagattctaccattgcactccagcctgggcaccaaaagcaaaactccctctccaaaaaagaaaaacaaaatgtcacaaaagtatcaaaagtaaacacatttttttaaagaacacctagctacaaattgtaatttaagtcagcatatgcacagccatcaatcctaaatattatttgctaggccttcaaatacgacttaaagttagctgaactgccctgccaaaatgtctca

SEQ ID NO: 46355 - DNA, 580 bp, Homo sapiens
ctgcagagggaataagctcaatacctatctctacagagttaataatttcatataaggataggacaagtagacacacagtaggctacaggtgtcattaagaaaaacaaaatctcaggccaggcatggtggctcacgcttgtaggcccagcaccttgggaggctgaggcagacggatcgcctgaggttgggagtttgagaccagcctgaccaacgtggagaaaccccgtctctactaaaaatacaaaattagccaggcgtggtggtgcatgcctgtaatctcagctacttgggaggctgaggcaggagaattgcttgaacttggraggcagaggctgcagtgagccaagatcgagattctaccattgcactccagcctgggcaccaaaagcaaaactccctctccaaaaaagaaaaacaaaatgtcacaaaagtatcaaaagtaaacacatttttttaaagaacacctagctacaaattgtaatttaagtcagcatatgcacagccatcaatcctaaatattatttgctaggccttcaaatacgacttaaagttagctgaactgccctgccaaaatgtctca

SEQ ID NO: 46356 - DNA, 580 bp, Homo sapiens
ctgcagagggaataagctcaatacctatctctacagagttaataatttcatataaggataggacaagtagacacacagtaggctacaggtgtcattaagaaaaacaaaatctcaggccaggcatggtggctcacgcttgtaggcccagcaccttgggaggctgaggcagacggatcgcctgaggttgggagtttgagaccagcctgaccaacgtggagaaaccccgtctctactaaaaatacaaaattagccaggcgtggtggtgcatgcctgtaatctcagctacttgggaggctgaggcaggagaattgcttgaacttggaaggcagaggytgcagtgagccaagatcgagattctaccattgcactccagcctgggcaccaaaagcaaaactccctctccaaaaaagaaaaacaaaatgtcacaaaagtatcaaaagtaaacacatttttttaaagaacacctagctacaaattgtaatttaagtcagcatatgcacagccatcaatcctaaatattatttgctaggccttcaaatacgacttaaagttagctgaactgccctgccaaaatgtctca

SEQ ID NO: 46357 - DNA, 580 bp, Homo sapiens
ctgcagagggaataagctcaatacctatctctacagagttaataatttcatataaggataggacaagtagacacacagtaggctacaggtgtcattaagaaaaacaaaatctcaggccaggcatggtggctcacgcttgtaggcccagcaccttgggaggctgaggcagacggatcgcctgaggttgggagtttgagaccagcctgaccaacgtggagaaaccccgtctctactaaaaatacaaaattagccaggcgtggtggtgcatgcctgtaatctcagctacttgggaggctgaggcaggagaattgcttgaacttggaaggcagaggctgcagtgagccaagatcgagattctaccattgcactccagcctgggcaccaaaagcaaaactccytctccaaaaaagaaaaacaaaatgtcacaaaagtatcaaaagtaaacacatttttttaaagaacacctagctacaaattgtaatttaagtcagcatatgcacagccatcaatcctaaatattatttgctaggccttcaaatacgacttaaagttagctgaactgccctgccaaaatgtctca

SEQ ID NO: 46358 - DNA, 580 bp, Homo sapiens
ctgcagagggaataagctcaatacctatctctacagagttaataatttcatataaggataggacaagtagacacacagtaggctacaggtgtcattaagaaaaacaaaatctcaggccaggcatggtggctcacgcttgtaggcccagcaccttgggaggctgaggcagacggatcgcctgaggttgggagtttgagaccagcctgaccaacgtggagaaaccccgtctctactaaaaatacaaaattagccaggcgtggtggtgcatgcctgtaatctcagctacttgggaggctgaggcaggagaattgcttgaacttggaaggcagaggctgcagtgagccaagatcgagattctaccattgcactccagcctgggcaccaaaagcaaaactccctctccaaaaaagaaaaacaaaatgtcacaaaagtatcaaaagtaaacacatttttttaaagaacacctagctacaaattgtaatttaagtcagcatatgcacagccatcaatcctaaatattatttgctaggccttcaaataygacttaaagttagctgaactgccctgccaaaatgtctca

SEQ ID NO: 46359 - DNA, 558 bp, Homo sapiens
tcaattaaaaccattaacacagccacataactttttcttaacctcctcactagcaatcctttttatagcctggttcccaaagcaggtcaatttatatcataaaactcaaaaattacagcttatagcataaaatgacctcccatgatataatgtggcaaaataagcgaattaataccagaggtagtaaatgtctgggcactaatgtgacttgagtatgaaatatgtttccatcgcattaggagtaaggatycaaaatgagagggggatcggtgacctggcaccacctacatggagctagctatgctaagtcctggtttagaagatccacttggtatgaatgcaaccacttaggtatttttgattcttctcatcatttagtcaacaagtcgtttttttgtttgtttgtttgtttgttttttgttgttgttgttgttgtgtgtgggggtttttttgtgtgtttttttgagatggagtctagctgtcgtccaggctggagtacagtggcgcgatctcagctcactgcaacctccgcctcctgggttcaagcgattctcctgt

SEQ ID NO: 46360 - DNA, 558 bp, Homo sapiens
tcaattaaaaccattaacacagccacataactttttcttaacctcctcactagcaatcctttttatagcctggttcccaaagcaggtcaatttatatcataaaactcaaaaattacagcttatagcataaaatgacctcccatgatataatgtggcaaaataagcgaattaataccagaggtagtaaatgtctgggcactaatgtgacttgagtatgaaatatgtttccatcgcattaggagtaaggatccaaaatgagagggggatcggtgacctggcaccacctacatggagctagctatgctaagtcctggtttagaagatccamttggtatgaatgcaaccacttaggtatttttgattcttctcatcatttagtcaacaagtcgtttttttgtttgtttgtttgtttgttttttgttgttgttgttgttgtgtgtgggggtttttttgtgtgtttttttgagatggagtctagctgtcgtccaggctggagtacagtggcgcgatctcagctcactgcaacctccgcctcctgggttcaagcgattctcctgt

SEQ ID NO: 46361 - DNA, 558 bp, Homo sapiens
tcaattaaaaccattaacacagccacataactttttcttaacctcctcactagcaatcctttttatagcctggttcccaaagcaggtcaatttatatcataaaactcaaaaattacagcttatagcataaaatgacctcccatgatataatgtggcaaaataagcgaattaataccagaggtagtaaatgtctgggcactaatgtgacttgagtatgaaatatgtttccatcgcattaggagtaaggatccaaaatgagagggggatcggtgacctggcaccacctacatggagctagctatgctaagtcctggtttagaagatccacttggtatgaatgcaaccacttaggtatttttgattcttctcatcatttagtcaacaagtcgtttttttgtttgtttgtttgtttgttttttgttgttgttgttgttgtgtgtgggggtttttttgtgtgtttttttgagatggagtctagctgtcgtccaggctggagtacagtggcrcgatctcagctcactgcaacctccgcctcctgggttcaagcgattctcctgt

SEQ ID NO: 46362 - DNA, 580 bp, Homo sapiens
gatccttgccaaccccctggttctattgctctagagagaagtatgtggttgcaacccatctgccacctactaattgggagatgtagacaaatcacccaacttctgtgagtttcagctactcctttgttaaatgtagaaattaatttttctggtggttaattgaatcaaatcagctctgcaggtccatctttgattcataaggaaaccaatygtgtgatttcaaggatagtgaagatttactgattgattgatacctgctgattaatatctgacattccacctggagggattcattcttgaaccttaagaatttatttccaattaaaatatgaatattcatggaagaagtaatgaattaaacataatgaatcatttattcctaatatgaataattttcttaatttcaacacagcaccatgtgatacagaaaataaatttgtataaaagagaagggaaagcatactggaggcttgagaagaaaaagatcaacttttatttctatttctaaatttcatctaagtttagccctgcttataagtcagataattctgattgttttattgcttagtcttacattctg

SEQ ID NO: 46363 - DNA, 523 bp, Homo sapiens
gacttctgagcataamacagacattgtagtgggaggcttataaatatttgctgctttattgttattgattattaacagagggatttagctgaaggactaggggcaatgaatctggatttcctgctaaaactggtccaggcaagccgaagacaaggtcaagaacaaagcctcattgaaaacagggctcagaggagcttgactaaaatgtggccaaggagagcatctttgtcacccagactctctgtgataattaatcatgacaagcagctgttgtgaaatctttatcactcaatttatttcaattcctctgcaaataatcttaaaacagtctcattttccaagagggaaaaaagatggcagtccaatatttcaggctaatgacctgcacgctctaccaagaaaacaggaaaacatgcctggagttggctggtgcccaggtcaagcggatggcacagcccaagcagcggtggccttggacctgactgggctggacaattgtccatgttcagaagttcttcaggcc

SEQ ID NO: 46364 - DNA, 1313 bp, Homo sapiens
gagtgggaggggggaaggcagccaaccctgcacaacgttgctggctctggtgtggagtgtgaactttgcctgctctgtaaactcagtgttcatcaagggaagagtggttgatcaggtgagagagaatgctggcccctactcttatggtggctgtggaattggagagaagtggatggatgccagaaatatgtaggcaggttgaataaacaagaggaagtaaattatttcctcatatattgagggtgagtatataaggaaatgtcaaggatgactcccagatttgtgttaagagcacctgttggggtgattgtagtatttattgataagaaacactcggaggagggtagagttgtttggcttgaatggagaatcatgagctcggtttgggacatattgaattttatctgtctgttaaataaccttctggagatgccaaataagcaatttgatacttgaatccagaactcagaaaactgggctggggatattctcttggaagtcgctagcatataaatggtgacagagccacgggattagacaaaatcaacaaaaaagagaataacaatgccgtagggttcaagacccaagctttgggttccccagttaatagaattaatagaggtgaggatgagaagtcgaggggaaacaggagaaaagagaaagaaaaacaatagagttggaggaaaatccagggaaggttgtgtcctagaggccgcatgcatagaggtttggaggaaagctgctctcaaatgctgttgatggatctgaacatgtccattggacttggtaatagcagggacattaatgacatcagggagactgaggtggtggaatggtggaactgaaagggtaaagaggaataatttttaagggagaagtggaacagagaattctgaatctgggaatattcatttaactcagacaattcaaagcagaatattttttatgtaatatcataagtactcatttaacaaaaaaagagcactttaaacttctaggcttctagactttatcatatttcttcactttcctgctgatctcctcaaagaatagtctattaccatcctgcatatttggtctggagaggaagtctaaatagatttccagattcactattggtataatccccaagtactttttcataatttggtatctgaccagctcttctgctgatttgatggaacccttttatggtgaactgcttaaaattctttatgtaattggaamttgtctttatgaataatacaaacttctccagtcaatccagttgattcagtagtgctaactctccccaaaatgtcctccttcctctt

SEQ ID NO: 46365 - DNA, 588 bp, Homo sapiens
gaatcatattcatgtaggaagctgagaagcragacactgaggccacacagaccattcattgcttcacacggcaggagccagtaaccaaatgggaggcagctgtggagtgaggggcatctctgctgacgtgtgtgtgcccagctcagaacgttagacctggtatgaagtgggatggaatggcacacatgatagaccatttcagtccaccagactctgttacaaatgacatatctgagcacggcccagccaaatttctatctcggagactgttacaatgcggtagaaagcagactctggttacaaatgcctcctatgataaatgctatgtggcttgggggaactcattcactcttgtggaaacttagttttcttttcttttctttttatactttaagttctagggtacatgtgcacaatgtgcaggtttgttacatatgtatacatgtgccatgttggtgtgctacacccattaattcgtcatttacactaggtatatctcctaatgctatccctcccccctcccccaccccatgacaggccccggtgtgtgatgttccccttcctgtgtccaagtgttctcattgttca

SEQ ID NO: 46366 - DNA, 545 bp, Homo sapiens
gaatatttttctcagcatgaactgagatgatataaattgtggtaaattacatgaatggatttcctgttactaaaccatttttggatttctgggataaattctacttggtcatgatgtaattttaaaaatgcatctctatgcatgtgatttgctaatgctttaaaatcaatgttcataagagagatgggtctatatttttcttttcttgtgttgttttactgtgaatatatttgtctcctaaaacgagttaatagctttctacatttttctgtgatgtgagatacatccatttcttcaccatttggtagaactcacttgtaaagctgtttgacctagtgtcttttcttcaggggtagatatttgacttctttttcagtatattctatgattatttttctattcaggttttctactccttgyggtaattttaataacgtatgttttcccccaactcatccatttctcctattttttaaagaagttgtatatagcattctcttatctgtttttactgccttaaatatctgcaattgtatttctttcct

SEQ ID NO: 46367 - DNA, 585 bp, Homo sapiens
ctcctggaatttttttttaaatgacagcttcattgagatataattcacacatcatacaattcacacatttaaagtgtacaaatcaatgttttttgtatattcacaaatatatgcaaccatcactacagtcaatttgaraacgtttttatcacctcaaaaagaaacctcatgccctttagctgtcacccactatcctgcaccctccagccctaagcaaccactaatctacctcagatctatatggatttgcctactttaaccatttcatataaatggaatcatgtaatgtggtctttcgtgaccgggttctttcataatgttttcaaggttcataatggatgaaccttattttcaaggtttataatggtgtcattatggctgaaccttgaaatcattatgacaagtgaaagaagctagtcacaaaagaccgtggtagcaaggttcattcatgctaccatgttgtagcatctatcagtgcttcattttttttcattcctttttatggtcaaatagtattccattgtatagatataacacatttcatttatctttggctactatgaatgatactgttataaacattca

SEQ ID NO: 46368 - DNA, 585 bp, Homo sapiens
ctcctggaatttttttttaaatgacagcttcattgagatataattcacacatcatacaattcacacatttaaagtgtacaaatcaatgttttttgtatattcacaaatatatgcaaccatcactacagtcaatttgagaacgtttttatcacctcaaaaagaaacctcatgccctttagctgtcacccactatcctgcaccctccagccctaagcaaccactaatctacctcagatctatatrgatttgcctactttaaccatttcatataaatggaatcatgtaatgtggtctttcgtgaccgggttctttcataatgttttcaaggttcataatggatgaaccttattttcaaggtttataatggtgtcattatggctgaaccttgaaatcattatgacaagtgaaagaagctagtcacaaaagaccgtggtagcaaggttcattcatgctaccatgttgtagcatctatcagtgcttcattttttttcattcctttttatggtcaaatagtattccattgtatagatataacacatttcatttatctttggctactatgaatgatactgttataaacattca

SEQ ID NO: 46369 - DNA, 546 bp, Homo sapiens
cctgcccccagtgctgaccatcactggccccacctcattgcttctgtattctgcatcatcattgtcatcaccatcacctgcttccgtttggcacctacacatacgctgctcccacaacagacttcttccctgtccctggggaatcctatttcctttacagcaggggttctcaactccccaaggaacagtaccagtttgtggcctgttaggaactgagccacacggcagaaggtgagtggcgggtgagcaagcgaagcttcatctgtatttacagccactccccaccactcgcattactacctgagctcttcctcctgtcaggtatccagcggcattagattctcacaggagcacaaaccctattgtgaactgcacatgtaagggatccyggttgcatgctccttatgaggatctaatgtctgatatctgtcactgtctcccatcaccccctgatgggaccatctagttgcaggaaaacaagctcagggctcccactgattctacatgatggtgagttgtataattgtttcatcatatattacaatg

SEQ ID NO: 46370 - DNA, 546 bp, Homo sapiens
cctgcccccagtgctgaccatcactggccccacctcattgcttctgtattctgcatcatcattgtcatcaccatcacctgcttccgtttggcacctacacatacgctgctcccacaacagacttcttccctgtccctggggaatcctatttcctttacagcaggggttctcaactccccaaggaacagtaccagtttgtggcctgttaggaactgagccacacggcagaaggtgagtggcgggtgagcaagcgaagcttcatctgtatttacagccactccccaccactcgcattactacctgagctcttcctcctgtcaggtatccagcggcattagattctcacaggagcacaaaccctattgtgaactgcacatgtaagggatcccggttgcatgctccttatgaggatctaatgyctgatatctgtcactgtctcccatcaccccctgatgggaccatctagttgcaggaaaacaagctcagggctcccactgattctacatgatggtgagttgtataattgtttcatcatatattacaatg

SEQ ID NO: 46371 - DNA, 526 bp, Homo sapiens
gctgcaacccctcaggctcaatttctaccttgtgtgacaaagggaatgtcttgccctgtagtagagggggatcacctcatacagtcacagcccactgcacccctgaaatgctatagaacaatgggcaatcaatgaggaaggtgttgggccaacgaaaggatagctgtccctaacaatgacacaggaaatggtcatgataaattaaaagggaaagcaggctacacatcagtatgtacaatataacccaagcttagtttcaaacaattaaaaattaaaaatctgagaggttgcagctctcctgtgctggtatgataaaatttggtacaatttctctgtcacyatttctttgtctatctccaactctttttgtagctgaattccatcatttttggctcttctgagttttccacattttctaagcaaatgtataattttagttgctaaacaaatgttaaaatgtagaaacactgtgcacagagagactgaggaatagccaactgactgcagttcttgtttatttgggttg

SEQ ID NO: 46372 - DNA, 553 bp, Homo sapiens
tccagccctgcaggagtactcagccccaggggctagctcagtttacccttcttcctctttccctaacaatatacctggcatcagactgcatctgaaacatgggtcaacacatgtgcatgactgagcatgtttcctcaggcctgcagctccgctgccagagaagctttttagcagctaaggcccagaggtaggctgggaaagtgggctgggtcagaggcaagaagcttccatggctagcttcctaagtatttttttttgaccctcaagactgtgatatctataaggttctcttgcctgaatttataatccccaaacctcaatttactctctcctcatgtatccctcaaatggttcccctctgtagtactttcccagtattacagagcagaggttcaccacccacgagccttcctcacttttagttttacaatgaacagtatggagtttttctgctgrcagttaagacttcagaatcagaatcaatcttacatacatttaactctattttacagatgaggaaatagaaatccagagaggctaaatgacttaatca

SEQ ID NO: 46373 - DNA, 575 bp, Homo sapiens
ccaccacacccagccaccggagttttctttaaaagaacactgtagagtttttttttttttttagtgttgtaataaatgrgacaagatacaaagcagttagcatagtacctacctcacaacaaaagtgctcaatatatgataaccataataaatacaacacctcaaagtcttccctaacattcccagggagaatactatttatttgtgcttccaaatattatgtttatacttctatttgagcatttgtcacaaattatattatttgcccacataaatgtgcattcttgggagctagaatggtgccctatgcaatgttttattgtcagtgcctagcaagtgcccatcaatttgtaagtactcaatatttttttgatgaatgaattatagacaataagatatagggtggcgttctccaattttaacatgcaagcttttagagtttctttttttttgagacggagtctcgctctatcgcccaggctggagtgtagaggcgcaatcttggctcactgcaacctccgcctcccagattcaagcaattctcctgcctcagcctcctgagtagctgggattac

SEQ ID NO: 46374 - DNA, 1769 bp, Homo sapiens
tgcatataacgacaacataacttaatctcagtttctttttagtaagtaaaagttgtcagaactgaaagtctaaattctgtataattcaatttatgtgacatttataaaagataaaaccactgggacagagaacaaaatagtggttgcagaggttgaaactgtgatgaggggctgactacaaagaaacagcacaaaatttctgtattgtgttggtagacacgcaactctctcgcaacccacaaaatggtacaccacaaagactgaattttgaagtaggtcaatataaaatctaaactaagaaaagatgtctgcaatatttttaytcagatttcctgtcccagccttcgtacaggtgttgtgttaaacctcttttatttattgtttctggatgaggagtcttatgatagatgatacattacatatattcccaagaagaaaaattgggataaggaaaactaattaaaattgatgataccccctctgtgcacttgagtacaatattatacatttgcatccatcatgccatttaactcttatatcaaccttatgaaggaagttgttaacatatagacacttatcctacagaaagaacaggaaacccaggagggtttggagggctaacaacgtagttgtctgattcagcattttgtgcaatctccattatattacttttataaaatttattttttatttatttttaaattattattattattgatattagtatttttggtacagatgggatcttactatgtcattcagattggtctcaaactcttgcctcaagcaatcctcttgcctcagcctctcaaagtactgggattataggtgcgagcctccacgcccagccatgatactattatagggcagatagttattgttaattatgttttttgtgattagtagatgaaggatacagaagcaggtgaattatttcatttatctgttgttcctttctctcccaaggtgatccactgtgtgatacataagacaagtgtccttcataagaaaattgtaagtgtctattgatggaaatgcttctctttagggagttctttttcttctctggagctttctaggtaggtgacagcagtatacctagtgccacattgtaactaaagtgacacacattaacaaaataatagtgctgcctttatatgtttcttctaatgttccagagttatcaattgtataatcatcaaagagttcataaaattatttttctgtgaagaacaaagctgatcttacccctgttttttgaacatgtgttgacaggtacacaggaaagtggaaaatatttcttagagaaaatctgagtcattaagttgtccagataatccattcactttgtaagctgtacatctcacattattattagtttagtatgtgctgaacactgaataaaaacatttctttgaaactgcgtgagtacaatgtttatgagataatgcacctctgtcaacatggactcaagtccattttgtgccatgtgtgtaggtggaaaactgggttaggaatgagggaaggcactgttagcatcagggcctgtgagcagagaatagaaatacgtatgagtcaaaaacagaaactttcagacagggctaaaacaaaatattacaaatcttaaaggacacactaagtagtctagaatgaaagaagcaagaactcagataatcatgaaaattgaaaagggaggcaggaggcaccatgaggcatcagcatcccggaagcaatggttgacacaacattcagcaatgaccttcttaatg

SEQ ID NO: 46375 - DNA, 1769 bp, Homo sapiens
tgcatataacgacaacataacttaatctcagtttctttttagtaagtaaaagttgtcagaactgaaagtctaaattctgtataattcaatttatgtgacatttataaaagataaaaccactgggacagagaacaaaatagtggttgcagaggttgaaactgtgatgaggggctgactacaaagaaacagcacaaaatttctgtattgtgttggtagacacgcaactctctcgcaacccacaaaatggtacaccacaaagactgaattttgaagtaggtcaatataaaatctaaactaagaaaagatgtctgcaatatttttactcagatttcctgtcccagccttcgtacaggtgttgtgttaaacctcttttatttattgtttctggatgaggagtcttatgatagatgatacattacatatattcccaagaagaaaaattgggataaggaaaactaattaaaattgatgataccccctctgtgcacttgagtacaatattatacatttgcatccatcatgccatttaactcttatatcaaccttatgaaggaagttgttaacatatagacacttatcctacagaaagaacaggaaacccaggagggtttggagggctaacaacgtagttgtctgattcagcattttgtgcaatctccattatattacttttataaaatttattttttatttatttttaaattattattattattgatattagtatttttggtacagatgggatcttactatgtcattcagattggtctcaaactcttgcctcaagcaatcctcttgcctcagcctctcaaagtactgggattataggtgcgagcctccacgcccagccatgatactattatagggcagatagttattgttaattatgttttttgtgattagtagatgaaggatacagaagcaggtgaattatttcatttatctgttgttcctttctctcccaaggtgatccactgtgtgatacataagacaagtgtccttcataagaaaattgtaagtgtctattgatggaaatgcttctctttagggagttctttttcttctctggagctttctaggtaggtgacagcagtatacctagtgccacattgtaactaaagtgacacacattaacaaaataatagtgctgcctttatatgtttcttctaatgttccagagttatcaattgtataatcatcaaagagttcataaaattatttttctgtgaagaacaaagctgatcttacccctgttttttgaacatgtgttgacaggtacacaggaaagtggaaaatatttcttagagaaaatctgagtcattaagttgtccagataatccattcactttgtaagctgtacatctcacattattattagtttagtatgtgctgaacactgaataaaaacatttctttgaaactgcktgagtacaatgtttatgagataatgcacctctgtcaacatggactcaagtccattttgtgccatgtgtgtaggtggaaaactgggttaggaatgagggaaggcactgttagcatcagggcctgtgagcagagaatagaaatacgtatgagtcaaaaacagaaactttcagacagggctaaaacaaaatattacaaatcttaaaggacacactaagtagtctagaatgaaagaagcaagaactcagataatcatgaaaattgaaaagggaggcaggaggcaccatgaggcatcagcatcccggaagcaatggttgacacaacattcagcaatgaccttcttaatg

SEQ ID NO: 46376 - DNA, 586 bp, Homo sapiens
cctgttagttcaatgtcttctctatgacccaccatttcttggatttatgataatataagccaataatagaaaactttggcactattttctaataatggagaatcattcaggggtaatctaaacactaaatgtgtgtgtctgtgtgtgtgtgtgtgtttatttaaattcctacataattaactttaggggagagctcttatatagataccttggttatgatagagttgaagaagtgtggccataacrtagtctggaatcacatatgtgctttgacgttttctagctgtggaactttgggcaagccactaacctttctaagcttcagtgtccacactggtaagatgaggatatgaagcggacttccctcacagggtggttgtaaggactagagataatcctcataaaatagttagaaaagtgcctagtacacagtaagcattctgcaaatgtggctatctctagtagttgcatatgctaacatctgttacactattttgtgccatagatttttgttatagtttaaaaatatacaacaggcaatttatttagactacctaaaatcttgggcagaaagtcaccatagaac

SEQ ID NO: 46377 - DNA, 641 bp, Homo sapiens
atgcgaacctatatggtataccaacttttcaggccaacttttcatacacatgggttctgaggggcccatggtgggacttgagaatgcacaggttttggtaaatatggggctcctgaaaccaatccccttcgtacactggggaatgactactatgtgcaacaactactcatcaaatttagtgatgtaaaacaataaacaataaactatgggtcagaggggcctgatctgggaagactcaaagttcyggtggctctggtgtgcattttaaacacaacttccaaaattggactaaaatggcaaattgaacacctgctctagagtcccaccagctacaaaagctggggctggaggatttacttccaaaattacttcttttttcatatatgtatctgacatctggcctggaatggccaaaagaagtgctcagttaggactgtaaaccagaacatctaccaatggcctctctacctggagccatgcaacaccattcgttcatgctacactatactgatttcaagtcattaaggatagcccacactcaggtggaaggaaatcagattctattcttggtaacaaaaccacactacagaaaagcatgaagaatgggagataattttgtaaccttctttgtaaaataaaat

SEQ ID NO: 46378 - DNA, 555 bp, Homo sapiens
tgttattttttgaattatgtttcagaagctggtsttgtgctttctggtcttggaagttgttgaaatctgactctttctcttgagggagagttttacaacttcttctgagaaaagtccctcatcgctgctacttgatataagtgatgtgctttccttcctgcatcataagacttttctcttggtcgtctctagttcttgaggtccaatttctaaatctctccttccttcatttttagggtcccgtcagtcagccatcctgtatataaggtccatattttgtctattgaacactctttctccattctttgcccttaaaaaccccgagtgttctgggtaatttggcacagtagtaaacagtccttcactttccttttcgagttaactttcctttagagttttcataaaggagtcacatgctagtccactgagccctcataacttcaagaaatagtaattaatccttcttacctgtaatcttaaatttcttcttgttttgtttgagctgaaaaaaagaatacatacctacttctcctcctgatagtagccatcaatgga

SEQ ID NO: 46379 - DNA, 555 bp, Homo sapiens
tgttattttttgaattatgtttcagaagctggtcttgtgctttctggtcttggaagttgttgaaatctgactctttctcttgagggagagttttacaacttcttctgagaaaagtccctcatcgctgctacttgatataagtgatgtgctttccttcctgcatcataagacttttctcttggtcgtctctagttcttgaggtccaatttctaaatctctccttccttcatttttagggtcccgtcagtcagccatcctgtatataaggtccatattttgtctattgaacactctttctccattctttgcccttaaaaaccccgagtgttctgggtaatttggcacagtagtaaacagtccttcactttccttttcgagttaactttcctttagagttttcataaaggagtcacatgctagtccactgagccctcataacttcaagaaatagtaattaatccttcttacctgtaatcttaaatttcttcttgttttrtttgagctgaaaaaaagaatacatacctacttctcctcctgatagtagccatcaatgga

SEQ ID NO: 46380 - DNA, 555 bp, Homo sapiens
tgttattttttgaattatgtttcagaagctggtcttgtgctttctggtcttggaagttgttgaaatctgactctttctcttgagggagagttttacaacttcttctgagaaaagtccctcatcgctgctacttgatataagtgatgtgctttccttcctgcatcataagacttttctcttggtcgtctctagttcttgaggtccaatttctaaatctctccttccttcatttttagggtcccgtcagtcagccatcctgtatataaggtccatattttgtctattgaacactctttctccattctttgcccttaaaaaccccgagtgttctgggtaatttggcacagtagtaaacagtccttcactttccttttcgagttaactttcctttagagttttcataaaggagtcacatgctagtccactgagccctcataacttcaagaaatagtaattaatccttcttacctgtaatcttaaatttcttcttgttttgtttgagctgaaaaaaagaatacatacctacttctyctcctgatagtagccatcaatgga

SEQ ID NO: 46381 - DNA, 595 bp, Homo sapiens
ttatctcagctccttccccagcagaataacacaaaagaaaactaaacatgcttatgctacagcactacaaatatttctctactggctcccattttctacagggataaattgacttcagttagtcattatgatcagtatgctatatagtatggcctctttgaagattcttttatcttttactgcatcaacacagcrttttaaccatgaggaataatgcactttaagattcatcagccttgtattagtaaactttcaggctggctgagaactttacatggattctctcctgaacccaggagctgtccctcagatgaatcctggtccgtggtgcattccctcagtggtaggttttattgtgagtccggctctcctctttgataggtcctgtgtctcctggaaagcccctactccaataccccacatcccacccacccagccctgtcctatatttccatacccacttgcacattctggatctggattctccctattttagaagagtcatacaaatggcatcatcacagcagaggaatggcgtagtccttgaatggcagcatagggcccctgctgaaaatagtgatggtatcgcggcatg

SEQ ID NO: 46382 - DNA, 595 bp, Homo sapiens
ttatctcagctccttccccagcagaataacacaaaagaaaactaaacatgcttatgctacagcactacaaatatttctctactggctcccattttctacagggataaattgacttcagttagtcattatgatcagtatgctatatagtatggcctctttgaagattcttttatcttttactgcatcaacacagcgttttaaccatgaggaataatgcactttaagattcatcagccttgtattagtaaactttcaggctggctgagaactttacatggattctctcctgaacccargagctgtccctcagatgaatcctggtccgtggtgcattccctcagtggtaggttttattgtgagtccggctctcctctttgataggtcctgtgtctcctggaaagcccctactccaataccccacatcccacccacccagccctgtcctatatttccatacccacttgcacattctggatctggattctccctattttagaagagtcatacaaatggcatcatcacagcagaggaatggcgtagtccttgaatggcagcatagggcccctgctgaaaatagtgatggtatcgcggcatg

SEQ ID NO: 46383 - DNA, 595 bp, Homo sapiens
ttatctcagctccttccccagcagaataacacaaaagaaaactaaacatgcttatgctacagcactacaaatatttctctactggctcccattttctacagggataaattgacttcagttagtcattatgatcagtatgctatatagtatggcctctttgaagattcttttatcttttactgcatcaacacagcgttttaaccatgaggaataatgcactttaagattcatcagccttgtattagtaaactttcaggctggctgagaactttacatggattctctcctgaacccagragctgtccctcagatgaatcctggtccgtggtgcattccctcagtggtaggttttattgtgagtccggctctcctctttgataggtcctgtgtctcctggaaagcccctactccaataccccacatcccacccacccagccctgtcctatatttccatacccacttgcacattctggatctggattctccctattttagaagagtcatacaaatggcatcatcacagcagaggaatggcgtagtccttgaatggcagcatagggcccctgctgaaaatagtgatggtatcgcggcatg

SEQ ID NO: 46384 - DNA, 595 bp, Homo sapiens
ttatctcagctccttccccagcagaataacacaaaagaaaactaaacatgcttatgctacagcactacaaatatttctctactggctcccattttctacagggataaattgacttcagttagtcattatgatcagtatgctatatagtatggcctctttgaagattcttttatcttttactgcatcaacacagcgttttaaccatgaggaataatgcactttaagattcatcagccttgtattagtaaactttcaggctggctgagaactttacatggattctctcctgaacccaggagctgtccctcagatgaatcctggtccgtggtgcattccctmagtggtaggttttattgtgagtccggctctcctctttgataggtcctgtgtctcctggaaagcccctactccaataccccacatcccacccacccagccctgtcctatatttccatacccacttgcacattctggatctggattctccctattttagaagagtcatacaaatggcatcatcacagcagaggaatggcgtagtccttgaatggcagcatagggcccctgctgaaaatagtgatggtatcgcggcatg

SEQ ID NO: 46385 - DNA, 595 bp, Homo sapiens
ttatctcagctccttccccagcagaataacacaaaagaaaactaaacatgcttatgctacagcactacaaatatttctctactggctcccattttctacagggataaattgacttcagttagtcattatgatcagtatgctatatagtatggcctctttgaagattcttttatcttttactgcatcaacacagcgttttaaccatgaggaataatgcactttaagattcatcagccttgtattagtaaactttcaggctggctgagaactttacatggattctctcctgaacccaggagctgtccctcagatgaatcctggtccgtggtgcattccctcagtggtaggttttattgtgagtccggctctcctctttgataggtcctgtgtctcctggaaagcccctrctccaataccccacatcccacccacccagccctgtcctatatttccatacccacttgcacattctggatctggattctccctattttagaagagtcatacaaatggcatcatcacagcagaggaatggcgtagtccttgaatggcagcatagggcccctgctgaaaatagtgatggtatcgcggcatg

SEQ ID NO: 46386 - DNA, 550 bp, Homo sapiens
taaaaaaccattacatcttatagactttaacatatttatgtagttgtaattaccatatacatatatttgcattatgtttattttacctaatattatagacctgctttattcattcatccaaaagatatttattgagyttctgccataagccaagcattatttaggctctgtggatcatcagtaagcaaaacagtcaaaatccttgcttttttgaagcataccttctaataggaacagaatataatacatcaatgatgagaagtgctaaggaaaaaaataataaagcaaggtaagcaggcagacggtgacaggaaacgtggtattctaaaagagtctgattagtggaggcatctctgaaaaggtaatgtttcagtagagacctgaatgaagggagggagttagccctgcatatatctcagaggatttctaacagtgagacagtttttaaaaaggctctgaggctggcgggggcttggtgtgtttgaaaagcagcaaggagactagaataaatgaagtggaagtcaaagaagagtggtggaagatggggagg

SEQ ID NO: 46387 - DNA, 605 bp, Homo sapiens
tctgtcctttcagaaaagctccatgaatgaagaggtcagggctgtgatgattagagttttgttattttgatagggctggatgtagaaacctgaatttgtctgacctcgtttttcagacatttgcctgagtgttgagcttttggccacacagggtttctgcctgaccctgattccagtcattttcaactcaagctttggctgctgggttctgccatcagcatgagaaatactgaaggaaggggaggggaggctgaaagagaacaaggaacaagaataactgggaaaaataacatcccaataaaagatagaaaacataatcaggggagtggaaggtggaaagttctgttgactcaaacatataataatgagaattgaawactctgttaaaaacaagtaacttgctattatgtttgtttactgtacccaggataatatctatttgtggttaaatcgtgatttttctcctgtctctgaggaactttgcgttaaatctgttttcttctatttcatccatagacctgtctgtaacttttataaaaatatttttacaagcataaatggacatgaagtcacaaagcatagaaatgatactatcataaaaagta

SEQ ID NO: 46388 - DNA, 589 bp, Homo sapiens
aaatgggatcactgaatgcaaaagaacaaggcaatcagtgtctgtgcactgtgtcctgggacctcatccaccctttcctgcagcttcttcctatgcctctccctctgcctctgaccttcccattttctgatttttctaaccattctctctaggttccaaactcagtgtagcaggaggctttaactgagtaatctgtgttcattggtagagaaagtctcattgaaatccatcctctgtgaccttgaaaagtcaccttggccatcctcctgccctggggaagggatgttctttcaggtctaaactgtcatgacttctcctgctttcatggtctcagagctgttgaatgaatgaatgaatgaatttgattccctcacttggtcrccagctgggagtcactgcattgctccctcccgtcatggctattattgaaaaagaatatattgaaaatatatgaaaaagggacaatcagctccctgttagaaaccactaatggagaataatggagactcaggggtctgaaagcaacagctaatagaagatgggagcaattatcaggtgcaatgtcatcagaaacccatgtacgcatgca

SEQ ID NO: 46389 - DNA, 589 bp, Homo sapiens
aaatgggatcactgaatgcaaaagaacaaggcaatcagtgtctgtgcactgtgtcctgggacctcatccaccctttcctgcagcttcttcctatgcctctccctctgcctctgaccttcccattttctgatttttctaaccattctctctaggttccaaactcagtgtagcaggaggctttaactgagtaatctgtgttcattggtagagaaagtctcattgaaatccatcctctgtgaccttgaaaagtcaccttggccatcctcctgccctggggaagggatgttctttcaggtctaaactgtcatgacttctcctgctttcatggtctcagagctgttgaatgaatgaatgaatgaatttgattccctcacttggtcaccagctgggagtcactgcattgctccctccygtcatggctattattgaaaaagaatatattgaaaatatatgaaaaagggacaatcagctccctgttagaaaccactaatggagaataatggagactcaggggtctgaaagcaacagctaatagaagatgggagcaattatcaggtgcaatgtcatcagaaacccatgtacgcatgca

SEQ ID NO: 46390 - DNA, 612 bp, Homo sapiens
taatcgttttatttatttattagtttttgccttaaaacaacaaaaatatattctctccaagtctgaagtctggagtctggaagtccgaaatcaagatattggcagggctatgccccctctgagggttctagaaaagaattcttctgccccttccagctctggtgtttgttaacaagccttgctgtctctcagcttgtagaggcatcactctcattttgttatgtggccttaatagttttatacttatatttgtgtgtttataaataataagcataataattgttcatgagtgttgtctcttcttataacccaaggacaccatctgacctccatatctgaattcacaccactttccaaatttactgaaagttctttcactctggctcctttgatacctccgtttctaccatagtccagtttctataccatagtcagatcttgagaacaaaaaccaaaacaaatgagtcagttttcttgcttacatcccttcagtggttgcaattgccttaaacacacctctactcttgctctactctgygcacagcagatgaggtgcactttgaaaaatgtagatcagatcatggcattctcctgcttctgtaccccagtccc

SEQ ID NO: 46391 - DNA, 502 bp, Homo sapiens
tcacatccatgaggactccactctcatgacctaatcaccttccaaaaaccccacctcctaataccatcaccttgcgtgttagagcttcaacatatgartttggtgggcgacatacacattcagtccattgcgcagactaaatatgagacaagtcattcattaagtcagtctttctaggactatacaaaatgtcaaaataactaggagaaaagagaaaactactcaagtgtgacatcaaggggaaaacgttatcacagaacttggtagtttcttacagacaggactggcgatagaatctgcagggcctagtgaaaaataaaaatgtgggaccccttgttcaaaatgcaggccccaaagtgccattgaaagtaccaaaatataaaactttttcctttattttatggtctctgacttggcttgtgaagatgttttttatttgctatttaatgttgctctaagtaaagaaaattaaaacattaaattattagcacaaattttatta

SEQ ID NO: 46392 - DNA, 578 bp, Homo sapiens
gaatcttttttctctagtggcgattggacttttctgtaacttggtattctgcagtttgttttatttgcttgctcaggacttaaggtgcttctttaatatgaagaaatatatttctttaattttgtaaaaatttcagttattatacatttgaatactgccacttcccacccaccttgttctttacttctggaacttcgatttatgtgtgttgagcctctaattccatagagtatttgcgaagtcagaaatgtaacatatactcatttaacatgatctcgggttcatcgaggaataatttatacacagtaaagtgttctctttaggtgctctgttcgatgagttttgacaratgtatgcgctcatgtgagtgctaaaaagatgtagaatattcctatactcagataatttcgctaatgcacctttgtatttaatccccttcccccacatccagtccctggaaatcactgatctgatttctgtccctatagttttacctgttctagaaggtcatataaatgaaatcatagaggatatagctgttatttggcttctttcactcagtgtaatgcttttgagat

SEQ ID NO: 46393 - DNA, 1217 bp, Homo sapiens
tgcatgcacatacacacacatgcgcacacacacatcttgaagcatacctctacaaaaggatcactgttctcttgtaacaacagtgattccgtatccatatgtagcagagactcattattcacaaacgtagtccttttcctctggtcatcactcaagtagtcagggagtcaggtagactcccagcctctttgcagctagaagtggctgtgtgactgagttctagcccatggaatgcaggcagaagcaatagatgacacttctaagtgagtgtgagattctgggtttcacctcctggggctcatggtcatgagccctcttcatcctccagtcctagcagggacagcagcttcyggcagttgacatttggccaaccttactgaagcgctctttgctccttcagcccttctaacacctctgcaatcagccctgtggatgagattccctgtttaaaatgactgaagttatttctgttttccttactgagcactaatacagtgatctctgctgataccccaggattcttcagcattactggacaattgtttggaatcagaggcgaataatgaaaaaacagattccttgctcatttttccaattcacaaataacaaaggcacttataaacactcaaatggaaaccctttactaaaaaaaccataacttcgtggatatactaaaatgatcttaaacaaaaccagtagtaactcacactgtgaatgctcttatgtaggtttggcaattaatctaaactcaggcatgaacagagtcttccagtgaccacaaacgactacagcagtgattacggttctcagctgggtggggtgggtggggagagagaggcatccaaagctaggagtcactgtgtgcaatgaatctggacctggtgagcaaatgttatccataaacacaataaaaaggcagaaaaatcaagagtttagggaaaaatccaagatccagagtccacggggcatggctcctgaatggctgagaacaatgggtgcgcccaggatctagaaccaaaggctaaggccaacggcatgtgctcaaaaccaaaagggaggatcccagctcctcttccacctcctgtatcagacatccacagatcaagaaggggcctcgagaaatactcagggatctcaattcagccacatgggactgatgggccaggggaccccttgtgtctccgtcagtctccaactccgtaagcttcatttatgca

SEQ ID NO: 46394 - DNA, 585 bp, Homo sapiens
ttcttgaagacagcttagaaacctatatattcttagctccttgcaagtgcataacactagagtaactgctcaccaaatatttactgatgactagatggacggataaatggccatctgagccattggatctgagctattacttgccaaaatatttaacgggtgagaaaagtagggactctctcaattctgtttagtgcagtaacttttgtgggaagaatagccctgcatgaggccctcctactgctcctgatgttgtccatgtgcaggctggggaagccagggtggagatcattcaaaaaaaggaatattggggttataattttggaggctttgaatgtcatcctaagggtgtggccttaattccatggtgaaggtttggaataagcaagtgacacgattagatatatactccttgggacctactttggyagcaatggaagaaggccaggccaaaagcagacatgcctaacaggcaacttcttaattttctaagagaaacactaagaaggcttcagtgtgggtgaaaagaagggcatgggattgggaactattttagaggtaaatgcatcagatcatcatagcaaa

SEQ ID NO: 46395 - DNA, 2161 bp, Homo sapiens
atgctgctctaagctcccatttcaaagaaatggtgtggtgtttgtaatggataaatttgaagagacagccagtattattctcatctgtgatatatcatttctgcctctgatataatctttaaaaagaaaaaaaatccacttccacttccctttaagtccctacaactgtacagacaccacttggtaataaaaacagccttaaaaccatgtgcctcattatttcacagctactaaccataaataacagtctcatactttggggattataaattattcacatgaaagtaacgccaaattattaaaagccatttggatgaatctgtgacctcctttggcagccactggtttgagtgacagcctgcaagtcagtgtggtcaaagcttatatggactagccaagacaagctcttcctcttactcaccaagttgctttggtttgaagccagatgaactacaattctgagaagagaaaaagtatttttccattctggagctctgtttggggtgataagtgtaccttgggaaataggaatactcttaatccttaatagttaacaaatcactttcacatgtattaaacctaatcacttgccatttttttaagaattgctgagatatctggattttcttggagatacaaaataacttctggtataaatgcaagaatgaagaacatttatttacaatgtagtatgagaaagatctattcattttgtcatacttttgtagtgaataacattttgctaaatgatacatatagcagagcataaaaccaaaaacacatacttttttttttttcttgagatagagtctcgctctgtcccccaggctggagtccagtagtgcaatctcggctcactgcaacctcggttcactgcaacctctgcctcctggattcaagtgattctcctgcctcagcctcccaagtagctgggactacaggcacatgccaccacgcccggctaattttttgtatttttagtggagatgggatttcactgtgttagccaggatggtctcaatctcctgacctcttgatctgcccaccttggcctcccaaatgctgagattacaggcatgagccacagcgcctggccataatcaaaacttgactatcacaagatcacttccgtgtagtaacaggtgactgagctcagaattctgtaagtacaccctacctgcattgccttccctttggaaagccatatctctgctcagcttgtagtaaaagatgctaatttgatcacactgattcctttcagtgcaaagactgaattgtttttagaccactggtgattaatgtgggtattgattagctgatcaataaggccacagtgtctaattattgataatccctctccaaatgaaagatcgagtgtaaggagtcccagttacagagttcaaaatacaaagtgattcagtgtgatgcttggtaattgaaagtcaaactaatcccataaattaaatcacaacaatccataacatttacctgataaatcctctggaagctgtatttaatttttactatcctggacttgtttccccctctgaatgtcttaaagcacacaacttgtggagggaggtaaaaatcattctaaagcgatttgtctttatgaagtaagrgatctaatggcaccatcactgatagttacatattttaaataatggtttcaactccatatcacattataggatgaagaataaagaaaacttaccatgaatgctcaagagaatgaagactgtccctaatacttggactcacagagctgaagattatgagattatgaactctccctcttgctctcctatggtttaaaagacttatgattgtcatacagctagccagagggcaagacaggcttggggatctaggtctgttacaactgctgccctttcttgtcatataaagagtaggtaagcattattttgaactagggtcaaaaacgtactcatatagtcaatggccatgacatgcaataaaaataaaatttcttttatattcttagacagatctcaatttgctccaacacccctgcaatttccactggcaatgtgggggcaaggtgaggagaccctgccgatgaaagatcaatctccatttgaggttacctcagtctcttttagatacaggcttgatttggaaaatcatttcttcctcctcc

SEQ ID NO: 46396 - DNA, 2161 bp, Homo sapiens
atgctgctctaagctcccatttcaaagaaatggtgtggtgtttgtaatggataaatttgaagagacagccagtattattctcatctgtgatatatcatttctgcctctgatataatctttaaaaagaaaaaaaatccacttccacttccctttaagtccctacaactgtacagacaccacttggtaataaaaacagccttaaaaccatgtgcctcattatttcacagctactaaccataaataacagtctcatactttggggattataaattattcacatgaaagtaacgccaaattattaaaagccatttggatgaatctgtgacctcctttggcagccactggtttgagtgacagcctgcaagtcagtgtggtcaaagcttatatggactagccaagacaagctcttcctcttactcaccaagttgctttggtttgaagccagatgaactacaattctgagaagagaaaaagtatttttccattctggagctctgtttggggtgataagtgtaccttgggaaataggaatactcttaatccttaatagttaacaaatcactttcacatgtattaaacctaatcacttgccatttttttaagaattgctgagatatctggattttcttggagatacaaaataacttctggtataaatgcaagaatgaagaacatttatttacaatgtagtatgagaaagatctattcattttgtcatacttttgtagtgaataacattttgctaaatgatacatatagcagagcataaaaccaaaaacacatacttttttttttttcttgagatagagtctcgctctgtcccccaggctggagtccagtagtgcaatctcggctcactgcaacctcggttcactgcaacctctgcctcctggattcaagtgattctcctgcctcagcctcccaagtagctgggactacaggcacatgccaccacgcccggctaattttttgtatttttagtggagatgggatttcactgtgttagccaggatggtctcaatctcctgacctcttgatctgcccaccttggcctcccaaatgctgagattacaggcatgagccacagcgcctggccataatcaaaacttgactatcacaagatcacttccgtgtagtaacaggtgactgagctcagaattctgtaagtacaccctacctgcattgccttccctttggaaagccatatctctgctcagcttgtagtaaaagatgctaatttgatcacactgattcctttcagtgcaaagactgaattgtttttagaccactggtgattaatgtgggtattgattagctgatcaataaggccacagtgtctaattattgataatccctctccaaatgaaagatcgagtgtaaggagtcccagttacagagttcaaaatacaaagtgattcagtgtgatgcttggtaattgaaagtcaaactaatcccataaattaaatcacaacaatccataacatttacctgataaatcctctggaagctgtatttaatttttactatcctggacttgtttccccctctgaatgtcttaaagcacacaacttgtggagggaggtaaaaatcattctaaagcgatttgtctttatgaagtaagagatctaatggcaccatcactgatagttacatattttaaataatggtttcaactccatatcacattataggatgaagaataaagaaaacttaccatgaatgctcaagagaatgaagactgtccctaatacttggactcacagagctgaagattatgagattatgaactctccctcttgctctcctatggtttaaaagacttatgattgtcatacagctagccagagggcaagacaggcttggggatctaggtctgttacaactgctgccctttcttgtcatataaagagtaggtaagcattattttgaactagggtcaaaaacgtactcatatagtcaatggccatgacatgcaataaaaataaaatttcttttatattcttagacagatctcaatttgctccaacacccctgcaatttccactggcaatrtgggggcaaggtgaggagaccctgccgatgaaagatcaatctccatttgaggttacctcagtctcttttagatacaggcttgatttggaaaatcatttcttcctcctcc

SEQ ID NO: 46397 - DNA, 590 bp, Homo sapiens
aacatgcttttaaaaaactctactttctattaggcatcagaacgattggaataagtcaacatttttttgcataccagctgtcataacttaatgactgaacatcattcagaagagctaaattccatgtaataattctaactcattctggtagaaattactaattaaggagatttataaaactacatctttggccctaagaaaaggaaggatggctgaaaaattcaaacagctcatttccactctgtgtattatttgacaatctttttggccttattccaaaagctgttgccaagtagttakaaacagattgcaatgcctccggagagaacctcacaccaatacactgagaagaattccaccctggcaagtataagaaaagtcgtcactgctttccagttgaccaagtgacacactgcacagactgtgtccttaatacttttgtttagtaacctcttttcagccccacaaggcctacttctgaccgcattattattacaagcagaaatgtttatggatgactaaccatgcatgaaactgcatttaatatggcttctgaccaatgggtccatggtacacattgttttaatata

SEQ ID NO: 46398 - DNA, 534 bp, Homo sapiens
agcattattttaaagctaaaataaaaaggggaactgaaattaggtttaggattaaggtctcctcaccaaacactttacaagaaaataaaaactttgctcagtttcactatccaagtacctcattggtaaatgaaacaggcaaaactaaaatatgtggttccacatcacctcctggcctttgcacagctgctaagtagaaaaattcatgttatgaacaatgcaactgattataaaattaaataggatgagttcataaacataaaataaacaatccagaaattgtaagtagttaatatgagaggcagaaaagatgatgataacaagagaaagaaaagaagaaattttacagacatgaaaatttttgaacaaaagtcaattaaaatagtcatatccccttttagaagtcacaatttcctgaatttttaaaaattccataarctgtactgtcaaatgaaaactggtataactgggaaaatgatactttactattatctggagctgtaacattttcctgatcatctccaaaaagattat

SEQ ID NO: 46399 - DNA, 616 bp, Homo sapiens
agtgatggagttggcaaagcctcatcagtacagaccaaacagctttccaccaacattcatttattctttagggatgtctggatggttcaggcaccctagaatcaccctagaacttagcatcacttagcaacattaaggcaccttgatagaaaaagagaggtataaataaatcaatctgagtcttattggatgttgttagatggccaccaattgggagagtacaggggaaggttcttttcccattcccaatctgaggacagatgctatgggccactttctaattagctcctttttgttcatgcaaagtatagtgtaatcactttcctgttgtggttctcgctatccagactatagatacttaccttacttttgcaggcctaatgaaacccaaaatatattaaaataatttaatagttgaacatttatgttctgctaggtcctattctaggtgccttaaatgtgtggacttatttaattcttgyggtgatcctactaaataggatttattatcattcctaatactgacatagagaggttgctgtggttacacagctaataagtggtagagctgacgtttgaatgtagatagcgtaactcttagtatctcatgttttca

SEQ ID NO: 46400 - DNA, 591 bp, Homo sapiens
agtcttaagaactgatttgattgcaactgagtttctgtcttacaatggcagactcgtttccatttgtctttacacctaaaggtgataggccttcaaggatcgaaactgaatacctaggatacttaacagagccctactctttactgaaacctgaactccaagttatgtttttcctgcctatgagatttctagctgttctgctactgcctaggtaatggcaactgcctgaaagagaaaggtagggctgaatgttgggagtttacctctctgatttcatagttcttataccttcaaacagataaatttatactttagtcaaggttttctagttgttttcagcagaacagctggtgtaatataagcaaaagtgtcataatcagaatcagaagctccacataaattatttaatagttcaaatttctcaaaatattccactggattttgattgacatttcatagaatttatagattagggagaactgayatcgttacaaatatgttgtactatctttgaatagggtgtatctggttttcaagtcttttgaataatactgtaacagagtttaaaatttattccatgtagatcttatg

SEQ ID NO: 46401 - DNA, 582 bp, Homo sapiens
gagaaacaagactaccaagtttgcaaggaggtgcctcagttccctgcaaatatgtccacttcagagaagcctttgccatcaggtgcagatcttacatgccattgtctataggacagaaaatatccagtctgctgaaacatttcctcccttgggcagaggtactcatgatttctagcacctggtgcttaaaaaacttcaatagagcaggggttcccaattcccagaccgtggaccagtataggtctatggcctgctaggaactgagccgcacagcaggaggtgatgagtgggtgagctcacattacctcctgagctctgtctcgtgtcagatcagcagtggcattagattcttatagggkcataaactgtattgtgaactgtgcattcaaggaatctaggttgtgcgctccttattagaatctaatcagtgcctgatgatgtgagatggaacagtttcatttttaaaatgaaaaaactcttgttttagaaattttgcttaggttaaactttatatatatatatatatcctattactactaatactatggagaacactgatagtccttgatggaaactgtttag

SEQ ID NO: 46402 - DNA, 582 bp, Homo sapiens
gagaaacaagactaccaagtttgcaaggaggtgcctcagttccctgcaaatatgtccacttcagagaagcctttgccatcaggtgcagatcttacatgccattgtctataggacagaaaatatccagtctgctgaaacatttcctcccttgggcagaggtactcatgatttctagcacctggtgcttaaaaaacttcaatagagcaggggttcccaattcccagaccgtggaccagtataggtctatggcctgctaggaactgagccgcacagcaggaggtgatgagtgggtgagctcacattacctcctgagctctgtctcgtgtcagatcagcagtggcattagattcttataggggcayaaactgtattgtgaactgtgcattcaaggaatctaggttgtgcgctccttattagaatctaatcagtgcctgatgatgtgagatggaacagtttcatttttaaaatgaaaaaactcttgttttagaaattttgcttaggttaaactttatatatatatatatatcctattactactaatactatggagaacactgatagtccttgatggaaactgtttag

SEQ ID NO: 46403 - DNA, 580 bp, Homo sapiens
actactaactgaaaggagccaatttgaaaaggtacgcaccatatgattccaactctatgacattccagagaaggtaaaactatggagacaataaaaagatcagtggctgccagtagttggggggaggaagggatgaataggcacagaatagaggatttttagggcagtggarctattctgtattatactattataccttaatggtggatttgtgtcattacacatttgaccaaacacaccaagagtgaaccctcatgtcaactatggactctaggtgattatgatgtgtcaatgtatacaacaaacctagcactgagggaggggatgctgatagtgggggaggctgtacatgggagggggggtgtatgggacctttctgtatttcctctcagttatttagagtcaaaagctgctcaaaacaataatgtctatttatgaaaatcctcttagaagtagataggatctaaaatcacactttattgttagagaaaatgtacatgaaagaacttcctcagcggggcttaagcataaggaaatattattctcaagtgccggtattggcaataatctcacctctttt

SEQ ID NO: 46404 - DNA, 538 bp, Homo sapiens
aagtacctgacaacgtctcacgctagaatgagtttcgtacatgtttagttccctctctttttattccacgctcccccaccccaactttaaatcagaaacgtgagggtgctgattgaagctttttataacttttcttattgagaattgttctctggagttgtctccaagaacaaaggaattccagacgttctycttctctccttgtctcttctgtcctccagtcaaagaaaaactctgcatatgatctttggcctggagaaatattaaatctatgttaagtatgcagacatgaatgggcaaatgaaggatttgtggcaaagaagatctgccgaaacaaataagtcatgtaaatgggcagagggaaatattaaattgattgcatctttcagctcctggtacttaatgcaaagataaagtagtgggaaaaggttgtcatttgaaataatggaaagatgagggagttttgaagctagctgggatttttctgcctgttaatagagtgacttggattacagactataaagataaagagtagggc

SEQ ID NO: 46405 - DNA, 531 bp, Homo sapiens
ttcaaatcttttgcccatttttgaggcaattggcctgtttttttctttttgattattttctgtgtatcatggatatgtgtcttttaaaagttttgtgactattttctcacatggagctgtttgctgttgctgccttattttgagctcttttgataaaacctattcatgtaaattaattaactacatttaaaacatttcatttttatttttatttttatttttttgagacggagtctcgctctgtcgcccaggctsgagtgcagtggcgggatctcggctcactgcaagctccgcctcccgggttcacgccattctcctgcctcagcctcccgtgtagctgggactacaggcgcccgccactacgcccggctaattttttgtatttttagtagagacggggtttcaccgttttagccgggatggtctcgatctcctgacctcgtgatccgcccgcctcggcctcccaaagtgctgggattacaggcgtgagccaccgcgttcatttttatttaaaaatagcatattttataa

SEQ ID NO: 46406 - DNA, 583 bp, Homo sapiens
ataatttcttttaagggacttcagctttctaggaaaacaccgtgtgtggtttattcatattatccgttagccaacccttcattatcaagagaagcaaaggaactagagtgcataattcttttgtttgaaacgtaagcctaagaaaaatgtattcattgacaagctgtaaacagcagagaggaactacctggagtgaattcagcggttccggagtcttggttagcagccctgggtgtggggcacacacacacaagtaagcagctctgtcctgccatagtcccagttcactgtgacagatgatagtcacttaatagaaatgacaaaggtgacagccaatgttcctaaagcccataaccattgccaggttcttgctcgagagcttcctgcctgctstctcctggtttgagttccctctctggagaggaggttgagagcagaggtggttctctgaccaccaaagtccccagcttatgggactccatccctgaaaaacacccagcagaagggacccaaggtgatgttgctgcagagatggcaactcaggactcacaacttttcaagtctgggtaaatgagagacaaag

SEQ ID NO: 46407 - DNA, 676 bp, Homo sapiens
cacataattttaggttggccattcttgtgtataggggtaatctaaagctagtagttacaccccacaaaagaaaataaattcttatgacctctttgatcccacctgaaatatctcacaataaacaaacaaataaataataagcaaacaaaaacaaacagtagccttccccagttgcaggggcctaaaatatctcctaatctgaatttcgtctcaggacaggaaactattccataggcttcctcgcaggcttctgtgctggagtttgtcccactgactttggttgtccatctctctacaagaagggaacattctgaaacttagtttaaatactactaggccttagaatcttttgtaggtagttgctgaaacttgaagttgaataatactttgaagtactatgttacattgcattatgaaaaccttcatttttgtagctgtctcttgatctgcccaacatgtcacacaaatatagaagaaacggaatctgcaatacctaagggraaaaaaaggaattattagtctatttcctctttagatgcttttgaaattgtaaattaaagcaatttttcatttgggttcagaaagagtatctactgagaaaataatgtaatgcttatcacagcttgtcaatgtaaacatggtatcatcaaaagcagatattagaagagattaggca

SEQ ID NO: 46408 - DNA, 2230 bp, Homo sapiens
atacccacatgcacactccaacttttcctttccatttctattgttagtatactacttgtttaaggcagtaacaccccatatgttttaatgagttttttttctttctctccactcaaatccattttatgatgtagaccagggattgagaagcgtttcctgtccagggacagatagtaaatatttttgactttgcaggtggcacagtctctgtcaaagccatagacattacgtaatgaatgaggacggctatattccartgaaactttgtttacatgaatgagctgcagactagatttggcccatcggcagtagtttgttgagcctggatctacataaatcttactgattgcagatgttctcacattacttattacttaaaaataaaatcaatcatctcatttcttcaacaaacttaaataatttgtcctaagtgcaagacatctatttacttgtcctgtgatttcactacagaataagatgttaaatttaggctgacaattgagacacattttcctgttgtctttttcatatgcttgcaatctagtgaaaataaactattgacttctttatatgtctaatgaaatattttgcttcctttctaatgctaatctctgtatgttactatccaaagtccaactcacatatacctttcctcaaatgctaattggatgaatttctccattaggaaaaatttcacaacattctactttgcactataccattttgagggcatcaccattttgagggttcatctcagtgtctagtacagataacataatgtcttacacatcacagttgctcggaaagtaattgttaatgcttaaataaaacaactctgccagtggttttcctactgacttgaactaaaaatcttgttcatttaccacttctccctctccttttctctctttccccctccctttctctctcccatctctctatcctcctctcacccctattattggtaggtcctataaaatcttaccttatagaatctcacatttatcttttacatcattcacactgctaccatccaaattcagatctttcatacctcttcattggactattaaaatagtcgaattcctttctgtcattatctccatgccaaaccatctttattatttatctatttatatgtaacatatcacccccaaacttagcattttaaaacacacattatttcaatttttgttggtgggaatccacatgtggattagctgtggcctctgactctcactcttttaaaagtctgcagtcatcttaaggctggacagggaatgatttatttgcagactcactcacatagttgttggctttagttttgtgccaggtgttgtgctgtaaactcccttggttccttgtcacgtgggtctctccacaaagcatcacacaacatggcaactctctttatcaaagcaagcaagcgagagggcaagagggaatgccagcaagagttgggggtggctagcaaggggcaagacatagttccttgttagctaaccaaggaagtaacaccgcattacttttgttgaattctgtctcttaccagcaaggcaccaggtccagctcatactcaagaaggggagataatacaagatatcgggaggtggaatcagaaacatgggagctgtgtcagaagccacccatcccaccactccagatagttatcactttcttctattatgttatttttttctccttaaaatacttaaatgacctagagtagtggtctctacagttttttttttatcctgctcttcactcccagagtatattagttgatgcagcagtttgtctctcttcattatcaccaaactcacacataattcatgcatgtggtagagatgctctgtgtatgcataagtctgactcttcagaatccctgttattgacatgtgagtgactattgctatccatgagccattgaatttctactatcctcattctcagtggtcaaaagggttgattgctttctactctctacttctcattgtcacctggcttctgtaacaatgttcctgcctatacttttttcctttttgcaatgtcattttctgctttcttgtgtaatttcaagtaaaaagaacttttttaaaacagtttctaccatggggtcctcctgaacagtgtgacttctctgcccaaaacagttgtaacgtccagctgttttcagtaatttttcctagttggagctcaaagaataacacgagagaactaattttttttt

SEQ ID NO: 46409 - DNA, 2230 bp, Homo sapiens
atacccacatgcacactccaacttttcctttccatttctattgttagtatactacttgtttaaggcagtaacaccccatatgttttaatgagttttttttctttctctccactcaaatccattttatgatgtagaccagggattgagaagcgtttcctgtccagggacagatagtaaatatttttgactttgcaggtggcacagtctctgtcaaagccatagacattacgtaatgaatgaggacggctatattccagtgaaactttgtttacatgaatgagctgcagactagatttggcccatyggcagtagtttgttgagcctggatctacataaatcttactgattgcagatgttctcacattacttattacttaaaaataaaatcaatcatctcatttcttcaacaaacttaaataatttgtcctaagtgcaagacatctatttacttgtcctgtgatttcactacagaataagatgttaaatttaggctgacaattgagacacattttcctgttgtctttttcatatgcttgcaatctagtgaaaataaactattgacttctttatatgtctaatgaaatattttgcttcctttctaatgctaatctctgtatgttactatccaaagtccaactcacatatacctttcctcaaatgctaattggatgaatttctccattaggaaaaatttcacaacattctactttgcactataccattttgagggcatcaccattttgagggttcatctcagtgtctagtacagataacataatgtcttacacatcacagttgctcggaaagtaattgttaatgcttaaataaaacaactctgccagtggttttcctactgacttgaactaaaaatcttgttcatttaccacttctccctctccttttctctctttccccctccctttctctctcccatctctctatcctcctctcacccctattattggtaggtcctataaaatcttaccttatagaatctcacatttatcttttacatcattcacactgctaccatccaaattcagatctttcatacctcttcattggactattaaaatagtcgaattcctttctgtcattatctccatgccaaaccatctttattatttatctatttatatgtaacatatcacccccaaacttagcattttaaaacacacattatttcaatttttgttggtgggaatccacatgtggattagctgtggcctctgactctcactcttttaaaagtctgcagtcatcttaaggctggacagggaatgatttatttgcagactcactcacatagttgttggctttagttttgtgccaggtgttgtgctgtaaactcccttggttccttgtcacgtgggtctctccacaaagcatcacacaacatggcaactctctttatcaaagcaagcaagcgagagggcaagagggaatgccagcaagagttgggggtggctagcaaggggcaagacatagttccttgttagctaaccaaggaagtaacaccgcattacttttgttgaattctgtctcttaccagcaaggcaccaggtccagctcatactcaagaaggggagataatacaagatatcgggaggtggaatcagaaacatgggagctgtgtcagaagccacccatcccaccactccagatagttatcactttcttctattatgttatttttttctccttaaaatacttaaatgacctagagtagtggtctctacagttttttttttatcctgctcttcactcccagagtatattagttgatgcagcagtttgtctctcttcattatcaccaaactcacacataattcatgcatgtggtagagatgctctgtgtatgcataagtctgactcttcagaatccctgttattgacatgtgagtgactattgctatccatgagccattgaatttctactatcctcattctcagtggtcaaaagggttgattgctttctactctctacttctcattgtcacctggcttctgtaacaatgttcctgcctatacttttttcctttttgcaatgtcattttctgctttcttgtgtaatttcaagtaaaaagaacttttttaaaacagtttctaccatggggtcctcctgaacagtgtgacttctctgcccaaaacagttgtaacgtccagctgttttcagtaatttttcctagttggagctcaaagaataacacgagagaactaattttttttt

SEQ ID NO: 46410 - DNA, 2230 bp, Homo sapiens
atacccacatgcacactccaacttttcctttccatttctattgttagtatactacttgtttaaggcagtaacaccccatatgttttaatgagttttttttctttctctccactcaaatccattttatgatgtagaccagggattgagaagcgtttcctgtccagggacagatagtaaatatttttgactttgcaggtggcacagtctctgtcaaagccatagacattacgtaatgaatgaggacggctatattccagtgaaactttgtttacatgaatgagctgcagactagatttggcccatcggcagtagtttgttgagcctggatctacataaatcttactgattgcagatkttctcacattacttattacttaaaaataaaatcaatcatctcatttcttcaacaaacttaaataatttgtcctaagtgcaagacatctatttacttgtcctgtgatttcactacagaataagatgttaaatttaggctgacaattgagacacattttcctgttgtctttttcatatgcttgcaatctagtgaaaataaactattgacttctttatatgtctaatgaaatattttgcttcctttctaatgctaatctctgtatgttactatccaaagtccaactcacatatacctttcctcaaatgctaattggatgaatttctccattaggaaaaatttcacaacattctactttgcactataccattttgagggcatcaccattttgagggttcatctcagtgtctagtacagataacataatgtcttacacatcacagttgctcggaaagtaattgttaatgcttaaataaaacaactctgccagtggttttcctactgacttgaactaaaaatcttgttcatttaccacttctccctctccttttctctctttccccctccctttctctctcccatctctctatcctcctctcacccctattattggtaggtcctataaaatcttaccttatagaatctcacatttatcttttacatcattcacactgctaccatccaaattcagatctttcatacctcttcattggactattaaaatagtcgaattcctttctgtcattatctccatgccaaaccatctttattatttatctatttatatgtaacatatcacccccaaacttagcattttaaaacacacattatttcaatttttgttggtgggaatccacatgtggattagctgtggcctctgactctcactcttttaaaagtctgcagtcatcttaaggctggacagggaatgatttatttgcagactcactcacatagttgttggctttagttttgtgccaggtgttgtgctgtaaactcccttggttccttgtcacgtgggtctctccacaaagcatcacacaacatggcaactctctttatcaaagcaagcaagcgagagggcaagagggaatgccagcaagagttgggggtggctagcaaggggcaagacatagttccttgttagctaaccaaggaagtaacaccgcattacttttgttgaattctgtctcttaccagcaaggcaccaggtccagctcatactcaagaaggggagataatacaagatatcgggaggtggaatcagaaacatgggagctgtgtcagaagccacccatcccaccactccagatagttatcactttcttctattatgttatttttttctccttaaaatacttaaatgacctagagtagtggtctctacagttttttttttatcctgctcttcactcccagagtatattagttgatgcagcagtttgtctctcttcattatcaccaaactcacacataattcatgcatgtggtagagatgctctgtgtatgcataagtctgactcttcagaatccctgttattgacatgtgagtgactattgctatccatgagccattgaatttctactatcctcattctcagtggtcaaaagggttgattgctttctactctctacttctcattgtcacctggcttctgtaacaatgttcctgcctatacttttttcctttttgcaatgtcattttctgctttcttgtgtaatttcaagtaaaaagaacttttttaaaacagtttctaccatggggtcctcctgaacagtgtgacttctctgcccaaaacagttgtaacgtccagctgttttcagtaatttttcctagttggagctcaaagaataacacgagagaactaattttttttt

SEQ ID NO: 46411 - DNA, 2230 bp, Homo sapiens
atacccacatgcacactccaacttttcctttccatttctattgttagtatactacttgtttaaggcagtaacaccccatatgttttaatgagttttttttctttctctccactcaaatccattttatgatgtagaccagggattgagaagcgtttcctgtccagggacagatagtaaatatttttgactttgcaggtggcacagtctctgtcaaagccatagacattacgtaatgaatgaggacggctatattccagtgaaactttgtttacatgaatgagctgcagactagatttggcccatcggcagtagtttgttgagcctggatctacataaatcttactgattgcagatgttctcacattacttattacttaaaaataaaatcaatcatctcatttcytcaacaaacttaaataatttgtcctaagtgcaagacatctatttacttgtcctgtgatttcactacagaataagatgttaaatttaggctgacaattgagacacattttcctgttgtctttttcatatgcttgcaatctagtgaaaataaactattgacttctttatatgtctaatgaaatattttgcttcctttctaatgctaatctctgtatgttactatccaaagtccaactcacatatacctttcctcaaatgctaattggatgaatttctccattaggaaaaatttcacaacattctactttgcactataccattttgagggcatcaccattttgagggttcatctcagtgtctagtacagataacataatgtcttacacatcacagttgctcggaaagtaattgttaatgcttaaataaaacaactctgccagtggttttcctactgacttgaactaaaaatcttgttcatttaccacttctccctctccttttctctctttccccctccctttctctctcccatctctctatcctcctctcacccctattattggtaggtcctataaaatcttaccttatagaatctcacatttatcttttacatcattcacactgctaccatccaaattcagatctttcatacctcttcattggactattaaaatagtcgaattcctttctgtcattatctccatgccaaaccatctttattatttatctatttatatgtaacatatcacccccaaacttagcattttaaaacacacattatttcaatttttgttggtgggaatccacatgtggattagctgtggcctctgactctcactcttttaaaagtctgcagtcatcttaaggctggacagggaatgatttatttgcagactcactcacatagttgttggctttagttttgtgccaggtgttgtgctgtaaactcccttggttccttgtcacgtgggtctctccacaaagcatcacacaacatggcaactctctttatcaaagcaagcaagcgagagggcaagagggaatgccagcaagagttgggggtggctagcaaggggcaagacatagttccttgttagctaaccaaggaagtaacaccgcattacttttgttgaattctgtctcttaccagcaaggcaccaggtccagctcatactcaagaaggggagataatacaagatatcgggaggtggaatcagaaacatgggagctgtgtcagaagccacccatcccaccactccagatagttatcactttcttctattatgttatttttttctccttaaaatacttaaatgacctagagtagtggtctctacagttttttttttatcctgctcttcactcccagagtatattagttgatgcagcagtttgtctctcttcattatcaccaaactcacacataattcatgcatgtggtagagatgctctgtgtatgcataagtctgactcttcagaatccctgttattgacatgtgagtgactattgctatccatgagccattgaatttctactatcctcattctcagtggtcaaaagggttgattgctttctactctctacttctcattgtcacctggcttctgtaacaatgttcctgcctatacttttttcctttttgcaatgtcattttctgctttcttgtgtaatttcaagtaaaaagaacttttttaaaacagtttctaccatggggtcctcctgaacagtgtgacttctctgcccaaaacagttgtaacgtccagctgttttcagtaatttttcctagttggagctcaaagaataacacgagagaactaattttttttt

SEQ ID NO: 46412 - DNA, 1906 bp, Homo sapiens
gcatgagagccccaactccacccgcagagagtgtcccagtcaaaaagtcaaaatatcacagtggtgctgattcttggtgcaaaaatmaccatgttacctgtgtttagaatccatatataaaagtaaaaatgccaacttttgactgcctctaggtgtgagattcagaacctttacagtgcactgtgttcatttggaaagtaaccatactgttggctggttgtgcatatgagagtaacaatttcaccggttttgggcccttttataatgctctctgtagtacctgatggcattataaggtatgcaccagagtcacaataatctgtgagatttgcatgcttgtgtggacacacaatcttacctattactttaagcccagagtcaacatctctcctattttctgtgtccaggaatgagatttatcactgtgcctgtgagtggggtccagaaatgagtcaccatcccatctgtggccagatccacatacgacagtcacaatatcaaccgtgagctgcatccatgagagatttaggacctcagcagtgggcactgtctgtgtgtgaggctgacaatcttaacttttgactagatgtctatatgagagtcacaatctcaactgtgtgctgggccctgttttgacatactctgtaccacctgagggaattctaccatatgttagagtttcataggcccctgtgacctctgtagaggtaggaaacagacgaccttacccatggacctatgtctatctatgagtcagtatctgtcctattgacttggtctgagcatgagattcaccaccatgcttgtaagctggatctagaaattagtcaccatccagcctgaggccagatccacatatgacagtcagaattccaactctggactgcatccatgtgtgagattcagaatctcatcaatgggttctgtccatttgtgaaggtgacggttccacttgttggctactgagagccacgatctcacctgtgtgctcggccctgttttatttataaagcccaagggctttataaaatacatgtgtgtgtcataatcttttgtgacctttttataattagtagaccaaggtttttagttgttgccctaagcatagctattaaagtccaaatttctcctattggctaggtccatgtaagaaagccatcaaatgactgttgcctgggcctaggtataggtcataatcccacatgtgggcagaaccagggaggaaagtcacatcacctgaatgctgggctggggaaatatcaatatccctccatgggcaggacccacgcaggaaagccatatcacctttatgctaggtttagtaatatgtcacaaagcccactttaggaagaacctagtcaagagccagatcaccttggtgcttggcccagcaatatgtcacaatcccttgtgtacgtagggcccatgcaggaaaggggagtcacatcatctaggtgctgggcccagtaatatgtcacaatccaccctgttaacagggcccagtcatgagaggagagtcatatcacctagataacatgcccagattatatgtcacaaattttactggagaaagggatagtcaggaaagtagagtctcatcacctaggtgagggtctcagagataacattacaatgctccttgtgggcagggcccaggcaggacagtcatatcacctaggtgtttgggccaggtatatgtcacaatcccaactgttagctgagctcaggcaagagagtaaagtcaatcaggtgctgagaaaaaattatgtcagagtcacacctgcagaaggtccagggatgagagtcacagtcccacacatttcctggctcaagttataagagaaaactccttttgtgaattgtgtttaagtacacaaattacaatctcaattgtggacagaattca

SEQ ID NO: 46413 - DNA, 1906 bp, Homo sapiens
gcatgagagccccaactccacccgcagagagtgtcccagtcaaaaagtcaaaatatcacagtggtgctgattcttggtgcaaaaatcaccatgttacctgtgtttagaatccatatataaaagtaaaaatgccaacttttgactgcctctaggtgtgagattcagaacctttacagtgcactgtgttcatttggaaagtaaccatactgttggctggttgtgcatatgagagtaacaatttcaccggttttgggcccttttataatgctctctgtagtacctgatggcattataaggtatgcaccagagtcacaataatctgtgagatttgcatgcttgtgtggacacacaatcttacctattactttaagcccagagtcaacatctctcctattttctgtgtccaggaatgagatttatcactgtgcctgtgagtggggtccagaaatgagtcaccatcccatctgtggccagatccacatacgacagtcacaatatcaaccgtgagctgcatccatgagagatttaggacctcagcagtgggcactgtctgtgtgtgaggctgacaatcttaacttttgactagatgtctatatgagagtcacaatctcaactgtgtgctgggccctgttttgacatactctgtaccacctgagggaattctaccatatgttagagtttcataggcccctgtgacctctgtagaggtaggaaacagacgaccttacccatggacctatgtctatctatgagtcagtatctgtcctattgacttggtctgagcatgagattcaccaccatgcttgtaagctggatctagaaattagtcaccatccagcctgaggccagatccacatatgacagtcagaattccaactctggactgcatccatgtgtgagattcagaatctcatcaatgggttctgtccatttgtgaaggtgacggttccacttgttggctactgagagccacgatctcacctgtgtgctcggccctgttttatttataaagcccaagggctttataaaatacatgtgtgtgtcataatcttttgtgacctttttataattagtagaccaaggtttttagttgttgccctaagcatagctattaaagtccaaatttctcctattggctaggtccatgtaagaaagccatcaaatgactgttgcctgggcctaggtataggtcataatcccacatgtgggcagaaccagggaggaaagtcacatcacctgaatgctgggctggggaaatatcaatatccctccatgggcaggacccacgcaggaaagccatatcacctttatgctaggtttagtaatatgtcacaaagcccactttaggaagaacctagtcaagagccagatcaccttggtgcttggcccagcaatatgtcacaatcccttgtgtacgtagggcccatgcaggaaaggggagtcacatcatctaggtgctgggcccagtaatatgtcacaatccaccctgttaacagggcccagtcatgagaggagagtcatatcacctagataacatgcccagattatatgtcacaaattttactggagaaagggatagtcaggaaagtagagtctcatcacctaggtgagggtctcagagataacattacaatgctccttgtgggcagggcccaggcaggacagtcatatcacctaggtgtttgggccaggtatatgtcacaatcccaactgttagctgagctcaggcaagagagtaaagtcaatcaggtgctgagaaaaaattatgtcagagtcacacctgcagaaggtccagggatgagagtcacagtcccacacatttcctggctcaagttataagagaaaactmcttttgtgaattgtgtttaagtacacaaattacaatctcaattgtggacagaattca

SEQ ID NO: 46414 - DNA, 567 bp, Homo sapiens
tggagctgttcctttggacatgtacatgagagtttataagaaaggtgatattgtagacatccagggaatgaatactgatcaaaaaggaatgtcctacaagtgttacgaaggcaaaactggragggtctacaatgttacacagcatgctgttggcactgttgtaagcaaacaagttatgggcaaggttcttgtcaggagaattattgttcatattgagcatattaagcactttaagggctgaggcagcttcctgaaacttgtgaaggaaaatgatcagaaaagaagaaagccaaagagaaagtcacctgggttcaagagaagtgccagcctgctccacccagagatgcacactttgggagaaccagtgagaaggagcctgagctgccggaacccagtcgctatggattcatggcaaataggtatagaaaagtaaaagacctctggactgcaaaagtgtttcttttcattgagtggaagtgtggtgtcctctcccccaaagaaatatttaaagcaaattttaattgtgtcctaatttattgcgtaatgtctttactattcaaattcaat

SEQ ID NO: 46415 - DNA, 567 bp, Homo sapiens
tggagctgttcctttggacatgtacatgagagtttataagaaaggtgatattgtagacatccagggaatgaatactgatcaaaaaggaatgtcctacaagtgttacgaaggcaaaactgggagggtctacaaygttacacagcatgctgttggcactgttgtaagcaaacaagttatgggcaaggttcttgtcaggagaattattgttcatattgagcatattaagcactttaagggctgaggcagcttcctgaaacttgtgaaggaaaatgatcagaaaagaagaaagccaaagagaaagtcacctgggttcaagagaagtgccagcctgctccacccagagatgcacactttgggagaaccagtgagaaggagcctgagctgccggaacccagtcgctatggattcatggcaaataggtatagaaaagtaaaagacctctggactgcaaaagtgtttcttttcattgagtggaagtgtggtgtcctctcccccaaagaaatatttaaagcaaattttaattgtgtcctaatttattgcgtaatgtctttactattcaaattcaat

SEQ ID NO: 46416 - DNA, 895 bp, Homo sapiens
gagggaggtacaaatcacgttagctttggcgtgcaggcctgaaagctgggacctaaccaccatcttaaacatggtttccacaagaaaagccttccaacaattaacgtcctgtccagttcagatgggcagcatttttaccgattaaatcacacttttacaactgcaaacacaaatatgacacctgtccatctcttcaatggccaatgagacaagggaagctacaggcactcacctggattcacccacgccttcgctggcctgatcttgacttgctgactgccaccgcgacggaattcaaactcctgtcctcctaattgtgctagatagcaatatgtcattcagagtaaaaatgctggaagattcttacattcaagactccttcaggaccaagcatcgaatctaggattcaaggctgcaacctggcctaacccagcttagcacagaaacccacttcactagtcgtttttgaacaggctccctcgcagcatccgtagatcattcttcaaagagtaagaggagtaaaatgcggttctggcacttagcacccaagaagtcttgggcaagttacttaacctctcattgacgtttcatcctgtaatgtagggataacagagtccacccggtggttgtgagaattaaatggactggcacacacagaatgccgggcccagtgcccggctgtgacactcagtgtcgtggttattactagactggtgctcaccaccagtgtcattaccactgacagcatgaggacraagccggcctgtctgacgtaagctgtttccaccccacacctccaggtcccggcccctgcacactctgagaattacatcacagcacggtaagcgtcactgcgtgctgctccacaacgtgggacggccctgagtcacggtcc

SEQ ID NO: 46417 - DNA, 895 bp, Homo sapiens
gagggaggtacaaatcacgttagctttggcgtgcaggcctgaaagctgggacctaaccaccatcttaaacatggtttccacaagaaaagccttccaacaattaacgtcctgtccagttcagatgggcagcatttttaccgattaaatcacacttttacaactgcaaacacaaatatgacacctgtccatctcttcaatggccaatgagacaagggaagctacaggcactcacctggattcacccacgccttcgctggcctgatcttgacttgctgactgccaccgcgacggaattcaaactcctgtcctcctaattgtgctagatagcaatatgtcattcagagtaaaaatgctggaagattcttacattcaagactccttcaggaccaagcatcgaatctaggattcaaggctgcaacctggcctaacccagcttagcacagaaacccacttcactagtcgtttttgaacaggctccctcgcagcatccgtagatcattcttcaaagagtaagaggagtaaaatgcggttctggcacttagcacccaagaagtcttgggcaagttacttaacctctcattgacgtttcatcctgtaatgtagggataacagagtccacccggtggttgtgagaattaaatggactggcacacacagaatgccgggcccagtgcccggctgtgacactcagtgtcgtggttattactagactggtgctcaccaccagtgtcattaccactgacagcatgaggacaaagccggcctgtctgacgtaagctgtttccaccccacacctccrggtcccggcccctgcacactctgagaattacatcacagcacggtaagcgtcactgcgtgctgctccacaacgtgggacggccctgagtcacggtcc

SEQ ID NO: 46418 - DNA, 895 bp, Homo sapiens
gagggaggtacaaatcacgttagctttggcgtgcaggcctgaaagctgggacctaaccaccatcttaaacatggtttccacaagaaaagccttccaacaattaacgtcctgtccagttcagatgggcagcatttttaccgattaaatcacacttttacaactgcaaacacaaatatgacacctgtccatctcttcaatggccaatgagacaagggaagctacaggcactcacctggattcacccacgccttcgctggcctgatcttgacttgctgactgccaccgcgacggaattcaaactcctgtcctcctaattgtgctagatagcaatatgtcattcagagtaaaaatgctggaagattcttacattcaagactccttcaggaccaagcatcgaatctaggattcaaggctgcaacctggcctaacccagcttagcacagaaacccacttcactagtcgtttttgaacaggctccctcgcagcatccgtagatcattcttcaaagagtaagaggagtaaaatgcggttctggcacttagcacccaagaagtcttgggcaagttacttaacctctcattgacgtttcatcctgtaatgtagggataacagagtccacccggtggttgtgagaattaaatggactggcacacacagaatgccgggcccagtgcccggctgtgacactcagtgtcgtggttattactagactggtgctcaccaccagtgtcattaccactgacagcatgaggacaaagccggcctgtctgacgtaagctgtttccaccccacacctccaggtcccggcccctgcacactctgagaattacatcacagcacsgtaagcgtcactgcgtgctgctccacaacgtgggacggccctgagtcacggtcc

SEQ ID NO: 46419 - DNA, 599 bp, Homo sapiens
cagttattattttgattaatttacggtaacttgaacaggagctgggctgagatttatgtctgccatctaagctaaagggatttgctgtgatttgggaagggttattaacctgcactcaagaaaggacaccagtaagagtcattttaaagatagggagcaactggtgatttcgttgtgggtctcataagaaacatagttttgcacatctgaagccttaatatctgattaacaaggaatgactgggtcttaaaaggtctagacctaccataaaaagaaactgaagattgtttcgcatcaggaagacaattttaggttaaattacaaggtgaggctgagaatatatatttcaagagattagtgtatttataaccaatacagagtcaacaayaacttccatctctgcaactaaaatacctagaaaatggaattagcaataattccagcacttcttcaactttaatattcatgtgaattacctgagggtcttgataaaatgcagactctgattcagcacatctgagatggggtctaagagtctacatttctaacaggctcccaggtgatgccaatactgtggtctggggaccactctttggaac

SEQ ID NO: 46420 - DNA, 566 bp, Homo sapiens
tgaaatatcttattccaggccctaacttaactacctcttcctgagatgagaattacagtaacctacatggtattcctatttctataaacttattttgyacaatgataccagataaatgcttgaagagcttttcataataaaattatcctaaaataacaataacaagaacagcatttgtagggtgcttgctatgtgccaagcactttaatgatgttttaattctcgtaataatcccatgaggtaggtactattactaccctcattttacaaatgagaaaagcgaagtttagagatgcttaattaacctacccaaggttacacagttgctatgtggtagaatagaactcaaacaggcagacatattccagcggtcacattcttagccattttgctctattatttctacatataaatatcattattgcctacagcatttaatccaagttcctttctttggctttagagacctcaaaatctgatccaatcctaattatacttcattgtgtacccgtcctactagacttactcttctcttctacatgtcatcttcctatattattattctc

SEQ ID NO: 46421 - DNA, 513 bp, Homo sapiens
cagactttgtgggctgtaaggtctctgttgcaactactcaattctgctgttgtaggatgaaaatagtcacagacaatataaacaaataggtatgactgggttttaatagaactgtatttacaaaaactagcagcaggctagatttggcctattcctgagttgcagtttgccaacctctcaactagattatcacttgtacaaggtgttatggggattgatatagagtctaggtaacatcagagtccttctcagatatgtgactcagtgaaattcataagatgtaaaatgtagcctctgctgtatttatccagagcttataaaacagtaatcaacaaatggacaaaggtattttttccagattatatgatcatgtcttggttcaatgtatgttttctatgataaggaagataaagataacaaaagactcratgaacagtcactttaaaaagcaaaaaaggaaattagaagtaaaaacaaagttggagtggatctgtaagggttaaagaaaaggga

SEQ ID NO: 46422 - DNA, 543 bp, Homo sapiens
gaatctacttgtcgaaggtcgtagcgatgtaagtgtagtgctgggattcaaacccaggccgggtaatctcagaagcttatgcccttcccaccatacctggctgtatctgctcccacctccygcctctggcctggatggaagtccaccaccctccatccctcctgcagctcagctcccttccaggtgtgggctcacctgtgggtccttgcccttgaagctgcactgctgtttcttctctgcgtctgcaccccaaagcagctggggaatgagaaaggggaaggtagtggacaaaatggagggtttgctgagcctccctcctctcccataggcatcatccttggacccagaaggtcaagcttcccgtccatcttccctctgtggtcctctgcccagcctagccagctccaggcaacatctctcacctcctggtactccccgcctggcaggaagctgaggttgctactgagtgcaaagagggcctctcgagcacccacgtacagggtcctgccatccctgctcagcagaagggctgtgtagttggag

SEQ ID NO: 46423 - DNA, 543 bp, Homo sapiens
gaatctacttgtcgaaggtcgtagcgatgtaagtgtagtgctgggattcaaacccaggccgggtaatctcagaagcttatgcccttcccaccatacctggctgtatctgctcccacctcccgcctctggcctggatggaagtccaccaccctccatccctcctgcagctcagctcccttccaggtgtgggctcacctgtgggtccttgcccttgaagctgcactgctgtttcttctctgcgtctgcaccccaaagcagctggggartgagaaaggggaaggtagtggacaaaatggagggtttgctgagcctccctcctctcccataggcatcatccttggacccagaaggtcaagcttcccgtccatcttccctctgtggtcctctgcccagcctagccagctccaggcaacatctctcacctcctggtactccccgcctggcaggaagctgaggttgctactgagtgcaaagagggcctctcgagcacccacgtacagggtcctgccatccctgctcagcagaagggctgtgtagttggag

SEQ ID NO: 46424 - DNA, 553 bp, Homo sapiens
tgtggtgttcaagactcagatgaataatagagggtattcctccaaagatctctggagttcttactcacagcagatctttcctctccagtatcctgtatgacatattctagccatttttttctccctaaatactaagtaccatctcaactcaaaaagtttagaaattttacaggatctccttgggtttcccttccttatcaygtatgagaaaccatcaaggcagtaagctgggacttttcttttcgtttcttttttttattattgtttttgaaatataatttcaggatgacctcactcattgctttatgttcagtgtctttgaaagccttggtcagttttttttggttgtctcaggtgtgagggtaatttccatcttttgtgatttcatcttgatggggcacagatgttggagaaatgatgggtatttttttaaagctacaatttcgaagacaaattaaatcaatataagatacctgatactgatttctgatacctgagttgagactattatagcatttctattgaaggaaaaatgaatagttaaatacatttg

SEQ ID NO: 46425 - DNA, 538 bp, Homo sapiens
atccrggataatctccccatctcaagatttttgacttaatcacatctacaaaatctctcttgccatgtaggttaacagtcacaggttccagggattaggacctggatatcatgcggaagagaggggagaggccattattcagcctactatacatggtaactgatttaatgaaatggatagaaatggcttccaaaattatgacctgcataaaagcactccaatacaaactgaaaaggtggggttaaagaagttgtcagagaaaacctaatatctggagtataatgaaatgcttagaaaatatttttgattttgtttgaatcctagctcaacaaatcaactatacaaatatatttttaagacaagcagggacatttaaatgtagactggatatactagaggttacccaagaatcactgttaatattgttagatgtgataactatggttatgtaagaaaatgtttctttttaagaggtgcataatgaagcatgtagaggtgtaatgacatgaggtcatgagaaaatttgctttaaaatact

SEQ ID NO: 46426 - DNA, 538 bp, Homo sapiens
atccaggataatctccccatctcaagatttttgacttaatcacatctacaaaatctctcttgccatgtaggttaacagtcacaggttccagggattaggacctggatatcatgcggaagagaggggagaggccattattcagcctactatacatggtaactgatttaatgaaatggatagaaatggcttccaaaattatgacctgcataaaagcactccaatacaaactgaaaaggtggggttaaagaagttgtcagagaaaacctaatatctggagtataatgaaatgcttagaaaatatytttgattttgtttgaatcctagctcaacaaatcaactatacaaatatatttttaagacaagcagggacatttaaatgtagactggatatactagaggttacccaagaatcactgttaatattgttagatgtgataactatggttatgtaagaaaatgtttctttttaagaggtgcataatgaagcatgtagaggtgtaatgacatgaggtcatgagaaaatttgctttaaaatact

SEQ ID NO: 46427 - DNA, 532 bp, Homo sapiens
acacccccaaagcaagtaaatatttatacacacatgtaaacaaacaacctaaaagcagcaggaaaaaaagatggacttctttttctgtaagtcataactcttttatgcattttataacagagaagctgctgagaaaaaaaaaattgaattatttgaccaattagaaagtcaaaactcttgaatagtaaaagtatccaaaaaaaatcaaaagacgtggaaactggaacatatttgtaacacataaaaaaacaaatcttctaatgccatattggcaaagattaaaagattatataacaaaggatgaccatcttgcaaatagattgtgctacartcatataatgttacatgattactgccattacaagaatgcaacatatttatatatgctgctatgaaaatatccacagaatattgtatttgtcccagcaggtagaaacaaatacccaagttgaatctggaataatttgtagtcaaaggaagagaacctagaggggagacattttgaaaacagaatcagcaaagtaaaggaaga

SEQ ID NO: 46428 - DNA, 2115 bp, Homo sapiens
gtaaccaacaaagggttagtaacaagaatatatgaagagttcttacaaatctataagaaaaaagacaaacccaatagaaaaataaacagatgaccggaacagtctcttcacagaaaaggagctgaaagtggccaatacttatatgaaaagatgatcaatatcattaataatctggcaaagacaatttaggccatagcaagacatcattttgtccccaggagcttggcaggtgtgggagggactgtgaaacacccaagacacttatacgcttctggtagaggtagaaactggtcaagactctggtgagggtataaacttgtagaaccactttgagaaatgatggtaataatacaaggacccagagatcccactcaggtattttyaccacagacaaattattttatatatatatatatatatatatatatatatatatatatatatataccagaaaaaagtataataatgttcataacagctgtgtttgtagtagcaaaaacttgaagcaactcaaatgtcccgtagcaatacaagatgcagtgtgtttatccaatagaatagtaaacagcagtgaaaagaaacaatgaaccatagttacactcaccaacacgaaatgaacctcttaaatatatgaagtcaagagagcatagctccagaagaacataaacagcacaatgttctcttccgttcatggtttaaactcactcaaaactgagcactgtcattcagaattacatatattatgataaactataaagaaaggccaggcacggtggctcacatccgtaatcccagcactctgggaggccgaggctgaggcagatggatcgcttgagcccaggaattcaagaccagcctgggaaacgtggtgaaaccctgtgtctacacgaaatacaaaaattagccgggtatgctggcacactcctgtagtcccagctgctggggaggctgaggtgggaggactgcctgagcctgggaggtcgagggtgcagtgggcagagcttgtgccactgcactccagcctgggcgacagagtgagatcctgtctcaaaaataaataaataaaaatcaataaataaatacaaagaaatataaagaataagcactccactcatggaggcagttaccttctatgtggggtcagggggaatgcaattcagaaggaggcacagagacttcaaaagcgttggcgacgttctacttctgctgggtaatggacggcacttccactgggtaatggacagcacatcagctgggtaatggacggcacttctgctgggtaatggatgcacaggcgttggctgtattatggtgatgacaatgtgtatatcacatataatattttttatcaaaaatttcatgtttaaaataaaattatatggctgaaagaaaaatacactaagatatcatttatgtaaatctataaagcacagaaaacaagagtgtattttgtttctggaaacatacacatatagaaaaagtagaacagccacataaggatacacacgaatagaatcaattttgggcatttttggagaagaatgatgttggtatgtgtgtgacaaggagattccaactgtggtctgtaactttctctttaaaacattaaaaaactcaaggtaagatagcaaagtattgatacttattaactctgagtgttgggtacataggtgttaggaatagggtctctagacttagggcgtgcgtggatgcacacacacacatacacgcacaaacacacatacacacacactctctctctctctacaggacacccggttaaattgaatttcagataaaaaccaacaactttttagtataaataatttttaataaaaatatgccccattgggacagcctatgattcatctgacaccactacttatattgatctctacatctgaaatatagggaaaatacgtttgtcctgtttatgtacattatgaaaaacttagccagcaattatgtgtttagtgtgcacaaaatggggggcggggggattacagagggtcctgcccctgtgctatggaatcagtgcaccagactcatcccaccggctccccggaccttcaaggatttctgaccagatccgtttgctcagattatttaactcca

SEQ ID NO: 46429 - DNA, 2115 bp, Homo sapiens
gtaaccaacaaagggttagtaacaagaatatatgaagagttcttacaaatctataagaaaaaagacaaacccaatagaaaaataaacagatgaccggaacagtctcttcacagaaaaggagctgaaagtggccaatacttatatgaaaagatgatcaatatcattaataatctggcaaagacaatttaggccatagcaagacatcattttgtccccaggagcttggcaggtgtgggagggactgtgaaacacccaagacacttatacgcttctggtagaggtagaaactggtcaagactctggtgagggtataaacttgtagaaccactttgagaaatgatggtaataatacaaggacccagagatcccactcaggtatttttaccacagacaaattattttatatatatatatatatatatatatatatatatatatatatatataccagaaaaaagtataataatgttcataacagctgtgtttgtagtagcaaaaacttgaarcaactcaaatgtcccgtagcaatacaagatgcagtgtgtttatccaatagaatagtaaacagcagtgaaaagaaacaatgaaccatagttacactcaccaacacgaaatgaacctcttaaatatatgaagtcaagagagcatagctccagaagaacataaacagcacaatgttctcttccgttcatggtttaaactcactcaaaactgagcactgtcattcagaattacatatattatgataaactataaagaaaggccaggcacggtggctcacatccgtaatcccagcactctgggaggccgaggctgaggcagatggatcgcttgagcccaggaattcaagaccagcctgggaaacgtggtgaaaccctgtgtctacacgaaatacaaaaattagccgggtatgctggcacactcctgtagtcccagctgctggggaggctgaggtgggaggactgcctgagcctgggaggtcgagggtgcagtgggcagagcttgtgccactgcactccagcctgggcgacagagtgagatcctgtctcaaaaataaataaataaaaatcaataaataaatacaaagaaatataaagaataagcactccactcatggaggcagttaccttctatgtggggtcagggggaatgcaattcagaaggaggcacagagacttcaaaagcgttggcgacgttctacttctgctgggtaatggacggcacttccactgggtaatggacagcacatcagctgggtaatggacggcacttctgctgggtaatggatgcacaggcgttggctgtattatggtgatgacaatgtgtatatcacatataatattttttatcaaaaatttcatgtttaaaataaaattatatggctgaaagaaaaatacactaagatatcatttatgtaaatctataaagcacagaaaacaagagtgtattttgtttctggaaacatacacatatagaaaaagtagaacagccacataaggatacacacgaatagaatcaattttgggcatttttggagaagaatgatgttggtatgtgtgtgacaaggagattccaactgtggtctgtaactttctctttaaaacattaaaaaactcaaggtaagatagcaaagtattgatacttattaactctgagtgttgggtacataggtgttaggaatagggtctctagacttagggcgtgcgtggatgcacacacacacatacacgcacaaacacacatacacacacactctctctctctctacaggacacccggttaaattgaatttcagataaaaaccaacaactttttagtataaataatttttaataaaaatatgccccattgggacagcctatgattcatctgacaccactacttatattgatctctacatctgaaatatagggaaaatacgtttgtcctgtttatgtacattatgaaaaacttagccagcaattatgtgtttagtgtgcacaaaatggggggcggggggattacagagggtcctgcccctgtgctatggaatcagtgcaccagactcatcccaccggctccccggaccttcaaggatttctgaccagatccgtttgctcagattatttaactcca

SEQ ID NO: 46430 - DNA, 1863 bp, Homo sapiens
tttatttaacttcttaaaatcttccccaaagttctgttatcagggagacaccttggtctgggaatatgccttccctcttcaatagaattcatgtaagtttcctgaggattggcactgtgtttgatccattgagatagctccgtaataaaaataactggcatttattaagcacttactttgtgtctgaaattgtgctgtgccctttacatgtttagttcccttaatgctcacatctgttctatgagagaggtgttcttcttatctgcattttrtaattaaggaaatagaagctaggggatgttaagaaactttcacaggttcacacagctactcagtgccacagatgcttcaccaatatgcaatacagtcttcctgcagctatcccggtgcccatgatgacttcttattctgtgtttgttgaatgaatgttgtgttaaggcatggattctgtttccagttctgctgctaactggagtaatctcctcgaaataattgagctcattctttttatctaccgcctcccacagatcccagtacagagtaagtattcagtaagtatttaataaatgcatgctaaataaatgggtgaatgagtgcttgatcccagaattctcttctacatctaacagcctatgactgtagcttatatggatctcctcttccctgacctctcatagcacacttgatgtttagacatttgatttgatttgatttcatcttttgttggttctaactgtttagtgtgtgtgttttgtatttccgaatagattacattttatttccttggtattccccacagtgcctagcccagtgcctagatgtcatgagtgctcagtaaatatatattgcaatgggattgagtatcgcttcagcacacttcaagccagaagaaacactgaaattagtcacctcctgggctattgttttcctctttagagaagctgtcatgcagtttctgctaaacagatgttttggacaggtcagggagcagaatccaggctgcggctaatggcacaatttgacatcctgccacagtttacccacccatctgcccataagggctggtccccagatagaaagggtatttacgaagctcttagtaaatccagaggacaatcatgtaaaagatagactgttagataattgataaaatttctctgagtgagtggaacccttaggttgttgtaaacatgtgtacatgcttgcacgtgcacacacaagactcaactttgaaccttgagggaaaaattagactctcaaccttgctcctttctgatgaatgggaacaaaaccaattctcagagggtaaataggatggggaaatgcagacaggctcatcagtgcccaaggaaaccaagaagggccaccggagtgtcaaggctctccagggaaaatgtgggtttctacagcatgggagactccagagactttaacacgcaccaactgaaatcaaggctgctcggtgcatgtgttggtttcatggcatggatatttatacaagaaagataaaccctctaggaagtgattaagagaaaaatcaaaagaaagactgaaaagcctgggcctggagtgacgcccacctacccttagatacctcccctgtacctaatggacttgatattctttgcaaataggcataatcattactgttttgcaatttcgtgaataatctacccttggagggaatgaagtttcttatcctattctgccagcctcctcagccaccctccctctcccccagcttataatctaaggactccacctctccccctcacacactattacagagtttgtttgaggagtgtacaagtgccttctagaaagaggcagactgggtattcgtttactctagtgctatcatcc

SEQ ID NO: 46431 - DNA, 1863 bp, Homo sapiens
tttatttaacttcttaaaatcttccccaaagttctgttatcagggagacaccttggtctgggaatatgccttccctcttcaatagaattcatgtaagtttcctgaggattggcactgtgtttgatccattgagatagctccgtaataaaaataactggcatttattaagcacttactttgtgtctgaaattgtgctgtgccctttacatgtttagttcccttaatgctcacatctgttctatgagagaggtgttcttcttatctgcattttataattaaggaaatagaagctaggggatgttaagaaactttcacaggttcacacagctactcagtgccacagatgcttcaccaatatgcaatacagtcttcctgcagctatcccggtgcccatgatgacttcttattctgtgtttgttgaatgaatgttgtgttaaggcatggattctgtttccagttctgctgctaactkgagtaatctcctcgaaataattgagctcattctttttatctaccgcctcccacagatcccagtacagagtaagtattcagtaagtatttaataaatgcatgctaaataaatgggtgaatgagtgcttgatcccagaattctcttctacatctaacagcctatgactgtagcttatatggatctcctcttccctgacctctcatagcacacttgatgtttagacatttgatttgatttgatttcatcttttgttggttctaactgtttagtgtgtgtgttttgtatttccgaatagattacattttatttccttggtattccccacagtgcctagcccagtgcctagatgtcatgagtgctcagtaaatatatattgcaatgggattgagtatcgcttcagcacacttcaagccagaagaaacactgaaattagtcacctcctgggctattgttttcctctttagagaagctgtcatgcagtttctgctaaacagatgttttggacaggtcagggagcagaatccaggctgcggctaatggcacaatttgacatcctgccacagtttacccacccatctgcccataagggctggtccccagatagaaagggtatttacgaagctcttagtaaatccagaggacaatcatgtaaaagatagactgttagataattgataaaatttctctgagtgagtggaacccttaggttgttgtaaacatgtgtacatgcttgcacgtgcacacacaagactcaactttgaaccttgagggaaaaattagactctcaaccttgctcctttctgatgaatgggaacaaaaccaattctcagagggtaaataggatggggaaatgcagacaggctcatcagtgcccaaggaaaccaagaagggccaccggagtgtcaaggctctccagggaaaatgtgggtttctacagcatgggagactccagagactttaacacgcaccaactgaaatcaaggctgctcggtgcatgtgttggtttcatggcatggatatttatacaagaaagataaaccctctaggaagtgattaagagaaaaatcaaaagaaagactgaaaagcctgggcctggagtgacgcccacctacccttagatacctcccctgtacctaatggacttgatattctttgcaaataggcataatcattactgttttgcaatttcgtgaataatctacccttggagggaatgaagtttcttatcctattctgccagcctcctcagccaccctccctctcccccagcttataatctaaggactccacctctccccctcacacactattacagagtttgtttgaggagtgtacaagtgccttctagaaagaggcagactgggtattcgtttactctagtgctatcatcc

SEQ ID NO: 46432 - DNA, 517 bp, Homo sapiens
gacaacctacttgtctttataaaatagatttatttggtaataagagttcctatttaaaaaaaaaacttgctttgaatttccagctgtcagagctgtgtaattttatgtgtgcttgtttttatttgagagattatatcctcttaaaagraaaacaagtaacagagtaatgaagataaaataatctcatttttataaaaagtgtattttatatgtttgcatatttgtatatgagaaacactgcgcagtggtatcatgtgttacctaagaaagaatagaggagtagagggaaatagttgactttccttcatatatctgtgccaatgttattttttcttttggttttgtgctagaaatacaaattgaaaaaaaaattttaatgaaacgtaagtattgaagaaccaatgagataaattaattaaaattatgatagacaccatgatagagtcagtatttatattaataatattttaatacaacagggtgtacattcgtaagtgtgaataacattttgaaatat

SEQ ID NO: 46433 - DNA, 535 bp, Homo sapiens
cttacttcgtgggtacagtccatgttaataactgaatgacccatctcatagtaaagctttaaaaaatgtgtttttttaagtttactgaaagaactctcaaattaaaatgaaatgatataaatataacataaagtaatataaaataaaactaaattacaatgggactcatttaatraataacaatggaagtaatagaaaaatttaaaagatatatgttttgtgttcttaaccagaaaaaaacaaattcaacatatgtcacaaaagtgtaacaaataagctctttaatgattcacattctaagtactaaaacatgaaatacactcatttgaaccatagcagtacattaaaatagtaacgctattaaagtgccatttctctacaacaaaatgaaaacccattaatttcctgcctttacaaacgatactatagagagaatatttctttagtaaaaatgaattgaggaaatttaccaaagcatgcttaaataaataaatgtttcaagaaaaaacaaataaatatttaatttcattttgtg

SEQ ID NO: 46434 - DNA, 535 bp, Homo sapiens
cttacttcgtgggtacagtccatgttaataactgaatgacccatctcatagtaaagctttaaaaaatgtgtttttttaagtttactgaaagaactctcaaattaaaatgaaatgatataaatataacataaagtaatataaaataaaactaaattacaatgggactcatttaataaataacaatggaagtaatagaaaaatttaaaagatatatgttttgtgttcttaaccagaaaaaaacaaattcaacatatgtcacaaaagtgtaacaaataagctctttaatgattcacattctaagtactaaaacatgaaatacactcatttgaaccatagcagtacattaaaatagtaacgctattaaagtgccatttctctacaacaaaatgaaaacccattaatttcctgcctttacaaacgatactatagagagaatatttctttagtaaaaatgaattgaggaaatttaccaaagcatgcttaaataaataaatgtttcaagaaaaaacaaataaatayttaatttcattttgtg

SEQ ID NO: 46435 - DNA, 1043 bp, Homo sapiens
tatatttggaagctgactatatagttgagaggtctctgaattaatttacaattagaataaagtttatttatagataagtaaaagggctaacttagtatattatgtattatatattcattatgtacaaatatacgtgcattatattattaaaacttaacaataattgtggcaattacttaaaactttgtccattacaaagatttttgggacaggaytattttgataaggtttaaaattgccagaaatggtaaaataaaaagcagagtgactcatgatgggttttattattgttttcaaattctttataaactaccccgtaatgcctatacccacagtggactgatctcactgccttgtcttgatatatcactgatggtaagatcttttattcaaagtgccttgagcaaaagaaaattccttcaggcacggtttgatccagggagctcgaacagtgtcatcagagctcctccaaattattccaatctgttttccatctgttttcctctgggttggcttccttctacagcaggctgtctacttttagttgcaagatgactgacagtgactccagccatccaaatgcctttctccaggtcactgcagcagaagtcccaaaatatgactctaacaatgtcgtatgcccgtacttgaaccaatcacagtggccacaggaatgcaatattctaattggcctttgaaagtcaatattctaattctgacaggcttgggtcacttgcccccatttggagctgggtatggggtaggtccattttacacgaattacatggaagtagaggaggaaaggcaggcccccaagaaaaattaagattgctgttagcagaaaaagaggagatagatatgggatattcaagctacatccatgtactacaagcaattatttctgattcctatccagaattctgtcctaaaagtgttcccacttggtaaatcaggtacatagatatgaagttctcacccccgcattgattgccactgtagcttcctcttcctttcgtaggattctcagcaggaatcccctcttc

SEQ ID NO: 46436 - DNA, 559 bp, Homo sapiens
taagtattcttaggataataaaataaaaactctaaaaaacacacatacaagtcatgcacaatagaaccacgcaatatttttaaaattagattgggaactgcaatctaaaagtgtataagccagcactatagcaaaaccttatctctacaaaaaaatttaaaatttaggtgggcattgtggtgcctgcctgtaatcccagctactcaggttaaggtggaaggatcactggagcccaagaggttgaggctgcagtgagccatgatcactttaatgcactccagcctgggcaatatagcaagatcctgtctcaaaaataataagaataataakaagaaattaattaattgaagtgtataaaaatgggataaaatgaggacatatacttttatacatacatgtatagtcttaatttaaaattaagcctacttttaaaatttataatttaacattattagctaaattagggctgtaaaatttgtgtatttagttttaatctttaatttattgacagcagtataagcttcaccttttttcctttaattttggtcaggacaaggta

SEQ ID NO: 46437 - DNA, 623 bp, Homo sapiens
aaggtggcagtggctgggaggtgtcaaaaaacaaattcgtgctgctgcatctcctaaccagtagcccatgagcatgaatggcagcccgaacctgatcacactaaatagcatctgtagccctgatgagcaagctgagggtaccatggtgggagaggccaagggcagccaagatgccccagtctgacagcaccagttattaacattgaaatgcctcagtactgaatggcaataaatgatgttgccctgggcctcccaagtctcttgattggtgggcgctaggtgacacagatagtaaaagatgtattatattactgctagtcaaacccacaggatccatcaactcccctagtttaggccctgtttgttcctctccccatataaccaaggcccaagatgcctagataggggagcttcctgtggtttatgactggaagaaaatctccacaattgctggtaattaactctggaattgcatggtgaatctttgttaaacacccctcttccaaaagtcaggaggttgaataaatattaaaacattatacttttatcaggcataaaaagcagacttcattcttgtaacctctattgaaggtgccatagtgatttatttttaaggggraaaa

SEQ ID NO: 46438 - DNA, 539 bp, Homo sapiens
ggagaactatttacaagttaatttctgtttcctgatccagtcattctccttaataattattaatagaatacctattatrttaggtattctatagaatacctctcaataaaatacctcttctcttccctcctataatatctgttttactgttatagtacgtagctagtcagacatgagcaaggcaagagaggacccctcctcactccaccaggaatgtcaaccaaccatcaggttatggtcaggcagttgttaactgtctttctaaaataattagccacagccagcgccatggaaaggtagtctctcaataggtagaaaaacttgaagctggtgatcagcagctccttaataagatctcaggagttggacgagtgggctcacatatgtgcactaaaaggcaaaatggcagagtataactggtctatgacctcgtagtaacactgaactggtaagggaagatgcctaaaatgaacacgtgcacaattttggtaaacacacggcacatgcaacccttctcaagtgctggcaggccatagtgc

SEQ ID NO: 46439 - DNA, 546 bp, Homo sapiens
ctctacgcctggctaatttttgtatttttttttgtagagacagcgtttcaccatgttgcccaggctggtctcaaactcctgagcttaagtgatccactttgcctccatctcccaaagtgctaggattacagatatgagccaccatgcccggcctactagtgtgtcatttaagtcttaaaacagtttatggttaagtgttactattaagcctattttaatgaaactgtagcaaacttagttatgtcacctgcccaagctcagatcatttttaagtagggccagaactttatcccagggataaataatatttcagtggactgagaagttgaattaggaaaaaatgaacctaattttgattttgagaaatctattgaatgttccactcataattaatttacaacaatgaacaaaataagggaaaaaatcatcacctagaagacagrtatatagggttgaacagagagtgacaaagagcgagagctagaagattctttgggggcccctctttcttacatctcagcctctccgattctatcagatgagtcc

SEQ ID NO: 46440 - DNA, 279 bp, Homo sapiens
atttttgaattagcttgttaattctgggaaaaaaagtctgttaaggctttatgggaattatgttaaatctatgaagtaattcacagagatttgacatcttaaccaatttagagtttttaattccatgaacatagtatacaccttctttacattgggttttctatartatctcttcagatgatttgtagttttccatgtataggttttgcacattctatgtcaactattttccaatgaccagaaattgttattttatatacattttccagttttatagca

SEQ ID NO: 46441 - DNA, 351 bp, Homo sapiens
  misc_feature (1)...(351): n = A,T,C or G
tgtctatctgtcaaattcttacttgcttctacacttagcaatattacaactgtaatagaatcaggaatattctctctcactgtaaacaccagttttcacccaaaataagcactaactgtacttcacagaaagatacagcagtttcctgggcagtcacagcctctgcaaggctgaatcctctcactcacctatggaaccttcyggttatatgctgcctttgatgcaaatttaactatccctgtctgttcagtattccagaaagtaaatggactccggactccttaaggctggcactggacaattttttatcagtgcatcctctttttcccttttttncccacaaggaggcaa

SEQ ID NO: 46442 - DNA, 578 bp, Homo sapiens
tttttttttttttgagatggagtctcactctgtcgcccgggctggagtgcagtggtgtgatctcagctgactgcaacctccgcctcccaggttcaagcagttctcctatctcagcctcctgagtagctggaattacaggcacacaccatcacgcccagataatttttgtatttttagtagagacagggtttcgttatgttggtcagactggccttgaattcctgacctcaggtgatccccctgtcttggcctcccaaagtgctgggattacaggcataagcyaccgtgcctggccttaacagctcttaataacagtagctaacatttattgagagcttgctatttgacactcctttctgcatttgatttgggggtattttccctttggaacatactgtgtagtgtgcttatgttggattaaaattgtagcgatacaggcatgccttattttattgtgctttgctttgttgcactttgcaaatatcgcattttttacaaatagaaggtttgtggcaaccctgcatcgagctagtctactggcatcattttccaacagcatgggcttacttcacgtccct

SEQ ID NO: 46443 - DNA, 561 bp, Homo sapiens
tgcccgaataaaaatggatggggaagcaatgtacagctaactaaagacctctaagacctaggactgagcctgattctgcaatgaggtgagagaagttacaaaagtaatttaatctatctgagtttaattaatcattkagttttttcttcattaccaattcagagataataaatctctgccctgaaaacttcataactatgaaattcaaaagtaaactgtaggctgggcgcggtggctcacacctgtaatcccagcactgtgggaggccaaggtcagggggatcacaaggtcaggggtttgagaccagcctggccaacatggtgaaaccccgtctctatggtttttcttcattaccaattcagagataataaatctctgccctgaaaacttcataactatgaaattcaaaagtaaactgtaggctgggcgcggtggctcacacctgtaatcccagcactgtgggaggccaaggtcggggggatcacaacgtcaggggtttgagaccagcctggccaacatggtgaaatcccgtctctactaaaaaaaaaaaaaaagaaaaaa

SEQ ID NO: 46444 - DNA, 561 bp, Homo sapiens
tgcccgaataaaaatggatggggaagcaatgtacagctaactaaagacctctaagacctaggactgagcctgattctgcaatgaggtgagagaagttacaaaagtaatttaatctatctgagtttaattaatcattgagttttttcttcattaccaattcagagataataaatctctgccctgaaaacttcataactatgaaattcaaaagtaaactgtaggctgggcgcggtggctcacacctgtaatcccagcactgtgggaggccaaggtcrgggggatcacaaggtcaggggtttgagaccagcctggccaacatggtgaaaccccgtctctatggtttttcttcattaccaattcagagataataaatctctgccctgaaaacttcataactatgaaattcaaaagtaaactgtaggctgggcgcggtggctcacacctgtaatcccagcactgtgggaggccaaggtcggggggatcacaacgtcaggggtttgagaccagcctggccaacatggtgaaatcccgtctctactaaaaaaaaaaaaaaagaaaaaa

SEQ ID NO: 46445 - DNA, 561 bp, Homo sapiens
tgcccgaataaaaatggatggggaagcaatgtacagctaactaaagacctctaagacctaggactgagcctgattctgcaatgaggtgagagaagttacaaaagtaatttaatctatctgagtttaattaatcattgagttttttcttcattaccaattcagagataataaatctctgccctgaaaacttcataactatgaaattcaaaagtaaactgtaggctgggcgcggtggctcacacctgtaatcccagcactgtgggaggccaaggtcagggggatcacaaggtcaggggtttgagaccagcctggccaacatggtgaaaccccgtctctatggtttttcttcattaccaattcagagataataaatctctgccctgaaaacttcataactatgaaattcaaaagtaaactgtaggctgggcgcggtggctcacacctgtaatcccagcactgtgggaggccaaggtcggggggatcacaacgtcaggggtttgagaccagcctggccaacatggtgaaatcccgtctctactaaaaaaaaaaraaaagaaaaaa

SEQ ID NO: 46446 - DNA, 595 bp, Homo sapiens
atctgtcttaacaaaaaataataaaccaagaaaataaaagatatgggatcctagaaataaaaggtgcaacacaagagagagataaagaaaaacattgacagcctctctatgaagaaagacccaaagtaacaactttgcaacagctctagggaataatttgttcagataagagtaactcaggagactccaagagcgattttcgagaagattaaatctatagaatacctaatatgtttgcacttgtaaagaagagttttatactacttggagagaatttagcagttcatctatcagtatcatttgcatagatataatgttcgctaaatatttctatagcctaaggaagatggtgaatgagaagtgtgcttatgtgtggcaaggaagaaggggatttaccaagtgggaagtccatggtcaaatgcttaagacttagtaaggcatttaccaagtgggaagtcaatgggcaaatgcttmagacgtagtaatcagaatgcaaatacataagtacatgtagaggcaaaacatagcattgtagttatgtgcgcagatgctggagtgagactctctgggttcaaatcccagccctaccaattac

SEQ ID NO: 46447 - DNA, 508 bp, Homo sapiens
cttaatgaagctgaatcttttaatttaagcattttaatcgagagtaaggcctctatatacctagtggctacacttttccctattaaataaccatcaataatgatgtaccattttttaccttgtacataagtgtttcactatggattttcttggcagttctcaataatgctttcctattaataaccctgaaagaaataacagactcaaacataatgcatcttttaggacaaactaattatatttataaaaggtactctgggtccgtggcttttatttaacacaaaatattattgcccttcctccaaaaatgaaggtactttcacagctttaataataaggcaaaaattatgttctttttgtttattaaaaaagtacaaygtattccttttcaaaaagaacttcccagaagaaaattactattcatttaagataaatttatcatgataaggcataaagaataagtccaataattaactttcaaaattgtacacaacatttttgataaatc

SEQ ID NO: 46448 - DNA, 508 bp, Homo sapiens
cttaatgaagctgaatcttttaatttaagcattttaatcgagagtaaggcctctatatacctagtggctacacttttccctattaaataaccatcaataatgatgtaccattttttaccttgtacataagtgtttcactatggattttcttggcagttctcaataatgctttcctattaataaccctgaaagaaataacagactcaaacataatgcatcttttaggacaaactaattatatttataaaaggtactctgggtccgtggcttttatttaacacaaaatattattgcccttcctccaaaaatgaaggtactttcacagctttaataataaggcaaaaattatgttctttttgtttattaaaaaagtacaacgtattccttttcaaaaagaacttcccagaagaaaattactattcatttaagataaatttatcatgataaggcataaagaataagtccaataaytaactttcaaaattgtacacaacatttttgataaatc

SEQ ID NO: 46449 - DNA, 513 bp, Homo sapiens
tgctgaacaacaatcataataatgattatctgcaatgctcagtaaatatatgccaaatgaatgccccctggccagataaataaagaattctcttcagcattattaatatgttaccrataaatgacaccaactggatttacagaatcatccaggaagcaaagagattctagtccaagtagaaaatgccaagtagggtaagtttagcagcattcaatcctctaacaaaagatcagcaaatgtcctagagaggtagggtctgatttcctgaatccgactttaagtggacattatggatttccagatcctctcagataggaggggccaaagccaggagggacaaatgctggacagacgtagcggtgggaacgagagcttgcatgcacatcccaacacagacagtctcacacaccttcccttggatgggatacactagactgtagacatggacgggctggtgtgcttctctgtaaatagaaaatgagtctcactctagttgcccaggctggagtgcag

SEQ ID NO: 46450 - DNA, 1859 bp, Homo sapiens
cagtgcctaaggttgaggcagctagagaaggctcagggaggaggtgggaaccgagctgggtttggagttgagagagctcttgaaaagcaccaggaaggcaggggaagatgcggccctgcactttctgagggggaccattaagagatcaagttgactaaagcagagactttgtgtaggtgatgagcctgggaaagtagctatggatgccagactgagcacccatagcaggaccacgggatggagatgggaggggtcaggggccagggtggggtggaatgtgggrcagaggttcaggggaactgatcagagttgggaggtcatggagatggactatcttggggaatgggttcaaagcaaccagagttgcttctttctgacccaaaaacaaaaattaagaagatgagtgaagaagaagtaaaacagttgaaacagaaagaaagagaaaattatgagggagggaaggtaagggcagataagatttactgccacgttggtgtattttgttcagtacttcatcaatgccatgcccaaataactgaaagaggcagcaattctgagctctctggtccctcaagatagtcaatgatctttagcatttctcatttattaataaacatttgttttctttaaataaagaaaaatacttattggatttcctgcttcgttctgcagggcattccaatatcacagtaaagagcaacaatgtgtgataatggctgaaaacaggaagtcctccataatcattaggatgagagatgcagttttatttgaaaagtaaagtgagtacattttcttcctcctcctcctactgtcctccccatcctcccactcttcctctttctctattctatctttaatttatgagaccagaggaggaaggcgctatggtgttgtaaaattgaattctgagttaggacaggatttgattactaactaaccatgtcagcttgagtatattacttcacctcctagatttaatttttttttgttcaaaaaatgaaaggattagatttacaaaatcacttctacctctatgaccctgaaaataagatttttaaaatattattttatatttaacaaggagatgggaagtctaagcattccttttggtcttggcttcttattctgcagggtgaccatggtccttgggccctaacatctggacgaagccttgtaaaacagaaatactgaggtgttttaatcctcagaaacatttagattgggacacaaatcttattttttactcttaaatttttcacattttgggggacatggtctatatttttctcagatttctgatatgttgtcttttaaaaatgtgtaaaagttacagttccttttctatagtttattttaaaatgtgggtcaatagtcccactgcttagaataagaggcacacaggatttcaatagaaattgcatgcctttttagatgtgcgaatgtttcattaagcgtatgaatatttgaagagatgtatgacactttaaaaactgtttcctctactgtgttggtggccaggtattaagactgttaataataacaatttagctctccaaatatcctgcatcacaggtgttaaagaggactggaaacaccttagttcttgtattcttgaggatgatttgccatattgtgtctagtatcacggcaaaactccaagtagcattttaaatagtatttatttgggttggaattatttctatgcattgactcatcttcctgggtttcattagctgtacgcattgtactttcttccttaccactatttatctcgaattcttgagattaaagtacagatgaaatctaaactttatctggtaaagttattagttcttacaagtagcaagcaaacggtaaac

SEQ ID NO: 46451 - DNA, 1003 bp, Homo sapiens
ttaagttaacacttttcacatttctcaaagaccgtatctttaaaataaaagattaagagctaccttagctggtaataaaactggtatacttaaaaaaaaatcagagattgttattttatcattgtacttgtttggcatggctaagatgtgttactggtcactaagggtgaggtttcacttccctaacctgttcttgaaggccttcaacagatcccacttcttgttccactctagtagccacacttctaaaaatgatctgtgcaacatatataatatgcaagctgtagaatgctggctgttaaaaatggggtccattttcaaatacaacatttttctaaaccatgcacaaaagaacagccctacagggacactcttccatactgtatacatgccgttgccactacatgtgaatactggcagacgttagtggctaaagataaacattagataaaacataggtcttcactgagcagacctgaaatagcagagcaatgaagtacattacaaatcagcatcccastacattttaaaaaacaaaccaacaagggtgtcatgccaccagtcaaaaggtactttgcttaaactggcattctttaacattcatgttgtagtggtaagtacttcatttcatacagccacagttattaatactttcctaagggctaccagctgctaaaaactgctgttatctcatactgagaatgctagttctatacctttgctctcaggctgtgaggaaggggtgctagtccaaaaggccatgggattagatttaaaaaggctaaaattaaatcctagaaaataaagaatatttcattttttaacattttaggaaacaaaatgaatatgcttttaaaacataaaaagccagaatccctcaatttataccaccaatctgactgtcttacatattcatttatccctgtagtttcattctttgctcatttaatacatgagcaagactgacatacaacacataaaatgagaacatctcaatatcatg

SEQ ID NO: 46452 - DNA, 1003 bp, Homo sapiens
ttaagttaacacttttcacatttctcaaagaccgtatctttaaaataaaagattaagagctaccttagctggtaataaaactggtatacttaaaaaaaaatcagagattgttattttatcattgtacttgtttggcatggctaagatgtgttactggtcactaagggtgaggtttcacttccctaacctgttcttgaaggccttcaacagatcccacttcttgttccactctagtagccacacttctaaaaatgatctgtgcaacatatataatatgcaagctgtagaatgctggctgttaaaaatggggtccattttcaaatacaacatttttctaaaccatgcacaaaagaacagccctacagggacactcttccatactgtatacatgccgttgccactacatgtgaatactggcagacgttagtggctaaagataaacattagataaaacataggtcttcactgagcagacctgaaatagcagagcaatgaagtacattacaaatcagcatcccagtacattttaaaaaacaaaccaacaagggtgtcatgccaccagtcaaaaggtactttgcttaaactggcattctttaacatkcatgttgtagtggtaagtacttcatttcatacagccacagttattaatactttcctaagggctaccagctgctaaaaactgctgttatctcatactgagaatgctagttctatacctttgctctcaggctgtgaggaaggggtgctagtccaaaaggccatgggattagatttaaaaaggctaaaattaaatcctagaaaataaagaatatttcattttttaacattttaggaaacaaaatgaatatgcttttaaaacataaaaagccagaatccctcaatttataccaccaatctgactgtcttacatattcatttatccctgtagtttcattctttgctcatttaatacatgagcaagactgacatacaacacataaaatgagaacatctcaatatcatg

SEQ ID NO: 46453 - DNA, 1003 bp, Homo sapiens
ttaagttaacacttttcacatttctcaaagaccgtatctttaaaataaaagattaagagctaccttagctggtaataaaactggtatacttaaaaaaaaatcagagattgttattttatcattgtacttgtttggcatggctaagatgtgttactggtcactaagggtgaggtttcacttccctaacctgttcttgaaggccttcaacagatcccacttcttgttccactctagtagccacacttctaaaaatgatctgtgcaacatatataatatgcaagctgtagaatgctggctgttaaaaatggggtccattttcaaatacaacatttttctaaaccatgcacaaaagaacagccctacagggacactcttccatactgtatacatgccgttgccactacatgtgaatactggcagacgttagtggctaaagataaacattagataaaacataggtcttcactgagcagacctgaaatagcagagcaatgaagtacattacaaatcagcatcccagtacattttaaaaaacaaaccaacaagggtgtcatgccaccagtcaaaaggtactttgcttaaactggcattctttaacattcatgttgtagtggtaagtacttcatttcatacagccacagtwattaatactttcctaagggctaccagctgctaaaaactgctgttatctcatactgagaatgctagttctatacctttgctctcaggctgtgaggaaggggtgctagtccaaaaggccatgggattagatttaaaaaggctaaaattaaatcctagaaaataaagaatatttcattttttaacattttaggaaacaaaatgaatatgcttttaaaacataaaaagccagaatccctcaatttataccaccaatctgactgtcttacatattcatttatccctgtagtttcattctttgctcatttaatacatgagcaagactgacatacaacacataaaatgagaacatctcaatatcatg

SEQ ID NO: 46454 - DNA, 1003 bp, Homo sapiens
ttaagttaacacttttcacatttctcaaagaccgtatctttaaaataaaagattaagagctaccttagctggtaataaaactggtatacttaaaaaaaaatcagagattgttattttatcattgtacttgtttggcatggctaagatgtgttactggtcactaagggtgaggtttcacttccctaacctgttcttgaaggccttcaacagatcccacttcttgttccactctagtagccacacttctaaaaatgatctgtgcaacatatataatatgcaagctgtagaatgctggctgttaaaaatggggtccattttcaaatacaacatttttctaaaccatgcacaaaagaacagccctacagggacactcttccatactgtatacatgccgttgccactacatgtgaatactggcagacgttagtggctaaagataaacattagataaaacataggtcttcactgagcagacctgaaatagcagagcaatgaagtacattacaaatcagcatcccagtacattttaaaaaacaaaccaacaagggtgtcatgccaccagtcaaaaggtactttgcttaaactggcattctttaacattcatgttgtagtggtaagtacttcatttcatacagccacagttattaatactttsctaagggctaccagctgctaaaaactgctgttatctcatactgagaatgctagttctatacctttgctctcaggctgtgaggaaggggtgctagtccaaaaggccatgggattagatttaaaaaggctaaaattaaatcctagaaaataaagaatatttcattttttaacattttaggaaacaaaatgaatatgcttttaaaacataaaaagccagaatccctcaatttataccaccaatctgactgtcttacatattcatttatccctgtagtttcattctttgctcatttaatacatgagcaagactgacatacaacacataaaatgagaacatctcaatatcatg

SEQ ID NO: 46455 - DNA, 1255 bp, Homo sapiens
tgcatctgggtcttcattgtaacattgctgttatttatagatatttgttgaataaatatacaaactacttcagtgatgtgggtttattatcacctcttactacctctcttgcttcacttggaaaacagaaatggtaattataccattgttctacctctcctggagaataattactgtaaagattttttttaaagtggaaaatgacaattttgaatgagtgcaaaaattggttactatggtagatagaatatggcctatgcccctatccccagattatagaaaaaagaagtaaaattgcaaatggaattaaggttgctaatcagctgaccttgacatagagacagtaccctggattatccaggtragcccaatgtagtcatagggtctttatatgtgggagaaggaggcagaagagtcagtgtcagaggaatgtgatatgagaaagactcaaacagccatttaaagccatcaatctggctttaaagatggaaggagaccccaagccaaggaatgctggtgggctccagaacctgaaaaaggccagaaaagagattttcctttacagcctccagagggaacacagccctacgagcacttagattttggccaagagagactcattttggactccttccaaaactgtaagaaaataaatttggattgtttcaaatcactaaatttgcagtgatctggtacagcaacaatgggaaaactaatacaattactttcaaatgttttagaacaggaatgggcctttctagatcattaaccataatcaggtgtttgtcatgaagactaaggcccccataggtaaggtcctgggtcccagttaattgaacataccataatattggccaggcatggtggctcacacctgtaatcccagcactttgggaggccaaggcaggcagatcacttgaggtcaggagtttgagaccagcctggccatcatggtaagaccctgtctctactgaaaatacaaaaaattagccagacatagtgttcacgcctgtaatcccactggggaagctgaggcaggagaattgcttgaacctgggaggcagaggttgcagtaaaccaagattgcaccactgcactccagcctggatgacagagagagattctcccaaaaacagaaaaaaaaaaagaaaagaaaataccatagttttgatacagacaggaggcagggaaatactgagtagaagagagcagggtccctggcaagggtttcaccctcaaacctggacccacagcc

SEQ ID NO: 46456 - DNA, 617 bp, Homo sapiens
gagtggaaaacctttcccattcattcaaagaagggaaagagactgaacttactcccaacaggtgaagttaagcacgtcctgtaagtgaattgatttgttgtataaatcaaagttctgttcatagggaccatcaacaatgttctctgacctggcacccttctgttcccccaccccacccttctatcctcctagataactactgggaaaatatktctttctcggagatgcctttcttcctccttgatgatagtaatcatttttctctttttagctcaaaaggagaattttttttcctttgtcatgtctgtgtgccttgcctatctaatacagtacattgtttctcatttcctttgttactatgcttgtgcatgtctcaaaaacaaatgtgaactttttgtccaaacaaagtaagtgcatgctttataaaattacaaaggaatggtacagctgttctctgattatattcttagagtgtttaaaattttgaaagtgcttaggagtttctttttaaaaatctgtcaacaaacttcttacagaaacctattttgtgaagtgttttatttttgctcctatgaattgtatataaaaatacctaatgtgttttagtagtaataatg

SEQ ID NO: 46457 - DNA, 589 bp, Homo sapiens
catggaaaataaattcatcaactaaaggaaaaccatacggtggtatatgcagagcactgtctgaaacacacattctataaggttttactctattacatttgtttctatccaaccttaaagctatgattgatacttatttaattttctgcttaattgatttgttccaaatctgagccatgatgacccaagcaaggccacttaaggatgccctctgccttattagcatgacctttagtataataactactatatgatttatatttagctaagtgatgatccatgggatgacatatagccttcccaggcggtttacttattttgagatgtccgtgggtgctggttttccccatgaatacctgacgttctgggactaattttccccctatttatattacgtttgcttaggatgccatgtcaaagtggcttgttgggcaggtgttrgacagcacccagcttaatttttcaaattggatataatctttgaaattttagttagtgacttgtcgtacagaaggaacactctaaattattaaatatgcctcagggtggagaatcagcacatcttcattcagtattagattcattctaa

SEQ ID NO: 46458 - DNA, 515 bp, Homo sapiens
caaaaagaataaaataagaataaacttaaccaaggagataaaagatttgtatactgaaaaattacaaatgttgttgaaaaacagagccaaataaatggaaagatgttgtgtttatggatcagaagacttaatattttttaaaatgtctgcatacccaagggaatctacagattgaatctggtccctatcaaaatcccaatgatatttacagaaatagaaaaaagaatcctaaaatttatttggactcacaaagggcctcatacagccaaaagaatcatgagaaaaaacaaagctggaggctttgcattttctaattttaaaacacattacaaagttactggcataaagatactggcrtaaagacaaacatacaaatggaacagaattgagactctgaaatatacccacacaaatatggccataattattaattttaaaaaggcttaaaatttatctgaaaatgacaaaaaaaaactccatgtcaatacccacatttgaaatcttagtaaaacagt

SEQ ID NO: 46459 - DNA, 1137 bp, Homo sapiens
gagcccatgccactcacagtcttgtcataccacacctaccagtgaacagtattgccttataagcatatagttctgactcaagcagcgtcaagcctagccttttcacaggataatttctaacagttgggtctacccatgagttacacgaaccactctccagattcaatgagcttctattacctctgttacaactatcactcttgtgagtacagactaagttaactcataagactgtttagaagatgcctttgctacaaagggcactcctcgaaagttcttcctaccctcccagacatttacgatgtgtgaagagaaatgccccaaccagtcacaatctccccaatgtctgaagtagtcagaggtatcacacagtaaccttgaactacttctcttaggtgccaataggactatgaactccatgaataaaatcagctggtactaaaaatggtaactgcttataagtcaaccaccaggtcaaagatggcttactcaaaaaatgtcacaagaaaaaaaacatcaaatcaaagtgaccagcctcactgcctagcaaccaacycactcactcattcacacagaaggcaaaattgaaaggtagctgggacgcccataggaagaaaacagttaggatgatgcaggggagactgatacaaggctgttattctaatcatcccataacagagacagagtcacagctagggaattattcaggaattaggaaaagttacttctggtaaacaaactcccacatactgggttaaaatttctttggaactttatttatcatgaccctaggagctctagtcatatatgcaaatggataaacaacaaagctataaaagcagagggttttaattttgcttttattttttaaataatagcaacaaggaactttagtaagaataacatagtaaaactagacctgtaaaagtcatcaaaagcaaacatgacaggaatagcataaagtaatttgtgaaagctagtattatcaaagcactgacagaagaaaaagaatgatgctaaaaaatacaaaacacttctttcaataccataccttatcaatggcttttccaacccgagaaacactgctgtggatgtctttgtggtcggaggccaatttttgaacagtatcctttattc

SEQ ID NO: 46460 - DNA, 1137 bp, Homo sapiens
gagcccatgccactcacagtcttgtcataccacacctaccagtgaacagtattgccttataagcatatagttctgactcaagcagcgtcaagcctagccttttcacaggataatttctaacagttgggtctacccatgagttacacgaaccactctccagattcaatgagcttctattacctctgttacaactatcactcttgtgagtacagactaagttaactcataagactgtttagaagatgcctttgctacaaagggcactcctcgaaagttcttcctaccctcccagacatttacgatgtgtgaagagaaatgccccaaccagtcacaatctccccaatgtctgaagtagtcagaggtatcacacagtaaccttgaactacttctcttaggtgccaataggactatgaactccatgaataaaatcagctggtactaaaaatggtaactgcttataagtcaaccaccaggtcaaagatggcttactcaaaaaatgtcacaagaaaaaaaacatcaaatcaaagtgaccagcctcactgcctagcaaccaactcactcactcattcacacagaaggcaaaattgaaaggtagctgggacgcccataggaagaaaacagttaggatgatgcaggggagactgatacaaggctgttattctaatcatcccataacagagacagagtcacagctagggaattattcaggaattaggaaaagttayttctggtaaacaaactcccacatactgggttaaaatttctttggaactttatttatcatgaccctaggagctctagtcatatatgcaaatggataaacaacaaagctataaaagcagagggttttaattttgcttttattttttaaataatagcaacaaggaactttagtaagaataacatagtaaaactagacctgtaaaagtcatcaaaagcaaacatgacaggaatagcataaagtaatttgtgaaagctagtattatcaaagcactgacagaagaaaaagaatgatgctaaaaaatacaaaacacttctttcaataccataccttatcaatggcttttccaacccgagaaacactgctgtggatgtctttgtggtcggaggccaatttttgaacagtatcctttattc

SEQ ID NO: 46461 - DNA, 1801 bp, Homo sapiens
gtttacagcagcataattcacaattgcaacaatatgaaactagcccaaatgcccatcaatcaacaagtggataaataaatcattttatatatatatataaaataccatgaaatagtattcagccataaaaaggaagaaaataatggcattcacagcaaggtggatgttattggagaccattattctaagcgaggtaactcaggaatggaacaccaaacacggtatcttctcacttgtaagtaggagctaagctatgaggatgcaaagactgaataatgatacaatggattttggggacttgggggaaagtgttggggagggtgatggataaaagactaaaattgggtacaatgtatactgcttgggtgacgagtgcaccaaaatctcacaaatcactactaaagaactaactcatgtagccaaataccacctgtttctcaaaaacctatggaaataaataaaatggaagaaaattaaataaaataaaaaatagatcatatcagtgaatggcctgcattttaaaggagcaggcttaattgtctggaaaggcaatggggagaaaagagaactgttgtacctgagatgggagagaacaatagctccctaggcaagaaaaagttacatatttgcaaaagccaagttccagtgaaggagaataggtacagggattgctctgagaagtcgtttgggagactggagaatttgctgtacatgaagactacaatgagttgtgtttaagagtctggtgctttggaatcagaaagtttgagtttaaatctttattgtgtgatttggtacatttatgaactttgccagcttatgtaacttctttggtggaaattcctgagaacacaagggaagagtgtgggaagtaaggtaggagtggagagccagatgagttcaaggaggtacagtgcattactggggatgacagaacaacagaaaggtggccaggtgggcttacactgtggccactgactgatgaaaacagtaataagcagccttgtgtatgatttcaacagtctatttgagaagggtgattactgggtctaatggctagagggcttagtgcacaaatacttggatgatatctatttttgcagctgtggtctaaatgtacaggacagtcagaaaaggagaagtatgtgtcaagggagagacagacgtaatgataaaaagtcatagtgattgaggagaagaatgaaatagggagctgattttatgcatttgtttcacaaaatcaggggacacactcaagacagctctgaaaacaaagatatggccttttacaaccatctagattaaaaaaggttatttctgctaggatttgtcacaaagaattacatgttttactcaaactttaaaagcacagttaatctcactctatttttctcatttccaatggagaaaaatttcaatttactgctttgcaayatgaagagtgtgatatttaatttcacagcaaatgagttttctattttcagataatattcattttttgaggtttttcttctaaagacattataaaaccatatcacaacattttcccccataatagtcatgaaatatgcttcctaactttgtgcacatctggggtggagttatcctgagggatgcagtctctatgctttgcagagtgggtactgagattgcccttcagagcacacagcttttttggcagcatccttgctattatactagacattagtcacaacagtgacattcacaagatggaaatacctatgctcactaaagactggttcattggaatactattaccagaattattttccagtcagca

SEQ ID NO: 46462 - DNA, 600 bp, Homo sapiens
tgcatacttgaatgtaagaactgtttcactatcaaaaatgtaagtgccctcagaagtagagacaaacattaagacaaaaaaaactgaaacyatagtaaactgatctagtcatatggcttacaaagcaaaacacagttttatgattaccagtggattaataaatgcttgtgtaacggaaagttttaattcaaggaacatatttaacctgggtatgcaatgagctgtatgtttaatgaacaattgtgtagaacttcactttaatttggttatgcctgcctgggcacttcagcatttcagcatgtcattagattgttattttcacacagttttaactattttcttattaagaaaataatggtataagagtactttgatgctgtccttttcaatgctagaaaaaaatcttcaaacatattgtgtttgttttaggtaaatctttatgcaaaaccacaatcttttcaatatttaggtaagaactatcgttctacatagagtgaagttcatgcctggtacaaaaagtggttggtatttattccacttaaagatgtagtaaatctgagaaaaatcagtgttgtaaggtccttaaatacctatatgtgt

SEQ ID NO: 46463 - DNA, 2544 bp, Homo sapiens
tgcattttttaacccatcagcttcataaagattaaacagaatggtaggtaaatatatacagtgttgagaagagtgtggggaaatggcgtatggggctgaactggcttacctttcaagaggccagtttcacagtatatagcaaaagccttaaaaatgtgcatccccttttgccttggaattcaacttctagaaattcatcctaagaaataagcaagcaaggatgtttgctttgcattgtttcaacagtgaaatattgcatgccagggctttaaaatcccttccagagtatggataaagatactatcattgtctgatatgctagatgctgcacagagcataatattatactctgagggtataatgtgattcagaaatatgtatggattaatacacataaagaatatactgaatgccaaatatctgattttaaaagtaatttatttaaattatgcaacttgaaataatttacatatttaaaagatagaagattagttacataaactacgtaatatccaagcaataccactattagaaaaaatctatatattttttgacatagatttgcattttgtatgtttttatgtgaaagatgcgtaccacaaaatagtactatcttatttttatacaaaatttacaaaagacagaaaacatatgtatgggggaaaactgtaagcatacacttcaagacattattatgggtattgctgagtagtgggatgatgataacggatttttattttcttctttatacttttctgtatttccttttcttcccaatgaggatacattgctttcacgattgaaaaaaattttaattaaactgtttctagaaataactagcagattaatcagacacagttttctctgtactagcattgttgccagaacccccaaaaatatttcacctgttgcttatttggaatcttacctttcatcacagactttataggcttaccagcaggttctaaccactacccctagagcatttggagtcacatggcagccactgccacagtggcccaatgcacagctgttatgtcttgaacaatagccctgtttggagtccattagaagatcttgggtggttatcagccacttccagtgatcttgctgtgccctgactttttccttcatacctcacaactatctgcttccaatattaatttggaaatggagttcagccttaacatctttctctaacatcttcctttgaaataaaaaataaaaaagctatggaacttttttcaagcagttttccttaaaactgggtttcattacaaatttgaaatgttttcaaatttttcaggtaataaaaagtcagaaaaagggagaaaaatctgtcttttctgaattcttttttatatggtgatcacttttcttatcaggaaaaaaagaataagtgaattcattggctctacattatttcttttttatccacaatataacttttctgtatctacatagcttgtgatctgatatatttaaaaataatcttgttattactgatttcagaaaactttgcaatgtgcttctaaaattatttatttaattacctaatctttaattcatccctaatacctggacattttatttttggcaaacgaattgtcgatgtgtttgcattaaygtttttagtgtacctctaggcttttttagaagttattttaaaatccatttcagccaagatttctgatctgttcttgagttgtatttaaatcggtgtcttttgctttacctcaccttgctaaaatgttggacgtaatggtgctatgattacctaaaggatcacgcatgtattcctgactaaaccagttcttgttcatgacacaaacactttatgccatgaggggttattcccctcttgttagaattagtcatttgtctcatcctaaaacctcactgatgcatttcctcctgaattaggcagcctggtaactggcaagtagataatggaagtttttaatttcttacctggcctaacttttcagcttccccagtttccttggtaaactgattgtcaatatccttttttttcctttatgctttattcagaaagaatacttgcttacaaaaatgtttaatgtcattttgaatggtaatttccctcacaaagaatgatacaaatccctgaaatccagcctagatataacatttcttacccacctatctccaattatgtaaggacaacttatttcacactctcccacataccaccaagcaccctatctcatccatttaataatttccacatttttatattttgacctaacttttctcacatttcccaaaaatgtcaaattgttttctcctgacaaattggacactattttcctcaaataaataattgacttccctccagtgactctagcaacttaccatgtgcttttctttttttttttttttttaatactttaagttctgggatacatgtgcagaacgtacaggtttgttacataggtatacacatgccgtggcggtttgctgcacccatcaacccgtcatctacattaagtatttctcctaatgctatccctcccctagccc

SEQ ID NO: 46464 - DNA, 593 bp, Homo sapiens
tattcttttttcttataatgaattttttttcttatagttatcctttaaaaactcaagtattgtgataagtactgctgagattgagacaaaaatatttaagggacggcattttagttttcattcaaaatatatgttttgctaatcaattcatatgtgtggaatgatttttctccaggtttattgaggtataattgacaaataaaaattgtatatacattcaaattgtataactgatggtttgatgtctatatttttcaatgatttatccacagtgaatctcaatatataatcaacaayattttaattgtaattaattaatatcattctttacattagccttctgctaaagtgtaacttgttttcacttgtaatacagtaagtcttattaattattccctgagctctattttcagttttattcacagtttgataattttaaattatttatatatttttcagtatgtgaagaatcagtatggatctgaaagtcaggactttataggaaggtttattcagaagagcatcactcctccctaatgctttctctactatttacatttacttattctcacccacaccctgcagataggcaa

SEQ ID NO: 46465 - DNA, 593 bp, Homo sapiens
tattcttttttcttataatgaattttttttcttatagttatcctttaaaaactcaagtattgtgataagtactgctgagattgagacaaaaatatttaagggacggcattttagttttcattcaaaatatatgttttgctaatcaattcatatgtgtggaatgatttttctccaggtttattgaggtataattgacaaataaaaattgtatatacattcaaattgtataactgatggtttgatgtctatatttttcaatgatttatccacagtgaatctcaatatataatcaacaatattttaattgtaattaattaatatyattctttacattagccttctgctaaagtgtaacttgttttcacttgtaatacagtaagtcttattaattattccctgagctctattttcagttttattcacagtttgataattttaaattatttatatatttttcagtatgtgaagaatcagtatggatctgaaagtcaggactttataggaaggtttattcagaagagcatcactcctccctaatgctttctctactatttacatttacttattctcacccacaccctgcagataggcaa

SEQ ID NO: 46466 - DNA, 593 bp, Homo sapiens
tattcttttttcttataatgaattttttttcttatagttatcctttaaaaactcaagtattgtgataagtactgctgagattgagacaaaaatatttaagggacggcattttagttttcattcaaaatatatgttttgctaatcaattcatatgtgtggaatgatttttctccaggtttattgaggtataattgacaaataaaaattgtatatacattcaaattgtataactgatggtttgatgtctatatttttcaatgatttatccacagtgaatctcaatatataatcaacaatattttaattgtaattaattaatatcattctttacattagccttctgctaaagtgtaacttgttttcacttgtaatacagtaagtcttattaattattccctgagctctattttcagttttattcacagtttgataattttaaattatttatatatttttcagtatgtgaagaatcagtatggatctgaaagtcaggactttataggaaggtttattcagaagagcatcactcctccctaatgctttctctactattkacatttacttattctcacccacaccctgcagataggcaa

SEQ ID NO: 46467 - DNA, 615 bp, Homo sapiens
aagtggaggctatagtgagctaccaagttcatgccacggcactccagcctggacaacaggagtgagaccatgtctaaaaaaaagaaaaaaagaaccaaacagcctatgttctggcatgagtggttgggatataaaaaccaaaacaaacaaacaaacaaataaacaaacaaacaaacaaaaacccttacagagtagtcttaatttggtatttttataagagaaagcaatgataggtcataaaatctaaggccttactaaaataggtgggtggaattgatagataaaattttgtgataatgaaaataagtagccaacttattgacagactggacttcaggtgtacaaacaaaacatgtctatttttctcacttatgttgctctcaaatatactttgttggaagtgttctgtgccctcaacakatcccacagatttatagttaacttttattatgagaaaatacaaattttaatacctgagattgaattttagtattcaagagttccagctagtttaaatcaaagattcaatcacacattcagctcaaagactctcatctctccttacctcagccctgacacaggacttggggtcgttcagtggagaagataaatgca

SEQ ID NO: 46468 - DNA, 555 bp, Homo sapiens
tattattttttgtaaactcaggaaatgagaagagaggttgatacattttccagtaagattgctaggcttttcttctaccagcatcacccagtaaaattactcttctgaaatgcacactctgagctaggttttttctacacttcatctttggatcactggagagaygagtctcagcacacatggtgattctcggtgtggagacaaggaaaagtcttcactccacatccagtggatttcaaagccatctatctgatcaatattcacttaagcacatcttccttttactgaaatgtttataattttccttgatggtacacctcagccttcctgcttccagaaagaatcactatccttttgtgagccatggttactggtggcggtacccctcaggtgacatatcatggtcagtaaatacaatcaagtggctctatagtgagaattcctgtgatcatatgcaaggaatttaatactctaagtggtatatgaaaacaattgtatttttttcattagtaaaatgggaataatgtgtaacacacagatttgctatgtttggtg

SEQ ID NO: 46469 - DNA, 555 bp, Homo sapiens
tattattttttgtaaactcaggaaatgagaagagaggttgatacattttccagtaagattgctaggcttttcttctaccagcatcacccagtaaaattactcttctgaaatgcacactctgagctaggttttttctacacttcatctttggatcactggagagatgagtctcagcacamatggtgattctcggtgtggagacaaggaaaagtcttcactccacatccagtggatttcaaagccatctatctgatcaatattcacttaagcacatcttccttttactgaaatgtttataattttccttgatggtacacctcagccttcctgcttccagaaagaatcactatccttttgtgagccatggttactggtggcggtacccctcaggtgacatatcatggtcagtaaatacaatcaagtggctctatagtgagaattcctgtgatcatatgcaaggaatttaatactctaagtggtatatgaaaacaattgtatttttttcattagtaaaatgggaataatgtgtaacacacagatttgctatgtttggtg

SEQ ID NO: 46470 - DNA, 555 bp, Homo sapiens
tattattttttgtaaactcaggaaatgagaagagaggttgatacattttccagtaagattgctaggcttttcttctaccagcatcacccagtaaaattactcttctgaaatgcacactctgagctaggttttttctacacttcatctttggatcactggagagatgagtctcagcacacatggtgattctcggtgtggagacaaggaaaagtcttcactccacatccagtggatttcaaagccatctatctgatcaatattcacttaagcacatcttccttttactgaaatgtttataattttccttgatggtacacctcagccttcctgcttccagaaagaatcactatcctkttgtgagccatggttactggtggcggtacccctcaggtgacatatcatggtcagtaaatacaatcaagtggctctatagtgagaattcctgtgatcatatgcaaggaatttaatactctaagtggtatatgaaaacaattgtatttttttcattagtaaaatgggaataatgtgtaacacacagatttgctatgtttggtg

SEQ ID NO: 46471 - DNA, 555 bp, Homo sapiens
tattattttttgtaaactcaggaaatgagaagagaggttgatacattttccagtaagattgctaggcttttcttctaccagcatcacccagtaaaattactcttctgaaatgcacactctgagctaggttttttctacacttcatctttggatcactggagagatgagtctcagcacacatggtgattctcggtgtggagacaaggaaaagtcttcactccacatccagtggatttcaaagccatctatctgatcaatattcacttaagcacatcttccttttactgaaatgtttataattttccttgatggtacacctcagccttcctgcttccagaaagaatcactatccttttgtgagccatggttactggtggcggtacccctcaggtgacatatcatggtcagtaaatacaatcaagtggctctatagtgagaattcctgtgatcatatgcaaggaatttaatactctaagtggtatatgaaaacaattgtatttttttcattagtaaaatgggaataatgtgtaacayacagatttgctatgtttggtg

SEQ ID NO: 46472 - DNA, 555 bp, Homo sapiens
tattattttttgtaaactcaggaaatgagaagagaggttgatacattttccagtaagattgctaggcttttcttctaccagcatcacccagtaaaattactcttctgaaatgcacactctgagctaggttttttctacacttcatctttggatcactggagagatgagtctcagcacacatggtgattctcggtgtggagacaaggaaaagtcttcactccacatccagtggatttcaaagccatctatctgatcaatattcacttaagcacatcttccttttactgaaatgtttataattttccttgatggtacacctcagccttcctgcttccagaaagaatcactatccttttgtgagccatggttactggtggcggtacccctcaggtgacatatcatggtcagtaaatacaatcaagtggctctatagtgagaattcctgtgatcatatgcaaggaatttaatactctaagtggtatatgaaaacaattgtatttttttcattagtaaaatgggaataatgtgtaacacacagatttgctatgttyggtg

SEQ ID NO: 46473 - DNA, 542 bp, Homo sapiens
actgtctcagtaataacatccattaaaatctatacctcacatttcttacatttctaactttcaaaaagtttttgtactcctaaactcagcctgtccaaagtttatgctgtttgaaaacattcaaatgatgaaaaaakatagtagagttagactcaaacatgctttgttatctgcctttatggtaccacacatccaaaattttaattaattgaacttaaattttctttcaagaaaggagaggccaggcacagtggctcacactgtaatcctagcactttgggagactgaggtgggtggagcacttgaggccaggagttagagacaagcctggtcaacatggggaaatccattctctactaaaaaatacaaaaaaaaattatccgggggtgatggctcacgcacccgcaatcccagctgctcaggaggctgaggtgggagaatcacttgaaccctggaggtggagattgcagtgagcaaagatcactcagcctgggcgacagggctagatactgtctcaaaataataataataatacaaaaaaa

SEQ ID NO: 46474 - DNA, 542 bp, Homo sapiens
actgtctcagtaataacatccattaaaatctatacctcacatttcttacatttctaactttcaaaaagtttttgtactcctaaactcagcctgtccaaagtttatgctgtttgaaaacattcaaatgatgaaaaaagatagtagagttagactcaaacatgctttgttatctgcctttatggtaccacacatccaaaattttaattaattgaacttaaattttctttcaagaaaggagaggccaggcacagtggctcacactgtaatcctagcactttgggagactgaggtgggtggagcacttgaggccaggagttagagacaagcctggtcaacatggggaaatccattctctactaaaaaatacaaaaaaaaattatccgggggtgrtggctcacgcacccgcaatcccagctgctcaggaggctgaggtgggagaatcacttgaaccctggaggtggagattgcagtgagcaaagatcactcagcctgggcgacagggctagatactgtctcaaaataataataataatacaaaaaaa

SEQ ID NO: 46475 - DNA, 1346 bp, Homo sapiens
ccctcatttaaatgcaaaagaaggcaaacagaatctggaagttgacagcatccataaagggacacctgaagcaggataaggatcagttgttagaaaacagcttctcaatgatgcagtccctgtgtgcttcctccaccctgcagacagggctgtccctgggcacagtggctctctgcttccagcatttgtgtatgggtgaaaccctaggccagtgcatgactgagacctccttgaaggaaaagagaagcaaagtcctgaggccagggtcttgttcgtgatagtattctctgtaccagagcagagcctggtacccagcaagtatcaacacatatttgcatgaatgaatgactggctgggctggctggatcaacagatcaaaagatcagtggatcartgaatatggctgaatggatgggtagatggatggatggacagatgaacagatgggtgggtgggtggataaatgcagggatgggtagatagatgggagaaaggaagagaagaaggcagggagagagggtaaaatgagggaggtacagttctattgcctgtgttctgctgagcatacttggaagtagggagattgctgtaccatcaatcattaaatatttattgagcagttcattatgtgccaggtactatgctaggcaatactacagtgtggaagacatgcaggtcgccgccctcataggatccaaactgtagtagagatacaggcaattacacaagtgatgatcacatggtgggataagtacaatgatgaaggacgtactaggcaccataggaaggcttcccggaggaagtgacatctaaactgaacactgcaggaagagtagctgttagctgggtgagcagggcttgggatgggggtggagtgtcccagacaaagggagcagagtgagcattagcccaggggagcaggaggcaaacaggactggggagcagctgaaaggtggaagaacatcaggtatgtcaggtatgaacatcaggagcaccagccaatggaaccacttcctcattctcctcaagggactcctcctcagtggacacctgttgtttttctctgcccagactcatccagtcttctttctttgggaatagccccctaattttattttgaggaaatcccccaaattcccctccactattctcagtacacgtggttcatgggagtttgacatcaccccacaatcctggggtgggcacgagaccctggcctggccaatccgtaaacttatgttcatctggccataggaagctcagctaggccaattagatgctaccctagggcttcactggaaacactgggaagggagtgttttctttccactggagggtggggagag

SEQ ID NO: 46476 - DNA, 1346 bp, Homo sapiens
ccctcatttaaatgcaaaagaaggcaaacagaatctggaagttgacagcatccataaagggacacctgaagcaggataaggatcagttgttagaaaacagcttctcaatgatgcagtccctgtgtgcttcctccaccctgcagacagggctgtccctgggcacagtggctctctgcttccagcatttgtgtatgggtgaaaccctaggccagtgcatgactgagacctccttgaaggaaaagagaagcaaagtcctgaggccagggtcttgttcgtgatagtattctctgtaccagagcagagcctggtacccagcaagtatcaacacatatttgcatgaatgaatgactggctgggctggctggatcaacagatcaaaagatcagtggatcagtgaatatggctgaatggatgggtagatggatggatggacagatgaacagatgggtgggtgggtggataaatgcagggatgggtagatagatgggagaaaggaagagaagaaggcagggagagagggtaaaatgagggaggtacagttctattgcctgtgttctgctgagcatacttggaagtagggagattgctgtaccatcaatcattaaatatttattgagcagttcattatgtgccaggtactatgctaggcaatactacagtgtggaagacatgcaggtcgccgccctcataggatccaaactgtagtagagatacaggcaattacacaagtgatgatcacatggtgggataagtacaatgatgaaggacgtactaggcaccataggaaggcttcccggaggaagtgacatctaaactgaacactgcaggaagagtagctgttagctgggtgagcagggcttgggatgggggtggagtgtcccagacaaagggagcrgagtgagcattagcccaggggagcaggaggcaaacaggactggggagcagctgaaaggtggaagaacatcaggtatgtcaggtatgaacatcaggagcaccagccaatggaaccacttcctcattctcctcaagggactcctcctcagtggacacctgttgtttttctctgcccagactcatccagtcttctttctttgggaatagccccctaattttattttgaggaaatcccccaaattcccctccactattctcagtacacgtggttcatgggagtttgacatcaccccacaatcctggggtgggcacgagaccctggcctggccaatccgtaaacttatgttcatctggccataggaagctcagctaggccaattagatgctaccctagggcttcactggaaacactgggaagggagtgttttctttccactggagggtggggagag

SEQ ID NO: 46477 - DNA, 1346 bp, Homo sapiens
ccctcatttaaatgcaaaagaaggcaaacagaatctggaagttgacagcatccataaagggacacctgaagcaggataaggatcagttgttagaaaacagcttctcaatgatgcagtccctgtgtgcttcctccaccctgcagacagggctgtccctgggcacagtggctctctgcttccagcatttgtgtatgggtgaaaccctaggccagtgcatgactgagacctccttgaaggaaaagagaagcaaagtcctgaggccagggtcttgttcgtgatagtattctctgtaccagagcagagcctggtacccagcaagtatcaacacatatttgcatgaatgaatgactggctgggctggctggatcaacagatcaaaagatcagtggatcagtgaatatggctgaatggatgggtagatggatggatggacagatgaacagatgggtgggtgggtggataaatgcagggatgggtagatagatgggagaaaggaagagaagaaggcagggagagagggtaaaatgagggaggtacagttctattgcctgtgttctgctgagcatacttggaagtagggagattgctgtaccatcaatcattaaatatttattgagcagttcattatgtgccaggtactatgctaggcaatactacagtgtggaagacatgcaggtcgccgccctcataggatccaaactgtagtagagatacaggcaattacacaagtgatgatcacatggtgggataagtacaatgatgaaggacgtactaggcaccataggaaggcttcccggaggaagtgacatctaaactgaacactgcaggaagagtagctgttagctgggtgagcagggcttgggatgggggtggagtgtcccagacaaagggagcagagtgagcattagcccaggggagcaggaggcaaacaggactggggagcagctgaaaggtggaagaacatcaggtatgtcaggtatgaacatcaggagcaccagccaatggaaccacttcctcattctccycaagggactcctcctcagtggacacctgttgtttttctctgcccagactcatccagtcttctttctttgggaatagccccctaattttattttgaggaaatcccccaaattcccctccactattctcagtacacgtggttcatgggagtttgacatcaccccacaatcctggggtgggcacgagaccctggcctggccaatccgtaaacttatgttcatctggccataggaagctcagctaggccaattagatgctaccctagggcttcactggaaacactgggaagggagtgttttctttccactggagggtggggagag

SEQ ID NO: 46478 - DNA, 1346 bp, Homo sapiens
ccctcatttaaatgcaaaagaaggcaaacagaatctggaagttgacagcatccataaagggacacctgaagcaggataaggatcagttgttagaaaacagcttctcaatgatgcagtccctgtgtgcttcctccaccctgcagacagggctgtccctgggcacagtggctctctgcttccagcatttgtgtatgggtgaaaccctaggccagtgcatgactgagacctccttgaaggaaaagagaagcaaagtcctgaggccagggtcttgttcgtgatagtattctctgtaccagagcagagcctggtacccagcaagtatcaacacatatttgcatgaatgaatgactggctgggctggctggatcaacagatcaaaagatcagtggatcagtgaatatggctgaatggatgggtagatggatggatggacagatgaacagatgggtgggtgggtggataaatgcagggatgggtagatagatgggagaaaggaagagaagaaggcagggagagagggtaaaatgagggaggtacagttctattgcctgtgttctgctgagcatacttggaagtagggagattgctgtaccatcaatcattaaatatttattgagcagttcattatgtgccaggtactatgctaggcaatactacagtgtggaagacatgcaggtcgccgccctcataggatccaaactgtagtagagatacaggcaattacacaagtgatgatcacatggtgggataagtacaatgatgaaggacgtactaggcaccataggaaggcttcccggaggaagtgacatctaaactgaacactgcaggaagagtagctgttagctgggtgagcagggcttgggatgggggtggagtgtcccagacaaagggagcagagtgagcattagcccaggggagcaggaggcaaacaggactggggagcagctgaaaggtggaagaacatcaggtatgtcaggtatgaacatcaggagcaccagccaatggaaccacttcctcattctcctcaagggactcctcctcagtggacacctgttgtttttctctgcccagactcatccagtcttctttctttgggaatagccccctaattttattttgaggaaatcccccaaattcccctccactattctcagtacacgtggttcatgggartttgacatcaccccacaatcctggggtgggcacgagaccctggcctggccaatccgtaaacttatgttcatctggccataggaagctcagctaggccaattagatgctaccctagggcttcactggaaacactgggaagggagtgttttctttccactggagggtggggagag

SEQ ID NO: 46479 - DNA, 611 bp, Homo sapiens
  misc_feature (1)...(611): n = A,T,C or G
ttctaagtgaaatagaaggtataagagccttggtaattttttttcctttagacttcaggtttggataaccatttctgttttaaaagtccktagtgagactctgaaccagaatggaaaatcagttgtaggtaataaagttgaagaagacatcagcatgccatagggaaactataacaactccgtactttgccagttgagtgggaattaggtcagtcagtacacactttagtgaatgtgccacttggggcaaaactataatttgcctgaatcacatcagcagactcactggtggcccatttgtaattccgtaaggtcttatcacttcctctctgaatctgggcatcctaatccctcactcctctttcaaattagctccttttttattaaaaaaggcattttgtcttttttgcttattttccccttctttcaatttcagcaaaaggtaagcaggcaaactaccttcaaggtatgccagctcacctaaaggaggaaaacgatttcgttgggatnnnnnnnnnnnnnnnnnnnnnnnnnnnnnnnnnnnnnnnnnnnnnnnnnnnnnnnnnnnnnnnnnnnnnnnnnnnnnnnnnnnnnnnnnnnnnnnnnnnngc

SEQ ID NO: 46480 - DNA, 616 bp, Homo sapiens
tgcataaaaatgtcttatgggtcttaaaggctagacaaatgtagttgtgaatgaaatttttaagaactaaacattacatttgctctcttagtcactatcttcaacacaacgtcttagaaaattggacaaaactcaactttcccgccaactgaatacttggcatctcctgagggattcccatccagtcgtctctctttggraaaccttcctggcaaagataccccaagtcagaggacaggaataagaactgtaaaatattcactatttaaaaaacaatatatagtctcatgtttatgtaaaagtttcaatttttctaatcttttaaaaataataaagtgaatttattttccagctctgattctatttttatttccaaaagcttttgaaaatgcctcagaaagttatctctgtctgctatttctgtcacttcagtaggaatatgcctaattgaacaggtgactttatgcctgtatttttggaatttagaagctgcagaaagcaaaatatgtaaatgtctcgtgtctttgctacatcaccatcatcattagcatcatgttggtataattatataaacaatgagaggactctactgataattgactaaaggcaagtatat

SEQ ID NO: 46481 - DNA, 2047 bp, Homo sapiens
  misc_feature (1)...(2047): n = A,T,C or G
aaagagggtatattctgtggttgttgggtgcaatattctgtagatatccattaggtcaatattctgtagatatctattaggcccaattggttgtcaagtttaaaaccagaactagtttgttagctttcagcttaaacaaatcaacaagcaaaaaacaaataagcccatttaaaaatgggcagaggacatgaacagacactttttaagagacatacaagcagccaacaaacatatgaaaaatattcatcctcagagaaatgcaaatcaaaaccacaaggagataccatctcacaccagtcagaatggctattattaaaaactcaaaaaataacatgctggcaaggccacagagaaaagggaatatttatacactgttggtgggaatgtaatcctcagccactgtggaaagcagtttggagatttctcaaagaacttacaacagctactgtttgacccagcaatcccatggctatgtatatacccaaaggaaaataaatcatctgccataaagacaaatgaacttgcgtgtgttcatcgcagcactattcacaatagcaaagaygtggaatcaacccaggtgcccatcgacggtggactggatgaagaaaatgtggtacattaactccatggaatactatgcagccttaaaaagaacaaaatcatgtcctttgcacaacatggatgtagccggaggttattatcctaagcgaattaatgcaagaaccaaatactgcatgttctcagtacagtactgagtacacatgaacgtaaagatgacaacgatgcacactgggaagctctagaggaagaggggccaggtgggggttgaaaagcttcctatcaggtactgtgctcactaacttggtgtcaggatccataccctgaatctcagcatcacttaacatacccaggtaataagcctggacatataccccctggatctaaaatgaaagtaaaaattatttaaaaaataaaaaatttatgtttttaaaaaactggcatctaggtaaacttgaagtggaaatgcggatcatagaggtagtattacttgggaaagctttggaagcacacagactggttggaagcgctgcctctgccaaccagcagctgtgtgactgtgtgccaggtgctttacctctctgagtaccaccagaatccaggagttagatgnnnnnnnnnnnnnnnnnnnnnnnnnnnnnnnnnnnnnnnnnnnnnnnnnnnnnnnnnnnnnnnnnnnnnnnnnnnnnnnnnnnnnnnnnnnnnnnnnnnnagaaccaaaatggaggcacagcctataggagtctggtagcttaaagaaaggcaaccaatcccatgtaggagtgggacgccacggaaggctcctggaggaatgatggtggtcttaggttctacaggaggagcaggatatggtgagcatacaggggcaaggtgaggctattggggcagagggagcaataggtacaaaggaagaactgagttgggggagcatccagaaacaggcacttcagctcaccgtgctgggagagcctggtgccagacaggcaggggcaggagaaagggccagagatgtaggatgggtcaggtaatggagagcagccaggatctgtggacaaagtagacacacagatgccaagtacagctttgtcgccacaaaggacttgaaacgtacaactttcttagactggggagagagcaagatcccatgggctatgcctacttgcaccacaacagggatttctatgctgactgttttcctgtgtttattgtagtccaccaccctgggactctggcccttctaggggtcagagtgcaggagtagccacaaggaacatgtccataagcggtcagggccagacgtcccccaccatgttgggggacacccttgaactgatgtgttcagtatcatttttaccttagcaagtttcatctcaggtcaactttcaggtggggagaaacaagttgccaggtagagcacatggatggggaggggggcacagcgacatgccatgtgccatcttcaggtgagctgcaggtgactggtgccctg

SEQ ID NO: 46482 - DNA, 607 bp, Homo sapiens
agtcaagaagaatattgaagacaaaggatacaatcatcattgcttgaggaaaactaaattttatatagctgtcctttgttgttatgttaatcaaattataaaataagcgatagtaggagaatagcattgctgtgttayaaaattagttttagaattagattagttctgtgacatgagatggatcacagtgagattatacctcatgagtactcaactcttgtaaacactacaatgacatcgttaaatattccatgcttaaaacgcacagcacgttaactcctttatttcaggggttcgcttttatagttagagaaggttttttgtttctttttttttttttaacttttagactatacgcatacaatatattacaggtgcctgtgactcgctctaaaaatgttggaagctgaactgcatcatattcttgagggagaacttaatgtcaagaatttaaatttgcaacacccattaatgtgtatttagagcatttcaacaaagaaatacatttagtgacaaaagttttaaagtattacagaagagtcagaactgaaagataactcatggaattttaatgtaccattttaccaaatgtcctaaaaaatgatga

SEQ ID NO: 46483 - DNA, 523 bp, Homo sapiens
cagtagttcacatctgttccccttgtcatctgctttgacctgagtcacccctggtcacctgctctggcctgaatcatcctgagtaaccgcccttccgtcaaactacccaccccaccactctggctggtacccccgctctctttaaaatagccaactggaattagcttagactgtgcggtccaaccctagccaacaggggaatgacacagcagtgaggctacctgcgtcaggaataagaaccccttcccctcccttgcccaggtgtgctctcaccattactccattcgcgagttgcaccattctatagaagtaaaaattgccttgctgagaaaattaaatttatgtttgartgctgtttctttgcagcactgaggaacaagcattttgtttctaacacaaagaaatggctaaaacaaacaaacaaaaatgtatattgagagaagttggtcacagacagaataaggtttagggcctgctaaagattccacaggaagtggaagagtaaggacagaaaacataagcc

SEQ ID NO: 46484 - DNA, 592 bp, Homo sapiens
agcccattggtatgggactgaggctctaaaactgtggcctgatgtcccacatcatgaatattcaaaaccttaaatctggagaycttcatgtacttcctagagaggcaatccattccctcctacccagagagcacgtccatgcacgcaggcacgcgcacgcgcgcatcacacacacacacacacacacacacacacactgcccagaagaaaatgataggattttttcctagcatgaaaacattattattctataataagtacacaaatgcagtttttatgttgaagataaatcttttttaaaaaggaaactctccattcctttgtaaaatattgtaataagagaacttttaagtgtatacccaatcatgtatggatgatctcctgtgtcgatatcgcattgcagaaatccatgtacgtattttaatgggcgttgctacttggatcttcagaatacatgatatatctcttctcagatatctcatagaccatcccccctccgctgccactgaatttcatttagacctcggtggctgagtttttaagctagatcgttacaaatgaagccttaccatttgatgaaaatccagcaaaa

SEQ ID NO: 46485 - DNA, 592 bp, Homo sapiens
agcccattggtatgggactgaggctctaaaactgtggcctgatgtcccacatcatgaatattcaaaaccttaaatctggagaccttcatgtacttcctagagaggcaatccattccctcctacccagagagcacgtccatgcacgcaggcacgcgcacgcgcrcatcacacacacacacacacacacacacacacactgcccagaagaaaatgataggattttttcctagcatgaaaacattattattctataataagtacacaaatgcagtttttatgttgaagataaatcttttttaaaaaggaaactctccattcctttgtaaaatattgtaataagagaacttttaagtgtatacccaatcatgtatggatgatctcctgtgtcgatatcgcattgcagaaatccatgtacgtattttaatgggcgttgctacttggatcttcagaatacatgatatatctcttctcagatatctcatagaccatcccccctccgctgccactgaatttcatttagacctcggtggctgagtttttaagctagatcgttacaaatgaagccttaccatttgatgaaaatccagcaaaa

SEQ ID NO: 46486 - DNA, 591 bp, Homo sapiens
tttttggcattaagataaatgcttctatcaagtttttcgattcatgagggggagggaaggaggaatgttacaattctaactcttaaagcaactatttaaaaaatggataagttggctctatctagttgacttcggatacagataattcaaccatataaacattctcttggaaaataactccacaaaggtaaatccacttatttgtaartgggggtaggggtggggagagaatttgagtgtgagcacctggaacaaaagcacttttttccattgaaaaaattcttcctggggttgatttccataatggtacatttcctgtttataaatcctagtcatcaatcatcaaattgtgtttaatgagcacctgtgtagatcatagattccacagttcatcctcaaaactcaaattttgaattgcctcttgctttaagaattatagtccacccccagggtttgttcctggtttgtctggcacctttgctcctgactgaacttgaatcaaggtgcaggatttcagtgtcttctcttactcccctccctacctttcctcgacaccaagatctccgaacctcagcattattgacattttgg

SEQ ID NO: 46487 - DNA, 540 bp, Homo sapiens
tttttaaatgcatttggaaaactaataaacaacaattattttatgggtaaatttcctagtaagccattttaaactctgaaatgttttgactatccaaggcaacattcawtatgccatttatttcaaagagcatatagtttataactccgagttgttatttatccccagctcccacagtttatccatttggagactacaaatttgaattcctttttcagaatttaactatgttttccttcatctagtttataaaattgagatctatggaagtgtattagttcttgcatttgtataaagaaatgcctgagactgggtaatttataaagaaaaaatgtttaattggctcatgtttctgcaggttgcacagaaaatatggtgctggcatctgctcagcttctgggcaggactgaggaaacttacaataatggggaaggtaagggagagtgagcatttcacatggctggagtaggaagaagagagatgggagaagatgccacacacttaaacaaccagatttcatgagaactctatcaggagaaa

SEQ ID NO: 46488 - DNA, 540 bp, Homo sapiens
tttttaaatgcatttggaaaactaataaacaacaattattttatgggtaaatttcctagtaagccattttaaactctgaaatgttttgactatccaaggcaacattcaatatgccatttatttcaaagagcatatagtttataactccgagttgttatttatccccagytcccacagtttatccatttggagactacaaatttgaattcctttttcagaatttaactatgttttccttcatctagtttataaaattgagatctatggaagtgtattagttcttgcatttgtataaagaaatgcctgagactgggtaatttataaagaaaaaatgtttaattggctcatgtttctgcaggttgcacagaaaatatggtgctggcatctgctcagcttctgggcaggactgaggaaacttacaataatggggaaggtaagggagagtgagcatttcacatggctggagtaggaagaagagagatgggagaagatgccacacacttaaacaaccagatttcatgagaactctatcaggagaaa

SEQ ID NO: 46489 - DNA, 572 bp, Homo sapiens
gagaaagagtaggtccttttttttttttttttttttttttgagacagtttcgctcttgtcacccaggctggagtgcaatggcgtgatctcagctcactgcaacctctgcctcctgggttcaagcaattatcctgcctcagccttctgagtagctgagattacaggcgcccactaccatggctggctaatttttgtatttttagtagagatggggtttcatgatgttggccaggccggcctcaaactcctgaccacaggtgattctcccgccttggcstcccaaactgctaggattgcaggcatgagccaccgcacctagtgagcaggtccttcttagattactgattgaaattgcagtgtagaccctttcattttcttttcataatcttcaaatttctcatactgagtgacaaagaatttattcctccagtcttcagaaatatcctttcttatgaagggagacagaatggtccatctgatcattttccatagtggtataatttccactaggattctgctttatcacatcagaagagctataccagagggtttttcccacagtttcttctggc

SEQ ID NO: 46490 - DNA, 538 bp, Homo sapiens
tgcattatccattaattttcttttgtaatatttactgagtgtatgctatgggcactggagttactgcaatgtttaaaccagaggtgatcccttctccaaagagagtatgcaattctggcttattaatttatttatcatcacaacaaacttactagtgaggtgttactatttatattttgcaaataataaaactgaggccccaaatttgcccaagattacacagcgaatggggcaggatttaaaaccaagtcaccctgactgcaaaactacactcttaacctcatagctatggtgatgttctgagattctgaggcaaacctggactatatgaagtaggagggctaaaaacaaggttagcacttaaaatgcttagcgtctttacaatgggagatgtgtttgtcagtttttaagtaagcatgataagtagkgctccctgttgtcagaataagggagagaaaaagtatttttctgatattttcgatctggcaagagggatagttgacctggctaaggtcactcatacttaaagatgcttttt

SEQ ID NO: 46491 - DNA, 590 bp, Homo sapiens
aaaaaaaaaaacagccttggagtgactcagtaagtaggttagtcgaggtgtgagatgagcaaacccgtcatttcaggcaaggaaactattttgtccctccaatatacgttatcacatggttcctgacagcatcattattatctatgagcgtctatctatttgaaagaagggaaggaatgaaagtaaggatttatagcgcacttactgtgtgttggacattgtgtccacacatttcaactatttaaagcttaaagaagctcagagaggttacatggctttcccaaacaggatcacacagayagcaagtggtgaaattgacaggggagcctggcctcctgcctgcaaaatccatatttttctagtctacaccaccggcccttaatcagtgattcccaccctacagtatcacaatcatttcagtcaagaaagatactaaaattctacaaataatacttcaaaccaaaaatctagttaattttaaacataattttaaatatatatgtcacacaatgctttgtatggaagagtagctttaattagatgacatcaggtcaaacagcttcacaaaagggtgggacttactggactaa

SEQ ID NO: 46492 - DNA, 555 bp, Homo sapiens
caccaccaccagtgatgtggggacagaggcaccaggcttgccttcagccactcccacggcttctggagacaggactgaaatcagcggagacctgtctggtcacacctcgcagctgggcgttgtcatcagcaccagcatcccagagtctgagtggacccagcagacccagcgccctgcagagacgcatctagaaattgagtcctcaagcctcctgtactcaggagaagagactcacacagtcgaaacagccacctccccaacagatgcktccatcccagcttctccggaatggaaacgtgaatcagaatcaactgctgcaggtattgtgattttttccccctttaaatgtgcttaggtagttcagactgtagcctactgcagcacagaaggaggcagcatagctttaaggttccaagaacaactccaccaaaggttagctgtgcagcctcaggcaatagtcttcccctctctgagcctcatctgtaacgtaagagtaggataatactctaccagggaagattaggcagaacataaacatagatagataaagcaagc

SEQ ID NO: 46493 - DNA, 597 bp, Homo sapiens
ctcctcaggagatgaaaaagacttcaaagaaacctgtcacgtttgtcttatattttattatgtgtcttacttctgaagcaaggatgcacctaaagagcaagtggcttcgaaatgtcattacttgtttcctaggaagtttaagctttgccatatgatagtcttaatgtccaaagcatttcaaaggaaaaaggaaataattctcggttcattcctcatctattctctttccccacccacaattctgtaaaaacatgtcttaactctggaagcatagacgtaaaagtcataaagacccagttgcttgtcaggacagggtgaatrgggtcacctaagagatgctgtgagcagactaaacagccactttgcatacaagatttcaggagctcatctctctgacagagacccaagcctggagtgctatttatggggaaaccctaaagcggagcttcctaacttggctgcagattagagccacttggggagcttataaaaaaggaaaatactagtatgaactccatcctcaggggtactgattcaattggtgcagggcagttgccaggtaagggtagtttaaaagctccccagatgggagcagga

SEQ ID NO: 46494 - DNA, 597 bp, Homo sapiens
ctcctcaggagatgaaaaagacttcaaagaaacctgtcacgtttgtcttatattttattatgtgtcttacttctgaagcaaggatgcacctaaagagcaagtggcttcgaaatgtcattacttgtttcctaggaagtttaagctttgccatatgatagtcttaatgtccaaagcatttcaaaggaaaaaggaaataattctcggttcattcctcatctattctctttccccacccacaattctgtaaaaacatgtcttaactctggaagcatagacgtaaaagtcataaagacccagttgcttgtcaggacagggtgaatggggycacctaagagatgctgtgagcagactaaacagccactttgcatacaagatttcaggagctcatctctctgacagagacccaagcctggagtgctatttatggggaaaccctaaagcggagcttcctaacttggctgcagattagagccacttggggagcttataaaaaaggaaaatactagtatgaactccatcctcaggggtactgattcaattggtgcagggcagttgccaggtaagggtagtttaaaagctccccagatgggagcagga

SEQ ID NO: 46495 - DNA, 597 bp, Homo sapiens
ctcctcaggagatgaaaaagacttcaaagaaacctgtcacgtttgtcttatattttattatgtgtcttacttctgaagcaaggatgcacctaaagagcaagtggcttcgaaatgtcattacttgtttcctaggaagtttaagctttgccatatgatagtcttaatgtccaaagcatttcaaaggaaaaaggaaataattctcggttcattcctcatctattctctttccccacccacaattctgtaaaaacatgtcttaactctggaagcatagacgtaaaagtcataaagacccagttgcttgtcaggacagggtgaatggggtcacctaagagatgctgtgagcagactaarcagccactttgcatacaagatttcaggagctcatctctctgacagagacccaagcctggagtgctatttatggggaaaccctaaagcggagcttcctaacttggctgcagattagagccacttggggagcttataaaaaaggaaaatactagtatgaactccatcctcaggggtactgattcaattggtgcagggcagttgccaggtaagggtagtttaaaagctccccagatgggagcagga

SEQ ID NO: 46496 - DNA, 597 bp, Homo sapiens
ctcctcaggagatgaaaaagacttcaaagaaacctgtcacgtttgtcttatattttattatgtgtcttacttctgaagcaaggatgcacctaaagagcaagtggcttcgaaatgtcattacttgtttcctaggaagtttaagctttgccatatgatagtcttaatgtccaaagcatttcaaaggaaaaaggaaataattctcggttcattcctcatctattctctttccccacccacaattctgtaaaaacatgtcttaactctggaagcatagacgtaaaagtcataaagacccagttgcttgtcaggacagggtgaatggggtcacctaagagatgctgtgagcagactaaacagccactttgcayacaagatttcaggagctcatctctctgacagagacccaagcctggagtgctatttatggggaaaccctaaagcggagcttcctaacttggctgcagattagagccacttggggagcttataaaaaaggaaaatactagtatgaactccatcctcaggggtactgattcaattggtgcagggcagttgccaggtaagggtagtttaaaagctccccagatgggagcagga

SEQ ID NO: 46497 - DNA, 383 bp, Homo sapiens
cttcaccttacagccactcctggaaagagaagaaacacaaacaagccagtttgcaatcacactgacaattgtcaaggtatgaaatggagcagacagcagtgtgtgcggatagaagccaaagcatacagcaccacacaaatcatacatcgccgcaggagagaggcagggacaccttttatgcctctgagttttctccagagagacggggtaagcaaagacctacaagcggggctcattctctgaaaagaccccctcagcttgcttctatgagttgtcaaacagtagcactctgatgtctatggtttttaattacrcgccaccaaaagctttgcagacagtagagccttagcagctggagacattcagttcctctgagcctcact

SEQ ID NO: 46498 - DNA, 493 bp, Homo sapiens
aaaatcttccctggaaatacttacttataaatttccataatgaaatggccagcttgtcttttatgtaggatagaggtggatgataagcaattctttttttgtttgtttgtttgttttgagatagagtctcactgtgtggcccaggatggagtgcagtggcgcagtctaggctcactgcaagctccacctcccgggttcacaccattctcctgcctcagcctcccgagtagctgggactacaggcgcctgccaccaagcccagctaatttttttgtatttttaatagagacagggtttcaccatgttagccaggacggtcttgatctcttgaccttgtgatcygcccaccttggcctcccaaagtgctgggattacaggtgtgagccaccgcacccagctgcaattctttaaataacttgtttgggatacttctttgtaattccttcatgtatgattaagagcttctcttcagaatgtaagggactttaatgct

SEQ ID NO: 46499 - DNA, 493 bp, Homo sapiens
aaaatcttccctggaaatacttacttataaatttccataatgaaatggccagcttgtcttttatgtaggatagaggtggatgataagcaattctttttttgtttgtttgtttgttttgagatagagtctcactgtgtggcccaggatggagtgcagtggcgcagtctaggctcactgcaagctccacctcccgggttcacaccattctcctgcctcagcctcccgagtagctgggactacaggcgcctgccaccaagcccagctaatttttttgtatttttaatagagacagggtttcaccatgttagccaggacggtcttgatctcttgaccttgtgatctgcccrccttggcctcccaaagtgctgggattacaggtgtgagccaccgcacccagctgcaattctttaaataacttgtttgggatacttctttgtaattccttcatgtatgattaagagcttctcttcagaatgtaagggactttaatgct

SEQ ID NO: 46500 - DNA, 613 bp, Homo sapiens
ccctatttaaaagcctctagtgcttccagttgctcttgggataagatccaaactctttagaatggcatatcaggactttcagaatttgcacatgggatacaaaaatgaaaaatatacagtaccatcttcaatgagcccacagtttaatcatgaaggccaatgtatacacaaataattttaatgcactatgaaaaatgttctcagaattatgtgaaaatgtaaacaaaaactaaaataaagggtagaatttgtaatacttctattatcatgtaagaggtaggaccacaagagagaaattaaggctgttaagagggcattctctgaagtcatctgtttacttagtttacccactctgtgaagcaaatttaaccgttactatctaataggttcttacccctgtagacayatgcatatcttgcatagtacctagacaggttctttaacttgggaatcaaagaacaaaagggcttgttgaaaatgtcttattgcatgagaattatacctatttcattatacagtcctgccccagtataattctgaataccatgttgtgaaactctgatatttatctccagttctccctcatataaaagccctaagccagtggggcaat

SEQ ID NO: 46501 - DNA, 619 bp, Homo sapiens
tcataatccaaacattcccaaagtcagcctggtcagcctacaatacatcttaaagtacatctgtggcacagattgaaacaacacttaaagatattaggaagtgataaacatgtgattttgcttaagtagttacgtggctacaattaaagttgaagataatttctgctagtgccctgctaaactgtgcttgtacacatagatgataaaatagagatttctcaactagctttggtaaatggggagaaatggaacagatagctgaaatgtactgataatttgtttggggatactattgatggtctttatagaatccatgaatacctacatccccccaagggccacccacctttttttatgaagtctctaagaaaggtagatgtatgtaaaagagaaagtggcaaataagaaacgaaatgccactttattataattaggtgggtttttgcccgatactccagtgataagctctttggttattttggatggagacatgggcttagaacacatagcatggaaaggcacaaggagctttacytacccttcaagcccagatgtaaagctgtggttgcctcagtagttccaagtaaaaagagacttgagagactaacacactagagca

SEQ ID NO: 46502 - DNA, 630 bp, Homo sapiens
cttcccagtgtctcgtttgcttttcctgtaaactgggactacctcataggtagaataacgcctggcccagagcaaaggccactaagagctagctatgaacaaggattttgtttcatctctgcgtggttgctgaagtaggcactgcaggcaggaggtgagtggatgtgcctaaaggcactaagtgcgcatcctgctacaaaactgtgaagccagggctccttcctgccacttaaaggaggagtggagcagagggcgcccaagtcaggaatgacttagtggagaggcgtctgtgttggccaggaagggaacagatcagctcagcctttcttgagcagtactgctccaagtgtgacccaaaaccagcagcagcagcagcagcagcccgagctgtgagatggcaaattctcaggccctacccaagacctgaaggagaagctacattttttttttttttgagacagatttcactctgttgctgaggctggagcacagtggcacaatctcatctcactgcaaccttcrtctcctaggttcaagcgattctcctgcctcagcctcccgagtagctgggactataggcacccgccaccacgcccggcaatttttgtttgttttgagatagagtctcgc

SEQ ID NO: 46503 - DNA, 518 bp, Homo sapiens
  misc_feature (1)...(518): n = A,T,C or G
tcagcagaaactggaaaaccagctgaaaaatcctggttcaggtctacaagaaaccaatccagaggtcacttcaccaactgggtaaccgcttcggatttccttttttgggttatgccctggaaaccaacacccatggggcggagcttgggttaccctcatgacccaccaggaccacagttggaatcctatggtcayctgacttgcacttctgcctgtaacaaatgttctttcagtttaaagaatacctggcttcttgtttaggtggcagtgttcgggattgcatcttttgcttttggccaacttaaaatgaagaaagtcagctctcagggcctggaggagcaggaataagtcaaacatgaagctcaggactcagcccttcagcaaggagagcagagttaggagagacagaggannnnnnnnnnnnnnnnnnnnnnnnnnnnnnnnnnnnnnnnnnnnnnnnnnnnnnnnnnnnnnnnnnnnnnnnnnnnnnnnnnnnnnnnnnnnnnnnnnnnatacgt

SEQ ID NO: 46504 - DNA, 628 bp, Homo sapiens
aacctcataaaaccatgtgaagagttccacaaatagtatggagaggctaaggccctgggacagatgactctcttcaactgaaacaattcctaaagagtgctgagagtagaggactgaacaataaatcttatttctgaagagtatctctgagtatcacagcatccatgaatttatagtagatctttctcttgctaactctgtctttctcttaaaaactagtcttccccaccccaattgcactttgcatttagaaataaaaatcctaaaaacacaaatcacctcaaagtacgaaaatagaggcatgacaaaatgcctgaacaagaaaaaagaatgaaaacaatagcctggcttgaatatgagaagaaaatgaaataaatacaggtagaataccaaagttaagrtatacatatctgccatatatgttacaaatccagattatattaaaggcaggcaattgaaattctcttacgctaaaaacaaagttgcattattttccaagagcatgttcagggaactttacataattaatgcagtcattaattatttcattacaatgtttgactacctattctgtgtctgaccatgaattaagtgccattgattcaaaagtatataaataaaacagaaa

SEQ ID NO: 46505 - DNA, 540 bp, Homo sapiens
ggagccttttgaatactagttaagaggacctttcctgccaagatagaagaaataaaaacaatttatttataaaacctttccaatgcatcacattcactgattcttagtaaatagatttttcacaataactaaattatgaacttgaattagattgctaagctctatttatgaaatgtttacatcaaaaagaaattgtgcaattcaaagtatagcacgagaaacagaggagaaagagaaagagagaagaaagaccttacaaacgtctagttaatatacatacatacatacatayatatatatatatatatatatatatatatatatatatatatatattttaaactaaactatggaaagcacctaacacctgttgaaatatagcataattttaatgtagctgggaaggagggtaaattatttgtcaaaaatttcataacactaactaatcaagttagcttttttaaactctgtatacagtgaacgacccccctctagaagtgatactttaaatgaaccttgaggtgtatagaataaataagg

SEQ ID NO: 46506 - DNA, 607 bp, Homo sapiens
tggtgattgacctttttcagaaagaaactaggcttccaaaccaaactctaatcatggagattctgtcttccttctatccctcctttcctccttctcttccttccttctaacatttaaagtcttaattctgacattacacacagtgtaatgcacagtggtatacttagacagaattaagactttcaaatgaaattgaaccctaagatgttatatcatagtcagacctcttggcgcttagggtggcagatgttcctcacagtttcttccaaagtagcaacagtctttttgcataatttattgtaattggatattggaattatgaacagagaaattcttctcttctttaaaaattagtaatagaacctaattgtaacaccagtagctttagaatctcttaaaggaaaaaaccttcattaatttgctaagagattaagctgaagctaactttgctttataaamaagttgccaataaaatagcctaatacttgcatagaggaacatttaatttactgaaaagaacaaattgccttcaaacaatttaaaacaccaattaatggataaacaaccaatatgttaaatacaaatcattcttctctatttattgaag

SEQ ID NO: 46507 - DNA, 580 bp, Homo sapiens
gcctcgcgcccaccctcgccgctctccgcagcgcccggcgcagtggggaaattcgaggcaraggttcctttctcctctgggcggcagcagcaggaatcagggggcgggaggcgagctgtgtcgaggggcgcacgcgggcggacaggggccgcggggctcgaactcgccaccggtgtgtgtgcgtgcgtgcgtgtgtgtgtgtgtccgtgcgcgcgcgactgtgtgtacctcctttccccggtgacggaacaaacagcccgggctgctccccgaggctgctcgccctaccagccgctccctagcgacagcgccgcttaaaaagccaatggtgaaggtgcttctttcaaagtgcacataaatctggtgcttgttggctactccttggcagctacaaatgcagttcgaaaggggatcgtccccaccgccccttctgagcctctcctcagcaccttctgccctgcctactctagcgcaggggttgagaagggcagagttttgagaaggtgcgtgggtttaagggtttgccgcgaaaaagaagttgccttccttttcaaaatctggtttggcctggagcaagtcg

SEQ ID NO: 46508 - DNA, 566 bp, Homo sapiens
tcaaactttccttgaaatactgwtaaacaccacacagtgttctaggtgtgggcattgcaaacatgagcatgcagtggtgcagtgggcacacgctgtctgatacattgccccccttaccaccgtctgatgcaggcacacttctctgcagcagctctcctcagagcctggccctcttatacctctagattctgatggtcctgggttattgaatgtgcttccttctcttttctactggttaacttctactgattgtcctcactctgctgacacagggactcctccaggtaaccttccatgacagcctcctcactgctccccctccttggaggatgtgtcgccttccctctgcgataacctttctcagcactcactaccctcctctgtgattgtttctatggctggctgttcacagagccccctcgactgcagagactgtgccttccttagacacagccctagaacctagcagaacttctggaacatagtaaaaaccacacaaatgttcattgaataaacgttgagatccccaacagtgccctgatttctgttctttctgatgcttagtt

SEQ ID NO: 46509 - DNA, 545 bp, Homo sapiens
ccgacagaataacccgtggaattccaactctccgtccttcattcttgatgttgaccttgagtgtcagcgcagcctggatccagcaggtcaatgtgccaaatccaaaggtcaaggaagttccgacgttatggatttcttcatcatttgtgagcttagggatgaatggataatgacacatgaaggcccattcagcaaagaagacaggcaagttgaaggaatgaatatatgaggggagaagataggaaaagaaatatcccaataatgggatgatagattgcagaaagattagctcttcgttctattctcaaatggtttgaactctgaggggatgaaggagataaataatacccccaacccttaaaaacatttgtgtagaaaaagtaaaagaaaacagmaggagagttacagaaaaagaaatgtttctacaagcatacaccccaaacttttccaggataagaaaattagaccaggaatttggacatggttttttttgtttgtttgtttttgttttggtttgtttgtttgttttgagacagggtctttac

SEQ ID NO: 46510 - DNA, 418 bp, Homo sapiens
gagttaacttctagaaggaaatagggcccatacgtgtcctggagccccaaacccggtgtccagaggcttctgctggttgggtgtggcagggttgagtcactcagcaggagaaaaaattgggaaaacatttccgttgtcctcctcccttctcctcctggtgctcccgagcagtgaggctgagcaggatcaacaccgtccacgcctstccgtgttggcatgtttagtcacctgggcaagctgggggaatactgccatgggatggaagagccaggcacttgaacgcccatgcacacacatgctccctaccactaacctgcagtggctttaatgaaccccttgcaaagctacagccctttaaacaggatcgtatccatcacatcggaagaaaagcatcataatttgcccctggacccagtaa

SEQ ID NO: 46511 - DNA, 418 bp, Homo sapiens
gagttaacttctagaaggaaatagggcccatacgtgtcctggagccccaaacccggtgtccagaggcttctgctggttgggtgtggcagggttgagtcactcagcaggagaaaaaattgggaaaacatttccgttgtcctcctcccttctcctcctggtgctcccgagcagtgaggctgagcaggatcaacaccgtccacgcctgtccgtgttggcatgtttagtcacctgggcaagctgggggaatactgccatgggatggaagagccaggcacttgaacgcccatgcacayacatgctccctaccactaacctgcagtggctttaatgaaccccttgcaaagctacagccctttaaacaggatcgtatccatcacatcggaagaaaagcatcataatttgcccctggacccagtaa

SEQ ID NO: 46512 - DNA, 556 bp, Homo sapiens
cctttagagcaggaaagaaaggaaagtacacttggaagagacaaagtgggcaacttgaaggacaagtacagtgtcttaccttgatcataggactttatatgytggcccaccttcggcgtcttgctcccctttcccatgattcttccattagggtgggctgtggacctgtacagtgccctcctcatgcttgggaagtgaacatgcggcagtatgtttaggaagtgtttttatccatttggaaagttgtttctccccggcacctgcgttcaattaacactttagtgtgacagctctgggcaatcaggagattgtctgtccctggcactggctgccaaattatcatttttagagaggcaatgtgataactgctaagcaatcatctgatgatcgcctgctattccttgtgagttgggggagacagccctcttctaccctgctcatgccttcctaactacctataacaatttggcattttccaccttcatatctctcacaacatcactttggaaaccaatgtggcaaagatgtaggctgctaagtatgtctattccaacta

SEQ ID NO: 46513 - DNA, 556 bp, Homo sapiens
cctttagagcaggaaagaaaggaaagtacacttggaagagacaaagtgggcaacttgaaggacaagtacagtgtcttaccttgatcataggactttatatgctggcccaccttcggcgtcttgctcccctttcccatgattcttccattagggtgggctgtggacctgtacagtgccctcctcatgcttgggaagtgaacatgcggcagtatgtttaggaagtgtttttatccatttggaaagttgtttctccccggcacctgcgttcaattaacactttagtgtgacagctctgggcaatcaggagattgtctgtccctggcactggctgccaaattatcatttttagagaggcaatgtgataactgctragcaatcatctgatgatcgcctgctattccttgtgagttgggggagacagccctcttctaccctgctcatgccttcctaactacctataacaatttggcattttccaccttcatatctctcacaacatcactttggaaaccaatgtggcaaagatgtaggctgctaagtatgtctattccaacta

SEQ ID NO: 46514 - DNA, 578 bp, Homo sapiens
tgaggcctctcctcaacctctttttctgaataaatagtaagctaactgctaaggccatacaattaattatctggttccatattctattatcatgtcatgaacgtaagtttgtctccccaccccaccaccaagaatgcaaatatcttaaaaaattgtttatgctgattgtacctcttcaaatacttgcatttgctaagtatgttgcaagcattcaataaatactttgtgatatgctgatcatataaaaggtgctctgggaagcaggctccatgagttccagccatttcgtgtaaaggcaaaagggtaatacaacttctggatttgaaaggagcttgtgaacaaggccccattcttcaatgagatcagctcactttgcaactaggcacatatcatgtttgtcagcatcccccaaatttacacttagcttaacagttattccagcatcccatagtggtaaacatttctgtccatattaggatgaggtggaaagcccaagaaatgtgagggaaatacaatcatttctgagagagagagagaragagaaagacagagagactaatgttttcctgcattcatct

SEQ ID NO: 46515 - DNA, 618 bp, Homo sapiens
ttttctccctgcatcacaacgatgatctgtctggtctgcacactgttaccatgtgacttaggtaaacagcttccttaatatggggaaagccttctggcttggtcttccaccccagtcctggggccttcaggcacatatttatggtctcagttttgatatgcaagtctgaaggtgtcagccatcacttgaccagcttaggtttatgaggctacacctcgagtggcatccgtagccacctagacattgacatcacacctacagtttcgatggatggcaccaggtgaacaggggacttggggtcagcgcctacttccagtgtctggtctcacagaagacatagagggccagaaaatgaatcaaccccttatagctctcaaaaatatatccttgggtaaaataaccagtgtaaatgtcaatgaccacttaccaacatttgcaagtgggtaggtcatctcttttcttccctgccccctgaatcacccagtggcacacattgatcaaagtccttacttawcaccaattaccacaagcccgtttcccaccccaattcccttttctgttcctgaaaatgaagattagtaggaaaagaaaaccccaacagtttttctaggcttttca

SEQ ID NO: 46516 - DNA, 618 bp, Homo sapiens
ttttctccctgcatcacaacgatgatctgtctggtctgcacactgttaccatgtgacttaggtaaacagcttccttaatatggggaaagccttctggcttggtcttccaccccagtcctggggccttcaggcacatatttatggtctcagttttgatatgcaagtctgaaggtgtcagccatcacttgaccagcttaggtttatgaggctacacctcgagtggcatccgtagccacctagacattgacatcacacctacagtttcgatggatggcaccaggtgaacaggggacttggggtcagcgcctacttccagtgtctggtctcacagaagacatagagggccagaaaatgaatcaaccccttatagctctcaaaaatatatccttgggtaaaataaccagtgtaaatgtcaatgaccacttaccaacatttgcaagtgggtaggtcatctcttttcttccctgccccctgaatcacccagtggcacacattgatcaaagtccttacttatcwccaattaccacaagcccgtttcccaccccaattcccttttctgttcctgaaaatgaagattagtaggaaaagaaaaccccaacagtttttctaggcttttca

SEQ ID NO: 46517 - DNA, 617 bp, Homo sapiens
gggcactgagataggagggaagccagacttgccctccttcccagaagccaagacaggagagtgtccccgggaaggtcatggtggagatgaggcagaggtcactggtggggctgactctagatcctaagaattcgtataatggtctatgaagctgccagatacagttacggcaagagtaggagagaaccaggctgaagctggaaggagtagctgggtctagagaaaagttccttttcagacaggggaagcagaagcaacagaagcatgcagaatatgttggaaagcagaaaggaagcaggctcccaggggggatggaaaaaccgaccagggagaaacaggagragggaggcaggaacaggtgcttcagcttccctgagttcccctggaccgatctctacaaggagggttataatttcgacctcttggggttctgagtaagaactgaatgaattaactcatgtaaaacacccaagactgttgacatgcaatctatgaaagtggttgtcattatgtggaaataaagaaaatggatgagatgcagtgggttgaaaaatgtgaaccaggaacctggtgggaacttcagctaagaaaggaatacaaatgaaataaaacttgtc

SEQ ID NO: 46518 - DNA, 617 bp, Homo sapiens
gggcactgagataggagggaagccagacttgccctccttcccagaagccaagacaggagagtgtccccgggaaggtcatggtggagatgaggcagaggtcactggtggggctgactctagatcctaagaattcgtataatggtctatgaagctgccagatacagttacggcaagagtaggagagaaccaggctgaagctggaaggagtagctgggtctagagaaaagttccttttcagacaggggaagcagaagcaacagaagcatgcagaatatgttggaaagcagaaaggaagcaggctcccaggggggatggaaaaaccgaccagggagaaacaggaggagggaggcasgaacaggtgcttcagcttccctgagttcccctggaccgatctctacaaggagggttataatttcgacctcttggggttctgagtaagaactgaatgaattaactcatgtaaaacacccaagactgttgacatgcaatctatgaaagtggttgtcattatgtggaaataaagaaaatggatgagatgcagtgggttgaaaaatgtgaaccaggaacctggtgggaacttcagctaagaaaggaatacaaatgaaataaaacttgtc

SEQ ID NO: 46519 - DNA, 580 bp, Homo sapiens
atttggtttaaataataccaaaaaatgattatttcagagatttattgcaagttaattgtctgtgaagctggatattccttaacatgaaggtaataaactttaacgttccactcaaaaagacaaaaaccaaacaacgaaaaataagaaattaaccagaaagctatagcttgttttcttactcagaaaaaaagtataactgataaggtacaatttctgtaactggatatttttcaaaattataaggcttttagttctaaaagtataaagaactgtgatgcacttctagtcaacctaatcttgctagaagctttatcaacactgacagtctcaatactttctcttttgctattatatagtcaactttaaaggtaattccttaaagtaaatttgtgtgttcctaaaaatatggactaaagttgaatgggcaaaggtatacatcgcattttctgggggagtaggggagaagtcattcccaaaaagtgaaayatttaaacaattttattctttctttcacaactaaacacaccttgaggctgaggaacatgtgatttgccatatgatttccaaccttttcttatcc

SEQ ID NO: 46520 - DNA, 180 bp, Homo sapiens
aacaaaatgtttaaacattatttcttaactaagtcaatcrtaggaaaagttccttgaaatttgtagttataaaaatatgtacaagcttttcttagaattttgccacatgtataaacagaacaaagcaactctactcacatgtccttatgcccacatcatgccacttctctcctctctccc

SEQ ID NO: 46521 - DNA, 521 bp, Homo sapiens
tgaaaaaaataagtccttacttaaaatgcaagattaatacaattaaacaaatgatcttcacaaaaggctatcataaaacaaaaccccataagcaatgcaacactcccaattcagaaatgatagttctttgtagtcttattttgactacagtcatattttgaataaatcaaaaaagatttacaaaattggagacatagcaagggaaaacacagaaaatctagcaatggcaaggcaaattctgacagatcatggaaatgattcaytttgaatctcagtttcaacacagtatttgtgcttttgaaatggctttgaataaaacaaatcagacacagatgacaactaagacaacaatgctgtataaagggagtactttcaatttgtcagagacacattttatcctgtgtgctcaatccttccctcctacgtctgcctcgtcccagtgggtgttacaagaatgttcatttaacttttatgatgggtgtgattgtcacagtgttgggtgttatacatttctatggcta

SEQ ID NO: 46522 - DNA, 521 bp, Homo sapiens
tgaaaaaaataagtccttacttaaaatgcaagattaatacaattaaacaaatgatcttcacaaaaggctatcataaaacaaaaccccataagcaatgcaacactcccaattcagaaatgatagttctttgtagtcttattttgactacagtcatattttgaataaatcaaaaaagatttacaaaattggagacatagcaagggaaaacacagaaaatctagcaatggcaaggcaaattctgacagatcatggaaatgattcattttgaatctcagtttcaacacagtatttgtgcttttgaaatggctttgaataaaacaaawcagacacagatgacaactaagacaacaatgctgtataaagggagtactttcaatttgtcagagacacattttatcctgtgtgctcaatccttccctcctacgtctgcctcgtcccagtgggtgttacaagaatgttcatttaacttttatgatgggtgtgattgtcacagtgttgggtgttatacatttctatggcta

SEQ ID NO: 46523 - DNA, 521 bp, Homo sapiens
tgaaaaaaataagtccttacttaaaatgcaagattaatacaattaaacaaatgatcttcacaaaaggctatcataaaacaaaaccccataagcaatgcaacactcccaattcagaaatgatagttctttgtagtcttattttgactacagtcatattttgaataaatcaaaaaagatttacaaaattggagacatagcaagggaaaacacagaaaatctagcaatggcaaggcaaattctgacagatcatggaaatgattcattttgaatctcagtttcaacacagtatttgtgcttttgaaatggctttgaataaaacaaatcagamacagatgacaactaagacaacaatgctgtataaagggagtactttcaatttgtcagagacacattttatcctgtgtgctcaatccttccctcctacgtctgcctcgtcccagtgggtgttacaagaatgttcatttaacttttatgatgggtgtgattgtcacagtgttgggtgttatacatttctatggcta

SEQ ID NO: 46524 - DNA, 596 bp, Homo sapiens
ggttgtcctgattgatgtttaaaaatagtatatgcaaatgtctgtctacctatcatcawctatcatctaatcgatctatatgaatatatatgaacctcaaaaatattctcatcataagtgagactatgagccataattaggacttcatttaaaaaactgttggcgctattatcctattttggctcctgtcaaatgaaatatttgctcttcttacctttgcacatttccacgtgagcaaacacacagctcttcccagaaaatcagaaagattgcatcttagattcacacctgcaggtggtaaggttttctcagaggctatatagaaacactgcatttcccaggggcttggagaaaagcaattttaaaatagtttgagatttttttctgggaggcggcacttggtgaccacacctaaaagtttatttgtcatgtgttgattcatttgttcattcaatgcgttattttctaagagctttatatgtactacctctgacgacacagacaaatcaagtgagacattttcccccaagtatcttacagtacaaacaggggaaagaattttcctagaatcaccttaaatccaccccttggtcctt

SEQ ID NO: 46525 - DNA, 573 bp, Homo sapiens
gcagctttgctgtgacaaattggaacacatttgttcacctttgaaaggtgctcttgcccccatgcctgctaggggcaggttctcttcagcagggccaccaccccagccaggtagcccctaaaggctgcaagaaaatgagagcacagctgccatcctgggctgggctctgtgcactttcccatgtactcctcaaacctctggtaaggctgccacctcccagctgcatccggctctgcccctctcttgtctcagagtcgccctgggctgagcacagtgctgagcatgtttgcttttcctgccctcagtcttcccatcgcccgcagaaggtgccaggtgctgcctttgttgttaatgctcctcccaccaccccatggagacttgatgggccccagatgtgctgggtcaggatgttaccacacagcaggtggatcctgtctctccatgagtgtattcgtccattctgcagtgctatgaagaaacacctgaaactgggtaatttataagaaaagagktttaattggctaacagttccacaggctgtacaggaagcatggctagggaggcctcaggaaa

SEQ ID NO: 46526 - DNA, 562 bp, Homo sapiens
taatatataccctttttcatttttatagccgaataatttagtctaaaatatttatcttataattttgattaataatcaattatactgagaattcagatgaatagaggtttactagatgctttcaaggaatataaatttttaagacgtattcatcaaataaattaaaagctatgtcataatatggtcttgttggaattaagattttgtgtcctttatttcacttaatatttgtcactagagacataatttcaaagatggagtttttaaacttaggttgcttgttwttttcagctggattaaatttgggctaaagataataatataaaagatattaagttataaccttcaaccaatgttttctgaacttgttggatattagcaatcatccaggatacttgttacacaaacagatcatcagtttaacttagcaggttcgagtcaggcctcaagaatttgcttctttttacatggagtccaggtaattcttatttttcagcatacttaacgactgcatctttataccatcttaataaacgcaaaaattcagaaaatatgcaggtca

SEQ ID NO: 46527 - DNA, 563 bp, Homo sapiens
gccgagacaccacagctgaatttgaaggttgcagtccgtaagaggaagaaccacctctatctctggatgaagaatattttaaattacctgggtcggctgatgcactatcagttctataaaaagagaaaagtttaagattagaactttaaataacataaataaatctttctttaaacaagcctctcttctcccaaattttacatttaaccattactattgtatttagtgtaatatgcactatatattatatgtaagcactcagccgtctaataagaagtctttcactgggaagagagtctcaatggaygaaatgccaacttttcactctcttctactgttctaaagacccattcagaaatatgaataactactgggattagggtgactttgctggttttagcattgaaagtctcctgtcccaggcaaaacaggacaattggttactctggtccagtgttctcctcacatgacttgataataagaataattctttctaaattctcccccatggagacggttaatcagtcaaaacatttcagcctttcctgtcataaaaataaaaa

SEQ ID NO: 46528 - DNA, 620 bp, Homo sapiens
gctggaaattcaatggcgattaatctggaaataggaggctccttccttcagaaattttaaagcccagggagaggagacagaccaatacaacgaagcataaagaatgccataatggaggaagtataaggttctatggggacacataaaaagggaacttggaccagtcttgagcaatgaaagaatgattctgagaaaaagtgatatctttgccaaagctagaataagaatttactayatgccagggtaaggaataaggaagagggaggaaggctccatgcagatgggaaacatgtgttaaggcccaaaggggagaaaagccacagcatatttgaggaatacacataatttccaaataatccgagcataaaatgaatgaaagaagtgatgaaagctgacactgggaggaaagtaggagattatttcagttgcttttgagcaatggtgggaaagtttatccaaaagaaatttggatttacaggtcaagaaaaaagggagatttagttaaaaaaatttgtagttgagaatcttccatatattgttggtcactaacttaataacagagtgtggctatcactcaagatgagtatgcaaaaatgagaccctaaaacaattctgaggaa

SEQ ID NO: 46529 - DNA, 620 bp, Homo sapiens
gctggaaattcaatggcgattaatctggaaataggaggctccttccttcagaaattttaaagcccagggagaggagacagaccaatacaacgaagcataaagaatgccataatggaggaagtataaggttctatggggacacataaaaagggaacttggaccagtcttgagcaatgaaagaatgattctgagaaaaagtgatatctttgccaaagctagaataagaatttactacatgccagggtaaggaataaggaagagggaggaaggctccatgcagatggraaacatgtgttaaggcccaaaggggagaaaagccacagcatatttgaggaatacacataatttccaaataatccgagcataaaatgaatgaaagaagtgatgaaagctgacactgggaggaaagtaggagattatttcagttgcttttgagcaatggtgggaaagtttatccaaaagaaatttggatttacaggtcaagaaaaaagggagatttagttaaaaaaatttgtagttgagaatcttccatatattgttggtcactaacttaataacagagtgtggctatcactcaagatgagtatgcaaaaatgagaccctaaaacaattctgaggaa

SEQ ID NO: 46530 - DNA, 1221 bp, Homo sapiens
gagcagagattatgccactgcactccagtctgggtgacagagcgagactctgtctcaaaaaaagaaaaaacaatctgtcttaagtagaattttctaagtgtcagagagaatgttacacatttattcattcagtccatcaatttatttagcaaacatttatatttattgagcattgtgatatgtcaagcattctgactcactggagatacaaagatgaataaatcatatatggtgcctgcctgccttatatgaatttagagtaagttgataccatggtaggctagaactttgttcctccacgtttgtctgagaaccaggagcattggcatcacctaagagcttcagaaataaataattttaggctccatccagatatactgaatcaaagtctgcattttattgaagtgcccaagtgatccaaagtgaagtttgaaaatcactgggctagaaggattatggaatgcttttgtggaggagctgaaataagtagatatcatcaagttttattaaaagaggaaggaagacttgttaaaaaggattggataacatctgaaatctaatttaggatatggggttttcagagctggttgggaatgattattcaaacaatgatgggaaatgacccaatagttggttgatgatccacagggagaggagtggtgataatgtatgataatatggcactcaaagcttagagaaagatgagtggtctagattctagactctagaagtagcaatgggatactgatggtgatgcagtggctaaaggcaagattttctcatcccaagcatgtagaggtaaacactcatattctcacaggtgatatttaaattaacttttaggatttatatttttgaatcctaaaattacagtgaaagtcaataagtagatacaaatccagctagtaaaatgtttttatatatgccagtttttttcaaaatacatttaatttattgcaccttaaatatgagaaaaaaaggaggtaatcttaatggagaaaggctgtttacatttttatctacagagttatgtcttcataatcaagagaagtcccagacaagattgtgagaaaatgaagtttatctgtrgtggctttatgtacttcaatcatctttctgttatcttcctctcagtttttgtaatccaacacaaggaaatgaagacaccatgtggtcggaagtcaataagagtaatattgagggaatggtgacctcctcaaa

SEQ ID NO: 46531 - DNA, 1939 bp, Homo sapiens
tggtattcgagatttttatatcgtattcctgaattctcgaaagttctgaaaataaagagatgttcatagggcccatatatagttatatataacagatccatgttccaagtggacaaggatgagtggaaaggcaggtacttcagtcatacacagatattcaggtagctccttgatgacctgtctacccaccacattcctctgccttgtgtctaccttttttttcaaatgygaaaattatctggactttatttttctacttgtcaaattctctttagctttttttagctgttgtgttgacctcttctatctctaaaaggcatttggttattttttttaatgtttttgcttcactgaagcttagtgtgctttttatggttttatggttaccttgcagaaatctcattagaaaagcactttaatatattacttggcaatgagacatctgacaatattctagttcattagttaggaaacctccccaagcttggaggaatagacattcctctgtgaatggtagagctttgatcactcctgaggggccaggatttattttaatgcattttaggggaggagaagatatcctaagcctggcaaaataaaaataacacagattaaggaaacaatgaaacattattttaaaagaaatgcacttcagttaatattattctatgggatctcctgagtcctttgaaggcagagcttatcttagaaaatatgtctcctttagtgggcaggaggttagttaagcaacctcacaccagatcacagattatactgaaatgatcctaataaggaaagactttccaaagctatactcattttagcatgaataaatggattcaagtcttatttgtgggattttaatttccaactttgaatttgcaaactatcaaattccttcaaagacacggtgtgcagagaaggctctgagtaataggattgcttatttttaaaggaagatgccctttagcaaagcacgaggctttgacatgtgatcagtcaagggtccaatcagcacggatttccccacatggcactgtttcttgttgagttccaaccagatttaataactcatacaaaatgcaactccaccctgagggtgcctagtgcattcaaagcagataatgctatattgttttaacacagattatgccaaatgaagtacaatttaaattcctgaagcatgacagtccttgggtgcttgtggctgtgttttagttgggtgctgtatcttttctttctttcttttaattgaaagacttaaaagaagcaagctgtctgaaaaagtgtttaaaagagcttggttttcaaatggtataaataggacagaggcagaggatgctatggaaaaagggccttcctccaactttaagaggtagaggaaagaaatgggagagtctgggcaaaagtgacgtaagcccctgaagtcaggctggagactcttttgtgtctcatgtgaggagagaaatgggtgaagcctatagtactttcacactcccctgaatgggaagtagaggccagatgccagttgcagcttctttttaactttttaacaccttcagaggcaggagaaaatggtgggtggggggaatgtttttatttgggattagaggtaaattttcaggccggacgaggtggctcatgcctgtaatcccagcactttgggaggcagaggcaagcagatcacttgaggccaggagttcaagacaagactggccaacatggcaagaccccgtctccactaaaaataccaaaattagccaggcgtggtggcacgcacctgtaatcccagctactcgggaggctgagacaggagaatcgcttgaacttgggaggtggaggttgtagtgagctgggattgctccactgcactccagcctgggtgacacagcgagactgtgtctcaaaagaaaaaaaaagagagagagagagagagatg

SEQ ID NO: 46532 - DNA, 1939 bp, Homo sapiens
tggtattcgagatttttatatcgtattcctgaattctcgaaagttctgaaaataaagagatgttcatagggcccatatatagttatatataacagatccatgttccaagtggacaaggatgagtggaaaggcaggtacttcagtcatacacagatattcaggtagctccttgatgacctgtctacccaccacattcctctgccttgtgtctaccttttttttcaaatgcgaaaattatctggactttatttttctacttgtcaaattctctttagctttttttagctgttgtgttgacctcttctatctctaaaaggcatttggttattttttttaatgtttttgcttcactgaagcttagtgtgctttttatggttttatggttaccttgcagaaatctcattagaaaagcactttaatatattacttggcaatgagacatctgacaatrttctagttcattagttaggaaacctccccaagcttggaggaatagacattcctctgtgaatggtagagctttgatcactcctgaggggccaggatttattttaatgcattttaggggaggagaagatatcctaagcctggcaaaataaaaataacacagattaaggaaacaatgaaacattattttaaaagaaatgcacttcagttaatattattctatgggatctcctgagtcctttgaaggcagagcttatcttagaaaatatgtctcctttagtgggcaggaggttagttaagcaacctcacaccagatcacagattatactgaaatgatcctaataaggaaagactttccaaagctatactcattttagcatgaataaatggattcaagtcttatttgtgggattttaatttccaactttgaatttgcaaactatcaaattccttcaaagacacggtgtgcagagaaggctctgagtaataggattgcttatttttaaaggaagatgccctttagcaaagcacgaggctttgacatgtgatcagtcaagggtccaatcagcacggatttccccacatggcactgtttcttgttgagttccaaccagatttaataactcatacaaaatgcaactccaccctgagggtgcctagtgcattcaaagcagataatgctatattgttttaacacagattatgccaaatgaagtacaatttaaattcctgaagcatgacagtccttgggtgcttgtggctgtgttttagttgggtgctgtatcttttctttctttcttttaattgaaagacttaaaagaagcaagctgtctgaaaaagtgtttaaaagagcttggttttcaaatggtataaataggacagaggcagaggatgctatggaaaaagggccttcctccaactttaagaggtagaggaaagaaatgggagagtctgggcaaaagtgacgtaagcccctgaagtcaggctggagactcttttgtgtctcatgtgaggagagaaatgggtgaagcctatagtactttcacactcccctgaatgggaagtagaggccagatgccagttgcagcttctttttaactttttaacaccttcagaggcaggagaaaatggtgggtggggggaatgtttttatttgggattagaggtaaattttcaggccggacgaggtggctcatgcctgtaatcccagcactttgggaggcagaggcaagcagatcacttgaggccaggagttcaagacaagactggccaacatggcaagaccccgtctccactaaaaataccaaaattagccaggcgtggtggcacgcacctgtaatcccagctactcgggaggctgagacaggagaatcgcttgaacttgggaggtggaggttgtagtgagctgggattgctccactgcactccagcctgggtgacacagcgagactgtgtctcaaaagaaaaaaaaagagagagagagagagagatg

SEQ ID NO: 46533 - DNA, 569 bp, Homo sapiens
cacacatttgtaaatgcataatttttttaaaaaaattattattttaaagagatgtgtttcaaatagatcatgttgttctctaaatgcttttccatcatcaaattctggactgtttacatgggttctttggaagtgtgctctttgaaggtgatcattacagtgtgtctaatgagagatgtagaatcactcctcaattagattagtattttaagaaaaaaaaaaaaaagcttyatatgtgtggtgggataaaaaccacagtggtatgggggagggccggggtatagttaaagccaaaggttaaacatgccgtgcttatcaatcactttttctggtggcaagttattttaaaagagttgttttatatgaaaattgttggggaaaggggagtggcaataaaaacaggacttctccctacctggattctgaacacgatgaacacagtcagcagataaggtccaaaataatacctttattatagatagaactgatcttggagaatgtagctttcatctgcagggagtggactttctcaaactgaaaggcagaggtagagatagacttatctggcc

SEQ ID NO: 46534 - DNA, 607 bp, Homo sapiens
tttcccttagagaagaaatcacgatgtcacagcttcaaatttttcatctctctatgggctaatttctccttagttttctcttcaagcaatcagaaattaaagacatttgagaatactctttagggagaataatggctgtactgcttattatatacctttaaaagcttattttatcagaatgttttctagatttttttttcatttatgcatttggatgctcaacaataaagttcaacactccattattatctgataatccaagccagaatcatcctctaattctgaattttcactaattcttatctgttactacttctacatgtctctaaaaagtcatttcactttgtccytacagctactgctttaggtcagtattgcataaaatctttcttgtgttattttagttgccttctaactggtttccagttttctgtgttttctcctttcaataatcagggaaagagttcagtatagccagtgaaaaatattttctagggctcccagaattaaataatattcctatcctattataataaatgttctgtacattactttgcctgtagcagtaaaaataaaacaaaagtagtttacagagtattactaaaga

SEQ ID NO: 46535 - DNA, 3403 bp, Homo sapiens
ggaagccattatcctcagcaaactaacacaggaacagaaaaccatacaccacatgttctcactcataagtgacagctgaacaataagaacacatggacacaaggaggggaacaacacacactggggcctgtcagggggtaggattgagggcgggagagcattaggaaaaactcctaatgcatgctgggcttaatacctaggtgatgagttgacaggtgcagcaaaccaccaggacacacatttacctatgtaacaaacctgcacaacctgcacatgtaccctggaattttaaattaaataatcctttccaaaactgcttctgtaaaccttcaacatttttctcatgaagtttatgtgtgagtatgttttttaaaaaaatcaaatcctgttaaagagatgagtttcaaatctgcatggagctagggtgagatcagggcagtgtgcaaagtaggggttaaaaatggaggtaacaaaggggagataagtactagggatctttcaaccatcacagtgaaaacttttagtctgttgccagctacagtctgatgagcagtttaaattctaatgtactgccaggttagacacaaaaattgttccagggccagaagttggtttgagcccataggggcagagtggaatggtttgttatgttaggattaaaagaattcagacaaggggtcaaattcatagcacacatgagtcaaaacgggcatgtggaatcagtgtaaatgccaaacactgccttaaaagataagcaaggatgacgttaacaataatgtgtacaaatatataatatgggttatttttaaagttagcctaattaagatttttgaaacaattttctttgttacatttgttttatgctaaagattttccacataatctgaatgaagggattaaagagaaattgtgaaggagtgcatgatggaaaaattgaaaaccagcaacacaaaacaaactctgaaaagacaggcagagagagagtgttaggagataatggagagagaccagatgagaagaggtgggccaagcaaactgcaacatccaacacatccagccagattagccttctcgcagatttaattttgccatatttccatgtttgcatgcttttaataagggctataaataacctttaatatggttagggtgaaaaatagggaggaaatgaaaggtaggatttaacttaaaggcatattttattgaacgattttgtaatcaccagatacctttcctgtattgtaaaaagcaaacaaacaaacaaagattaggaccatcttcctagtcctgtgagtagcatttgtcatgaccaatcagctgcttctttgcacttttctttcctctctttgtatattgatcttctgattgtctcgctttttgtcctgactctcaactctgtgtgttttccagcccgattttaacatgagtattcctaaaagttctcgccatggacttatctcttctcaaactatactttctattgagaacagcacagtttcgagactaaaaatacatagtttgaagatagcctgtctggatttgaatcctcactgtacaacacacatagaaatactctctctgggcctctctttctccatttataagatggtaacaataacagcaccttcctctcaaggctgctgtgaacgtaaataatttaaagtatgacaaatgcttaggacaatgtctggcatacaatacaattaatactttggccttgctatgatgatgcttagaaaaaggttacatccattcctgtatcttcaaattctggccatcctgagaataatttttgattctgtttttcctccaattcttcacctgtaactttactcctgcagtgataaattcctgttgggtattgctacctgatcattctgccagcacctccactgaacataaccaaatctgaagtcagtcctcggtttttttttcctctgattattcttctgacactattctctttttgcttttttgtttttaatgatatgacagtctttccactaatygacccttaaaatttcttggtcaacttacatatcttattcttcaacttccacatctcatctgcctttaagttctagcttcctttcacaaatgctcgtcatatgcattcactttttctatttcctcttcactgcctaaatccagacactcatcattgtttatctgaattagtccacattatctgtgaactgatatccttacttctatcatctcttcgacgcatctgcatgagcagcacatgttaaaactgcgctaatcattccttgctcaaattacatttaaaagttgtcatatttaagagtactttaaaattcattagtttgatttttgtattactttatttttctttttagaaattgtatgtatttaaatatgctttatcatctacccacaagctatgtctccatatttgtcttccatgacaattaaagccttctctgctccagtcatgtccacagctcagagatccccaatcatgcctaggtttctcaccaccatgttttgctaactggaatacatttctcccttatttcagcttatcaaaatttttcccaacatttgagacccaatccaaattccttttctgcatgaagcttttctgttcccctggtacagtagattcagcatttctttcctttttccaatcctagcacttatttagaattgataaaaagctgtcatgctatgtaccagaaagcacaaacaatatactttaaaaagggttggatatcataggactgtcatttacattactcataatatctctataatgtaggtaagtatatattgcatgttcaaattatttatatttgcatgtgcaaaaattgaagatgaaaggttaaacaagtttcccaattatattcctagaaacagccagaaacaagaaagcataccaaatatgtgtgtctcttaaatctgtgctcattagcattaattttggtagtttttaaaggatcacctacatcagaggcatcttgaggtgcttactaaaacgtaaattcctacttacatggctactggggaagggatcagactctgcgtctttaataatttatccaggtgattctcatgtactgtacaatttgcaaaatagttcattgaaccttttttattatctattactatatatattaaattcagtgaaggattagtttcttgtgggcaaaaatcatgtcttatttcaaatatgtaccgtataacggttcatagtacagtgcctgatacataatatatgctcaataaattttggttgaattattgccaatttctatgtttcaccacagcaaaaattattataaacccatcagcggtcagtaatatatttgccttatgtggcaagctgtaagaaatatatttgaagatttaacatatacacagaaatagactcacatatgca

SEQ ID NO: 46536 - DNA, 610 bp, Homo sapiens
gtgttttggttttgagtggaaatatttggatgggtaaaaatttaaaatataaataataaattagtacatctttattacatttacttttctgccttttagcgaaatgactgattttgttggaataatcaagattttcacataattttcattctaacaagacaatgatataaaagataaaaactgacatgtgaggccgggcgcggtggctcacacctgtaatcccagcactttgggaggctgagatgggtggatcacgaggtcaggagatcgagaccatcctggctaacaaggtgaaaccccatctctactaaaaatacaaaaaattagctgagcgtgttgsggggcgcctgaagtcccagctattagggaggctgaggcaggagaatggcgtgaacccgggaggcggacttgcagtgagtcgagatcgtgccactacactccggcctggtagacagagcgagactctgtctcaaaaaaaaaaaatactgacgtgatcagtgtagaaagtttaaaagttttcagcaataatataaaagatggaaaattttaaaatttttgtatgtgctttaaatttttttctgatattcaacattttctattaaagtcaaaa

SEQ ID NO: 46537 - DNA, 596 bp, Homo sapiens
gtgattcactgccttggcttcccaaagtgctgggactataggcgtgatccagtgtaccagccacattttccaaatttaattgagaaatatcttttcatgtaacatctcaggaggtttcggtctacagaacayattgggaacacaatcacatatttctacacatggaagttttagatttgctagcagacagcagtaagctaatgcagagaatagaatgtgggtttgtagggaaggaatagaaaactgtgtgggatattggattcagcctggggaggaaagtccaggtgagaaactcacatccaccaaggacatcagaagggtaccagggatcctcgaggctgaagccctaaaatagagtaaagaagacttgaaagtcagaatgctttagttataatttagtatagcagtgcttgtctgggaaaacaagttctatgcttcctttctctgttcttacatttaccttcacagcttctgacctgcctaattgaggttacctaggtacttacaaggaaagttcattcttcccaccccttttcccaaaaaataaatttaaattgggtatttaacatatgtcactcactgggcttggagctaag

SEQ ID NO: 46538 - DNA, 596 bp, Homo sapiens
gtgattcactgccttggcttcccaaagtgctgggactataggcgtgatccagtgtaccagccacattttccaaatttaattgagaaatatcttttcatgtaacatctcaggaggtttcggtctacagaacacattgggaacacaatcacatatttctacacatggaagttttagatttgctagcagacagcagtaagctaatgcagagaatagaatgtgggtttgtagggaaggaatagaaaactgtgtgggatattggattcagcctggggaggaaagtccaggtgagaaactcacatccaccaaggacatcagaagggtaccagggatcctcgaggctgaagccctaaaatagagtaaagaagacttgaaagtcagaatgctttagttatratttagtatagcagtgcttgtctgggaaaacaagttctatgcttcctttctctgttcttacatttaccttcacagcttctgacctgcctaattgaggttacctaggtacttacaaggaaagttcattcttcccaccccttttcccaaaaaataaatttaaattgggtatttaacatatgtcactcactgggcttggagctaag

SEQ ID NO: 46539 - DNA, 593 bp, Homo sapiens
tgccctcttctgtttgtcttgcaccttgtctraggaccctaaatgaacgataaacagagatggtagctatgagtatacaaaaggtaaatccacttaatcacatacagaagagcaacaacaaactgcttacgacaggtttggaagccacaggcgattctatggtcaatgtgaaggactagaaataaaaacccacatgtggaaagtgcgactttggcttgtcttctgtcagaaacagtggcaaatatggttataattccgtctgtcaacccacataattggcggctgcatgcttgtgggcaaagagtacatagattagttaagaatttgtcagctgggtgtggtggctcatgcctgtaatcccagcactttgggaggccgaggccagcggatcacggggtcaggagatcgagaccatcctggctaacacggtgaaaccccatctctactaaaaatacaaaaattagccgggcgtggtggcgggcgcctgtagtcccagctactcgggaggctgaggcaggagaatggcgtgaacccgggaggcagagcttgcagtgagccgagatcgcgccattgcactccagcttgggtgacag

SEQ ID NO: 46540 - DNA, 600 bp, Homo sapiens
caaaaattagctgggtgtcgtggtacgtacctgtaattccagytgcttgagaggctgaggcatgagaattgcttgaacccaggaggaagaggttgcacggagcctagatcgcaccactgtactccagcctgggcgacagagcaagattccgtctcaaaaaaaataaaataaaataaaataaaataaataaatgttatctgtgacatgcatttacaatgtcctcaaaaatgccacattcatcaccaagaaagccaagcactgcctcacctgcctgtgaactcagcaattttaaattctacagagtgattcccaaccattataaatgttggctgcctataagttctatacacggactagctccttcaggggctcacctaatgattacttttaaggttaaaaattaaggtcaccaggccgggcaaggtggctcacgcttataatcccagtactttgggaggccaaggcgggtggatcatttgaggtcaggagtgtgagaccagcctggccaacatgctgaaaccccatgtctactaaaaatacaaaaattagccggctgtggtggcaggcacctgtaatcccagctacttgggaggctgaggc

SEQ ID NO: 46541 - DNA, 600 bp, Homo sapiens
caaaaattagctgggtgtcgtggtacgtacctgtaattccagttgcttgagaggctgaggcatgagaattgcttgaacccaggaggaagagsttgcacggagcctagatcgcaccactgtactccagcctgggcgacagagcaagattccgtctcaaaaaaaataaaataaaataaaataaaataaataaatgttatctgtgacatgcatttacaatgtcctcaaaaatgccacattcatcaccaagaaagccaagcactgcctcacctgcctgtgaactcagcaattttaaattctacagagtgattcccaaccattataaatgttggctgcctataagttctatacacggactagctccttcaggggctcacctaatgattacttttaaggttaaaaattaaggtcaccaggccgggcaaggtggctcacgcttataatcccagtactttgggaggccaaggcgggtggatcatttgaggtcaggagtgtgagaccagcctggccaacatgctgaaaccccatgtctactaaaaatacaaaaattagccggctgtggtggcaggcacctgtaatcccagctacttgggaggctgaggc

SEQ ID NO: 46542 - DNA, 600 bp, Homo sapiens
caaaaattagctgggtgtcgtggtacgtacctgtaattccagttgcttgagaggctgaggcatgagaattgcttgaacccaggaggaagaggttgcacggagcctagatcgcaccactgtactccagcctgggcgacagagcaagattccgtctcaaaaaaaawaaaataaaataaaataaaataaataaatgttatctgtgacatgcatttacaatgtcctcaaaaatgccacattcatcaccaagaaagccaagcactgcctcacctgcctgtgaactcagcaattttaaattctacagagtgattcccaaccattataaatgttggctgcctataagttctatacacggactagctccttcaggggctcacctaatgattacttttaaggttaaaaattaaggtcaccaggccgggcaaggtggctcacgcttataatcccagtactttgggaggccaaggcgggtggatcatttgaggtcaggagtgtgagaccagcctggccaacatgctgaaaccccatgtctactaaaaatacaaaaattagccggctgtggtggcaggcacctgtaatcccagctacttgggaggctgaggc

SEQ ID NO: 46543 - DNA, 600 bp, Homo sapiens
caaaaattagctgggtgtcgtggtacgtacctgtaattccagttgcttgagaggctgaggcatgagaattgcttgaacccaggaggaagaggttgcacggagcctagatcgcaccactgtactccagcctgggcgacagagcaagattccgtctcaaaaaaaataaaataaaataaaataaaataaataaatgttatctgtgacatgcatttacaatgtcctcaaaaatgccacattcatcaccaagaaagccaagcactgcctcacctgcctgtgaactcagcaattttaaattctacagagtgattcccaaccattataaatgttggctgcctataagttctatacacggactagctccttcaggggctcacctaatgattacttttaaggttaaaaattaaggtmaccaggccgggcaaggtggctcacgcttataatcccagtactttgggaggccaaggcgggtggatcatttgaggtcaggagtgtgagaccagcctggccaacatgctgaaaccccatgtctactaaaaatacaaaaattagccggctgtggtggcaggcacctgtaatcccagctacttgggaggctgaggc

SEQ ID NO: 46544 - DNA, 588 bp, Homo sapiens
ttattataaattcatttaaaaatgatcaaataattgttttagaaacctaagtttacaccacaattattagagcatgcaaaaaatcttacaccagtgtgctgaagttcttattcttacataagtagatggtttaagtttgttgttattcatattcagtagaatgtttggggtagtaaatgagacttgtttgagacttatttttctgaagaaaaataacaagcatatgctagtacttcaaaagtctgaatatctgaaactctgtgcagtgtttttgttatcattcaggtttagatttttttcttccccctaacaaargaaagcttgaggtaaaaaaaaaaaaaaagttcctgatactccgtggagaagtggtgtttgtattctctgttcagtttgcaaagtcatatatccatacttcttgttgaatttcttttatttttccataactgctgaccttttctagaaaaaaaaacagctgatagctttgaatgaaagatatatagactggcatttacatcatgtccatcattcgttaaatgaatttttattctggacactacattaggctctaaaataaaaaagcaatcagga

SEQ ID NO: 46545 - DNA, 572 bp, Homo sapiens
aaccccagtaatggaattttctcagctcatggaagtgcccgctaactgtggatgactattgacccaamtttttgagagcaatttggaaatagtttacttgttatgcagcaacatctgccctttacctgctctaaagatgtgttccaaagaatgagggacaagaaatgaaaactcttttgaagcaagcagcctttgccattacttttaatggcaaaaactgcatttacttttccagcaacctaacacatcatgtcatttgcttccatcatttccttctacatagtaactttctctttatgaccataatgaactctaatgagcctcacttccctattttgaggaaaaagtgtgtttgggagtgagacccacactatgtgtgtgtggtgggggccagaacactcttctgggtataagctttctcatagagcttgactgagttcttcctttctctcattaaaagaaaaaccagatgtatagattgtgaagattttcttccactctgtgggttgtctctttactctgttgtctctatactctgctgtgttctttactctgctgtgtttacttttgct

SEQ ID NO: 46546 - DNA, 1275 bp, Homo sapiens
ggaaatgttctgtctgttaggattcttgaggcaagattggctcatatgtaccttacaytgattcctattcggaacctgttttaacaaattcccttgggatagacccagtgagggaatcaagtcctaagtggcacttttaagccttagtacaatgtcatgtgatacattaaagtctaatttgttccttcattgaaaatcaccctacagcaaggttctgactataatgctctttcttagatcctttcccaggcacattttgcaacatacaaatgaaataaagatatgatttgttccctcattttgctggattcaggcttgcagtggatagaagtttacttttatcttaacattggaggttgcccctaaggctgctgaataattaaggtctatgttttctgtagttcttcaataataaaatacatacgaaggcccttttctaccattaataacagaacacagtgttaaggctgctgcctagaaaagtagtagctttccattaactaaggttgacaattacatcgcacctttcttctcttaaatttgcaaattccttgatacctcatcagtttgaaaactcatctgcttcttgtgacagaggtgatatttatctaacagttaaaggtgatctttaagagaaaattacagttttatatctctttgttaaataattttccaatttatattaatctaagtatagatactttatgcagagatcttagttaaaaactttctgcattgtactaacagtttagtttaattttcaccgatgtctcagaattttgttgctcaagtttgaatgataaattttcttctccattccttaccaactgctcctactgtatgttactcttaggttcactgaacatctttattatggcatgcacatattcgctaaatatggatgtcatgacttaaacctagtgactacagaacgtaacatgcctaaggacaagatataataagccctgacaagataacacattgaaatatttgatataaactgatgttccctttattcactattatctttgctgaaaaaggtatggtttgcacagaccacccccccacacacactcacctgcatacacacatgcacctgtgcatgcatgggcatgcacaaacccccccacacacatacatatatctaaaacattattggggattttttttcaactgaagaattgataaacaaaaaatactttaagtaaattaaatttattttatatactgttgatcaacaaattgtaatctataaatctacagcactgaaatcta

SEQ ID NO: 46547 - DNA, 1275 bp, Homo sapiens
ggaaatgttctgtctgttaggattcttgaggcaagattggctcatatgtaccttacattgattcctattcggaacctgttttaacaaattcccttgggatagacccagtgagggaatcaagtcctaagtggcacttttaagccttagtacaatgtcatgtgatacattaaagtctaatttgttccttcattgaaaatcaccctacagcaaggttctgactataatgctctttcttagatcctttcccaggcacattttgcaacatacaaatgaaataaagatatgatttgttccctcattttgctggattcaggcttgcagtggatagaagtttacttttatcttaacattggaggttgcccctaaggctgctgaataattaaggtctatgttttctgtagttcttcaataataaaatacatacgaagrcccttttctaccattaataacagaacacagtgttaaggctgctgcctagaaaagtagtagctttccattaactaaggttgacaattacatcgcacctttcttctcttaaatttgcaaattccttgatacctcatcagtttgaaaactcatctgcttcttgtgacagaggtgatatttatctaacagttaaaggtgatctttaagagaaaattacagttttatatctctttgttaaataattttccaatttatattaatctaagtatagatactttatgcagagatcttagttaaaaactttctgcattgtactaacagtttagtttaattttcaccgatgtctcagaattttgttgctcaagtttgaatgataaattttcttctccattccttaccaactgctcctactgtatgttactcttaggttcactgaacatctttattatggcatgcacatattcgctaaatatggatgtcatgacttaaacctagtgactacagaacgtaacatgcctaaggacaagatataataagccctgacaagataacacattgaaatatttgatataaactgatgttccctttattcactattatctttgctgaaaaaggtatggtttgcacagaccacccccccacacacactcacctgcatacacacatgcacctgtgcatgcatgggcatgcacaaacccccccacacacatacatatatctaaaacattattggggattttttttcaactgaagaattgataaacaaaaaatactttaagtaaattaaatttattttatatactgttgatcaacaaattgtaatctataaatctacagcactgaaatcta

SEQ ID NO: 46548 - DNA, 505 bp, Homo sapiens
aggagttccaggctgcagtgggctatgattgcaccacttcattccrgcttgagtgacagagcaagaccatgttccctgaaaaaaaaaaatagtaacaaaaaaactgtaaagaatttataaataactaccaattgtcagtgactgagggaaaaaaagaatatggactaatagtcttgagctaggagactaagtggatagaaaagacatgcatctgagggcagtttgagaagcatgtcaatgccatcctagccctttcgattattgacccatagagagagaggttccaatgcaggtgaggtgatacatagattaatatccacacaaatgctatatcttacacaatatcacactttgctaacgctgcacataatcaagaggtacccataggcagcaagatgtttggaccaccgtatgtgactctggatttttctttcctgtaagagtcttctactttctgactgagtgtacattgtgttgctaaagaggtatgcaggttaattcatac

SEQ ID NO: 46549 - DNA, 505 bp, Homo sapiens
aggagttccaggctgcagtgggctatgattgcaccacttcattccggcttgagtgacagagcaagaccatgttccctgaaaaaaaaaaatagtaacaaaaaaactgtaaagaatttataaataactaccaattgtcartgactgagggaaaaaaagaatatggactaatagtcttgagctaggagactaagtggatagaaaagacatgcatctgagggcagtttgagaagcatgtcaatgccatcctagccctttcgattattgacccatagagagagaggttccaatgcaggtgaggtgatacatagattaatatccacacaaatgctatatcttacacaatatcacactttgctaacgctgcacataatcaagaggtacccataggcagcaagatgtttggaccaccgtatgtgactctggatttttctttcctgtaagagtcttctactttctgactgagtgtacattgtgttgctaaagaggtatgcaggttaattcatac

SEQ ID NO: 46550 - DNA, 505 bp, Homo sapiens
aggagttccaggctgcagtgggctatgattgcaccacttcattccggcttgagtgacagagcaagaccatgttccctgaaaaaaaaaaatagtaacaaaaaaactgtaaagaatttataaataactaccaattgtcagtgactgagggaaaaaaagaatatggactaatagtcttgagctaggagactaagtggwtagaaaagacatgcatctgagggcagtttgagaagcatgtcaatgccatcctagccctttcgattattgacccatagagagagaggttccaatgcaggtgaggtgatacatagattaatatccacacaaatgctatatcttacacaatatcacactttgctaacgctgcacataatcaagaggtacccataggcagcaagatgtttggaccaccgtatgtgactctggatttttctttcctgtaagagtcttctactttctgactgagtgtacattgtgttgctaaagaggtatgcaggttaattcatac

SEQ ID NO: 46551 - DNA, 505 bp, Homo sapiens
aggagttccaggctgcagtgggctatgattgcaccacttcattccggcttgagtgacagagcaagaccatgttccctgaaaaaaaaaaatagtaacaaaaaaactgtaaagaatttataaataactaccaattgtcagtgactgagggaaaaaaagaatatggactaatagtcttgagctaggagactaagtggatagaaaagacatgcatctgagggcagtttgagaagcatgtcaatgccatcctagccctttcgattattgacccatagagagagaggttccaatgcaggtgaggtgatacatagattaatatccacacaaatgctatatcttacacaatatcacactttgctaacgctgcacataatcaagaggtacccataggcagcaagatgtttggaccaccstatgtgactctggatttttctttcctgtaagagtcttctactttctgactgagtgtacattgtgttgctaaagaggtatgcaggttaattcatac

SEQ ID NO: 46552 - DNA, 620 bp, Homo sapiens
gagcaccactgcttctagtgcgtagacgttttgcttgctatcattgaaaactcgcttgacctctttggagaggggcatggcggcccccagatatctgaggaaggctgagcaggaggataaggtgagctgaggaaaagggagggagcaatggggtattcacggcaggggagcctgagatggtcccttaaggatttgcattggttaatgggcagactggtgcaaaagaggctgaattgaataattaggaaactgggagaattcaattcaaagaagaattcttgttcgcaaggtcaatttttatactatttaaataaaataactctggtaggttctatagcaaatgctaagtaaagtaaccgctggtttctaaattattacgataatctgagaaaattatttctttgaaaawattatagaactttcaaatatgcaaaaaactctagagagtaatataacaaatgcacttaatagggacaacctttaacattcagtagagaacattttactctattggcttcagatcttgttttgactgcagcttgattcccacagtcctctctcatccccacccatcgtgggtcctcagcctcatctcaccaccctgagttgggtatagaatt

SEQ ID NO: 46553 - DNA, 563 bp, Homo sapiens
gtctaacagattatattgcagctgttactcagtaatcttgaaagactctgtggtgtcctaaaagactcctttgtacaartaacacttccaagaacagtttccataacatccataacagattacacttttccacgttttgtgagtataagattgatacttttatagatgttttccattcaccattttatcaaaactaggtctaggaggcagaataatattatttttctggagctacagggggagataaatactttatcctttttatatttctgagatttctatcgtcagcatttaggaacacatgcactttcaatgttggcactgtaatatcattacttagcaccagaggggaaaggaataggtgacctaagaaaataacaacttaaaatatggcaaaggaaagagcacagagagcttttaaaaggcaactatgggacatctaatgttttgcatttacaattcttctgcctgttgactataatcaacactccattttaaatttggatctgtgtaggctcccttaaatatctcactgcagtgcaatactttcttagcatcccagt

SEQ ID NO: 46554 - DNA, 1849 bp, Homo sapiens
catacagccaataataggctggtcatcccacatctgcatcattggaatgctgtattcagcacaccccccagaaaatctattttcacagtgagcctctcccctgcgttcgagggctgtctaccctagtctatgagaatagggacatcggtgggcagccaggtctcccaatggatgtctgagcagtgagcaagagggtgacccacctctccaccaaagtgtgaaaagcyttcccctggagcttggtgagcttcaccctcacgaagatgcaaaagtaccttctgcttctctgtcaccttggtgccaatgtagggactcacaccccggggctgagcctgaattttatttggagaacagttcttgcagctttagcctgagaacaaatgcggctgtcagctgcttggcataaggaatcagtaggaacagggtgtcttttaattaattatccagacaatcaatcactcactccatggcctactcatgacctccactagatggcgcaggtggtgcttcttcccagctccagcccagaacggtgctccccttggacagttcatgtccgccccctctgggttttttgctctatcttttaaaatccagtccccagtcccatctgctggtaccttcgggacaatcctcagaatttctttccagttgatggtaccttattctgtctgcccgccctgttatggttttttttttttcttcttataccctttgggggaatcatttcagtgagattctgggatgaaaaggaaataaatacttatgtcattccagcatcttgacaaaggagcacctatttttaaaatgcacaacaacagccccagtccactcctttacctctaacccaatttacccaacggaaatttgcagaggtggggcctaagaatgcagtttcttaaagccccttgggtgattctgacgcacagccagagccgagagccaatgtgttaatcctcttcttggtataattaaggcagcttgtagagtaaaaataaatcattagcagccatttcattttgtttaggtaccaaggctatgccacccaaaaagttaattgaaaattactaacccaactccaggacataactagtactttgcaatctacaccttctatcagtgtgtgctttgttaaataaaactcttggcggggagagtctggctaggattctattcccaaattcatttcttcctgtgtaccctcagtaataacacttcccacctacttacctcacaagagtgttaatcaaaggaatttgaaagccatctgagcaaactttgttgactgaaatggacacataagtattgtatcaaagcattgtgtcatcaatcctatagcctttacttagagatattaacaagaatatcatactccgacttgacctttcctcccagtcataccttttattgatcctgaattttcaacaatgatgctcatttgcatcagcaaattgagtttctttcctccaccacccacctcactcttcaggggctttcgagctatgtcctccctgccaaggcttcaccacacctacatgtccagacctatcctcccagaaacgagatggagggtctgtgtagagtagcagcaaaatgtgggggctatctgggaccagactacctgggtcccaatctctgcaccatctcttgttagcagtgtggccttacacaagtaactaaagcaccctgcatctagtcttctcatctgtaaaatgggaataagaattgtacctccttcataaggttgttgtgagaataagtggattcaaacctgtgaagggcttggaacagacactggaacatgatattccatatatgttctctgttgtcattacaactggatggctcc

SEQ ID NO: 46555 - DNA, 576 bp, Homo sapiens
atgtaggaactgtgaattacaggcagatccaagttggattcctgtcctttaagatatgaaagtatagttggaaaataagcaaatatgtaaaagattattartattatactgttaaattagcagctaacagtattgtgcttgtctaagagacacctgttgtatcttagagatcttaacagtccatggagaagcatcagtgagcctgtgaactgcctgaaattgcatgtaaattttgtgtgtgtatgcattttactggggaaagggtctatttttgcatcatattcccaaagatgtgtgcagtctgtcacaaatttaagtccattgtatttcattctcatagcagtcttctttttcacatgagaaagccaatacccagagaggttaaatggcagaatcggtacttgaacctagacctctttgataccacaccttgggcttggctcatcttgctatggtgcactcctaccatagtagaggaaacagaggcaagcagtggttggtccattcccccagctttgatttgtacccacgaatggtgtgtgactgtgaccgctgctttgaacagaagtctgtgct

SEQ ID NO: 46556 - DNA, 1862 bp, Homo sapiens
tgaagccatctcctcagtgatggtcaggtgataaaactataaaaataattgtgcttggatcattttgcctattaagtactgatatctaaaaattgtacttcttagaaaattgtatttaaaaattatgcggccgtattacctgttgcaatcaatgttgtggtccacattgattgcttagcatggtgctcttaccaaatctgcaggcttacctcaaatgtgcgtacttgagagamgtaacacagtttctttaagttaatttgaatttatatgcacaaactacaacatatggccagtttaaataagcattggtttgggggtattgtaaacacatttgataaactactttaaatcctattttgaatatatagcgtactgttctcccatctggctcttccatgcaatttctgaagttttaatgtcaatttctactcagctagctgatatgtagcatgcagacttgacttaggcctctcacacatttctgttacttattctgggtgttgcatgccctcaaggagctctgtagttccttggcaaagttttttctttatagagagggcttggccttgcttcctttctaagtaggttcattttaaaggatgttctttcccaaggtggaaataattttcctggacgcaagacaaactggttgtttaaaggagccagacacttctgcctgctaacttttttgagcccccatcactttccaccaaaacaaacacaggataggccatataagacaattatcttcgtagacaatataaacaaacatagttgaccacttattaactatgcctatctaacctgtctccagaaagcagtttataatgagaaaaatatacaataatgttgataaaattaacataaattaaatatatgaattaaaaagaaaccaccatatgctaatcactcagcctgatgagccactatgataaagattacatttatctctgagcctcctggaagtcaaagaaaaagcagatgagctatgagctcctccagttgatgatggggcaatgataattttttactgcctgttgtgtgacacctttgtcctaacatacatcttccagccaccccatgagactagtccaccatcctcattttaatatgaggaagtagatactcataaagggaaaatgcctttatcaaggagaaatagctagaaatcttggaaatagttcaggtatggctgtatcccacttttgttctttctaaaatccaggagcatggtattaaattttaacttaataaaggtatgtctgcagattctcccttgatatcattgcctgggaacagaaaataaaaatatgatattcaggagtatattatagtagtttgtaggcaattgtttttcttcctatgaccaatacccagtggtaatgtactcatcagtttccacttaccagaatatcaggaaagtgaaaccatccctataaagtttataaaattaatcagggaagaagagagggggagaaaaaaataaaccaagcttacagcacacttagcattaatcattaggtcagctgctctctgacccacttcctcatagtcatttgctgcctattacctcagaatcacattagaccctgtcctaggattatagttccccttaactgctctgtagataacatcttaagcattgtgaaacattaaattttccatttgagagattctttcaggccctgcctactgatgaaatcactgatgtcagctggtctgaaggaccccatgacatactgactcactgaataatacggtttccacatcctgacgagttcatccccttaccctgactgataaatgatcccagttttccagccctttgccctccatgatcctcttaaaaactcctaagggag

SEQ ID NO: 46557 - DNA, 514 bp, Homo sapiens
aggctggtcacacagttaacgctgcatatagagtgctctctataatgtgcaaattgcaatgcacattaaaatgtaatctactttaataagtcacatgaagattacattttaagataattgtttgcatgtttatgctacacaccaaaatattttcctgctttgtttacagtattttctctttgcctttaaaacataatgattgcaaccattagcactaaataacttcctccttcgtatggttgggggtgaagttatgaagattcaaattttgggttcctggaagcatggtttaataatataatattcaaaaatctgcttgattttattgactttctcaaagtcaaacttgttatgataatcaaaaaccctattttgcatmagtaattaggacacttgtcttgaattatgcagatgattttataagttgtccactttccaattcctgtgtagacaaaaatatgtgactggtgacaatttttgaaatacttataatgaacatcatcacctgggtttt

SEQ ID NO: 46558 - DNA, 599 bp, Homo sapiens
ctctagcatatgttgagtactcagaaaagttcactagcattattactcatggcagaaagcagtgggtacatgcagtcctaggtgttaagaaggaagtgaggctgggcggctcatgcgtgtaatcccagcactttgggaggctgaggcaggcagattgcctgaggtcacgagttcaagaccagcctggccaacatggtgaaaccctgtctctattaaaaatacaaaaattagccagatatggtgttgggtgcctgtaatcccagctactcaggaggctgaggcaggagaattgcttgaacccaggaggcggaggttgcagtgagccgagatcgcatcattgcactccatcctgggtgacaagggcaaaactccgtctttaaaaaaaaaaaaaaattgacctgcccccttatccccacccctggcactcttgctttccttcyctttctttttttccttagctttgtaaggtaggtttagggttatttatgtttgctgctatttactgtctccattcagctaaaatataaactgtgaggcagggatctttgccactttttctcactgatggtcacctacgagatatcaataaatagctgctg

SEQ ID NO: 46559 - DNA, 599 bp, Homo sapiens
ctctagcatatgttgagtactcagaaaagttcactagcattattactcatggcagaaagcagtgggtacatgcagtcctaggtgttaagaaggaagtgaggctgggcggctcatgcgtgtaatcccagcactttgggaggctgaggcaggcagattgcctgaggtcacgagttcaagaccagcctggccaacatggtgaaaccctgtctctattaaaaatacaaaaattagccagatatggtgttgggtgcctgtaatcccagctactcaggaggctgaggcaggagaattgcttgaacccaggaggcggaggttgcagtgagccgagatcgcatcattgcactccatcctgggtgacaagggcaaaactccgtctttaaaaaaaaaaaaaaattgacctgcccccttatccccacccctggcactcttgctttccttctctttctttttttccttagctttgtaaggtaggtttagggttatttatgtttgctgctatttwctgtctccattcagctaaaatataaactgtgaggcagggatctttgccactttttctcactgatggtcacctacgagatatcaataaatagctgctg

SEQ ID NO: 46560 - DNA, 601 bp, Homo sapiens
tgtgattcacagtatgatgtgtctccatttgtgacttttttaaagggaaggattaattcagaaactttgggcggaagaargggggaggatgtggggatgctgcctcaccgtctcgagacatgcccacagagagacacttcttgaagcgacattgctggcagcggttgcgattgatgcggacgatggagcaattctcattcttcagacaccttttgtactggatgttctgctggatgctccgacggaaaaagccctggagggcaggggtggttagtgaccacctccatcatggctgggcctctgtgtccagggggagggggccacctgcccctgcccttacccccagtccgcctcaccttgcagccctcgcaggcgtgcacaccgtagtggaagcccgaggcaacgtccccacacactttacacagtaacaccatgccattcagctctgtggaagagacgggcagcaggtgagcaggagaggccaggctgagtggccacaggtgtggaggctttctgggccggagatccagggagggaaaagctaaggaggaactccagtgttgaggggcactggagtgacaaaactgggctgaagaggggc

SEQ ID NO: 46561 - DNA, 536 bp, Homo sapiens
gccaatcccgacttccctcctgaaaacatcaactaccactccctacctgtatcctcaatccctttcatcccccatattctaaaaaatagagacaggtgaccgggcgtggtggctcacgcctataatcctagcactttgggaggccgaggtgggtggatcacctgaggttaggagttcaagaccagcctggccaacatgctgaaaccccatctctactaaaaatacaaaaattagctgggcgcggtggtgcacacctgtaatcccagctactcaggaggctgaggcaggagaatcacttgaacccagggggcggaggttgcagtgagccgagatcacaccactttacaacagcctgggctatagagcaagactcttactccaaaaaaaagaaaaaaaaaatagagatgggatcttgctacttgcccaggcttgtcttgaactcctggcctccagcaattctcccacctcagcctttstagtagtagctgggacaacaggcatgtgctgccatgcctggcttcactccacctattttc

SEQ ID NO: 46562 - DNA, 560 bp, Homo sapiens
atattaattttatatgcagccacctgtaatatttactgtaaaaagtgaatttgacatggtatttattttaataaatcacttaaaatattgtttttttatttttttaaagaaatgtaagcatttaactcaaaagttagttagaaataacaattagataccaccagacacctgttagaatgaccaaaattcaaaacactaacaacaccaaatgttggcaagggcaaccagcactctcattcactgctggcaggactttaaaatgctacagtcactttggaagagagtttggaagtttcttacatataacaggcttttgccataacatctgacaattgcactcrcaaatatttaccagaatgagttgaaaacatatgtccacacaaactcctgcacactgacatgtatagcagctttactaataattgctaaaatttgtaagcaaccaaaatgtccttcagtaggtgaatggatagactgtggtacattcagacagtagaacattattcatccctttaaaaaatgagctatcaagccatgtaaagataaggagaaaccttaaa

SEQ ID NO: 46563 - DNA, 599 bp, Homo sapiens
ggaggccattattctaagtgaagtaactcaggaatggaaaaccaaatatcatatattctcacttttaagtggtagctaagccatgggtatgcatacagagtggtataatggacattggagaccactaakggggagagtaggaggtgggtgagggataaaacactacatattgggtacaatgtacactacttgggtgacaagggcaccaaaatctcagactttaccactctgtaaccaaaaaccacttgttccccaaaagctattgtgttatgtatgtatattacatatgtctaagtatagccatagatatccaggattttttttatccttaaaaaaccatatgatttaagagaacttaaagttattaaaaatatattattattttaattctccatctcccctggtagtgtgctatgcaaataataatgaggagatattaaaggtccctgggtttctcatggattctctcaaagcactagcttcttgagactcttcacacactgagagaattaaatctgtagccctttgtccagttaatttctctgatttgcaacaataggaaaacttcttttactcccctaagagggtcaaatttttaa

SEQ ID NO: 46564 - DNA, 599 bp, Homo sapiens
ggaggccattattctaagtgaagtaactcaggaatggaaaaccaaatatcatatattctcacttttaagtggtagctaagccatgggtatgcatacagagtggtataatggacattggagaccactaatggggagagtaggaggtgggtgagggataaaacactacatattgggtacaatgtacactacttgggtgacaagggcaccaaaatctcagactttaccactctgtaaccaaaaaccacttgttccccaaaagytattgtgttatgtatgtatattacatatgtctaagtatagccatagatatccaggattttttttatccttaaaaaaccatatgatttaagagaacttaaagttattaaaaatatattattattttaattctccatctcccctggtagtgtgctatgcaaataataatgaggagatattaaaggtccctgggtttctcatggattctctcaaagcactagcttcttgagactcttcacacactgagagaattaaatctgtagccctttgtccagttaatttctctgatttgcaacaataggaaaacttcttttactcccctaagagggtcaaatttttaa

SEQ ID NO: 46565 - DNA, 599 bp, Homo sapiens
ggaggccattattctaagtgaagtaactcaggaatggaaaaccaaatatcatatattctcacttttaagtggtagctaagccatgggtatgcatacagagtggtataatggacattggagaccactaatggggagagtaggaggtgggtgagggataaaacactacatattgggtacaatgtacactacttgggtgacaagggcaccaaaatctcagactttaccactctgtaaccaaaaaccacttgttccccaaaagctattgtgttatrtatgtatattacatatgtctaagtatagccatagatatccaggattttttttatccttaaaaaaccatatgatttaagagaacttaaagttattaaaaatatattattattttaattctccatctcccctggtagtgtgctatgcaaataataatgaggagatattaaaggtccctgggtttctcatggattctctcaaagcactagcttcttgagactcttcacacactgagagaattaaatctgtagccctttgtccagttaatttctctgatttgcaacaataggaaaacttcttttactcccctaagagggtcaaatttttaa

SEQ ID NO: 46566 - DNA, 537 bp, Homo sapiens
tgcattatgaatgatcaatgaacattatcatcagaacaatgtcacactattacaattatggtgcatcaaaartgcaaacttaattgtttagctcttaatgaaatacaaaagccacatgttaataatgttaaagttgtggttcgatctgacaaagtcaaagttaagatgatgataaaccatcccaaacactttgatatcataatataaaatatatcatagaggttccataccctacagccaccactctccccactatgaacagcagagaacatcttttcaaaatctagttgactggctttttgtaggaaagaacatggtcctgagttaagttgacaactcaacttacttcattttgtccaatctcaaaacagacaaacataaaaaattaggaggcatccaaataaagtgctcctccttatccacagtttcaccttctgaggtttcagttgcctgtggtcaactgaagtctgaaaatattaaaatggggaattccagaaataagcaattcataagtgttgagttatatgctgtgacatg

SEQ ID NO: 46567 - DNA, 537 bp, Homo sapiens
tgcattatgaatgatcaatgaacattatcatcagaacaatgtcacactattacaattatggtgcatcaaaaatgcaaacttaattgtttagctcttaatgaaatacaaaagccacatgttaataatgttaaagttgtggttcgatctgacaaagtcaaagttaagatgatgataaaycatcccaaacactttgatatcataatataaaatatatcatagaggttccataccctacagccaccactctccccactatgaacagcagagaacatcttttcaaaatctagttgactggctttttgtaggaaagaacatggtcctgagttaagttgacaactcaacttacttcattttgtccaatctcaaaacagacaaacataaaaaattaggaggcatccaaataaagtgctcctccttatccacagtttcaccttctgaggtttcagttgcctgtggtcaactgaagtctgaaaatattaaaatggggaattccagaaataagcaattcataagtgttgagttatatgctgtgacatg

SEQ ID NO: 46568 - DNA, 537 bp, Homo sapiens
tgcattatgaatgatcaatgaacattatcatcagaacaatgtcacactattacaattatggtgcatcaaaaatgcaaacttaattgtttagctcttaatgaaatacaaaagccacatgttaataatgttaaagttgtggttcgatctgacaaagtcaaagttaagatgatgataaaccatcccaaacactttgatatcataatataaaatatatcatagaggttccataccctacagccaccactctccccactatgaacagcagagaacatcttttcaaaatctagttgactggctttttgtaggaaagaacatggtcctgagttaagttgacaactcaacttacttcattttgtccaatctcaaaacagacmaacataaaaaattaggaggcatccaaataaagtgctcctccttatccacagtttcaccttctgaggtttcagttgcctgtggtcaactgaagtctgaaaatattaaaatggggaattccagaaataagcaattcataagtgttgagttatatgctgtgacatg

SEQ ID NO: 46569 - DNA, 862 bp, Homo sapiens
tattaaccttacctgttaacaaatacggatttcagtttgtaaaggtaggaattaatattcatggagataatagaaatttatcaagtggaagagaaatattatttaaaaattaaagatacttaagattacatagttgatatattaagagacgtaaatgtgaaatatctctgagctgtttattcaaagctactcagtgatattggaaatgaatatgagtaggtaagaaaagatttgggaggtgtatgttactactattcttaaaaatctaacatttgtaatttccattcagtaactacagatgtttccatatttttatttaacccaatgtttattttgggtttcgaagcattatatgaaagtttaagtaatttctaaatacatatttgagaaatgtgaatttggaatgtacatatctttaaaatcataaaaagtgataatttagtttcagatatcaaataatttaaagttttctaaattttacatcagagtaaagtctcagggaaaaaatatattagtagttttgaaatacctaagtaatagtcatcctacattatcagcatcatgccctctcctctccaaaatctgctccatcttacttaatactgccaccaaaaattttggagttagctgaggtaatcactacaatgtttttcacccacaattttcaaaagactattaaattatcacagcccaaattcaacwtattagatccctcttgccctctccatagcactgccctagacctgaatattaaccacctctccactaggctacaggctgattttaggagtatttctactttctagtaccatccactgccaagtaatcatataccagaatcttctctttaagggacaaatgt

SEQ ID NO: 46570 - DNA, 672 bp, Homo sapiens
  misc_feature (1)...(672): n = A,T,C or G
agagaattcctaattgcttgttaaaacaattttgtaattccaacatccaattcatgtaaatactggcttctgttgattgttttttctcattcatgttgtgattttcccagttcgtggccattttaattgcattctgggncattnaggaaattataggtgttgnanccactaaacgnnnnnnnnnnnnnnnnnnnnnnnnnnnnnnnnnnnnnnnnnnnnnnnnnnnnnnnnnnnnnnnnnnnnnnnnnnnnnnnnnnnnnnnnnnnnnnnnnnnnatctggctccgatttcatcttttctcttagcagtcattctcggtaggagaagggccaagggggtatgcatggggcaaaagatcaacttcttatttggccccactgaaaccatgtaggattggttgttccgttgatattcagckggagtagaaaaagtgttgtcacaaaggttttctgtggtcctttggctagaaggaacaagattttctgggactttctttttttttttttaatctgtgcctattgttggtccaggtgagattctggaatgctctattcaggatatatgggagtcaaagaggaaaatcagggaacttcccttttgtctttaagacccaaagcccctagacatttcattttctccttttcagtcttcttatacagattaggcatacta

SEQ ID NO: 46571 - DNA, 1627 bp, Homo sapiens
gcagaattgctgggactccattaaatatttttacagttttactggtgcacttttgattaaataacctttgaatgaaaacatgtagggattatgtaataaagcagatgaacacacattattttgaccaacacaagccatcctagggatcttttgcattacaaaagcatcttatgtaatttgaaacacaactggacacaattagtagtacagaacaaatgagcactgaaagaaaatactatcctcatacttttaayacggaatcgattactttaaaaagcaaatccacagcggcaaagcatcggagaaaccgttctaaagaaaatctgcaaattaaaaccagggcatcagaaagttcttgcttgaactaacaaatgatgctcttcttaattcaagtctgcacaaatatgggctgcaggaggcatttaaattgatgtaacaatattggcccggttaatgctgtgttcatttaatgcatggcttaagcttctgtaaagtcatttttcaaatttcaacatcggacagaattagcaccctcatttttatgataatattgttaatttaatgcatggcttgaagttagacttcaaagtgaatcagaaaaatatgccttttctcttgtcagagacatctctcttcatgcaccagtggtttgaccttaaaattttaacttcaactgcacaaaattactctcatatttcaactattctttcataattcaatcagttagtttgtccattttagatagatcttgtaataccttgcccatgagagctaaaacaatttttaacattatctctttatgtttatactctggatagatcaagatcagaaacttttcagtataatattaaacatgcagttcacaatgaacttaataaaacctgcaaaaccgaaagacgaacttaagtggccaagggaagtctttcccactatttaaatctctttcctccgacctccattatggcactgaaaatcaagaggcaatgatgaattagatttgcacaaacaaaaacctacagtacacgagggcttccggcactgaaaatattggattctttacttttcctctaaaacagtgagctatctccacaaacatctacccggcaagcaaaggaaggctgacagtgtaatggagggtgaaatgataatgtcctctttcgtaaatggaatccagccgatgataacaatgcactcacacagatttgcagggcgttctggatggcgtttcaaatatcccattcccctgcactttaagaacctgcagttgggtcgccctctacacaggagacaagtgaccattttaaacagactgagggaaaacctacaccatattactagagcaattatgtcagggcagaaacagaaggaggtgatggaggaaaaaagaataagaattcaacgaggcaaaattcgcagaacacacttaggattgggagagacaattcaagggaatgcaaatgaaaattagccagctaggaatctcctattatttagaagcctcaaactgttggtaactgtgtaaacattatgccctgtttggtagacattctggtaggtgcctgtgtgtataccctttggtgcataaatttcacttctagattttattcaatagaagcacacccaacct

SEQ ID NO: 46572 - DNA, 528 bp, Homo sapiens; identical to SEQ ID NO: 31492

SEQ ID NO: 46573 - DNA, 577 bp, Homo sapiens
ccaagccaacatggtgaatcccggtctgtcctaaaaatgcaaaaattagccaggtgtggtggcgcgtacttacaatcccagctactcgaaggctgaggcatgagaatcgcttgaacccaggacaaggaggttgcagtgagccaagatcctgccactgctctcccgcctgggtgacagagtgagactctgtcaaacaaacaaataaacaaacaaacaaataaataaatctaaaaacgaagaagaagaaaagagaagaaagaaacactgctctgaatctcttcctgctcttctccctccacatacatacctgcctcgaggttggtggagctctgtgtggtctcctttkaggggtaagcagggggcaatttgagaactgagatgcttcaagttattccccaggcagggtttgggttcccccagaaggatgttagcctgaaaattttaaaagacatggcacaggtcggggattcccagggttttgaccccaatggggacacacaacaccctgaaaggggaccaacttcctccttcacagagccctggaaacacatcttagctttctggaaacttcttaaga

SEQ ID NO: 46574 - DNA, 577 bp, Homo sapiens
ccaagccaacatggtgaatcccggtctgtcctaaaaatgcaaaaattagccaggtgtggtggcgcgtacttacaatcccagctactcgaaggctgaggcatgagaatcgcttgaacccaggacaaggaggttgcagtgagccaagatcctgccactgctctcccgcctgggtgacagagtgagactctgtcaaacaaacaaataaacaaacaaacaaataaataaatctaaaaacgaagaagaagaaaagagaagaaagaaacactgctctgaatctcttcctgctcttctccctccacatacatacctgcctcgaggttggtggagctctgtgtggtctcctttgaggggtaagcagggggcaatttgagaactgagatgcttcaagttattccccaggcagggtttgggttcccccagaaggatgttagcctgaaaattttaaaagacatggcacaggtcrgggattcccagggttttgaccccaatggggacacacaacaccctgaaaggggaccaacttcctccttcacagagccctggaaacacatcttagctttctggaaacttcttaaga

SEQ ID NO: 46575 - DNA, 577 bp, Homo sapiens
ccaagccaacatggtgaatcccggtctgtcctaaaaatgcaaaaattagccaggtgtggtggcgcgtacttacaatcccagctactcgaaggctgaggcatgagaatcgcttgaacccaggacaaggaggttgcagtgagccaagatcctgccactgctctcccgcctgggtgacagagtgagactctgtcaaacaaacaaataaacaaacaaacaaataaataaatctaaaaacgaagaagaagaaaagagaagaaagaaacactgctctgaatctcttcctgctcttctccctccacatacatacctgcctcgaggttggtggagctctgtgtggtctcctttgaggggtaagcagggggcaatttgagaactgagatgcttcaagttattccccaggcagggtttgggttcccccagaaggatgttagcctgaaaattttaaaagacatggcacaggtcggggattcccagggttttgaccccaatggggacacacaacaccctgaaaggggaccaacttcytccttcacagagccctggaaacacatcttagctttctggaaacttcttaaga

SEQ ID NO: 46576 - DNA, 552 bp, Homo sapiens
aagcatgtgattcatttctacagtaatrgaaattgtgtctggtagaatgcaattgattattgctctatggattcttgccagctttgcatttgcgtaatagatgcaaaactggcaagaatccattttttcataaagaggacaacagaaatactgcagtactgttcatattataccttagacattctacagtataatttgcatctattacgcaaattataatttcaacgttcctggtgggcttttatatttgtctgtcctttggattcctttcatgaccttttactgattctatcatgagcaaatgagataaaaactttgattatgtgtttgttttgtaagagagtcatgatgtcatcttttttttgtttttctttaaatgctgtttaacagtatagcataactcttgacttctagtatctacttgttccagcaggtagggttcttcctggatgacttagccatatctgactgctttcttctggtcgatgggaattcatgagcccttggcccactttgctaccactcctatactcttgtctcattcctctgttc

SEQ ID NO: 46577 - DNA, 552 bp, Homo sapiens
aagcatgtgattcatttctacagtaatggaaattgtgtctggtagaatgcaattgattattgctctatggattcttgccagctttgcatttgcgtaatagatgcaaaactggcaagaatccattttttcataaagaggacaacagaaatactrcagtactgttcatattataccttagacattctacagtataatttgcatctattacgcaaattataatttcaacgttcctggtgggcttttatatttgtctgtcctttggattcctttcatgaccttttactgattctatcatgagcaaatgagataaaaactttgattatgtgtttgttttgtaagagagtcatgatgtcatcttttttttgtttttctttaaatgctgtttaacagtatagcataactcttgacttctagtatctacttgttccagcaggtagggttcttcctggatgacttagccatatctgactgctttcttctggtcgatgggaattcatgagcccttggcccactttgctaccactcctatactcttgtctcattcctctgttc

SEQ ID NO: 46578 - DNA, 552 bp, Homo sapiens
aagcatgtgattcatttctacagtaatggaaattgtgtctggtagaatgcaattgattattgctctatggattcttgccagctttgcatttgcgtaatagatgcaaaactggcaagaatccattttttcataaagaggacaacagaaatactgcagtactgttcatattataccttagacattctacagtataatttgcatctattacgcaaattataatttcaacgttcctggtgggcttttatatttgtctgtcctttggattcctttcrtgaccttttactgattctatcatgagcaaatgagataaaaactttgattatgtgtttgttttgtaagagagtcatgatgtcatcttttttttgtttttctttaaatgctgtttaacagtatagcataactcttgacttctagtatctacttgttccagcaggtagggttcttcctggatgacttagccatatctgactgctttcttctggtcgatgggaattcatgagcccttggcccactttgctaccactcctatactcttgtctcattcctctgttc

SEQ ID NO: 46579 - DNA, 552 bp, Homo sapiens
aagcatgtgattcatttctacagtaatggaaattgtgtctggtagaatgcaattgattattgctctatggattcttgccagctttgcatttgcgtaatagatgcaaaactggcaagaatccattttttcataaagaggacaacagaaatactgcagtactgttcatattataccttagacattctacagtataatttgcatctattacgcaaattataatttcaacgttcctggtgggcttttatatttgtctgtcctttggattcctttcatgaccttttactgattctatcatgagcaaatgagataaaaactttgattatgtgtttgttttgtaagagagtcatgatgtcatcttttttttgtttttcwttaaatgctgtttaacagtatagcataactcttgacttctagtatctacttgttccagcaggtagggttcttcctggatgacttagccatatctgactgctttcttctggtcgatgggaattcatgagcccttggcccactttgctaccactcctatactcttgtctcattcctctgttc

SEQ ID NO: 46580 - DNA, 552 bp, Homo sapiens
aagcatgtgattcatttctacagtaatggaaattgtgtctggtagaatgcaattgattattgctctatggattcttgccagctttgcatttgcgtaatagatgcaaaactggcaagaatccattttttcataaagaggacaacagaaatactgcagtactgttcatattataccttagacattctacagtataatttgcatctattacgcaaattataatttcaacgttcctggtgggcttttatatttgtctgtcctttggattcctttcatgaccttttactgattctatcatgagcaaatgagataaaaactttgattatgtgtttgttttgtaagagagtcatgatgtcatcttttttttgtttttctttaaatgctgtttaacagtatagcataactcttgacttctagtatctacttgttccagcaggtagggttcttcctggatgacttagmcatatctgactgctttcttctggtcgatgggaattcatgagcccttggcccactttgctaccactcctatactcttgtctcattcctctgttc

SEQ ID NO: 46581 - DNA, 583 bp, Homo sapiens
gcctcccaatgtactggtattataggcatgagccaccctgtccagtctaattagggatcttaatcacatcattcccatatagcataagcaaatcatgtgaataaaatcccagaacatctgcaagttcttctcacactcaaagggagaaggttatgcaagaagtgtccaccaagagatgggaatcttggaaccaatttagaattctgtctactacagcattcctaacaaataatgtttactgattcctagtttgtactttcatacataattctcaggtgtagaatattagtcctggcagggattttggagattgttagcttgctgttctggctccttgcttgcatttccttgtttctttagcatttctttttatttaatawgtttttagaataatacacgtaaaacacggccccagtgatttcacgtttgtgttctcatttattagaaatggcttggctgtagaaactactatcagtgtgaacaggcaacctacagaatgggagaaaatttttacaatctgcccatctgacaaagggctaatatccagaatctacaaataacttaaacaaatttacaagaaaaa

SEQ ID NO: 46582 - DNA, 594 bp, Homo sapiens
cagagcctgttcttttattggattgctctgccattttctgggatatattttaatgttgtacaaagaaaatgaatttcatggatttgatttaacagttcagtttctccacattactattgtactacgatggaagtttgctcttttattcagttgtctactccattttaggtttgaaaggggtgtgtgtgtgtgtgtgcgygcacacatttaacatcattctgcttaaggcacaaaccatgtattattcaagaaaagtcttatcattttaccaataatgttcagcgcatgctccgtaaaacagcatctgatcaataaaagttagattcagcaaatcatttgacctacactctcacaaatgactagatgaggaagctttccagggctcatagagtattgcacactacgccagagagctgatttgtggaagtcattttctactttttaaattatcttcattgattttgatccttttgaaatttggtttattttgaggcaaacttaattgtggggacacatactatttccataagggagctttttaattaataaagtcaaagcaatgacataaatacactgaaagaagcagacattgtg

SEQ ID NO: 46583 - DNA, 517 bp, Homo sapiens
tgggtctttctatcagctatattgccttcagtatggtcttgtactttgtagatgatcratatattttgttgaatatataaatacagtaataaatatagagcaggtaggctagctgatattccagaattatagaaaagagacaaaaacggtagaaacaatttgcctcaccgtttagtaaaataatgatgctcatagtgatgactttgagacatctagaaaagttaaaaataagctcagaagcctgtgagccagatagataaatgccagattttccactatgatgtcgacatcagttacaaagtactcttgcaagtatgacaataaatcagtgatgtacattataatcactccaatatatatagagaagaagatctaatactcagggatgttcattggcctgaggtcacttggtattgtgtagatgcgggaatccagattttcggaatcaggtgcatttcccaccacctttgactcctttcaaagctgagcttttacctgtcagaaacaatactgtgaa

SEQ ID NO: 46584 - DNA, 601 bp, Homo sapiens
agatcaataattaagtatgttatctaagagaaaatggaacaaaggtttaaagtatgtgtgtgtgtgtttgcattttctgaccctatttttgagacttcttttattctaattgtgtagaatttatgtgtgacatttgtatttcaaaatktctatgaagcaaattggacatctaacagtgtttgaaaataactattttaatactttgccaaaataggcattccaattctgctaaatttgcaaaatgacttatatttagaatctattttgcctttaactttaccaagaaaatagtactagccatataagaaacagtaagattatagcctctgtattttaatatgtttttagaatattatcttcttatttactactattaatttgtgaaagaaagaacttctgtacatttggaagaagaattaacacaagtctttggtgcctcatactttaggttaatcttaaaaggtcatgccaagtccttcttatggttattttaggttaaaaaattgcaaactttcaaataggtataaacaaaagacaatgagtggaaatgtccatgaactcattttattcagagatgcaaatttatcagccatatcctcca

SEQ ID NO: 46585 - DNA, 601 bp, Homo sapiens
agatcaataattaagtatgttatctaagagaaaatggaacaaaggtttaaagtatgtgtgtgtgtgtttgcattttctgaccctatttttgagacttcttttattctaattgtgtagaatttatgtgtgacatttgtatttcaaaatttctatgaagcaaattggacatctaacagtgtttgaaaataactattttaatactttgccaaaataggcattccaattctgctaaatttgcaaaatgacttatatttagaatctattttgcctttaactttaccaagaaaatagtactagccatataagaaacagtaagattatagcctctgtattttaatatgtttttagaatattatcttcttatttrctactattaatttgtgaaagaaagaacttctgtacatttggaagaagaattaacacaagtctttggtgcctcatactttaggttaatcttaaaaggtcatgccaagtccttcttatggttattttaggttaaaaaattgcaaactttcaaataggtataaacaaaagacaatgagtggaaatgtccatgaactcattttattcagagatgcaaatttatcagccatatcctcca

SEQ ID NO: 46586 - DNA, 601 bp, Homo sapiens
agatcaataattaagtatgttatctaagagaaaatggaacaaaggtttaaagtatgtgtgtgtgtgtttgcattttctgaccctatttttgagacttcttttattctaattgtgtagaatttatgtgtgacatttgtatttcaaaatttctatgaagcaaattggacatctaacagtgtttgaaaataactattttaatactttgccaaaataggcattccaattctgctaaatttgcaaaatgacttatatttagaatctattttgcctttaactttaccaagaaaatagtactagccatataagaaacagtaagattatagcctctgtattttaatatgtttttagaatattatcttcttatttactactattaatttgtgaaagaaagaacttctgtacatttggaagaagaattaacacaagtctttggtgcctcatactttagrttaatcttaaaaggtcatgccaagtccttcttatggttattttaggttaaaaaattgcaaactttcaaataggtataaacaaaagacaatgagtggaaatgtccatgaactcattttattcagagatgcaaatttatcagccatatcctcca

SEQ ID NO: 46587 - DNA, 548 bp, Homo sapiens
tgtacttggaaatgatatatagatgttaagtgtgaagttgcatgtattaaaaagtaaaatgaaaaagctatgcattttgtaattaggtcttttttataatgtaagttgtcttttaactgttcggaccaacttgcattttcactttagaattgtagtttaagtgtgtctttgaaatttaaagcagaattttatgctctctcttttttaattctgtgtcttctgtggcatttataataggagagccatttccaatatttrtatttctttttagttatgaaaaagtgaccatcgtatgcctagattgtacctataatacagacctggctgggcgcattggctcatgcctgtaattccagcactttgggaggccgaggcagggtggatcacctgaggtccggagttcaagaccagcctggccaacatggtgaccccgtctctactaaaaatgcacaacttagccaggcgtggtggtgggcgcctgtaatcccaactactcgggaggctgggttaggagaattgcttgaacccaggaggtggaggttgcagca

SEQ ID NO: 46588 - DNA, 548 bp, Homo sapiens
tgtacttggaaatgatatatagatgttaagtgtgaagttgcatgtattaaaaagtaaaatgaaaaagctatgcattttgtaattaggtcttttttataatgtaagttgtcttttaactgttcggaccaacttgcattttcactttagaattgtagtttaagtgtgtctttgaaatttaaagcagaattttatgctctctcttttttaattctgtgtcttctgtggcatttataataggagagccatttccaatatttgtatttctttttagttatgaaaaagtgaccatcgtatgcctagattgtacctataatacagacctggctgggcgcattggctcatgcctgtaattccagcactttgggaggccgaggcagggtggatcacctgaggtccggagttcaagaccagcctggccaacatggtgaccccgtctctactaaaaatgcacaacttagccaggygtggtggtgggcgcctgtaatcccaactactcgggaggctgggttaggagaattgcttgaacccaggaggtggaggttgcagca

SEQ ID NO: 46589 - DNA, 574 bp, Homo sapiens
taaccatgaggagtccagagcgaaattgctttgggagcctttgtgtgattaacatttcagctgtttatggagtctttgccctattatttcctgttttaaaaattaatgtgctggtttctttattattaaaaaccaagaaagggaagttcagctggagcacaggaaatagttctatgtgatccaaatataagtttctgagtagggaggatatttggaggactcctgttttacttagatgttctttgagttcccacaactttttattttgaagtcattgctccccaactctacccccaagctctctgcccctctgtccttcctatccctagatctgaatggaggaaagacattcgaatcaaaggcattatgacttataaacaatgccaatkgcagtttacatgacagaatcataaaaacccattgacttagagagtttttcagtcagaagaaatcttggagggcacgtagtttgatcccctcattttacagatgagaaaactgaggcttggaggttttttgttttttttttttgagatggagtcttgctctgtcgcccaggctggagtgcagtggc

SEQ ID NO: 46590 - DNA, 874 bp, Homo sapiens
tctgccagacatttcggtagctgagcgatcagcgagttcagggtccacgcacggcctcttacwtgttgtgtggaccggcattggccggcttgcaacctgaaagagaggaaacaacacaggttagaagttcctcagcatggagccaacgtgaaaatcaagcacatccaaagacaaggtgcacacgccatgaaattcttagtacagtatcgacaggcggtccttggaagtagagacagaccctccacctgagtgctgatcaggacaagacacatgaacgatgcgctctcgagctatgtgtagctgatctaagcacaccattgttcaaaagatcgcgtcttgggcattaactggatcaaagcgcctccactcagccttccatgaagtggaacagactaatgcccttccgaaggcaggttggtggctcaagggtactcaggacgtcttctctgaacacatgcatgttccagagtttagccttctccatgtttggggcctctgagggacaaatttcctcatgccgctaggaacatgttgttggcaggcttgccataattggacagaaagaaagcaacaggaaatacggcatcttcagatgccttcgcctggaatcaaattgacctggaaggatcgtgaagtccctgaccccaagaaggcaagaaagaggggttccccgattccctcccgcagacgggaagctgaaaggaaatcaaccagggtgacctagaggacaaaaagaccaggggcccagggtgacactcaccctcagaaaaacagaagattccgtggatccttttcgatttggcagcagcttctctggaggtttcccggaaaatatgtggaggagagcctttctctgcgggtcttgttgcctgca

SEQ ID NO: 46591 - DNA, 1293 bp, Homo sapiens
gataaatgggaggattaagggtgtgtggcaattttatagttccctgtagaagacaaaatatgtttaaattatgtgtttgtagacttagacttttaccagatctccagacattattgtgttctttcttcatgagaaattctttagaaaatccaccaaaagtaatcctgttttagctgttctccctaactgaaatatgtatgcttgtatctggaataaaagataaatgataattaaatgtgtatctaagtgaaggtgaatagtttttaagtgtgaaagtgctaacaatatactgtttaacagtcattaacctctacatggtaatgtctagatctcaagaaaaaatggaaataagtttgtcattgagttctcactttaatgttgtgcactaattaagtatataaaggttagtagagtgggcaagttaatttttatttttaataataaaatattaatttagtgttaattgctgataatttaattcaatcaacaatggaccagagatcagtaaagtattttcaatttcagtaagatggtgagaacagatactaaattctggttgtgtgaggggcaagtggaaagtgagacaaagcatatagactatttcattaagaaatttattgatgtgtgggatgcaaaaataaataagacatagttcctggtttcatgaacatagctcaaactaaaattatctgacaataaaatcatatcactcagatctcaacttccactctctctaccctcctgggaggtcagtgaacagagctgaaagccccaaccctctaatcacttggttggttcccttggcactgggatatccccttgtactgagataaatatttagtataaatcatattttttaatcctcctaactatcctgctattatcactagtttatatatggaaaatagatttttggaaaataaagmgacttgtataatgtcgaaaaactagtaagtggcagagctgaatttgaacctatgcattctgaatctagagcccaaacactactactctaagcattatttcttaaaatgtgcaggtgtaaagaattgcactttaggtatagaactcacccacaatatgcgcccaccaaaaaaaacaaaataaaataatggcatgaaggtagtggtaacctctcgatgaactcacaggacttatatagctcatgttgtacaagaattcagtaaaaacattctcaatgtgagctataaaaacactctaggtcatactctgaagccaaatggattaaaatcagccagtttacaaaaagcagcctcagatgtgatgtagccc

SEQ ID NO: 46592 - DNA, 568 bp, Homo sapiens
ttatgtcagtaaaacagcaggaaaccaaagaagctattgtgcactaaattgactttaggtgctttatttcagacctaaaccttatactctgtcatgtagcaacacaaatatgtccagaaatatgttaatgagtttgttcaggaattgaatttctgagataaaagagaaaatacaacaacatacttcttttaaagktttattaataatttgtctaaaataaatttataccattttattaagtccccaagaacagttccaaaatgttagaaaagcagaggaaatggttataccagaaacatgggataagagtttttttccctgaaacataaatttagaggtatcttccttccagttagtaattagatgcaccaaaccttcctctccagctctaatccatttcaaaaatattatttaatatttgagatacaaacaaatatacatgacctacatgtaagttgtaaaacataataataataaaacactcatgaatccacctcccaacttttcctacttttacacctcatttcctgccatcctccatttgtttgagtcacaaatgatttgtgca

SEQ ID NO: 46593 - DNA, 600 bp, Homo sapiens
aatgtgccaagaggtgttctttcagcccagctgggtacagaaaatgactatttccaggtaaaagtatcatgaagtccctgccatgataactcttagtcttacaggggaactccagcagacaaaggggacacagaatgttctgaaagtgagcaggaaagagaaccgtggagcatcataagcaaagcaggccatcaaggtactataaacacttgaaagagaatacttcctttgagatrttaacctgtgttctgctcagcactgttttcctctcattggatttcatgcaagcagcctttgtaattctttacctcagggcatttttgcagagccagggacagaagctacttgaggtcagaaacctgttctgttctctgtaacaaccctctgatgaggaaatactgggtgtcccataaacaatggaaagagggctcttatgctggcaacgagagagtgcagggcagaactcctgatggtaaaaatgtctatgagccccatgagtttatggggacagtattccaagtaggtcctaagacctcgaggggatactggggtcagggggctggaccagtgacccaaagcaccaggcctcctggcctcacc

SEQ ID NO: 46594 - DNA, 603 bp, Homo sapiens
ataaatataaattaaaattaggtagcccactattaaatctctttcctggattatagccaaataaattgtctgaggactgaaataagactgaaagattaacatggggaactattacaatgtcctctgttaaaaatcaaaattaaattagcatgcactgagctgtacacttaaagtctgataactttcctatatgtatgttttatctgaatttaaaaaacaagcaggccaggcatggtggctcagctgggcgccatggctcatgcctgtaataccagcactttggaaggccaaggtgggcaaattatttgaggtcaggaagtcgagaccagcctggccaacatgatgaaaccacatctctactaaaaataaaaaaaattagccaggcatggtggcrggcttctgtagtcccagctacttgggagactaagacaggagaactgcctgaacccaggaggcagaggttgcagtgagccaagatcatgccactgcatttcagtctgggtaacagagcctccatctcaaaaaataaaacaaaaataaataaaaaataaacataaaaaacaagcaaatacttggagcgccaagtaccttactgctggagtt

SEQ ID NO: 46595 - DNA, 623 bp, Homo sapiens
aagtgtggaaatagctaatgaggccgggcacgatggcacatgcctgtaatcccagctactcgggaggccgaggcaggtggatcacaagctcaggagttcaagaccagcctggccaacatagtgaaacactgtctgtactaaaaatacaaaaaattagctgggcatggtggcacacacctgtaatcccagctactcgggaggctgaggcaggagaatcacttgaacccaggaggcagaggttgtagagagccaagatcgtgccacagcaccctagcctgggtgacagagcaagaccccatctcaaaaaaaaaaaaaaaaaaaaaaargaaatagctaatgagtatgagtttgggcaaaatttggtgagtgagtatgagtttcccaaagtttgcctggttttagggacagccgtctttatagtttttcttttgcctaaaatccatagcctctgtgagataccctagatctttaaaagtagatagttcatttactaattcgatatgtgaagcctggggttgtgcaaacaaaacagagaattctcacataggaattccaggaaaatgagacacgttaatggaaagttaatattccagttcattggaactttccatagtacatattcc

SEQ ID NO: 46596 - DNA, 560 bp, Homo sapiens
agaatcattttctaagagtgagagaggtagcggaggggagtgaaaccttgggaaactgagtagaatgggaataagcaacagatgtctttgagggtccttttgagagtcactagtttaagctgcatgttgactgccagctcctgttaaataaggacctgtttgaagcacacagcaggaacctttgtatggtccaggaaaatagcatgctaagcaaattaataacaatctaagggtgaaaactttgaactcataaagctatactataataaacatggcaatagacaatgcttatgttcatktcggctgattctgtggtttgaaacacctaggcaggatcctcaagattctaggaaatataggtatatatccacttttctctattcctgtaagcagtgtatgtatttcaagatagagataatttcttcaatgtttgatagctcccactatggcacgttatctcccaccaatgcacacatacacacatacactgactatttgttatatattcgcttttattcaatgagtttaaagttatcacctggtgactcaaaacttaacgt

SEQ ID NO: 46597 - DNA, 504 bp, Homo sapiens
cccagtgacatctagatgtgattagaaactcttaccatttcaacacttrtaagttcaggacattcatttattttatatttatttattgagtcacttgtcatttatgtgccactttctgttttctaaatgctttacaatattagaatctaggaagacagtggtgaggaagacagattcagtccttgttcttgtgaagtttacattccagtagaaggggcaggaccacaccctcccatcgcacacacatacacacagaacatgaacacggaccacaagagagcggcacattgcgactaatgtcagggtcatcacagagaaagagccgagggagccgttacaggtaagggaaggctgttctgagaaggtgacattttggcaaagatcttttaatggaggacagaggaggcaggaaaacaaccagagaatgcctagcaagaagttggcctgttgcaaaaactgtgagaaaatcatccactctgattggcgaggatgtggccagcaggg

SEQ ID NO: 46598 - DNA, 504 bp, Homo sapiens
cccagtgacatctagatgtgattagaaactcttaccatttcaacacttataagttcaggacattcatttattttatatttatttattgartcacttgtcatttatgtgccactttctgttttctaaatgctttacaatattagaatctaggaagacagtggtgaggaagacagattcagtccttgttcttgtgaagtttacattccagtagaaggggcaggaccacaccctcccatcgcacacacatacacacagaacatgaacacggaccacaagagagcggcacattgcgactaatgtcagggtcatcacagagaaagagccgagggagccgttacaggtaagggaaggctgttctgagaaggtgacattttggcaaagatcttttaatggaggacagaggaggcaggaaaacaaccagagaatgcctagcaagaagttggcctgttgcaaaaactgtgagaaaatcatccactctgattggcgaggatgtggccagcaggg

SEQ ID NO: 46599 - DNA, 545 bp, Homo sapiens
tgagttgccttttagtcacaggtctaggataattttgaataatatttattttttctggagacagaaagattacttttgcagagaagtcgtgacctagataatgtgccacttcttgtgagaattgaagcttatctcaagaggtcttatggctcttataagctggttgttatacgtatttggtcaatttgtacgtcctctttagatgaagaacaaagaagcaaattacctacatattgaatcaaggtagaatgtctgggaaactgcagtgttcaaatcttgatataaaattcgtgagaaatatgaaagagcctttaatccttaaggtgttactgtcaaagtacattgttgatttttccaagtgaaaacaaacaaatactaacactctttttgtctactggaatgctaaaatatatatacaaagtataagtctactattgtgaaccactcagattcagttgatccctttgacaacraagtgtttggatttggtatcactgggaatctttttttttttttttttttttttgagacagagtctcactctg

SEQ ID NO: 46600 - DNA, 406 bp, Homo sapiens
gtgcagtggtgtgatcatggctcattgcagcctcaaastcttgggttcaagcaatcctcccgcttcagcctctaaaataactagaactacaggtatgcaccgccatgccaggctaattttttaaattattttttgtagagacagggtcttcctatgttgcccaggctggtctcaaactcctggcctcaaatgatcctcccacgtcagccttccaacatgctggaattatactcagcctcatgactaattgttaatgtctgttttttttctttctttctctagaatgacccaacccatttgacaaaaacattgttttgaatgcatagtcaaattccaaatcatatcaacatcgtttacagataacaatcaagtgggtaggccaaatccaaataaccaatttttaaag

SEQ ID NO: 46601 - DNA, 534 bp, Homo sapiens
tgttcctgccccaccctaactgatcaatgtactttgtaatctcccccacccttaagaaggtactttgtagtctcccccacccttaagaaggttctttgtaattctccccacccttgagaatgtactttgtgagatccacccctgcccaccagagagcaaccccctttgactgtaattttccattaccttcccaaatcctatcaaacggccccacccctatctcccttcgctgactctcttttcggactcagcccgcctgcacccaggtgaaataaacagccatgttgctcacacaaagcctgtttggtggtctcttcacacggacgcgcatgaaagtggaaaaacaagmgcctatcatagggttgatatcagaagaaaatgtaaatctttagcagggtacctgcttggcatatagtaagtgctcattaagtgctagcaatccttataaatgctgtggtatggaaaatgtgggctgctaaagagagtatagaaacttgcctcctcctcagcccaagtataggagagaataggaga

SEQ ID NO: 46602 - DNA, 603 bp, Homo sapiens
gatctgtttaggaaacagaatgcaatgtgggccatttctgtatttctatattacattctactgcgatctaagggagggagagaaagcacagacaagtaatgcaagaatatataaaaatagactctccaagagttaaaacaagttattcctttgagaacaygtggctcaaaaagtagttgttttgtatccttgccactggaatcccatcccaggattttttttccatacccaatattagattttatgttgattttactctgctgcttggttttggaaatctctagacatgaattaatgtgtgtttattaaatccaaaccatcttcagattcactcagtaaattatattagttgcaaatttgaaaatataaaaataatgagtgttcatatatatacactattgtagtagtattgatattaatttataccagtaattttttctcaataacatcgaaactcttcattagcatgaataatcaaaatttctgtgtcattctaaaataaacttgtgggactagaagaaatctttattttttgattgacagaagaaatcttattgattgattttctaatataaactctgaataagtcgcatgcctcataaa

SEQ ID NO: 46603 - DNA, 603 bp, Homo sapiens
gatctgtttaggaaacagaatgcaatgtgggccatttctgtatttctatattacattctactgcgatctaagggagggagagaaagcacagacaagtaatgcaagaatatataaaaatagactctccaagagttaaaacaagttattcctttgagaacatgtggctcaaaaagtagttgttttgtatccttgccactggaatcccatcccaggattttttttccatacccaatattagattttatgttgattttactctgctgcttggttttggaaatctctagacatgaattaatgtgtgtttattaaatccaaaccatcttcagattcactcagtaaattatattagttgcaaatttgaaaatataaaaataatgagtgttcatatatatacactattgtagtagtaytgatattaatttataccagtaattttttctcaataacatcgaaactcttcattagcatgaataatcaaaatttctgtgtcattctaaaataaacttgtgggactagaagaaatctttattttttgattgacagaagaaatcttattgattgattttctaatataaactctgaataagtcgcatgcctcataaa

SEQ ID NO: 46604 - DNA, 603 bp, Homo sapiens
gatctgtttaggaaacagaatgcaatgtgggccatttctgtatttctatattacattctactgcgatctaagggagggagagaaagcacagacaagtaatgcaagaatatataaaaatagactctccaagagttaaaacaagttattcctttgagaacatgtggctcaaaaagtagttgttttgtatccttgccactggaatcccatcccaggattttttttccatacccaatattagattttatgttgattttactctgctgcttggttttggaaatctctagacatgaattaatgtgtgtttattaaatccaaaccatcttcagattcactcagtaaattatattagttgcaaatttgaaaatataaaaataatgagtgttcatatatatacactattgtagtagtattgatattaatttataccagtaattttttctcaataacatcgaaactcttcattagcatgaataatcaaaatttctgygtcattctaaaataaacttgtgggactagaagaaatctttattttttgattgacagaagaaatcttattgattgattttctaatataaactctgaataagtcgcatgcctcataaa

SEQ ID NO: 46605 - DNA, 603 bp, Homo sapiens
gatctgtttaggaaacagaatgcaatgtgggccatttctgtatttctatattacattctactgcgatctaagggagggagagaaagcacagacaagtaatgcaagaatatataaaaatagactctccaagagttaaaacaagttattcctttgagaacatgtggctcaaaaagtagttgttttgtatccttgccactggaatcccatcccaggattttttttccatacccaatattagattttatgttgattttactctgctgcttggttttggaaatctctagacatgaattaatgtgtgtttattaaatccaaaccatcttcagattcactcagtaaattatattagttgcaaatttgaaaatataaaaataatgagtgttcatatatatacactattgtagtagtattgatattaatttataccagtaattttttctcaataacatcgaaactcttcattagcatgaataatcaaaatttctgtrtcattctaaaataaacttgtgggactagaagaaatctttattttttgattgacagaagaaatcttattgattgattttctaatataaactctgaataagtcgcatgcctcataaa

SEQ ID NO: 46606 - DNA, 603 bp, Homo sapiens
gatctgtttaggaaacagaatgcaatgtgggccatttctgtatttctatattacattctactgcgatctaagggagggagagaaagcacagacaagtaatgcaagaatatataaaaatagactctccaagagttaaaacaagttattcctttgagaacatgtggctcaaaaagtagttgttttgtatccttgccactggaatcccatcccaggattttttttccatacccaatattagattttatgttgattttactctgctgcttggttttggaaatctctagacatgaattaatgtgtgtttattaaatccaaaccatcttcagattcactcagtaaattatattagttgcaaatttgaaaatataaaaataatgagtgttcatatatatacactattgtagtagtattgatattaatttataccagtaattttttctcaataacatcgaaactcttcattagcatgaataatcaaaatttctgtgtcattctaaaataaacttgtgggactagaagaaatctttattttttgattgacagaagaaatcttattgattgattttctaatataaactctgaataagtcrcatgcctcataaa

SEQ ID NO: 46607 - DNA, 581 bp, Homo sapiens
tgcattttaagatatataattttgattttatctcaataccagtttcttttagtagttgctttggagattgcaacatatgtactcaaatttcacactctgtgtgcaaccaacatttaccatatcagtccctgtatatctaattagttttataatatatttcatctacatccagtgaaaatcaagttaggcagtgctataatttttgctttcaatcatcaagtgtgttataaaaactcaaaaggtaaattagyatatctgcccatgttagttgttcttacttcactgcaaaggctccaagtctctcactggcattatttccattcagtctgaataatttattttaatagcaatccttttatagcagatttgcagataataagttttctcacattttcttcgtctgaaaatgtctttatttcatattcatttctaaattatatatccaatagaactagaattttctttcaccactttaaaaatagtatgtccctttttctttattattaatatttttattaggactctgatgtcctacaaatttttgctcccttgcaggttatgtgtcattttgctctggctac

SEQ ID NO: 46608 - DNA, 515 bp, Homo sapiens
agagagagagagagagagatagagaaagagagagagaggtctaagagcaatagtggtttgttccagcctcttgggaccactgccttaccactaagaaaggaatattcrcctataagagttccaactcttgtaatacgttgttgtaatctccgtgaatccctccactctgtgatcctgagttcacttttcagctccttgaatcagacaaaagcttttcgtggtgttctcttcctttgaacatgaattctcacttttgtgtaaaccacaaatatgtctgcgtagtgtcctggccctgaaaacagggacaaattgttggtaacttaccactagttcagtgtcgacttgaattcttcctcaactagtctacttttcacagtcctgggatagtagcttcatacaggctcagcaggttcaatgtttgtgttctgtgttctgtgggagaaattaggtaaaatatgcttacttcatcttactgggaaccaggacacaaacattcttgtattgtgatcagaata

SEQ ID NO: 46609 - DNA, 599 bp, Homo sapiens
tgggtgtcaattcataaactgcctgttatcgtaacaagataagtataaaattgagagtaggcattaagaagcttttagagcaattggacaaatatccaaatgtgatcagcagacttctattttatgtttttatatttgtttgtttctaataactattttcaattgtattttataaaaagatgtagtctacaatggattgggaatttagaaaaagaaaaactggcactttctcatccaggatttgagaagcagtgatcttgtgtgtggctagggagggctgggaagagggcacagagcaacagattctaaagcttgcctctgaggctggaaagacaggcatgttctgggaactgcagttcctcccaaagcatcatctcctaaaatacattctctccttcctacagctcacaagcaatcctttctctgatcatggtaattcttaacattgtacatgcyctctatgtgtctggcactccattaagcactttatctgtgtgatctaattgttataaccagatgacaaggtaaatgctcttatttttcttattttgtaaatgagagaagtaagatttggcaaggtaaaacaacttacctaggtt

SEQ ID NO: 46610 - DNA, 549 bp, Homo sapiens
tgcaacattatttctagtgcgaaagattggaaacacccaaatgttcatcagtaagaattaatcagctatgacaatgaggaagttcccacatattgactcagaaagttatccaggacatgccatgaagtaaataaaaaaaaaaggaaagtaaaagaaagtaaaaaatagtatatataatatgatatcatttgcaaaagactgggagagaataagattacrtatgagtctatggtttaacctacaaaataagtactggaagaatactcagaaacttatatatgtgacaacctgtagaggtaggatgaggtgggagcgaagaagtgtttttaaactctttatatatactttacatataataacacaaatctcacggaaagttatgagtagggaaagtaagatactcaatgtataccttgttttatttttgatctttgaaccatgtgcatattttgttatttacaagttagagagaaaaggtaatgatagctacactcacagagcacttcctgtttgcctggcactgtgctaagcatgttgtctttgttatct

SEQ ID NO: 46611 - DNA, 613 bp, Homo sapiens
agtggctcacgcctgtaatcacagcatgttgggaggctgaggtgggtggattacctgacgtcaggagttcgagaccagcctggccaacatggtgaaaccccatctctactaaaaatacaaaaaattagccaggcatggtggtgggtgcctgtaatcccagctactttggaggctgaggcaggagaattgcttgaatctgggaggcggaggttgcggtgagccgaggtggggccactgaactccagcctgggcaacaagagcaaaattccrgcaaaacaaaacaaaaacaaaaacaaaaacaaaaaaatagaaacaaaaatgaaggacccccagcagttcttagtttgcaagactcgaggggttgggtggaagatgagggagtatgcaattttggggaaaaaaaagcctgtggatgcttctcatggaggcatgaagtcaaagttagtaaagaactgcacttagtggaaaggatggcacagacgtagatgcttcattttttttttaatctgcaaatgggctaggtaggttatttccacgtgagcaaatgcatttacaatcctggctttccttataggccgagtggtacattttgaagaatgagatgtaaactccc

SEQ ID NO: 46612 - DNA, 1838 bp, Homo sapiens
gtatttctcagccttacaaaggaaggaaatcctgtcatatgatacaacatggatgaaccttgagaacattatgctaagtgaaataagctgtcacacaaacaagaaaagcaaatactgcatgattctgcttatatgaggtatctaaagtaacaaaattcatagaaacagaaagtagaatgatggttaccacagactagaaagaggagaaaatgagaagttgttgtttaatgggtatggcattttggttctccaagatgaaaaagttctggagatctgtttcacaacaatgtgaatataggcaacattactaaactgtacacaaaactggttaagataatcatatgtgtttcttactacaatttcaaaaaaacttatatattggtgttggtaacttatttcccaccaataaactaatttggggtcctttttgaaagaaggatcagccttgtcaacattcattcatgttctaatagtgtgagatccatcttctatacagtcttcctttgaaaccagctgatcacatctggattcagtgcctccacagttacaattataaggaaatcaagataaaaccaatgctaatctggtatccataaagacattaagaaacagtaggtctcaaaggttatggcatacaaacatgatgagactgtatttaggacagatgttagtaagtataaaatatcgctccattgttattgtaaactctactcagtgaaaatgtctttggataagaatctatgcttgctgcataggacccagtcagaagttgaagagaagacctgattgctgtgattatatgtcagaatttaattttaaaatatctgtaaccttacaacagaattatatcctgtggtttgggagtttaaaagaggagtacattctcatttggaattcatcccaaggattagcaattactgaacaataaaacagatgattctcacagaagtaaagggaaagggggaaagaaaagcatgtataagagaattggatggaaggagggagatatttttagcctttgtatttctcgaaatacaaatgtaacacattgagttaaaaagaaatcaatccatttggttcttttttaatgtattttttttttaacgtttgctttggtagccttggcagcaaacaaaccaaaatggaaaaataattctcttcttcttcttcctttttaggaaaaacctccataccttggattctagatccctgggtccccttaccccaggagggcactaatagcttactcagtggtattgaggctgtccagcagaccatcccactttgatttggaagatcagtgcctatgcaagaggaaaagcatgcaattgggaataggacagagggtttccagagaggaggaacacccaggacaaaggaggggtaacacgaattcctgagaactgaccaccaagttcatgacttttggagcccagaccaaaagtcttctagggcccaagcttgggacagaaggagtggatsccaccatcagaggatgcctgttacctcaaggtatgtccaagtatgagtaggcctgggcacaaagccaggtaagcaggacctgcttcaggtgggcaaggttactggatcgcctcaaggagaggattccccaaggccctggtcaacagggctgctttaaaattgttgtaatacccaaggacttactttaggataccctaccccacatcatataaaacgtattgaaatgtaccatgtcccagcttaaataaaatttctttagctaaaaaagttgtttttgagtttttataattttgcttttatttttctttgtttaattcatttaatttatgtttggctctaatttctgaggaaaatat

SEQ ID NO: 46613 - DNA, 2353 bp, Homo sapiens
gactgcttcctccctctggatgcattcttaggtgtactagagactataaatcctttgtgcactattttttccatcttcaaattcctctgggtagtccttaatacatactatttcatcacccactcactccttaatccctcacaattggcttccgtctcctcgcaaattaaactgacctttcaaagctcatgtgataatacatgctaggtgcttaataaataattgttgaatgaatgttaaacacatgaatacatggctctaatcaccaaatcaatgatctgtaatcagtttccatccttgacacatggtcagtcaggctcacggctctgtccttgtcttctttaatgtagaatcctggtttttctcctcttttagaggtttctctatgacccctttgctgaccactcttgaatatgttagtctgcacaatgtgtaagggttctggtggcagacaaagttggcattcaaatcaggccattgataatttattgctgtatgacttaggacaaattatcccttgtcactaagcctcatttctttatctatagaaaagaaataattatagcattgtttcaaaggttgatgtgctacttaaatgccacagcaaagacaatacatgttcattaaatgttcatattagtggttcaatggacgtaagcttcctatgggcagtcaccacgccatttttcccaccatcatgattctgtcttcaaaacctgcacaggatttgtcacaaggtgcttgaaaaaatactagcagcgaatgaatgagcaaatgcatcattctacttytcttaatgaataatctttcccacgaccttggctttagctctcttcactctttcccttgctaacctaacttattctctaatgacctgttgaccttattcattcttcaactctctccttcgcatagatgactgctaaatccaaactaaaatcgacttggccccttgtgatctacagatccagatgtgttgtcttttagacacttcccaaaataacttttccagagacatcactttgagactttaaactccctgcacttaaaaaagaatgattatctccccttaatccatattgttcactcatatatattcacttcttgtatattttatgtattttattatacatttatatttggaatggcctctaaagagttctacctgcctatttgtttattagccttaagatattcccacttgcaacatgttcttcttactaatgtgtaagccttcatgtattagcaacctccacattgacaaccaaaaataatgataatattaattttttaaagtccatactccttttggggcctgtaaattgacccttattttactagaaaactttttttttctgagacagggtctcactctgtcacccaggctggagtgcagcggcacaatcatggctcgctgcagtctcaacctcccaggtccaagcaatcctcctgcctcagcctcgtgagtagctgggaccactggtgcatgccaccatggctggctaattaaaactttttttgtaggaatggggtctttgtatgttgcccaggctggtctcaaagtcctggcctcaagtgattctccctgcctcagcctcccaaggtgttaggatttcaggtaacagccactgcgcctagcagaaaacctttatttatgtaaaaaatatttctttattaagcaagtcacatgtaggtaagtttctattgtgaaaaatcatagcttaagcaacacagatgtgtcaatgtcaaggcaacatctccacttcattactgcagcttgccccattctcactgctctttgacaaatttatttggttccgtattatcagtttgggataaagcttttccagatcttttgcattcattctcgagcatttgcatatctggtttttacttaatgtaaagggggccaagctgtatttattaatgggaagctatatttttccctttgttagtatatcctggaggtgtgctcatttagatcttcctcatcctaaagaattactgcatcatattctccagtgcggatacaccacaatatagacagacctctattaatgaatgcttaaacactaccttgctatgtttatttcccatccctctcatatgtgtgatcttttaaccaaataaaaaagcccatttcagacttttctatcttgacctctttgtgcatgcctttcttttccgattcctttcagtgaaacgtctgcttatcctccaaaactcagctcaaatgttaactccatgttctgtccatcatgctatgctaaaattgatgtcttacacctcttactcttcttcttcaatcattcaaggacaggctctaatgtttttatactcccacagagctaaa

SEQ ID NO: 46614 - DNA, 508 bp, Homo sapiens
tagactgaacctggaaatactgtcttmgatgaaaattttgtatgtagaaagaatttcattttcgatggaaattttgtatgaagaaaattttgtatgatctacattacatatgacagaactattttactataagattttaatcaaatcttaagcagtgggaagaatacttatcttatgatttacttgtgtaaaataaaataaatcagtgcctgggattaatttcccactgatttcttaattagccatccaataagaatgagtgggtacacacaatatgttctagaagcctaagtgtaagaaacgaatggtgttccctggtcagatgctataacaacaacaacaacaacaacaacaacaaaacagagggctctctccatgagactatatgaggccatttccatttttaaaaagactggtctacaacaggtagaatgactgcatttcaggtacacacctttctgcataataatattgtcttcagtaattgcttttcctcaagcaacaaaaa

SEQ ID NO: 46615 - DNA, 585 bp, Homo sapiens
gaaaattaattccaactaatttccataggcattcatcacagttttacttattgcagacaaaggagccttcattgaggattaatggactctcaagatgagctctgagatatttgaactctctaaaattatatgcaaagctgtggatgtgtatatattggaaatgcccatacctttagattaatgtagattaatctaattagtgtttggatttatcctttctgttctatccctgctgccaccaccctaatttagattctccatgtcttttacatgaactggtctattggatcatggcttggcccactaaaggctatctcttataaagccattctctccagcagctgttgaaaataaaaggtgtaggcagggcgcggtggctcacgcctgtaatcccagcactttgggaggctgaggcgggcagatcacgaggtcaggaaatcgagaccatcctggctaacacagtgaaacacygtctctactaaaaacacaaaaaattagctgggtgcggtggtggacacctgtagtcccagctactcgggaggctgaggcaggagaatggcgtgaacccgggaggcagagcttgca

SEQ ID NO: 46616 - DNA, 625 bp, Homo sapiens
ttcactgtgaactcttaggaacataaagatttaggtctccatgtcctgaggcagtaaattgtttaagaagaaaatagctacattgataggttctggtttgcttattggcatttggctttgtgggtccaacagcggcacaaagatttcgaaaatctgtgttcaagaccagctctgcctcttagtaggatgaccttggactgctcagtgtctgtttttcagatctttatccatttttgtaggacttggtagtctctgagatgtctatgagagctaacatcttatgattaagtctgcaaggacatttttcttatgctttagagaatgagttctcttcagttcctcaagtagacaaaccattatggtataataaattgtcagtaaagttattctgattatacttgccattggagaaagaatccartgatgtgtttcaggtagggtatagattgtctggataagaccacacacctggctgagttagattaagtttctgatataataagctaataaacaaaattatatcaaaagtgaattggtcacacagagaattggcatctgcagccaataccagaatagctttcattggtcacctgtttctaaagggattagtcactcagtagtgcca

SEQ ID NO: 46617 - DNA, 616 bp, Homo sapiens
aactgaggctcttagattttggggaggagggtaaagctgttgattaactttacatcttgttaaattaaacatgcatgttatattttctgggtcattactaaaaacagaaataatttatcatttagaaaatactaaggaatggaacaaaaacttaatccaaaggagagaaagaaaggagtaaaaggggagataaacttgggagaaaattagaaaatacaaaataataataatcacattaagtataaatggactaatatctgcagttcaaagataaagactgtcagactagattttttttttgaaatctagttatattctgtttagaagaagtaaacttaacactttagaacacagtaaggtttaattggaaaagatatatttacayagatgaaagtaggagaattattttaataatagaaaaaataaacatcagaaataaaaacattaatgacaatgaagaagattattacatgttcataaaagtttcacctcaacagaaagatgtatccattctaaatttatacaaattcaataaaatagcttcaaaatatataaaggttaatttggaagaatataggaagaattttacataccaatcgtgatagtgggggattcc

SEQ ID NO: 46618 - DNA, 616 bp, Homo sapiens
aactgaggctcttagattttggggaggagggtaaagctgttgattaactttacatcttgttaaattaaacatgcatgttatattttctgggtcattactaaaaacagaaataatttatcatttagaaaatactaaggaatggaacaaaaacttaatccaaaggagagaaagaaaggagtaaaaggggagataaacttgggagaaaattagaaaatacaaaataataataatcacattaagtataaatggactaatatctgcagttcaaagataaagactgtcagactagattttttttttgaaatctagttatattctgtttagaagaagtaaacttaacactttagaacacagtaaggtttaattggaaaagatatatttacacagatgaaagtaggagaattattttaataatagaaaaaataaacatcagaaataaaaacattaatgacaatgaagaagattattacatgttcataaaagtttcacctcaacagaaagatgtatccattctaaatttatacaaattcaataaaatagcttcaaaatayataaaggttaatttggaagaatataggaagaattttacataccaatcgtgatagtgggggattcc

SEQ ID NO: 46619 - DNA, 579 bp, Homo sapiens
taacctattgtatctgctaccacagtaaaagaatgaaagttatccaaaataagtaattaaaatattttactgtgtcattttataataccatgaaatctcaaagggaaataagaaaaaaaattatgtttccaaggcacaaaaatatatcaaaaagtagagattaggaagaatacaagtccaatggaacatctccagtccactctaaaattagagtttaaaacagagttgtaggttcaaatatatctgttttattttgttaaataggtttaattacaaaacaatacctggctgatagaaaaagtttccttccggttgcatttaaatagaaatagaaaagctcaaagtattgaatagaaagaatatttgtgattggagaaaacaaagaacttcattaagcgrtaaagaagacacgttgaagaagcaaaggataaatgtaacgattataaaattaagcagtaatgggctgtattcagctcctacttttcaatatcatctacttagcagccctgaagcagcctttcccaatttttaattaaaatgcctttaaaaacacagaaaaataataaaatccataactcc

SEQ ID NO: 46620 - DNA, 560 bp, Homo sapiens
gcatgcttattatctgctaatatctgccttggaccagcagacaaactcagaaatgagacaagtcccatttaacattattacatctatattttattataggatgaagttggaattggagttttctggggtagatctggggaggacttaktctacaagcaagtcaggaatgggatagggtttaaatagtctctgagaaggtggggagcctgtaatgtaccctgaaacctgtttgcttagctataccatgccaagtgggatagctccctttgaagatttttatttccacattatgtagacagctccaggggaaagggccccaggagagaggacaggcaagaacaccattggccgtggcttgggccgatgagaacaacagctacaccttagctccagggacaggcttcctcaaagaaattacaaccattttggcccttttatgcaggtggctgcagaggtcgatgccttggaaataagttccccagcagcagggtagaaaagacacagtgagatacatcatacttaagattcaactgggagcataccagggatgctctataatg

SEQ ID NO: 46621 - DNA, 560 bp, Homo sapiens
gcatgcttattatctgctaatatctgccttggaccagcagacaaactcagaaatgagacaagtcccatttaacattattacatctatattttattataggatgaagttggaattggagttttctggggtagatctggggaggacttagtctacaagcaagtcaggaatgggatagggtttaaatagtctctgagaaggtggggagcctgtaatgtaccctgaaacctgtttgcttagctataccawgccaagtgggatagctccctttgaagatttttatttccacattatgtagacagctccaggggaaagggccccaggagagaggacaggcaagaacaccattggccgtggcttgggccgatgagaacaacagctacaccttagctccagggacaggcttcctcaaagaaattacaaccattttggcccttttatgcaggtggctgcagaggtcgatgccttggaaataagttccccagcagcagggtagaaaagacacagtgagatacatcatacttaagattcaactgggagcataccagggatgctctataatg

SEQ ID NO: 46622 - DNA, 556 bp, Homo sapiens
catatatatttcatatatatttcatatatatatgaaatcatgmagcagctccaattatacaacattctatgggttataaataaatcccaaacctgctcagattgaaggggatgttaattagactctaactcttaagggcaagtggcagaattctagaaaactgtgtaggataggaaattttgttgtgaatgtctttgaaaaatacatctactacagatcttttgagtccaaagcctaggtacataaccgccaggctgtatcattttcctgaaggggcatcaggagccacacactgatttttctagctttgatgtatcatagtattttttaatgaagttaaagtaattggttaactgtatatccaaaagttgttctttcttagccctttaaaatattttatgtaatatttacaagtcagaattctttgcaaattcatgtttcttactgttgagtttaaacgatatagtcaaggtaagtataggaatttagatgaaaaagaagtttttgtcaggaaaggctttgtagaggggttaggactttagctagttttgatgca

SEQ ID NO: 46623 - DNA, 533 bp, Homo sapiens
tgcctcagaactacctgctctagcaggggaacatagtgctaattttttaaatatttcttctcaattatttctgaagctgggaagtccatacatcaacaaataagaagagaaaatgaaagaataatacttagtgtttcagcaggcctaggaaataagagagagaaaatgttctcacagttcctcacaaaaattctataatcttgcctttatcactcattatatttacttagttaacaggaaattaatcttcataaattttggttcacttcagattctaccaattttaatatttggttattatttacggtggataactaatgccctcttactccctgttggcaaatctgacacctgatgatcatctgacttcttgtgtggatctatttatatagggaatatgctggttgggggacaaagcatttggtattataattctcactggaattacatawttatgaattaatttaaagtaaattaaagctttctaattttttaacaatgataaaataatgctaaaaacagtaatgctatat

SEQ ID NO: 46624 - DNA, 595 bp, Homo sapiens
actcctgttcttggcctcactctcccaaaagtgctaggattacaggcatgagccatggcacctggccgaaataaggatttttaaataatcccttcattcatccttttaacattcagtaagcattcatgaagtgccacttacatggcaggccctgttctgggctctggaaaagggtagtgaacaaaatgaagattcttacccttagggaatttatgctgtggtgagaggaaacagacaagcagataaatgcacagtgtgtcagtggtaacaggtggtatggcactgcagggaaggggacagggaatatggcctttacaacttygaatagagctgttttagagagtagggtagtcagctctgtctctgaatcgctgtatgacctttgacgagtcttatatgacctcgggcaaatctcctaatctggtagcacagcttcttatttgcaagatggtgataatgttttatgaggatgaacagattatataacacaaagtaatggtcataaaataagggttcggcatatttatttatttgataaatatttactgtatgtctactgaaactgttccaaatgcttaactcattgaactatgca

SEQ ID NO: 46625 - DNA, 522 bp, Homo sapiens
caaaatcctggaaacaaatgtctatcaagaaagcaaagataatctaaacagcagcatattcataggatgacaaactattcaaccattataaagaaaaccgaatcaaaagcactggcttattagacaagagtttcccaaactatcatgctaaaacagtaacagcgagcttccaaattaatgttgcctttttttttttttttttccaaactgaaaggagggtggggaaaacaaacgcatcatatgtaaagcactgagtccagcctggctcttagtaagcattttaatcaccttcaaaaattaawtgtgacttacggaaacaggtcactgaatattatttcatttcacttattcatttatggcctgttttgctctatataaaattctgaagtggctccataatacagcatcttaaaaaaaagctttcaacttgccctttactcgcaaatgtttacaatgcaaaaaagtccctacaacgtaatatttaacgagtgatgcttttcaatatgccatacaaatctcaat

SEQ ID NO: 46626 - DNA, 483 bp, Homo sapiens
atttttaatatctaaattaaacttcataaagtctgttctttaaataaacaagagaaggcttttatcatctgtaaaataaaggtaaaactgttgccaacaattaaaaacaaagctttattcctgcagtttatttttyaggtaggtgctttgacaacaagtggaaagtataaagaataatctgaaagaatcacccatttaacaattaaagagtttatccatggaacaccaaaaaagtattttctgacttttatgcttacacacgcatgtcatcatagctcctctagatcaatatgggaagaaatacaagttaattaaggattctcatttagagttactataatgtttaaccacaaatctctttcgattgtacagatttatcttatttctgatcatctctgcaactgaacaggaaactaaaaaaccacaacacttaaaagacaacttcctgtgggatttttggtgtctgcggctcagaatgaaaaa

SEQ ID NO: 46627 - DNA, 611 bp, Homo sapiens
cataacaaaccaccataaaaattcagtgacatgcaacaataaacatgactatggaattcaaccgaactagggtcaggtttggggcagactcacatatctgcagctgtctagagctctagactccatctagaattagggagactatattcatgtgtctctcgtcttcttcctgggttcagtggactaacctagccattttctccttcatggtgatagaagagagttcggagcacaagtggaaacacacaaggtctagtgaaacactattatttccactgaactctattcgaaaagcgaagtcatgcaatagcacccaaaagataaatatcttgctccccacagtgagaaagtgccacaaatttaagtggcaaaaggtgtaggtacagtgcagataaagaatcgcagttaatcatgcaatctaccagagacaatgtgacacatttgaaattctatgtctgacactaatggtgtcaagttaggcaatctatttataatctgaaccttaatttcctcttttgttaaactgtgttattcctaccacatggagtstttgtgataattgaatgaagaaaactgtgtgaaagtcacagacaagaagatggaaatgaggc

SEQ ID NO: 46628 - DNA, 1356 bp, Homo sapiens
cacttaaaaattgtctaaactcacattttatgtgataaaactacaaaacacaatcctttaatagaagcactcattttcattttgcataaatatttctgtattgaataacttttaacaatttcaaatttctttcatgtatgtgtagaagttcatgagcacatttgtgtgcggagtggtccctttgttgttctgtattcattttatttgtgattttgccacttagaaattgtttaatctttaaacttgcacaaaatgagagaaatgggcctgctgcggtggctcacgcctgtaatccccagcactttgggaagccgaggtgggcggatcayttgaggttaggagtttgagaccagcctggtcaacatggtgaaaccccgtctctactaaatatacaaaattagctgggcatggtggcaaatgcctgtaatcccagctactcgggaggttgaggcaggagaatcgcttgaacccgggagatggaggttgcagtgaaccgagattgtgccactgcactccagcctgggcgacagagcgagactccgtctcaaaaaaaaaaaaaaaaaaaaagtgcactatctgggagtaaccttgtctttctgccactgcccaacaccaacaccacgaccctccaattctgctgttacactttgatgatttgtagaaatcactgctgatatgcatagaatgtgtgtgttctacggaagttttctaacaaatggtaccataaaaaacttttacatattcaattccaggtagaaaaatttggctccttctaacacttctctattaatttcacattgaacagtaatggcttattcacatgcctgcttccctactaggctgtaaatgtcttgagggcaggggcctgaccttatttatctttgtagatggagcaacctagcacaaaaggtaggtgtcaaggaaagcagatgagtgaagcatcaaataagactctagtataagtaattattgcaaaacagctgttctaacttttaaggcaatttattcactgtgcttaatatcttatcctgacaccacttcgcctctcaactctatttattctaattggaataaaattttaaaacttcaagccaagcgaggcagctcatacctgtaatcccagcactttgagaggctgatgcgggcggatcgcctgagatcaggaatttgagaccagcttggccaacatggtgaaaccctgtctctactaaaaatataaaaattagccaggcgtggtggtgagctcctgtaatcccagctactctggaggctgaggcaggagaatctcttgaacccaggaggcggaggttgcagtgaaccgagatcggccattgcactccagcctgggcaacagag

SEQ ID NO: 46629 - DNA, 1356 bp, Homo sapiens
cacttaaaaattgtctaaactcacattttatgtgataaaactacaaaacacaatcctttaatagaagcactcattttcattttgcataaatatttctgtattgaataacttttaacaatttcaaatttctttcatgtatgtgtagaagttcatgagcacatttgtgtgcggagtggtccctttgttgttctgtattcattttatttgtgattttgccacttagaaattgtttaatctttaaacttgcacaaaatgagagaaatgggcctgctgcggtggctcacgcctgtaatccccagcactttgggaagccgaggtgggcggatcatytgaggttaggagtttgagaccagcctggtcaacatggtgaaaccccgtctctactaaatatacaaaattagctgggcatggtggcaaatgcctgtaatcccagctactcgggaggttgaggcaggagaatcgcttgaacccgggagatggaggttgcagtgaaccgagattgtgccactgcactccagcctgggcgacagagcgagactccgtctcaaaaaaaaaaaaaaaaaaaaagtgcactatctgggagtaaccttgtctttctgccactgcccaacaccaacaccacgaccctccaattctgctgttacactttgatgatttgtagaaatcactgctgatatgcatagaatgtgtgtgttctacggaagttttctaacaaatggtaccataaaaaacttttacatattcaattccaggtagaaaaatttggctccttctaacacttctctattaatttcacattgaacagtaatggcttattcacatgcctgcttccctactaggctgtaaatgtcttgagggcaggggcctgaccttatttatctttgtagatggagcaacctagcacaaaaggtaggtgtcaaggaaagcagatgagtgaagcatcaaataagactctagtataagtaattattgcaaaacagctgttctaacttttaaggcaatttattcactgtgcttaatatcttatcctgacaccacttcgcctctcaactctatttattctaattggaataaaattttaaaacttcaagccaagcgaggcagctcatacctgtaatcccagcactttgagaggctgatgcgggcggatcgcctgagatcaggaatttgagaccagcttggccaacatggtgaaaccctgtctctactaaaaatataaaaattagccaggcgtggtggtgagctcctgtaatcccagctactctggaggctgaggcaggagaatctcttgaacccaggaggcggaggttgcagtgaaccgagatcggccattgcactccagcctgggcaacagag

SEQ ID NO: 46630 - DNA, 1356 bp, Homo sapiens
cacttaaaaattgtctaaactcacattttatgtgataaaactacaaaacacaatcctttaatagaagcactcattttcattttgcataaatatttctgtattgaataacttttaacaatttcaaatttctttcatgtatgtgtagaagttcatgagcacatttgtgtgcggagtggtccctttgttgttctgtattcattttatttgtgattttgccacttagaaattgtttaatctttaaacttgcacaaaatgagagaaatgggcctgctgcggtggctcacgcctgtaatccccagcactttgggaagccgaggtgggcggatcatttgaggttaggagtttgagaccagcctggtcaacatggtgaaaccccgtctctactaaatatacaaaattagcygggcatggtggcaaatgcctgtaatcccagctactcgggaggttgaggcaggagaatcgcttgaacccgggagatggaggttgcagtgaaccgagattgtgccactgcactccagcctgggcgacagagcgagactccgtctcaaaaaaaaaaaaaaaaaaaaagtgcactatctgggagtaaccttgtctttctgccactgcccaacaccaacaccacgaccctccaattctgctgttacactttgatgatttgtagaaatcactgctgatatgcatagaatgtgtgtgttctacggaagttttctaacaaatggtaccataaaaaacttttacatattcaattccaggtagaaaaatttggctccttctaacacttctctattaatttcacattgaacagtaatggcttattcacatgcctgcttccctactaggctgtaaatgtcttgagggcaggggcctgaccttatttatctttgtagatggagcaacctagcacaaaaggtaggtgtcaaggaaagcagatgagtgaagcatcaaataagactctagtataagtaattattgcaaaacagctgttctaacttttaaggcaatttattcactgtgcttaatatcttatcctgacaccacttcgcctctcaactctatttattctaattggaataaaattttaaaacttcaagccaagcgaggcagctcatacctgtaatcccagcactttgagaggctgatgcgggcggatcgcctgagatcaggaatttgagaccagcttggccaacatggtgaaaccctgtctctactaaaaatataaaaattagccaggcgtggtggtgagctcctgtaatcccagctactctggaggctgaggcaggagaatctcttgaacccaggaggcggaggttgcagtgaaccgagatcggccattgcactccagcctgggcaacagag

SEQ ID NO: 46631 - DNA, 610 bp, Homo sapiens
attttctcaaattctttcacaagggaacagtagtttacatcctttaaagctttcttgaggctgggcacgstggctcacgcctgtaatcccagcactttgggaggctgaggtgggtggatcaccctgaagcaggagttcgagaccagcctagccaacatgacgaaaccccgtctctactaaaactacaaaaattagccatgcgtggtggtgagcacctgtaatcccagctacttgggaggctgaggcatgagactgcactccagcctgggtggcagagtgagaccacgtctaaaaaaaaaaaaagctttcttgggataccagtgtggtcttctggtgacagaaccttgcccacaggttagaggaaataatactttcagcaacacccccagcttgggggatctcagaaagaagggcatgttgccaacttttgaggatttgtctgagaaacagcaacctggcatccccctaactccctgctttttttccctctagaatcaaatagaatctcttttcctggcaaagatttcctagataaaaagaggtactacttagtcatttttgtaggtacgaaatagtttctaaaagtttttaaaagtacataataagaaaa

SEQ ID NO: 46632 - DNA, 540 bp, Homo sapiens
aaaaacattcccacaaagaaagcttcagacccagatggtctcactggtgacttctatcacatacttatagacccattttacagaagctctcagaaaaraagaaaagaaatgaccatttcccatctcattttatgaggccaacataatcctaactttaaaaacctgagaaagacatttttaggacaaggactctctcatccccactgcatggatgaagcacactgaggcttggagtgctgacacgacttgtcccaaatctcgggacatgaaacggcagcactggggcccaggttcccatcccaagaggtttttgctaccatgctgtcctctagaaggtggccccttcacaatctgcagatcacatcctgtaggcaacagctcacacctgctggggccaggagacaagacctgaggaatgccccttctccacttcctacccctaaaggaatgtggatggtgggttttgcaccccatctcgcccattgtgtgaatcttcctatttacaatgaacagctgtgtgaggccaaagatgtatgtgtg

SEQ ID NO: 46633 - DNA, 697 bp, Homo sapiens
ttgatactgcttaatgaattttaatggcaaagtgtacaacaaaccatcaggtgaaaaaggagtcaatatacaaaagtttgcatgaaatattccaattatgttcaaatatgtacatgcacagagaaaaggctaaaaggttatatatcttaatttcaacagtagatatgtccacatagcagaattattaaaatgttttaacatgttttactttgtgctttttgtattatacaagttccacacagtgagcacatataattttcataatcagaaaataaaattaagagtgagatgaaactccagtgggaagttggggctgcgtcatggccccaagrcccccccaaaagccttttatcctggagctgctagggatcaatatattatctcttgtagatgtgaggccttatcagctactaccttagatcaatactgtgtgctctcatgtaagtttcttaacttctccattctctggttatctactccatcaaacaggggagttggacagtaggattaaatctttagaacttcagaatttacaagcactttctcttatcctattcctcttcacaatagccggatggcagaatcaaggcaagccttatcactgtttggcctatgggaaaacaggctcagcaaagtcaggtcagtagcccagggtcacacagatgttaggcagcggtgagcattcaaaaccaggtct

SEQ ID NO: 46634 - DNA, 590 bp, Homo sapiens
taaagatgaggtttcaccatgttggccaggatggtcttgatctcctgacctcatgatccgcccacctcggcctcccaaagtgctgggattacaggcgtaaacaaccatgcctggccaagatttttttttttaattgagactggagtctcactatgttgcccaggctggacttgaacttctgggctcaagcaatcctcctcccaagtagctgggattccaggtgtgcaccaccacacccagctaaaaaaatgtgagattttaaaaattctttgttgttttttctttttggtgaggtgggggggggggggggggcgggtacagagttttgctcttgatgcccagggtggagtgcaatggcgtgatttcagctcaccgcaacctctacctcccaggttcaatgattctcctgcctcagcctcctgagtagctagcattacaggcatgtgccaccaaacccagctaattttgtatttttagtagagargggttttctccatgttggtcagactggtctcgaactcccgaccttaggtgatctgcccgcctcagcctttcaaagtgctggaattacgtgagccaccccacctggc

SEQ ID NO: 46635 - DNA, 572 bp, Homo sapiens
ttgctgtgttgcccaggcttgagtacagtggtgcaatcttgactcactgcaacctctgcctcttgggttcaactgattctcctgcctcagcctcccaaatmgctgggattacaggcacacacaaccatgcccagctactttttgtattagtagtagagatggggttttgccatgttagccaggctggtctcaaactcctgacctcaagtgatctgcccacctcagcctcccaaagtgctgggattacaggtggtgaaccaccgtgcccggcctgacagtattgatttttgtaatgctgaagttatatgcattaagttcagagaaggagctgtctgataacagcatttgtttcctaacgagaactggtattttcagttaaaggctggtgataatgtacacatacttgtgctctggtttcagatttatccagctgctgaatgctttctcagtgttttttatttgaaccagcgtatacttattaggatttgaaatatgaccaaggtttctgcagttgaacattttctatttctcaacagtgtttatccatgtaggccaggagcatagtattgttc

SEQ ID NO: 46636 - DNA, 583 bp, Homo sapiens
tggtatcatttcttaggcaactaattcccattgaaatgttgagccaaagataactagatattttcaaaatgtgctttttagatctttagcacagaaaactttgaacataggatactacgtgattttgaaattatgctgaaatatcattctcattcctatgatcactcatgatgtaatatttttcagaagttttcaagatcaggtcaactagagattagaagtacttacatagtctcaattcaaagtatgccctttcaaaagtgcataatgtaaattctggaagcccttaggtaggtggcagtttaagcactttatatagtgaactgctggcaatgaaatgtaaggtcacaacatctagacatgtggcttcatgcttttgacactactataggcactgagatacatttctggagatttgtcaggaacarccctggaagtcaagaactaaagagagtgtcaagaaattctttagaggaaaaatactgccaaagagttgagaaagccctgattggctcttttttattttgtagtggggcaaaaataactctctcagaatactgaggatacctttaagtaatttcgg

SEQ ID NO: 46637 - DNA, 586 bp, Homo sapiens
cttcttcacccttgaacacacaacagacacaggcacacacagactcagcacaggcttgaataccatcgggatgaggtaatgtcatgggttgaggggggcgttccccacccctcacctcccacatgagaggcagaggccaaggtttggtttctggctgtgaccctgggctgctttcccactgggtctctgcttcattatctgtagagggaggacttggacttggcaggggttcctggacaattctcagccaaagaaacccgwccccttccccaggctgcaggagccgcatttaggggtgttctcccgctctgcacacacacccttgagggtctactccattcaccttgcaaggcaagctgtcccctacagccccggaaagggtggcactctatcccagcagaccctaggccgtggctgcagcagtcggaccggctcaagcatctgccccggggaagcagcctaaagcaagagaatcacccacatgggaatccggacccaggtgtggaggacactgggctgacagtgtgcacagggccatgcacccaccagcaagggacacagcactcggtcccagaggtggcctctg

SEQ ID NO: 46638 - DNA, 576 bp, Homo sapiens
tcactggaacactgaagacaaagcggtcaagcagctgagagaattcaccatactgatgagctttcctcctcagagagcttgctcctcaggccctcactcaaaggctctttattctttttagatacaattctaaagagtttgatatctacttttccatccacaasagactaaatgctgaaaactcgagagcataggtgagcttgtgtttgatgctagctgcaagcagcctgacacagggagaaatgagagctctcctagagccaatctggggagtgtcctggtgagggcactgagacctgctagttaggaggaggcctagtgcaaacaggcaaaattgcttggatgaagggtaatcaatctgagcctagttcttttggatgaaacctttgagaactcaatgacaagaggatatggatccaacaggagactagtagagaatacaaattcattattttgctatacaatgctagttgcattttaaacaattgtttctctatgaattttactaccaggcttttctgaaccattctgtgtgaattcaatactgcctggatttttaaaaccacttctgacact

SEQ ID NO: 46639 - DNA, 553 bp, Homo sapiens
attacaaaggaaaccaattatactgaaatgcacttatcaaaatgttcccccaaactgggacacagcaatacagtgctcctttggtatacacagggaactggttccaggacccctgagtacaccaaaatacctaaatctgggcatactcaagctctgcagtcagatctgcagaacctgcgtatacaaacaggcctccatttacaggggtttgcatctcatgaacgctgtattttccatccacaatgggtggtaaaaactccacggttaagtagayctgtgcaattcagagctgttatccaaatatccaactgtatatgcatccattctatgggagtgattacacgtgagaatgggctccataaaagtgtcaattctctgtcattagacactgacaggaataggctgagttgaccaaatggctggatgctttcaagatagacatcagaggcaacctccaccttcattaactttctgtttctttttttttcttttgagatggagtcttgctgttgggaaaagctgagtgttgggagaagctgaggcagggcttgca

SEQ ID NO: 46640 - DNA, 1827 bp, Homo sapiens
tttttagattcattatgattaatgtttaagaatgaatatataatttctagtcaatatataataatgcaaatttaacacataagaaatattgatagaaaaagcattctaccttaaacatattgctagaccatgtgagagagttctgtagaatagattcaagaatggtgtggaaaggggtggtacctcctgatcaattttctcccctgatgggggcaggtgtggaggaaaactcctgggaaataaagaagtcaggtgttctggtttaatttttctgcaaacatattaatgcaagtctcttagaaaataaactaaatagtttttggtggccaaagaatcattcttcataaaatgtttctagcagaccatgcggagttgtctaaaattgcttatgaaaaataagccaggaatcaataaatgtagggtgatgattcccaagaaaatgtcacgttagctgtgttgctgyctaagtataaaaggagatggtttgtaactgagaatacacttgagtaagtaaagcaactgtacattttacttagaaaccaaatctagaaacttggatgagaccacattcaatgaagatgaaaggacccaggtctctccccacttaacccatacatgattattttatctttgaaattattcaaaaagcatgatactgagcaaaatcttcaatctgagtctgatttgacaattcaatgctttttgtgggttcagattggcactgagagcaggattgtcttttagacccacacaccaaaatagtgaatgttttctttttctacctgggctccttttcaaaaggaaataatggaaaaatatgagaatttgttctcaggatagttggctgtacatttttggtatgaggtagtggaatctttgaggcaggttaagggaaataagtcttaccattgaaatctgggggccatagactacagtctgggagtacgggtctagggagtacatggacaaagggaaattgggtgcaaatcccattgactgactcctgctagcatacctgtaaaagctaaccttttaataggttagtttttaataggaggagatgatagtgggagaaaaagctgcgagattacattttattcactggaaaaccttcttatccctccctggtttcttggagaaatttcttgtatcttttgaaatgactcaaaatattgattataggacaaactatttatgtaaccagagtccaaggacaggtgatgagtgaaaactatattttattaaagaacagaatattcactaacagaagactggtgaattaacattggcatggattcttcaaattaatgatggaggacatgttgcaattctattattatctgatgcaaaggactattcatggtcatgactaatcattaaatggctgtaaacttttgagaaaacacttccaaatactgtgacagcatatcggctgcagttgttaaggtgagatttgtcagtcctatactgagaagggtaactgctactactcctctccaaattgccaattggattctccttttcacatgataggaatgatacaagtgtaaaggttgacaggctttatattttccagagagaaaacaccttagttaatgctattgatacaaataataagagatagagtgaatgggataagctaatgattctctgtcttacaagacttatataaccttgagggccaaatatatatattcagagaacagtaacaaacatacaggtttagttactatacatgggattatatggagaaaaagcatttatatcatgtgcacaacagggagaaattaaaaatcagaagagaaaatagaaaggcagctcacatga

SEQ ID NO: 46641 - DNA, 533 bp, Homo sapiens
tggatacttactcaaaaattattaagaatttcgagatagctacaacagagcattaaaccaatctcaggggcctcctaagattttttttttttaatttcaagtaggaaaattttaagctttgcagaatagaaacaagtacatgtttactgtcttatcatggattaaaaaaaattcattatcacatttccataatctggtaaagaataacctaaaagatagagttcatctactactttcatggtatgatgwtaattttcttctcagagcaaaaattaggagaggatttaaggaccatagtcacccatattacaaatagaagctgggtgataaatccagctagaatttaaggcacagcccaaggtgcaaattaattcctggaaattagtacaaatcaacttaggatgttccttaaactgcaactaaatcctgtaaattagtgcagatcaacttaggacattccttaaactgtgagaagtaatttatctttcataggacccaccaataagcaataaactcagagactgtcaagactg

SEQ ID NO: 46642 - DNA, 543 bp, Homo sapiens
atttggttgaattataaaagcctgtttgtttatgtctcttctaatggaatatgagcccagtgtgggcgagggtccattactatcatattcatttgcatgcgccaatagtattagttgaattgatattcactgaaatgaagagaggactatttaaggtgcgaatgcaagtttatatttctagtaaacattttaacattttagtcccaatttcattttagtcttggcctgaaaacgtattaactgggagggctagccatacctttctattggagccattcatttgcccattaacacagaagaagtagaagaaatgaaagggcagaggtggcttattctgtttttagcatctactttgtgtcagactttggctcrgcgttttgtttattttgtgtcatttgatccataactatactactgagattgactgaattatccccatctttaaaattaggaaactgggactcagggaaagtaaataacatgctcaactaataaatggtgggatccagatctatccagctcccaagcttgggccacgtcctc

SEQ ID NO: 46643 - DNA, 1178 bp, Homo sapiens
  misc_feature (1)...(1178): n = A,T,C or G
tacaggcgcctgccaccacaccsggctaatttttgtatttgtagtagagatggggtttcaccatgttggccaagctggtctcaaactcctgaccttgtgatctgcctgcctcagcctcccaaagtgctgggttacaggcgtgagccaccgtgcctggccctaatattcttatgtgttaacaacttactatgagatccttaccctcctagcagaactgacgttatttttaaaaacactggcaaaagcacaaattcttcagatcactttattctaatataatatctttccattttcctgggctattccttatatattaatagtatcaaatgcacttgaagttttgttactttgaataatcataatgtaacaaacatcaaacaaaatctgagacattcaaatttaaaattttaataaaatctgcaccaacataggctcatccatcactaacttcaatgacaatctattaaatataactcagtagatgtcatctaaaaagtacgcatcctcaaattctttcccaggaggagaactcaatgctagactggcctgccccattagagatgttaacatcacagctcaatgccatgaagagcaggaccaaaaaaacaaaagcaaaacacaattcttaaatatggcaagtgctcaagacaccatttaccaaaaaaagaaacgttccctatttcaaccagtttactagctagtaacaatgtagcaggcactgtactagtcactgagccatactcagactgaggataggggaggcgggtggacatggcccaggtcctcaaagtgttcctcaaaatgtttacctattagttacaggacttcagattgagttttccagttgtagcatggcttactttacctggaaggcaagtttaagatctgggtaggcatcaaggaagaataagccacatgtggntgaccagatcacctgggaaactccggaaacagattcccaggggctgtgcgcgattcactaaatgggaatctcagagaaggctgggcatctgtgttcttaacacccctcgcttacccgcatgggtctgggggttaacccgcgtagaacccattgccctcaaatacgccaaatggagggcccctttgcatttttatataatggaagcttccccaccgggacaatataacacaaccttcttccccccaccccatttagc

SEQ ID NO: 46644 - DNA, 1652 bp, Homo sapiens
ttgtatatttaggcaaccatgtgtggtgttgtcacttctttaacggcgagcattttctcctctgagcgctccatgtgaccagacccagtgggtatgtgatcgtaaggcctagtgcaaccagtacatacccttggttctggctctaacccccgactgtcaggtgttggatggggaaattgcttcaggagcagataaacaaatagaagggcagtcttcagaacagatggaaagctcagaataaagagggagccattagagacatcaagaatagcataaggttagtcagtgtacatacctgcagaagtttagtgggatggcaaccagtttcatcccctgccaacttcagttgattgatattggttgtccagaacactgtgctargtaaaattatcaggccaggcccagaaatcacaggaaaaagtaggtcagtatctctgctaagactgggctatcagattgggactgagttgagttagttgtaagtccaccgtggttctttggaaacgctctactaggagaagataatgcaaacaacagtaggaacagaacagctgaaaaaaaagttcaaatgtttttgtaatatgcatggcaacatttaatatttaccctataaagttatagaagaccaaaaataatttagagatagctcagtctgggaattttctaatctttctaagtttttgttggggggtggtgggcgtggggtggggaggggagtgcttagtgaaaactgtttgccaaaagaagtcttgtttcttaagccccaaaacacaaagtagataacagcagagtgtctgtagtggaaaaggagggaaatccggaccttgtccatttaaagattccttttcagctctcacagtggagcctgaagtaactttgtagactactggggcttaaataccactgaaatatacactcgttccatttttactgactgacgaggaaactgagaggctgccaggttaaaggattttctttgagttatactaccagaaattgagcctagatattctgccctacatctagatagttcctgcattacaatcatcagaaactgacggaatttaaaaccgtttttcttaaggcatattaatttccaaggaatcaaatagcaattgcattagctcaagtaaaagacacattttaaggataaaattatagagaatccagagaaaagtggtactatgaggtgtcaggaagtgtggtaaccgggtcagctctagggacctacatcataagagctcaaggacattcattctagcacactgctgtgagcatgacttggctactaattctaccaatctctatgaatcttaatgcaaatcctaaagagaaagcattaggttggtctggcctatagacgttttcttcctttgttagtttttcactcctaggccagccagctgtgtctgggaggaaaggtgtggagtcatatggagatgcagtttctgggaaagggagaacaacttcccttagaaggccctgtgggcaggtatcagtgatgtgctggtaaggtgttaacaatgggttctggggtagaagaggtggggagttctgacttgtagtgttttcagatttccatggcgtaaatactcccaccgtggtgatttcaggctaccaatacgacattactgattgcagattgggaagag

SEQ ID NO: 46645 - DNA, 580 bp, Homo sapiens
cagaatcagatatgcaacaatggagagcaggccacagccatttaaaaaaagttgctttagtggtaagttgttccaagtaatgttcctcattatcaagtatccagtgcttgtcatgtgctaaacatcctactatctgccaacataatacactgtaggcttttcttaagaaccttacactctaaaaagggggaaattggtaaacactactggtggaatatttatctcataaacagataaaagttacataaactcataaaatgaggaaggggttacacggctctgggtgagggcctgtgcctcattccatatcactagtaaatacttgtaggttccagatctataaaataatgggatacatccatttggtatccggagcttttgaagtttctaggattctaaagggattacatctaaartatgggcctccagctccatattgatggtgaaggttgcatctttgcaacatcttcttttgtgggtactctgaccaagagctaatattgatgagtacctatgatgacagggcccagagagactcttggtacacacacctcatatcatactcataacaaccttgcaa

SEQ ID NO: 46646 - DNA, 1102 bp, Homo sapiens
tcattttgttgccctagctggagtaccagccttgactttccagatcaagtgactctcctacttcaacctccctactacaggtgtgcacagctacaccaaattaattttttttaaatgtttattagagacagagtctcactatgttgcccaggctagcagtgttctctttacctgattagactttattatttactttaaatatgagagtccaaaattaaaatatatatatttttaaatactgaaacccgcttttttttaattacagtcagatcacacctctccttttacagataacattgcttgaaggaagacagaactatgctactcaggaataatgatggacaaatcatatgggtamattagagttgaacattcccaacttgtttcactctgactaaacagatccaagtttctaactcagattttgtttctctcctttttaacctttgccttaggatatgactaaacacaatacaaactgacttttcttcccggaaaaatgttctaatatggagtcagtaaaactaacggttttcaccattggctcatttgctgttttgaatgttagtgtagggaatgaaagaatgttaggacttgaattccaaatggaaaatttacataaagttacttatatatcatgcatagataactaagttagttttccaagaatccaaacactacaaaacgtaatgtaatgtaatattcttttttgaaattttattgtatctaaattgtaaaatcattgtaattctcagtcaattcattaaaaagcactttacctcctctctggccggagcactgggtcttccctatttgtatgcagtatcatatatactgtgttttgaatgaaatgtactgacatagtttaaatgctgactattttctcattgtatcattttctttttggtggatcctttgagaagtaaatttagcattttgatctattatttgacaacaagcttgattcttttattcagtcgtattgaaaacgattacctacataaattataaaccttctattactcttttgttaacatcttacatttttttgttttgatttaaactcatgagttacttttttttaggcaactaatcttcaaac

SEQ ID NO: 46647 - DNA, 555 bp, Homo sapiens
ctcttatttaatgattgcaaatagcctttacctgggtattatcaaccatcccattttgcagataaggaaattggttcctaaagaggttcaataacttggtgtggatatgtggctagtgatgctggtaagtggtgaatctagatccaaatctggctgtgtttgaacccggagcctctatgcttagctgtaataggacaatgaatgaattcataaacttgctcttctgggccagtgaaggagaggagaatattaatggatttgagggttcaaagtcactaaaaataaaagggactaacatcttttrccatcatgtaaaaaatataatacaactatcatgctccttcaaggtcaatacctaatacgggctccataaagtgctaatctgcactgtccaataatatggtagccactagctacatgtggctatttcaatttcaattggccagaattaaacaaaataaaaaattcattaccacagttgcattagccacatttcaaataatcaatagccacttgtggctagtggctactgtacaggacggtgcagacacagaa

SEQ ID NO: 46648 - DNA, 465 bp, Homo sapiens
tagatcttgacattgcactccagactgggcaacaagagcaaaactccatctcaaaaagaaatttttttwtaaattaaattaaatttaatttaaaaatcagcctggggtggtggcacatgcctgtagtcccagctactcaggagactgaggcaggaggaccactcaagcccagaagcctggataattatttagttattttcattttttgtagagatgggttcttgctttgtgacccaggctggtctcaaacttctgggcacaagcaatgtgccccctcggcctcctaaaatgttggggattacaggcatgagccacccagtccagccatgcttgggttttttcaaaacccacctggctaggttggaggtgaccccgagtggagaagggttaagaggccaccacggttgtttccattcccaaaagagatgctggtggcttgggctggggtagtgacggtggtccatg

SEQ ID NO: 46649 - DNA, 465 bp, Homo sapiens
tagatcttgacattgcactccagactgggcaacaagagcaaaactccatctcaaaaagaaattttttttwaaattaaattaaatttaatttaaaaatcagcctggggtggtggcacatgcctgtagtcccagctactcaggagactgaggcaggaggaccactcaagcccagaagcctggataattatttagttattttcattttttgtagagatgggttcttgctttgtgacccaggctggtctcaaacttctgggcacaagcaatgtgccccctcggcctcctaaaatgttggggattacaggcatgagccacccagtccagccatgcttgggttttttcaaaacccacctggctaggttggaggtgaccccgagtggagaagggttaagaggccaccacggttgtttccattcccaaaagagatgctggtggcttgggctggggtagtgacggtggtccatg

SEQ ID NO: 46650 - DNA, 1840 bp, Homo sapiens
tgcatcctcattctgtaaggagtttctttgtatttccttgaggcttggagatggaagaagtcactgataactgagagcgtgggctcgtgtgtttcctgatggttgtgcagagccaatacaccccagagaaggctgtgagttgcaagaaataggactgtggtagtaacttggtttgctatgctctttcaagtcaggcctggagatctctagaatcccttggtctactgctcacgtccttgggcccacacattgtaccataccccttttgtcagctgtcaacattagcttgtcgtcacctagtcccaggaatgactccctaaattacataatgaacatatcccaaaggtattgcccaaactgaactcaaaagcaaactttatatgtccttctctttttcttataggaataaacagttgtgagaaaaagaagacacagtttctacagttcgtacatctatctcagacatttatccagtgccagaacagctatgagggactttggctaaaagctggtcagatgagggggaaaaacaaaaaagccacaaaatctattttaactgccttgataacaaacattgattaggcagggcctcaatacatataaaaccatgttggaataaaggctaaagtagcaaattaataaatttgctttaaagctcattcttgtatattttcttttgtcttccaggcaaggtctgtggtgcactcatttaggaggcaaataaggcctgttcaactggtttcagtgctggaaaataatttagtactttgcagaaacattttttccatggactaaccacaatccctcttgtaatcctaaaatagagagttataacacctgcattatataagacaaaactaaatggaagtatattttttttctcaaatatatggatcctttcccccaacctgctttaatttggtgaaactggttactttccccagtctctagcctgcagtagttaccacattccatcttaatgaagaatgtaaaacagcaggcttggaagcagcaggcaatggtaaaattcccaaacaatttatgtcagaaaacaggaaattgaaaataaaaacgaaggcattgtttggatgtttgaagaaatatgttttgccttgaccaatcatgctgcccaagtcttcagcatggggacagatgcgcagctgattatctttgctcttagcagcacttatgttgtggcaacagggcaaacagaataggttctggcaaataggaaggatatagtggggccaaacaggacatggtgaacagtctgagagggagtgttctcagcaaattcagtgctgataatgaatttgcctttctggggggaaaagtaagctggtcaggaacgagatgggattaaaactatttttgtccttcagaaagaataaaacacaaagcttcccccacatcttgaaattttaggtgatgaaatttctgaagttaactkgaaatgtttaagtgtatacaccactgagaattatggtctctttattaggacccaagggaaaatgatgaatgtaatggaacattctagaacattagtacaaatttttttttttttagttgggtgtgcaggagatgtttcccaccccgccccctgcccgccccaccatccaaagacagctgtctccagggtcctcctgtttgtgtcagctgttttcatgatggatatttcatgatggaccaatgtttcacactggtctctttgggagggaatctgcattggtcattaataagctgggtgcagggaagccattttacatgcggaaatacaattacagagaggaagaggggaaaaaatgagccacggaaagaactatatatgcaaatatatatg

SEQ ID NO: 46651 - DNA, 1840 bp, Homo sapiens
tgcatcctcattctgtaaggagtttctttgtatttccttgaggcttggagatggaagaagtcactgataactgagagcgtgggctcgtgtgtttcctgatggttgtgcagagccaatacaccccagagaaggctgtgagttgcaagaaataggactgtggtagtaacttggtttgctatgctctttcaagtcaggcctggagatctctagaatcccttggtctactgctcacgtccttgggcccacacattgtaccataccccttttgtcagctgtcaacattagcttgtcgtcacctagtcccaggaatgactccctaaattacataatgaacatatcccaaaggtattgcccaaactgaactcaaaagcaaactttatatgtccttctctttttcttataggaataaacagttgtgagaaaaagaagacacagtttctacagttcgtacatctatctcagacatttatccagtgccagaacagctatgagggactttggctaaaagctggtcagatgagggggaaaaacaaaaaagccacaaaatctattttaactgccttgataacaaacattgattaggcagggcctcaatacatataaaaccatgttggaataaaggctaaagtagcaaattaataaatttgctttaaagctcattcttgtatattttcttttgtcttccaggcaaggtctgtggtgcactcatttaggaggcaaataaggcctgttcaactggtttcagtgctggaaaataatttagtactttgcagaaacattttttccatggactaaccacaatccctcttgtaatcctaaaatagagagttataacacctgcattatataagacaaaactaaatggaagtatattttttttctcaaatatatggatcctttcccccaacctgctttaatttggtgaaactggttactttccccagtctctagcctgcagtagttaccacattccatcttaatgaagaatgtaaaacagcaggcttggaagcagcaggcaatggtaaaattcccaaacaatttatgtcagaaaacaggaaattgaaaataaaaacgaaggcattgtttggatgtttgaagaaatatgttttgccttgaccaatcatgctgcccaagtcttcagcatggggacagatgcgcagctgattatctttgctcttagcagcacttatgttgtggcaacagggcaaacagaataggttctggcaaataggaaggatatagtggggccaaacaggacatggtgaacagtctgagagggagtgttctcagcaaattcagtgctgataatgaatttgcctttctggggggaaaagtaagctggtcaggaacgagatgggattaaaactatttttgtccttcagaaagaataaaacacaaagcttcccccacatcttgaaattttaggtgatgaaatttctgaagttaacttgaaatgtttaagtgtatacaccactgagaattatggtctctttattaggacccaagggaaaatgatgaatgtaatggaacattctagaacattagtacaaatttttttttttttagttgggtgygcaggagatgtttcccaccccgccccctgcccgccccaccatccaaagacagctgtctccagggtcctcctgtttgtgtcagctgttttcatgatggatatttcatgatggaccaatgtttcacactggtctctttgggagggaatctgcattggtcattaataagctgggtgcagggaagccattttacatgcggaaatacaattacagagaggaagaggggaaaaaatgagccacggaaagaactatatatgcaaatatatatg

SEQ ID NO: 46652 - DNA, 497 bp, Homo sapiens
aagagaaaatatcatggcttagtgagtctaataaatataattcacttttcaatcccattgaaatagtaaattttctcctctatatttaaaggaccgatttttaatgataacaataataaattgaaagataacttttatgagaatactagatctttctacgagactttattttctcaagttttagtaagagggaatggtaatgtgtatttacaaaaacatatcaaatctctatctttgtgctctggattctgatataaattaacattcttttagcagcaatagaaacraaatcttagggactagaggctactttgttctattcaagggagggaggaaggggccctaaaccaaaggacttaggagaaggtagagaagatgggaaagggagctatggcagtatctgaggaaatgctctccacactcaacagggccaagaggatggggaggagaaaagagcagtagaagggatgcagcttgaatcttggaatatgatgtct

SEQ ID NO: 46653 - DNA, 612 bp, Homo sapiens
tctgttaaaaaaaaattagggtcatcagtatcatttttaaaatcctagccataataaaaagtggtgaaaagacatgtcaagcaaactccgaaatgtggaagatgcagatgaggatcaatgattagtatttaagagtgtctactcacatwtgatgatgctgtagtgggtaaatgtgagacacagatgaaacataagaatcagagtacactaaagtagtagttaccaaaccttagggatttcaaaaaacaggtaaagtaaaaaagagaaaagttggaatgaaagaggtgtcaaattttaattttgacacaaagggatattaagaactaaaaacaattactatcactgtaatttcatcagaacatcttaacataaaaaattacctaatttcacaataaagggcagtcatttttaagtaaatttagatccatgagcacctcattatatacaaacagttcaacaaaaatttaagatctaaatgtgaactcttaaaagatgctctgaaagaatttttataaccccagtatagagaaggctttctccaaaagaatgatacatttgatattaaaattaaaaaacttctagtcattaaaagacaacatatttaaagtgaaa

SEQ ID NO: 46654 - DNA, 1912 bp, Homo sapiens
ttaactcttgggcactctcagcctgccctaaggactgaacagcgctgcatccagagagtcctttgactgagaaacgcagggagccagacacatgtctgtgatgactcttgggctgtccagggaatatgaatggaatattcacaacatctgctataagaactatttacatttcattgatgaggaaatcaagccccaaatatttgagcaacttcactgaaatgacagggcgaatttaaggccacatctttaaacccagatctgatgggagctcacccccaccgcttctgtgytgtgtgtgaagctgccctttatctctatcttgcctcttgctgctgggcagtgaagataaaaggtgtggctatgcctcctgcagaagagaagcagggaagaaatactacatacatgtgtggacatcaagagccttgggaaatgggtggcagtctatcatggagacgacttttacacaaaaagtgtggcctgtgccaggtaaaatctgggaaatgcttaagagctttaacaccatctcctaattgaagtcagcattgaagatgtcagtggacacaactgtgaagtcatagtctaacagctttggatgacttttgtgtcatctgagtacattcctttgtcttcaatctttcagcatccaagtgggagctggataaaaggaggaacagactccagccacaatatcttttgaaaaccagagcagtgagaaaaacattcatttgcactgggctgttgcacttaccttgaactgtgagacgtatgcgcgaagctacaatggagtgaacctctgtgggaagggggccaaaccttgggcatcactccgctcccactgatgtggcttccaacagttgcttctaatggatgggatctcatgaagttacagtgaaaaaatgccatcttgcatacacttcttgtgacatatacaaaaaaaagttactctcaaggtgtgacacctggagatccacatgtacagtgaccagctttcatcggccaaagacaaccaaggactcatggagtggaaaaaggaggttgactgtgttgagaatatgaaggttgaatgggacttaagctcattggcaaaggtcataaaaagatgctagtttgaatgacaactcagtgactctcactgagagaatagaagcctgccagctttcattgccatgttagattcactgtttgtaacaagtatattttttctttaagcaaataataaaaatattcacattgggaaatacaaagaaaaaaagaaaataagaattaaggtaatcttgtcacccagtattaaaatatatattctgatgtataattatacacatgtattccaatgtgtaattatacatatattatacacaaataaatatattatttgtgtttatatagatatgtatatgtaatcatatatatcatatgttatcatatatatattcatatatatctgtgtatatacatatatatcttcttcattggagaatacctgtgtaatttttataatcttggagcagattgtacacaaatttttataatattactttttcactcaattatatttatttcttaccttaattttgtgttaaaagcatttatatgctcttacattacttggaaataacaactgagactctgtgccttatcaaaggagaggttctgctttctgaataacagccaagcttatatattctggtgttgttttagttcttttaaattttcttgcatttcatcctttcttcttgttatatcatctttgatagttgggttgattctaccaattggttataccctaaaatcagactcatattcatatctaacaactgaaaaatcaggcatttgctaactttagggttagtgcaattgcagatatagggatgtgttcagaggacagctggggaatacgtggggatcactcaga

SEQ ID NO: 46655 - DNA, 1912 bp, Homo sapiens
ttaactcttgggcactctcagcctgccctaaggactgaacagcgctgcatccagagagtcctttgactgagaaacgcagggagccagacacatgtctgtgatgactcttgggctgtccagggaatatgaatggaatattcacaacatctgctataagaactatttacatttcattgatgaggaaatcaagccccaaatatttgagcaacttcactgaaatgacagggcgaatttaaggccacatctttaaacccagatctgatgggagctcacccccaccgcttctgtgttgtgtgtgaagctgccctttatctctatcttgcctcttgctgctgggcagtgaagataaaaggtgtggctatgcctcctgcagaagagaagcagggaagaaatactacatacatgtgtggacatcaagagccttgggaaatgggtggcagtctatcatggagacgacttttacacaaaaagtgtggcctgtgccaggtaaaatctgggaaatgcttaagagctttaacaccatctcctaattgaagtcagcattgaagatgtcagtggacacaactgtgaagtcatagtctaacagctttggatgacttttgtgtcatctgagtacattcctttgtcttcaatctttcagcatccaagtgggagctggataaaaggaggaacagactccagccacaatatcttttgaaaaccagagcagtgagaaaaacattcatttgcactgggctgttgcacttaccttgaactgtgagacgtatgcgcgaagctacaatggagtgaacctctgtgggaagggggccaaaccttgggcatcactccgctcccactgatgtggcttccaacagttgcttctaatggatgggatctcatgaagttacagtgaaaaaatgccatcttgcatacacttcttgtgacatatacaaaaaaaagttactctcaaggtgtgacacctggagatccacatgtacagtgaccagctttcatcggccaaagacaaccaaggactcatggagtggaaaaaggaggttgactgtgttgagaatatgaaggttgaatgggacttaagctcattggcaaaggtcataaaaagatgctagtttgaatgacaactcagtgactctcactgagagaatagaagcctgccagctttcattgccatgttagattcactgtttgtaacaagtatattttttctttaagcaaataataaaaatattcacattgggaaatacaaagaaaaaaagaaaataagaattaaggtaatcttgtcacccagtattaaaatatatattctgatgtataattatacacatgtattccaatgtgtaattatacatrtattatacacaaataaatatattatttgtgtttatatagatatgtatatgtaatcatatatatcatatgttatcatatatatattcatatatatctgtgtatatacatatatatcttcttcattggagaatacctgtgtaatttttataatcttggagcagattgtacacaaatttttataatattactttttcactcaattatatttatttcttaccttaattttgtgttaaaagcatttatatgctcttacattacttggaaataacaactgagactctgtgccttatcaaaggagaggttctgctttctgaataacagccaagcttatatattctggtgttgttttagttcttttaaattttcttgcatttcatcctttcttcttgttatatcatctttgatagttgggttgattctaccaattggttataccctaaaatcagactcatattcatatctaacaactgaaaaatcaggcatttgctaactttagggttagtgcaattgcagatatagggatgtgttcagaggacagctggggaatacgtggggatcactcaga

SEQ ID NO: 46656 - DNA, 1912 bp, Homo sapiens
ttaactcttgggcactctcagcctgccctaaggactgaacagcgctgcatccagagagtcctttgactgagaaacgcagggagccagacacatgtctgtgatgactcttgggctgtccagggaatatgaatggaatattcacaacatctgctataagaactatttacatttcattgatgaggaaatcaagccccaaatatttgagcaacttcactgaaatgacagggcgaatttaaggccacatctttaaacccagatctgatgggagctcacccccaccgcttctgtgttgtgtgtgaagctgccctttatctctatcttgcctcttgctgctgggcagtgaagataaaaggtgtggctatgcctcctgcagaagagaagcagggaagaaatactacatacatgtgtggacatcaagagccttgggaaatgggtggcagtctatcatggagacgacttttacacaaaaagtgtggcctgtgccaggtaaaatctgggaaatgcttaagagctttaacaccatctcctaattgaagtcagcattgaagatgtcagtggacacaactgtgaagtcatagtctaacagctttggatgacttttgtgtcatctgagtacattcctttgtcttcaatctttcagcatccaagtgggagctggataaaaggaggaacagactccagccacaatatcttttgaaaaccagagcagtgagaaaaacattcatttgcactgggctgttgcacttaccttgaactgtgagacgtatgcgcgaagctacaatggagtgaacctctgtgggaagggggccaaaccttgggcatcactccgctcccactgatgtggcttccaacagttgcttctaatggatgggatctcatgaagttacagtgaaaaaatgccatcttgcatacacttcttgtgacatatacaaaaaaaagttactctcaaggtgtgacacctggagatccacatgtacagtgaccagctttcatcggccaaagacaaccaaggactcatggagtggaaaaaggaggttgactgtgttgagaatatgaaggttgaatgggacttaagctcattggcaaaggtcataaaaagatgctagtttgaatgacaactcagtgactctcactgagagaatagaagcctgccagctttcattgccatgttagattcactgtttgtaacaagtatattttttctttaagcaaataataaaaatattcacattgggaaatacaaagaaaaaaagaaaataagaattaaggtaatcttgtcacccagtattaaaatatatattctgatgtataattatacacatgtattccaatgtgtaattatacatatattatacacaaataaatatattatttgtgtttatatagatatgtatatgtaatcatatatatcatatgttatcatatatatattcatatatatctgtgtatatacatatatatcttcttcattggagaatacctgtgtaatttttataatcttggagcagattgtacacaaatttttataatattactttttcactcaattatatttatttcttaccttaattttrtgttaaaagcatttatatgctcttacattacttggaaataacaactgagactctgtgccttatcaaaggagaggttctgctttctgaataacagccaagcttatatattctggtgttgttttagttcttttaaattttcttgcatttcatcctttcttcttgttatatcatctttgatagttgggttgattctaccaattggttataccctaaaatcagactcatattcatatctaacaactgaaaaatcaggcatttgctaactttagggttagtgcaattgcagatatagggatgtgttcagaggacagctggggaatacgtggggatcactcaga

SEQ ID NO: 46657 - DNA, 528 bp, Homo sapiens
cagcactttgggaggccgaagtgggtggatcacgaggtcaggagatcgagaccatcctggctaacacggtgaaaccccgtctctactaaaaacattaaaaaaaattagcygggcgtggtggcgggtgcctgtagtcccggctactcaggaggttgaggcaggagaatggcgtgaacccgggaggtggagcttgcagtgagccgagatcgcaccactgcactctagcctgggagacagagagagactccgtctcaaataaaataaaataaaataaaaataataaaataaaataaaataatataaaataaaataaaatattagggagtaatgaggcatcatggaggcaacttactcataagtggttcaggaaagggggaaattctttgtatatcattgtaacttttctataccgttgaaattatttcaaaagaaaaagacaaggaaggagtgaatgaaatccctgaggcagtggagaatgagaggaggttgaggcagtgcaatatcaaccactgacaccaaagggttcca

SEQ ID NO: 46658 - DNA, 570 bp, Homo sapiens
ggtccaaatctggtccatcactctgtttttataaataaagttgtattgaaacacagccatgaccatttattaacatattttccatggatacttttgctcaaaatctgcagagatgagtatttgaaacagaggttttatgtattgcaaaacgtaaaatatttgcaatactgctaccttattctcaaaaaaacccacaaactttgctgagctctgcttgctctagcttagacatacttaaaaggagcttcacgtattcaaagtgactaatatcatcaaatgtgcaatgaagagtaaaagaagttcaagctctgggaacatacatcatgaaacatttgagtgtgaaatgctgtaagtgtttacacatcctcattgtgatttgactgtgggagccatgagaccattttgtttaaaataaatggtgccyctccagctgctgaaaccagctctgttctcgttgtatcttttttcaggaattctaaatgttttaataaagtactggtttgttttatcttagatttccaattaaattgccatttcctaggaagaagattttgaagccaaatggaccct

SEQ ID NO: 46659 - DNA, 552 bp, Homo sapiens
ccgattgtttgaagaaaagaggtaccgagaaatgaggagaaagaatatcattggtcaagtttgtgatacgcctaagtcctatgataatgttatgcacgttggcttgaggaaggtgaccttcaaatggcaaagaggaaacaaaattggtaaggaaattaaggagcatgatgtcaagatagtccctgttagaagtagcaatagttatacttctttaggttgaatcctatagagttggcccttttttcttgtagacatagcaagtatgcattgttatctttttgcaaagtggtctggattttttttggttgtttaatttgtaaaatgtattctaagagcaatacaaaatgagattttagaatgagaaagagatttctaaatgattcattgcattggattsttttgcttaataaccctggaatttgccagtggagaggtaccaaaatttgacccatttgttctagtttctctctctctctctacacacgcgcgcgcacacacacacacacacacacacacacacgcagaacgtgatttgaagagagactggataca

SEQ ID NO: 46660 - DNA, 606 bp, Homo sapiens
aatgagttatacctccaggaagtgttttcactctcaggaacaggaaagatttattctaagatgtcatgactgtgtgtagatccatataaaatctaaataataataataataaccctcaaaagtcatttgagccatratagaaatgctgattataagccattcagtcacatacatgtagcttaaaaataaataactttctgcatgaattttatggccgaagcacaaactttgggttgattcttgtcagaaacaaaatttcataggcaaatttttctcaagcatgtgtcagagtttccaaaaaaatatgctggtctagagaaggtataaacatcgagggaaaattaagtgaggatacagaatgcctatagaagcagctggttttttctttcttctttattacagtaaagagatcgcgttttagtttgcaaggtcataaaatcatgatgtccagatcagttgttaaaaggaagtcagtggcaggtgcgggatgccaggtgtgctggctgccagtgagaaggaagaggagtcgctggaaaagccaatgataagtacacctgtgtttgagattgctgtaacaaggtttcatccccatctaatagggccaat

SEQ ID NO: 46661 - DNA, 553 bp, Homo sapiens
gtcttgaaacaagactcaaggacaataactgttcaggaggatgatcttaaggtccttttctattattcataatactaagcttaaatatatatataatatatatactttttaratctcatatgatttttgttataaatagctatttttaactatggtaaaacttagcacaggtaatcataaacaagttaccttataacttcatgacttttatttttagcagaataaatacatttactggagaattcttaagacaacagatatgaaaccgcaatgaaaatgtaaactgttcttattacttgttgtgatgaaaagtaaatgaaaccaccatgaaaatgcaaagtgtccttgttgcttgttatgataaaaagtaaatagtagcgcctggagtcattgtccgtctataaaaggtattcagtaaatgttgtctatatttgagtaaagatgagaataagtagtagttcaattttcccatgtctatgccacagaatatagccatcaaatacattataggcaaaaaaccagataatcatatatgcattctatgaaaacattt

SEQ ID NO: 46662 - DNA, 1625 bp, Homo sapiens
tgcatcctgcccctgggactcctctgccagagcctgagagctttctcctgcccacaggctaggggtagggcagttggaattgatccatgccttctagctagactgtgggtcccctcagtcttgggcatggtgacagcccagcatcagacagaggtcagtatcaaactagaaaatttaataaatactgtcagatttgtagacccaagaaaatataaactgccaatcacggaggaaaaaaatctctcaatgatcttatctttatatgattcccttgctgcctggagattgacatttccttggggataatctggtcataggattggtgaaggtggaagggaggcaacctccaaaggtggggccctctgctcacctgggacagggagggcctgaggtaggtgtctgtgtgggctggggaggaggatgggagcagtgcttctagatgtttccactttctcctcattagataataacgaatgggtgatttccctagtcactgcagtgtgaggaaatctacaaaattaatttcacaatacgctttacaggataggtggagaaacacatgaagtacaactgcagtgggttataaaaaacggcctttcgagttgagcaataaattcgttcaagcagccattctgaaggacaaactggctctgtatttaagaggggcattccagcacttctctagccactgggttgacaatgactcaccaaagcctctggtagccaccacaggacacccagagcatatgttttaaagctgaacaccaaactgcggacttcgggagtaagtgaactgactggtttttattttgttttactgcttttaacattacagtaactgttacaggttccagcaggctaactgggtggaaatgagtttggtttcacttagtctctctaaagagaaagcaagtcggtagactaatacctaataaaagcaaagctgccaacaattgaaattgcctaggctgctctgtgtgtcccacatgcatgggtgtgggtgccagtgtgtgtgcgtgtgtgcatgcatgtgcatgtgtgttgggatagagtggtaagaaaatgggaaataataagaatgttcagtccatagcccttcattataaaaaggtgagctgtaataaatactagtgccacatttagccaaaactttactccagccaaaggtgatattttcatgataacatcctgtgattgctttgttcttcgtcttttatgttcttcctagatgggctcagaacatacaagaattaagtacacatcttattttccagtgataatgctaccggcaaattctgttgtttgtataaacatcagccatgtttatataactaaactagtgttttgttttgtcaattcagcaagaaattagaccaaatggtggcttaatgctgcattgatttggctatcaatttgttttcacttttctgcaaaataattaatacattattaaattgaattgtgctgatgccacagttgttcttatctcaagtgtcttaaaattcatttaatttgttttycctttggtttcattattcaaattttaacttcagttctcaagattttatctgatggaagagatggagtccattactaaggactccattgtgctccatcatgccaga

SEQ ID NO: 46663 - DNA, 607 bp, Homo sapiens
atgctataccttggattgccaacttgccctcactgaagccagtttctctggttagaatagttgcccaaacccatgcctaatactctagtaaacaaggttctacctgggcttaggttaacttttgctcctttgggccctgtgttctaccagcattccatttatctgaaactctccctcaccttaagaacttatctgttctttaatgatttactgctgcttcctgggctcgaaagaacccagttcaggagtttctgttttagtttgagatcttataggcctgtctcatcaggttggtgtcagcccagctaggattaggcagaattgggtgggggctgtagtgcayttttggcacagcatgtacctgtctgactaattctctgtcttttctttcctgttgcaattcatgggtcttagcatcttctgaatggtgtttagtaggtcatcctgttgatttcctgctagggagtagcatactctggctctgtaccactggccaagggacttaaggatagatgaagggctgcagttttgttaaatggaacaatatgaagagatggcattgttaaaaaaaaaaaaaaaaggcttggcagcagggcccatttgaatg

SEQ ID NO: 46664 - DNA, 587 bp, Homo sapiens
aaggatctcttgagcccaggagtttgaggctgcagtgagttcygatcatatcactgcactccagcctgggtgacagagtaagaccctgtctctaaaaaaaaactaataataaaataaaatgcttgaaggagtgtcttactcataataaatgctatatattggctattattacttttatcctatcacttgcatttgtattttaagtctctctaatttagatggaaaggttttgtctgtattactggaatttgaaatatcagtgaacagatgttgaagaatattttgggagactcctgaaataagactttgtaggcaaccacctactcaccaagtctagcatgctttttctactaagggctgcacgcccaggcagaaattatcaagctttctttgaacaccaaagaaaggtacacctacttggccagctgtgaaggattttatatggctcatatgtgctcaaacatctatttgctggattctaatatacatgttaattcaatcaagattggggtatctacccatgagggaggggaactgaagccaccccatggagataattctactcccttggcccaatcctcatgcca

SEQ ID NO: 46665 - DNA, 552 bp, Homo sapiens
ttcagtattgtgagaagactaataagcatcattgtaactttataccattacgcttggagtggtttgttacacagcaatagatagctgatatacaaagtgatcttccaatacgaatattatgtcagttctccacttgacagcatttaatgatttagaattgagtgtaaaagtcaaaacccaattctgaatccatctgacaagggattaataactagagtacataaagagctcaggtggaaaaaaaaataaatgggaaaaaatataataaactgattttaaaatgggcaaaagatcagaatagatatttctcaaaagaagacatacaaattgcaaacagrtatataaaaaggtgctcaacatcatcgatcatcagagaaatgcaaatcaaaactacaatgagctatcatcctaccccagttaaaatggcttatatccaaaagacaggcaataccaaatgctattgaggatgtggagaaaagggaaccctgatacactgttgatgggaacgtaaattagtacaaccactacggagaacggtttggagggtcctca

SEQ ID NO: 46666 - DNA, 509 bp, Homo sapiens
aaagaaacatactagtgatatcttcagaatgttcttatctttaaatcattcactctagaggagtgccagggattttaagccctgtaaatatcttctagttttctctcccaattccctcctcttaaagaaatccttgttttcctttttagggtaaaccatccatctgtgccttttcacctctttttaaaatttgttttcaatttatcaccaratataaaggacatcccatctatctgctaaaggactcctgctcaaatatgctcaattctaaatgatttatttcacccttttcactccagggtgcttccatggtacgctgcacttccccacatcactgccagctcctccaaagggccctctctttgtgagtcctaaacctcctcagcacaccatcccttgcaatctggcttccatttgtttatttgcatcatagtagcgcagccaaaggcttttgtttttatatccatccatccatccacctgaaaaagatttattgttagatgcctgtt

SEQ ID NO: 46667 - DNA, 618 bp, Homo sapiens
gatttttaggagaataacagtgactacaaccaagtaaaaacaggactaagagtaacatgtttgagaaaaaagtgataaaagcaatggtacagcaatggagcagtggagcaagtggaaaataaagtttgaaagataaatttgaaaaagactaygcaaagtttgaaaggtcagtctagatccactctttgaaggttgaaaattaaataaataaataaaaagaagaaacaaaatgtcagtctataaattttaaaatttgctgtgtaaattgtggtagtccctgaagtttctgagataaaattaacatgaaaaaattgtatctgaacatcctgcaactctctcttcaccacattcacacaactcatttgcatgtaagttttcagatccctttaatatgtttaatatgttttactgaaaaggcaatgactgatgaatatagccagaaagaataggattgacaatagggatgaataaactttaatgctttaaaatcttcgattatgggccgggcgcggtggctcacgcctgtaatcccagcactttgggaggccgaggcgggtggatcatgaggtcaggagatcgagaccatcctggctaacaaggtgaaaccccgtctctact

SEQ ID NO: 46668 - DNA, 610 bp, Homo sapiens
tacatgagtacagatggttaccaaagtaaggatctaaaaytggactctgctgtactcacatcgaagctcccaatgtacgaagggatgaccttccttcaatggctttatgcaagggtcaaaatgtatttgaactctggagcagaaaagcactgctctataggatttccaagtgttcattatttaggaggtcaggaacgatgggagcatgtggcaatccagacagctgcagtccccacagacctaaaagaaaacagctgccagagcagccatttctatacaaaatgtctcatgaccagaagctatggaaataaacggctagaggcagctgtgcttccctcttgctaaacactcaaagattccatttttaacacaggatgtctattattaagacaatcagctaagatgtcaattcaaaagccacaaagttctgcaacataaatactgtactgacttctctcttctgttgtgtgggaccatggcttctttccctgtatgctggggacactacttcagaataatcaagtgaaaatactgcttttttatggtaactctccattcaagaacttattataatagtgttataaaaagactgtaatcttatcataggctg

SEQ ID NO: 46669 - DNA, 613 bp, Homo sapiens
actatcgcaaggacaaaaaaccaaacaccgcatgttctcactcataggtgggaattgaacaataagaacacttggacacaggaaggggaacatcacacaccggggcctgtcatggggtggtgggaggagggagggatagcrttaggagatatacctaatgtaaatgaccagttaacgggtgcagcacaccaacatggcacatgtatacatatgtaaccaacctgcacgttgtgcacatgtaccctaaaacttaaagtataataataaaaaaatttttaaaaatcccctgtcagtcctctctgcccacccttttgacatttgatggtaaagcccaatctttcctctgcccacattagtcagtgatttctttaaatttcatttataacgatccctaaacctcataattccgcaaccaattacatgctagtacacgtgattctctaatctgtgtattttaatctcatctcctaagaacacggtggcaagatctgtgttatttactttgaggctgcatcccatttttttcttttgtgtttttttaattgaagtgaaatttgcatgtaataaaattcacccttttcagtgtacatttctatgagttctaagaaatgca

SEQ ID NO: 46670 - DNA, 568 bp, Homo sapiens
aatctataacatcttaagaaattatatactgttctagatcattatttataatagttgtataaaagttcagtgcttacaaataataaaatamtttattttattaaactatccctattattggatattttggttatctctgacatagtggctttatcatcaataaccttttgatttgctcattccagtacataattaatttttatgttagtacataaatttttgaaaattattagaaatagccagattttaatattttctattcttacataaaaatttaccttaattttgctcatccacacaatgtaccacaatatttgacctaagccttgtggaatcattcattttcctagtatttcattctttaattttttacctacttgctaatgcctcttttctacactccttcttgctcttatcctttgtcttcctaaaaatctactcctaggcatttctttaacagggaggtaaaattagctagcaacaacttaatgttttcctttccaaggttattgcgttttaacagggttcaaaatcttatactaaccagctgaaactgtaatggaggaat

SEQ ID NO: 46671 - DNA, 594 bp, Homo sapiens
gagcctcactactggaggacaggaaccatggcctctctcccaggcaggcaatgcagggcacacagaaccagcagcctccctggactcacacccctgagcaaatctgcagctgacctgtggagtctctcttcctgatgtacccatgctggaagtggtaccattgcactttcagacattttttaaaaaagagttyccttgtttcctgaattaaatccccttccaaaccaggcactaaacatttggaaaactaggcccttgccccccaaaatagtgatattttctaattcaaattttcagcaccactgcactccagtctgggcgacagagtgagactccaactaaaaaaagaaaaaaaaaatttcatcagaggccaggcacagtggctcacgctgtaattccaccactttgggaggccgaggagagtggatcaccagaggtcaggagttcaagaccagcctggccaacattgtgaaactccgtctctactaaaaatacaaaattagccggacgtggtagcgtgtgactgcagtcctggctactcaggaggctgaggcagaagaattgcttgaacctgggaggcggagatggcagtga

SEQ ID NO: 46672 - DNA, 552 bp, Homo sapiens
tggtaagtttaagccaccaaaagtgtgattaaactagtagcaaggtaaattgktgagcactgtgctgttcttcaaaaccatctctgaatcagtgactacataggtggtcagccgtgaaggtaggactggtctgattctctgaggccaggtacatctatcagtaccaagaagttagaagtcttcctgctcgacgacctgccctgtcctctccctcagggatgctgtcaccaaaatcatagatttctctagcaacacggattgtgcttctcagacttgaatgtttgacgggatcttaagatgcaggttctgactcgaggtcatgggtggggctgagattctgcatttccagccagcagtgcccaggctgcaggtcaggaaaggcctcccggaggaataagaatctggagacagcaggaaagccacatggtcatttggcagaattccagtatggtctctgcacaggaaggtccttgactttatcaggggctattgtccatgagacccacagtgcagtgacgactcctgtgctttgtcccactcaggggaagggtg

SEQ ID NO: 46673 - DNA, 552 bp, Homo sapiens
tggtaagtttaagccaccaaaagtgtgattaaactagtagcaaggtaaattggtgagcactgtgctgttcttcaaaaccatctctgaatcagtgactacataggtggtcagccgtgaaggtaggactggtctgattctctgaggccaggtacatctatcagtaccaagaagttagaagtcttcctgctcgacgacctgccctgtcctctccctcagggatgctgtcaccaaaatcatagatttctctagcaacacggattgtgcttctcagacttgaatgtttgacgggatcttaagatgcaggttctgactcgaggycatgggtggggctgagattctgcatttccagccagcagtgcccaggctgcaggtcaggaaaggcctcccggaggaataagaatctggagacagcaggaaagccacatggtcatttggcagaattccagtatggtctctgcacaggaaggtccttgactttatcaggggctattgtccatgagacccacagtgcagtgacgactcctgtgctttgtcccactcaggggaagggtg

SEQ ID NO: 46674 - DNA, 575 bp, Homo sapiens
gtgaaacccctgtctctactaaaaatacaaaaattagctggccatggtggcacgcacctgtagtcccagctacttgggaggctaaggcaggagagccacttgaacctgggaggcagaggttgtggtgagctgagatcacgccactccagcccgggcaacagagcgagactctgtctcaaaaaaaaaagtaaaaatgattgtgataatggttgcrcaactccaaatataccaaaatcctttgtacacttaaatgagtgaattgtatggtatgtaaattatacctcaataaagctatcattaataaaagccaaaacaaaacctcagccctgcctaatcaccttgccatcctgtacaacctgagttcttagcttcatgtgctgttttcacaaatttttttttacttctgactctatccttattctcatctcccaaacctcaatttatattccatgaacatggaatttaaaatctaaatagaaggctgggcacagtggctcatgcctgtaatcctagctacttgggaggctgaggcacaagaattgcttgaacccgggaggcggaggttgcagtgagcc

SEQ ID NO: 46675 - DNA, 591 bp, Homo sapiens
gaggagatagcagcacaagtccacacattcttgaaggagaggaggggatctggaagaacaaaattggaaaggagcatcrcacacagacagctagcaacatacagagaaatactcaaaccctactagccatcagcaaactgcaggttcacctgacatcccatccagaggttttatatcctcaaaccacaaccaaaacatgtaaacccattgagtcagccgggctgcaccaggacggactctacttcagagatttctgtaacttcctgcttctggtaaagctgaaaacgccctcatgatggattttctgatggttttaacccaatgctaacaaccttccttggaacaggcactgctgaaaacagtgcaaagtcaccgccacttcctgggatcttagggggtgtttggtttttgagcaaaactgttttctgagattcacactcaagacctcatggggatcttacaaaggggacaaagaaccaaaatgtgtcctgtctctaactatgccaggcaggcagaggaaacaggccaggttctaacagcaagaggttgataaaaaggctcagttctatgagacaagacaaggtgtgtaac

SEQ ID NO: 46676 - DNA, 567 bp, Homo sapiens
tgacattttaacttgcatcaagtctcccaactcataagtatatttttccatttatgtggatctttaatttctcccagcaatgttttatatgcaaatgaatttttatacatataaactgtgagtaatttatatgcaaatagttaataaaactatgattatatgatttttttaaaagtctgcagttctaaatgaactgataaaagacctcgcatgaagggggagaagcactcagtaaacaatgtattaataacgggcactggacactcagaatcctcaagtactgtcataataatgagttcagttttaagtgcagtagaagccattagtgaagaaaaatgatattagacacaaagtttagtcggaatgcagtcttacatcctatccagtcttaaatccaaagacttgttccagggctccccacctgcactactccaacgtctttcttctttgtccatcaaggctgtcctgtygcttccaactgactgccactgcctgggctcaggtgccccttggcttgttcctgaaccactgaaacaatgtcctaactgacctctgtgcctcagtctg

SEQ ID NO: 46677 - DNA, 567 bp, Homo sapiens
tgacattttaacttgcatcaagtctcccaactcataagtatatttttccatttatgtggatctttaatttctcccagcaatgttttatatgcaaatgaatttttatacatataaactgtgagtaatttatatgcaaatagttaataaaactatgattatatgatttttttaaaagtctgcagttctaaatgaactgataaaagacctcgcatgaagggggagaagcactcagtaaacaatgtattaataacgggcactggacactcagaatcctcaagtactgtcataataatgagttcagttttaagtgcagtagaagccattagtgaagaaaaatgatattagacacaaagtttagtcggaatgcagtcttacatcctatccagtcttaaatccaaagacttgttccagggctccccacctgcactactccaacgtctttcttctttgtccatcaaggctgtcctgttgcttccaactgactgccactgcctgggctcaggtgccccttggcttgttcctgaaycactgaaacaatgtcctaactgacctctgtgcctcagtctg

SEQ ID NO: 46678 - DNA, 555 bp, Homo sapiens
ttaatcatttatttttacgatattttacaaaactttacatttgggatggattggaaattttataaaatcaaactggtcaatcaccactgacagtttgagaagcaatcttagcatcttcttgccttaatgaaacaaccgcacctgcaccatattgagtcctgacttttttccccagataatttattataaataatttctccaacttgctccatatctttataaccaccacttacaaggtttgcamaccttccatagagcagctgtactgagatttactcagccaattcccaaggttagacatgacgttatcacccatttcagggtcttagagaaactctgagtcactcacctttggtcacaaggctttctcaaacattttggatagaatgttcttagtttccattctcaccattatagttcaacttgctctttcattagaatttaggcatcaaggtcagaccagattgctggttggccacattctgtgttctcatggaaacaaaagatcagcggcactgaatccaaaccacccgagcaacccggcttttccagtcc

SEQ ID NO: 46679 - DNA, 555 bp, Homo sapiens
ttaatcatttatttttacgatattttacaaaactttacatttgggatggattggaaattttataaaatcaaactggtcaatcaccactgacagtttgagaagcaatcttagcatcttcttgccttaatgaaacaaccgcacctgcaccatattgagtcctgacttttttccccagataatttattataaataatttctccaacttgctccatatctttataaccaccacttacaaggtttgcacaccttccatagagcagctgtactgagatttactcagccaattcccaaggttagacatgacgttatcacccatttcagggtcttagagaaactctgagtcactcacctttggtcacaaggctttctcaaacattttggatagaatgttcttagtttccattctcaccattatagttcaacttgctctttcattagaatttaggcatcaaggtcagaccagattgctggttggccacattctgtgttctcatggaaacaaaagatcagcsgcactgaatccaaaccacccgagcaacccggcttttccagtcc

SEQ ID NO: 46680 - DNA, 594 bp, Homo sapiens
ttcctaattatttatttagaaacagagtctcactctgtcacccacactggagttcagtggtgcaatctcggcccactgcctcctgggttcaagcgattctcccgcctcagcctgctgagtagctgggattacaggcgcccaccaccatacctggctaatttttgcatttttagtagagaccagattttgccatgttggccaggctggtctcgaactcctggcctcaagcaatcagcttgcctcagcctttcaaagcggtgggattacgggcgtgagccaccatgcccagccagtatgtttctattttaaaataaagacatgaaraaattataaaatgtttctgacaatgaattaaggtgtatatgctatatggagcagcattaagccatttagttggttttctccttgtttgtatggaggagggaaacatgtcccttcttcagaaattttgttatctcaagctacctaacatgcaactgttgatctctgattagcaaatgcagagctgtacatcaccagtggcttttgtgctcaatgtttgtagacaattctactgatttttttttttcattgagtgaaggcgaagcatgtaac

SEQ ID NO: 46681 - DNA, 594 bp, Homo sapiens
ttcctaattatttatttagaaacagagtctcactctgtcacccacactggagttcagtggtgcaatctcggcccactgcctcctgggttcaagcgattctcccgcctcagcctgctgagtagctgggattacaggcgcccaccaccatacctggctaatttttgcatttttagtagagaccagattttgccatgttggccaggctggtctcgaactcctggcctcaagcaatcagcttgcctcagcctttcaaagcggtgggattacgggcgtgagccaccatgcccagccagtatgtttctattttaaaataaagacatgaagaaattataaaatgtttctgacaatgaattaaggtgtatatgctatatggagcagcattaagccatttagttggttttctccttgtttgtatggaggagggaaacatgtcccttcttcagaaattttgttatctcaagctacctaacatgcaactgttgatctctgattagcaaatgcagagctgtacatcaccagtkgcttttgtgctcaatgtttgtagacaattctactgatttttttttttcattgagtgaaggcgaagcatgtaac

SEQ ID NO: 46682 - DNA, 395 bp, Homo sapiens
ataaaaccatcagatcttgtgagacttattcactaccatgagaccaataggggggtaacaccaccatgattcacttatctctcactgggtcygtctcacaacatgtgggaattatgggagatacaattcaagatgacatttggatggtggacacagccaaactgtatcagttttctacaacttttataaatgcatagggtattacaaataccgtaaattagttggttaatatttagtatggtagaatatattctatctacattttctggggaaatcaaagttactttggtgtcataactcatttaagccaaattgattgggtttcatttttcataaaagatgcttcttttaagaatagtaaatatagcaaatcaataatattgatactgacatta

SEQ ID NO: 46683 - DNA, 580 bp, Homo sapiens
tgagactctatgataatgaacagtgttaaatgcctttacgtgaagttttgtaaagcttacaacagaagataaaatataagagatttaaaaaatcttcactgaagatagtttagggaaacttgaatggcttaatgaaagtgaggccactcattagagctggcttgaaaggcaaattctatgtataaaatttgcaaatgtgattcaagaaccaactggagttcctgatcaaaagaattcctgattctctttgttcatggagtctgaaatttcaacattgcwgacacattcagttgtctcatagggtcattgatcttcatgatttatgttaaaatgaatatacccctcaggggggtgacaccacaagcccttatcaactagtattttggaggagtatgacagctagatcagagtccaaatctgggtgaatatggcagaagattagtgttgcagcctatgagaaaagggacaagaaagggagaaaaattagaaaataattgggaaaacagagacagaaagtcagaaaggcaaagcttttagaaggacttcagggattattggttttcaatgactcttttaacat

SEQ ID NO: 46684 - DNA, 508 bp, Homo sapiens
cagtgtcacttggaggcttgttaaagcatagattgctggggctctcctcccrggattctgatgcagtatgtctggggtgaggcctgaaagttggtgtttccaacaagttcccaggtgatgaaatgctgctggttaggggaccatgctttcagcatcgctgtctttaaattaccccttcatccttacccctagatgagatgaatccctgattattatggaggtgttgggcctaaagataattgctccccttttgtagacagaggaaaagaaaataaagcagagattcaggtcgattatgaaagaggagacattaaaggcagcgtcgtgatgtaaaatgaatcagaatttggattcagaagatgtgggattgagtattgcctttgctggatgaatttagaggtgttattcaacctgtggttttttccgttgctgtgatttgaatgtttgtctccttcacaactcaggttgaagttcaatgccatcggtagagtaataagaagtggtgcct

SEQ ID NO: 46685 - DNA, 508 bp, Homo sapiens
cagtgtcacttggaggcttgttaaagcatagattgctggggctctcctcccaggattctgatgcagtakgtctggggtgaggcctgaaagttggtgtttccaacaagttcccaggtgatgaaatgctgctggttaggggaccatgctttcagcatcgctgtctttaaattaccccttcatccttacccctagatgagatgaatccctgattattatggaggtgttgggcctaaagataattgctccccttttgtagacagaggaaaagaaaataaagcagagattcaggtcgattatgaaagaggagacattaaaggcagcgtcgtgatgtaaaatgaatcagaatttggattcagaagatgtgggattgagtattgcctttgctggatgaatttagaggtgttattcaacctgtggttttttccgttgctgtgatttgaatgtttgtctccttcacaactcaggttgaagttcaatgccatcggtagagtaataagaagtggtgcct

SEQ ID NO: 46686 - DNA, 527 bp, Homo sapiens
cccttgggtcagcttctgggacttcatgaatactcagcacaaagggtggggggccccaagagatcccttcgtcccaaggcttccaagggtctccaccaactagatgttccagcccaatctctcccatgctcccatgggtctcctggatacttctttcccactggaaatggaggaggcagccatcaaagaagaaaggtagagacaggagcagaaagaaggggttctgaaaccctgagggtggggsgtttctgagaaagagtcagtcaccagcagcttgagaagtgggaagggagccttgaaaagtcccctaaacctgaacagagtccaagctctgcctcatgggcactgtgtcacctgagcaaggtactccactgccccaaagctcagtcttctgtaaaatgctgtgacttctctgttatcaccaaacacttctcattaggtattaaataaacttcacccaactatttattgtgagaattccgtgagatatcactagtgcacatagctcaggtcaagtgcatagtagg

SEQ ID NO: 46687 - DNA, 527 bp, Homo sapiens
cccttgggtcagcttctgggacttcatgaatactcagcacaaagggtggggggccccaagagatcccttcgtcccaaggcttccaagggtctccaccaactagatgttccagcccaatctctcccatgctcccatgggtctcctggatacttctttcccactggaaatggaggaggcagccatcaaagaagaaaggtagagacaggagcagaaagaaggggttctgaaaccctgagggtggggggtttctgagaaagagtcagtcaccagcagcttgagaagtgggaagggagccttgaaaagtcccctaaacctgaacrgagtccaagctctgcctcatgggcactgtgtcacctgagcaaggtactccactgccccaaagctcagtcttctgtaaaatgctgtgacttctctgttatcaccaaacacttctcattaggtattaaataaacttcacccaactatttattgtgagaattccgtgagatatcactagtgcacatagctcaggtcaagtgcatagtagg

SEQ ID NO: 46688 - DNA, 567 bp, Homo sapiens
tgtggggtggggcatgacaactcattggcatcttctctcaagcttggaaccagagtcacaaaaccagatgttttggttgaagggagtgtggtaagtggatttgataataaggaaggcatcaaaatgctytgcatggctggtatgggaatactggggtgccttttatcaactcttacctctaacccgactacctttgggaatactttagtagtaaataattattgtgttaaatcatgccatgtgattaatttggggaaacagaaaattatcttcatgtggaaaaacaataatagcatgtcttcaaactactcagtcaataaacatttcttatgttgagagtaattatatatatatatatttcacatttgagatagttcattcgataatcacttatttctatacaaaatgtggtaagaatattgggaaacatttgcccatgaataatacccacaacatgcctcttcaatttatagcctaatttgacttggcagacattttgcactcaaaagcgtgggattgagccaaatctaacctcaccacttttattttatcaaaacctggaatatt

SEQ ID NO: 46689 - DNA, 580 bp, Homo sapiens
gaggaaaaatgataagacacagttaggtagatatggcttgagacagcgtatccgatgtctatgaatccaaaagttcttatgtgtcccagtggtgctatgcaggaatgctctgaggactagtattctaagagagctggcatcaggacaggtgcagaatatgagcaatagttgccaacagagggtgtccacatagcccaagtctcacagcacatgtccagtgaccaggctggatggggccaactctgcagagaccagcaaggacccaaagagtagcaagaaaaccagagacttttttctcccttcatctgccattaccctgaggacacaaaagcttccctacacacactgtatccatccatctgaagaagccattttaaaaatgagaaagaaagagagaaacttcatagaaaaggaaaaaaaggtgstgaaaagaaatttgaccttgaaatttactaatcttttactctaatgaggctttctcaaaccaaaagaaaatagcttaatttaggtttcccccatcatcaccaacctcctttgcaaccaccagcagcaggaaaggagatttgaaagaaagcaagaa

SEQ ID NO: 46690 - DNA, 347 bp, Homo sapiens
tggcctagctttacagctagtagcaaaattcattgccttaacccagagcagtcttgttattttaacatggctgtttctatttataaagttacacaatccagttggttcattcttcctccctgtctgagacacagtttacaaaaagaaaccacagtcattacaaaaatacattgccaggaaatccaagtgttgttttctagtggaaactgaaagatccacaccttgacttatgtcttactcatcctaaatcacatctttgcagcactttctcctggctaaagaatgtgctctgaagttttactacgttcattagaaggccatcttttatattctgactawtcttgttg

SEQ ID NO: 46691 - DNA, 429 bp, Homo sapiens
cagctcttttccacgatggctttgcggttcttggaggaaacattgtgagcgatctcagcacagtaagatttgttttttctttgcagcacttccagctccttgacgtgtggaccaggaatttccggaagccactgggcagcatgtgctttgttttcttgttgctcccataatcaatgttgggcatcaagatctaacccttgaaccttccacgaaccctgttgtcaatacctctgggtttccgccggttacgcttaattttgacatatcggtcagactggtgccggataaacttcttggttctctttttgacgatcttgggcttcccaagggttctgaggacgggttataaaagtgcactgaggggaggctggagagaaaagaatcgcttgaacccgggaggtggaggttgcagtgagccragatcgtgcc

SEQ ID NO: 46692 - DNA, 701 bp, Homo sapiens
tgcataaatgacatttcagagcattgggcactcaaaagtacagtgacacagatagtaccagatactcacatccacacaaataattaccaatagtacatactaggaattgtggtttctatgagcttgattagttcagagtaaaaaataagagctggaataaataagttttacttatcaaaagaacaagtgttcacaatgaaagtccactgaaatgacacaattaaactataagatggcatattgtcttagtatatatctgagaagattaattttatttgtcaacttgatggggcyaagagatgctcagttaactggctaaaaatacttctgggcatgtcattctgaaagaaattgccatttggatcagtaaagaagattcactcttcccaatgtggccaggcattgtccaattcactggggccctgaatagaacaaaaagggtgaagaaggacaaattatctgtatctttccttgagctgggacacacatcttcccctcaggcaaaggaaatcctggttctcaggcctttagactccagggcagaggaacttaacaggagttctccccacccccgccatgttttcaggtcttcagccttgaactgaattacatcatttggtttcctagttcactaattttcactagtttccagcatccatatgacagattgtgggacttgtcagcctctataattgtgtgag

SEQ ID NO: 46693 - DNA, 701 bp, Homo sapiens
tgcataaatgacatttcagagcattgggcactcaaaagtacagtgacacagatagtaccagatactcacatccacacaaataattaccaatagtacatactaggaattgtggtttctatgagcttgattagttcagagtaaaaaataagagctggaataaataagttttacttatcaaaagaacaagtgttcacaatgaaagtccactgaaatgacacaattaaactataagatggcatattgtcttagtatatatctgagaagattaattttatttgtcaacttgatggggctaagagatgctcagttaactggctaaaaatacttctgggcatgtcattctgaaagaaattgccatttggatcagtaaagaagattcactcttcccaatgtggccaggcattgtccaattcaytggggccctgaatagaacaaaaagggtgaagaaggacaaattatctgtatctttccttgagctgggacacacatcttcccctcaggcaaaggaaatcctggttctcaggcctttagactccagggcagaggaacttaacaggagttctccccacccccgccatgttttcaggtcttcagccttgaactgaattacatcatttggtttcctagttcactaattttcactagtttccagcatccatatgacagattgtgggacttgtcagcctctataattgtgtgag

SEQ ID NO: 46694 - DNA, 581 bp, Homo sapiens
cctgacctcaggtgatctgcccacctcggcctcccaaagtgctgggattacagktgtgagccaccacccctggcctcatcaagaacattcttaagccaaattggtgtggttttgttttgttttgttttgttttaaaggggctgtaagtacacggtagtagagactatgattattcgtactgtttgaagccacagccttgattcttgctatagcccaccatttacatatcatttaatttattttgccattttatcaattttaccattttacccaccattgtttttaactgtgcaaatgttagcacagttaaaaagacaaagaatatcatggtatactatgaaaatagctttgacctcacaggccccatgcagaaaggtcctctggcctagctgcaagaacactgatactcaaactggggtctggggatccctgggggagaatcattgttctccgggctaagccagagtgcccggtaaacataattgctccagaaaatggcataaagggctgtcttgttcttatcagtgcatctcctctgataggaggctactttgattgctcattgagaatctctactgttt

SEQ ID NO: 46695 - DNA, 581 bp, Homo sapiens
cctgacctcaggtgatctgcccacctcggcctcccaaagtgctgggattacagttgtgagccaccacccctggcctcatcaagaacattcttaagccaaattggtgtggttttkttttgttttgttttgttttaaaggggctgtaagtacacggtagtagagactatgattattcgtactgtttgaagccacagccttgattcttgctatagcccaccatttacatatcatttaatttattttgccattttatcaattttaccattttacccaccattgtttttaactgtgcaaatgttagcacagttaaaaagacaaagaatatcatggtatactatgaaaatagctttgacctcacaggccccatgcagaaaggtcctctggcctagctgcaagaacactgatactcaaactggggtctggggatccctgggggagaatcattgttctccgggctaagccagagtgcccggtaaacataattgctccagaaaatggcataaagggctgtcttgttcttatcagtgcatctcctctgataggaggctactttgattgctcattgagaatctctactgttt

SEQ ID NO: 46696 - DNA, 581 bp, Homo sapiens
cctgacctcaggtgatctgcccacctcggcctcccaaagtgctgggattacagttgtgagccaccacccctggcctcatcaagaacattcttaagccaaattggtgtggttttgttttgttttgttttgttttaaaggggctgtaagtacacggtagtagagactatgattattcgtactgtttgaagccacagccttgattcttgctatagcccaccatttacatatcatttaatttattttgccattttatcaattttaccattttacccaccattgtttttaactgtgcaaatgttagcacagttaaaaagacaaagaatatcatggtatactatgaaaatagctttgacctcacaggccccwtgcagaaaggtcctctggcctagctgcaagaacactgatactcaaactggggtctggggatccctgggggagaatcattgttctccgggctaagccagagtgcccggtaaacataattgctccagaaaatggcataaagggctgtcttgttcttatcagtgcatctcctctgataggaggctactttgattgctcattgagaatctctactgttt

SEQ ID NO: 46697 - DNA, 587 bp, Homo sapiens
ggagcttgcccaagttcacccagctaataagtgagcttggagtagtgaaacagggtttctaaccttgtttatgtggcaccaaggcaatcatctcaactgttcctcaagatttgacaggtagaacrtagggaaggataaggagttcgttcaccaaggacattcagagctggaacttgaacccaggtctcctgactcccagtcttgcatctccatctcttaatattaacaacttttactctcactgcaatttggttacccctggggagggattcttggggagaaaatgaagaggctggaatagtgtgccttggtggttgggtttgggaggggctcaaggaagccagggacaagcaccagctctgtccccatctctggctaggccaagtggcacctcttgaccttggagcacaatgcctgtctcgacatgtttgagcacatgaacctcatgaccttggatagtctgcagaaatgtgtcttcagctttgacagccaatgtcaggagtgagtctttgcccagtggctgggaatttgagccatggacccaaaggagtaggctgggggagagagaactgatgagggcaagcaga

SEQ ID NO: 46698 - DNA, 587 bp, Homo sapiens
ggagcttgcccaagttcacccagctaataagtgagcttggagtagtgaaacagggtttctaaccttgtttatgtggcaccaaggcaatcatctcaactgttcctcaagatttgacaggtagaacatagggaaggataaggagttcgttcaccaaggacattcagagctggaacttgaacccaggtctcctgactcccagtcttgcatctccatctcttaatattaacaacttttactctcrctgcaatttggttacccctggggagggattcttggggagaaaatgaagaggctggaatagtgtgccttggtggttgggtttgggaggggctcaaggaagccagggacaagcaccagctctgtccccatctctggctaggccaagtggcacctcttgaccttggagcacaatgcctgtctcgacatgtttgagcacatgaacctcatgaccttggatagtctgcagaaatgtgtcttcagctttgacagccaatgtcaggagtgagtctttgcccagtggctgggaatttgagccatggacccaaaggagtaggctgggggagagagaactgatgagggcaagcaga

SEQ ID NO: 46699 - DNA, 587 bp, Homo sapiens
ggagcttgcccaagttcacccagctaataagtgagcttggagtagtgaaacagggtttctaaccttgtttatgtggcaccaaggcaatcatctcaactgttcctcaagatttgacaggtagaacatagggaaggataaggagttcgttcaccaaggacattcagagctggaacttgaacccaggtctcctgactcccagtcttgcatctccatctcttaatattaacaacttttactctcactgcaatttggttacccctggggagggattcttggggagaaaaygaagaggctggaatagtgtgccttggtggttgggtttgggaggggctcaaggaagccagggacaagcaccagctctgtccccatctctggctaggccaagtggcacctcttgaccttggagcacaatgcctgtctcgacatgtttgagcacatgaacctcatgaccttggatagtctgcagaaatgtgtcttcagctttgacagccaatgtcaggagtgagtctttgcccagtggctgggaatttgagccatggacccaaaggagtaggctgggggagagagaactgatgagggcaagcaga

SEQ ID NO: 46700 - DNA, 587 bp, Homo sapiens
ggagcttgcccaagttcacccagctaataagtgagcttggagtagtgaaacagggtttctaaccttgtttatgtggcaccaaggcaatcatctcaactgttcctcaagatttgacaggtagaacatagggaaggataaggagttcgttcaccaaggacattcagagctggaacttgaacccaggtctcctgactcccagtcttgcatctccatctcttaatattaacaacttttactctcactgcaatttggttacccctggggagggattcttggggagaaaatgaagaggctggaatagtgtgccttggtggttgggtttgggaggggctcaaggaagccagggacaagcaccagctctgtccccatctctggctaggccaagtggcacctcytgaccttggagcacaatgcctgtctcgacatgtttgagcacatgaacctcatgaccttggatagtctgcagaaatgtgtcttcagctttgacagccaatgtcaggagtgagtctttgcccagtggctgggaatttgagccatggacccaaaggagtaggctgggggagagagaactgatgagggcaagcaga

SEQ ID NO: 46701 - DNA, 581 bp, Homo sapiens
cacctaggctgtgtggtatagcttatggctcttaggctgcaaacctgcccagcatgtcactggactgaatgctgcaggcaactgtaacacaataagcatttgtgtttctaaacatagaaaaggtacagtacaaatatgatataatcttttgggaccactgttgtttatgccgtctgttgttgaccgaaacgtcattatacagagcatgactgtacttatctctctgagattcaatttctttgtttgtaakatggggataatgatgccaacctaataggtttgttttgcggatcaactgagataatatatgcaaagcacttggcataaagcctggcgcgtgataagaaccaaattaagaatggctgctattgaattgtggctgtggctgttaccaccttcgggactgtctttactgacgatgggattgagtggaaatttttcagccccccatcatctgacccaacctgcatttccaggcctccacgcctacgggatagcccggctgaatgacagcgttcccagtccagaatcccgcactaccagttcttcgtgctctgcccactggagggccctcttccccc

SEQ ID NO: 46702 - DNA, 543 bp, Homo sapiens
actagatgggctcaatagcagattttmagatagtggaagaaccagtgaacatgaaaatagaccaatagaaatgatccaatttgaaaaacagagagaaaaaaatgaagacaaatgaacagaccttcagacacacataggatgatgttaaatgtccccacatacatgtaatgggagccccaaaaagggagagaaaaaaatattgatgaaaaatattgaattgcagatttttttaaaaaaagctcaaccaacactgacttttaaaaaacagaaagagaaccatacagtaaggacaaagccagaagcatcacacttcctgtgttcaaattctattataaagctatagcaatcaaaacagagtactggcataaaaacacacatagagcaatggaacagaattgaaatcacagaaataaacccactcatataaggttaactaatcttctacaaaggtgtcaagaacaagaatgaggaaagaatagtatcttcaataaatggtgctggaaaaaaggacttcttcaatctaataaaggcacctgaaagaaa

SEQ ID NO: 46703 - DNA, 594 bp, Homo sapiens
taggtctctttatctgaggcctatgtagaggtcttcttcaggtgcctctgtcatggcctcctaataggagaggaagagaaagccttaaagacacttttctccactctgaatacccagtgagtttccactttctccttgcagggccccccaacagtgagacaaacccatgtctgcactaatccaactaacccttgaccagtgccatttccacagggaaaaatggaacagggggagtcagtaatttctctggctttagactcttgcttacactattaaaggaggtaattaaagacttaactctttccttttgggcttgttgctttaattggctcactacctgggtrcaatatacccatgtaacaaacctgcatatgtaccccctgtatctaaaataaaagttgaaattttaaaaagactaaatatgttaaaatgagtacctaagtcctcagcactctttttcagttctgctgagctcctgacactctagaataatcaaaacgttatttagaaagaacacacttggagtactttcactatctgacttcaagacttactataaacccacaataatcaaaggaatgtggtactggcaaa

SEQ ID NO: 46704 - DNA, 2572 bp, Homo sapiens
tgcatatgaataaagacaaagggctgctgagcaaatctgaatttaaatagaggtgttgtaggtataattaaccgtaacttattttttgaataagtaagaataaagtcactggctgcaaaggattattagagatgtattttccaaaattcatttatctggactccctctccccacctctaccccctgccaactgagcagacctcccactattaaaccaaaatgactactcaccctcaccccccagcagttataatacacaacatcactgccccaccagatcaggggaacagggcatttggcctgtggctctgcaatctttatcctaatcttgttccagcttcaagagcctaacagacgcctgtgatcacctgagacttcttaaacagcaccgatacttctatctggttggaaccttaaatgccaccactcttcagagacaaggttctcactagattctaaatctgttatttaaattacttttcaatttagaaaaggagagagagaagaaacttattagaataaggccacctaggaatgttcttaacctctccattgagcttttggctgatacacgaaactacacataataaatacaacttttcttccaggtgcacagctaaacaacagcttctggcacttgatctccagtgttcagaaagacgcactgcccagagtcaagctagtgtgtagatccagtggcctctgccaatgagggcttgccagtcatcagaggacagacaaataggatccagcaccagttattgggccttcccgcctgttgagtttcacaggcaggacgtgtgtgaggggagtagcccatacttctgttgaaagatggctgtagtactctttagggcacagatgatgacaaactttccaggaacagataagtcaactgcagtggagcccaggcaacattcagggctctggccaaccctgatgtgtcccgcatcaatgaatgaggacaatcaaagccagaggtcttgagactcctcaacattcagagaattggcctgggagctgaggctggcactggagagaacaacaggttccccaaacacttaggccaagtcttgcataaaggcatgattaggaatccaaatgcctacaagaggagtgaaggtgttcttcactccttcaggagttcaggtacttgtcccgctcttctaagcattccatcaccaggtcactggtcctggcaacaggtctttcaagagctccttgagtactctcccatggcaggaccttgtgcattcctgcatcctggcatggagtccggagcccggcatatgttaagtgttcagtacacatttcccattccagactccttggggagcctggacaagcccttcctgctctttctttaaatttttgctttaatttctagatgacggtttccagtctttctattgaatttttcaattctgctatcatgtttttaatttctaagaactttacttttgatctttgaatgttccttttagaaaaataacatgtattctattattacagatgtaatattttttatcttctctctctgagggtaatggttgatttaatgacattgtcttcttgccaaagagtctttttcttttatgtcactattttttcgtttttgtttatcttgctcactgtcttttagaatagattttttttaatggcttggmtcttttgaatatttaatctctgcttgcacttaagaattgtaaaatgctggttggcagctcattgacacccatggactcattgactctctagagcagtggttctcaaagtgtggtccatggagcagcagtgtcagcattcccgaggtgcttgttagacatgcatgttcttgagcccctctcagaccttctgaatcagaatctagagtgagacccagcaatctgcattttaatgcctccctcccaccataattgttattcatgctacagttggagaagtactgaaaattaagggtggtctgccttggtggcttcaatggggggatctgcatggcagtatcttagtgtctcttttggactgaccaggtatcacagtgtcatctctggctgccagactcctaagagcctactagagaaagaaggtggggaatctcacccttcagtatatgaacatttctttaacatcctgttttcaatttgaattccattttcaactgtgtctggtgtcattcaatccagagactgtttatctctctctagaatcagaccctgggtcttcagtcagatgacagagtggcagttcccttttgtccctcttgctggttctgctacatcttgccttcagttgtcttggtttcataatctcccatgttggctcccacattccacacagagcccccagagctctgcaggatcagctgctgcctgtgcctcctgaccctcctcttgcttcccacactccagcagaccaggctcccagccattcctggtcactgcagcagccctccttgctgagggccttggcatgtgctttcttctctagcaatgctttcttcttccatcctccttcacccagtctaattctttactacctgttaatggctgaaatgtgtttctctaaaagatgt

SEQ ID NO: 46705 - DNA, 608 bp, Homo sapiens
ttaatgaaagaaagttttccaaatctcttctttctaatgttcttctctggtttcttctcctctgctcacctcttaactccaaggcctcatctcagctacacttggggatattttccactccctgcwtggacccagagtccggctgaggtcatgtggcgaggtcagatattctgaaagttaatgcgtccccacttttgagtgccccttctgggtaggccattccaagaggggcttataggaagtgcaagggagacgggcttgagctgagttggacgcacagtgagggatatgtgtgtgagagacagagagagagagggagaggggagacagagagacacacagagagacagagacagagagagacagagacagagagacagagacataggggaacacaggcagagagagacagagacagagagacagagacataggggaacacaggcagagagagacagagctacagagagagacagagacagacagagacataggggaacacaggcagagagagacagagctacagagagagacagaggcacacagagagagacagaagcacacaaagagagacagagaccaacagagcattgacacaggtccacaga

SEQ ID NO: 46706 - DNA, 579 bp, Homo sapiens
gtgattataagtaagtgcatcagctccaggctccccagtgtcacatgcacacactatggggactgatcgtgttgattctcagtgaggtgtcttggggaccctgtcccagctgggaaggtagggatgtattagaaggcttggtgccaggtgcagaaaggggaagattctggaggccaggcacagtccatgagctgtagccagagayatggcatgagaataacatctaacttcccagaaaaacagcacagccaagccaggcatcagtcaaggatcacaggaggagagatttgcaggaaagcaaggttcctctacctgggtggcaaaatgccacagctgctgaggcttccttgactcttgcctgcttgaaactggcaaagcagtgactgctggtggctatgaatgcttgttaaatggcccattcttactccctgactggcctgtgcccaggacctctgcagttggatagaaagacagtgtctctagggtaaggcaggtcagaatcaaacacaaattccactcagtatgacctgtggctcctgtgcaagctaacgtcaccctctcagcctcagtttcatgatg

SEQ ID NO: 46707 - DNA, 539 bp, Homo sapiens
gtcaaagctaggattcagagtcagtattctcccctataaggtgaatactattgttatccccattttacaaatgaggaaacagaggctctgagattaaataacttgcttgagaccataaactagtacatgactgagtcaagatttaaactgaggcaggcagcctccaagtctatacttttaaccactacgcgatgctgcctctctagtgtggcaggaaggatttttgtttagtgctattctggaaaatcyatccatcattgattgtggcttcgaagcaagaaagttataatgaaggtgtacctttcagtcattttgctgacctaaagttctttaaaaaaggtttttatgcaactagaagttcccaacacattaaacaagttgtcactgatttactgcttagattaagaagctaatatatcgaaatgagctcattctagaaaatagctaattttaagaagagtcacagagatacaaaaagcaaaggtttttattttcccccaaggaaacctatgtaagaaaaaattaaatgtcatccttgc

SEQ ID NO: 46708 - DNA, 541 bp, Homo sapiens
actggttggatgagtgcctaagccaaagacaaacctacatgcgagtcactaagctgtgtatcagaacaaaggggaaatggttgccgggcagaccaacagccagtgtctactaccagcagcccctggtggcagctgtaccgttaagaaggcaaattaataacagtacctggggtgggaggatgctcatcttactcaataaaaactgcattcaggtaggactttttgacactaatcagtttgctaattataattattttcattaaagcaggtgctcaaaaactttccacttagcaatgcgttgttgatggtctgagtgactgtatgtggctgggggctttttaagttcaatttcytgatgagcctttgatcaataatttgaagcaattagggtcaagttctatctggatgtagttgtgctctgcctccattccttttcattctgttgttctgtgaacatgaagctgcccagcagctgccttaaggaagctgtgctgggcttgcatcagagtggcctcttaataatttgctcgtaaggaattta

SEQ ID NO: 46709 - DNA, 609 bp, Homo sapiens
catggaacatgaaaaactgaagtttaactgggcgcggtggatcacgcctgtaatcccagcactttgggaggctgaggcgggcggatcacctgaggtcaaaagttctagatcagcctggccaacatggtgaaaccccgtctctactaaaaatacaaaaattagttgggcatggtggtggacacctgtaatcccagctacttgggaggctgaggcaggaaaatcgcttgaacccrgaaggcggaggttgcagttacttctagaagaatttccattagccctttgaaatccttcaacattcatgaaggccaaagagttttcacctaatttaatctgatgggtatgtgaccagagtctttctagggaatagagactcccaaacagttcgactgggaagtgaggagagaatttattactcaaaaccaaagggaaatgaaaagaggccaacatagaatgtcattattctttcttggtggggaatggattccagagtcattctgtgacctttacatgacctccttattagcatctaaaagcttccagtgtaggatgcagccagctaggttctcttctaatgtaataaaatttgcttcggcaaatcttatgcagagc

SEQ ID NO: 46710 - DNA, 550 bp, Homo sapiens
tagtgcattttacaaggcaccattaatctctaagaagaacaattaaaatgtctcagcaatcatggttcactgtatatcttttctatcttcttagaagtaatatatggctggaaatgggcataccaaaatatgtcaaggaagtggaattgcgttcattagatttcaccastaattattttagttagcttcacagatctctcttccttgcttgttcttgagagcgaggctttttagtaggaagagaaattgtctaaaacgattaataaccacaaattcaccaaactattttgggtaagtccctctatttctctaggtctaaagctaggaataagagtcattctcatataatgtactgtcccagaaagggcattatattagtctgttttcacgctgctgataaagacatatccgggattgggtgatgtatttaaaaaaagaggtttaatggactcacagttccacatgcctggggaggcttcacaatcatggaggaaggtgaaaggcacatcttacatggtggcagacaagacagaattgagagccaatcaaa

SEQ ID NO: 46711 - DNA, 555 bp, Homo sapiens
ttttccctggccctggcttggagaatctgttttcaatctccactgattgcccccttgctggccagcccaggggcctttaccatgttctctccacatccgtaaataaacttccttcactacactgtaatctgtgagcatgcttcctctgccytggcctctcttgggccaagacctgctcctgggctcccaaatgctggctccagtcaaggcttcagtcgtggtcctctgggagcatccaggctggggtggtttggcaaggggcttactagaccatcatgtgcagagagcagcagagccccttgtacaaaaaccaggacccctgggttccctgtggataggatgagctgccaaggagatgtcactcttggcaccctccaagaatcattacggccgggtgcagtggctcatgcttgaaatcccagcactttgggaggccgaggcgggtgaatcacctgaggtcaggagttcgagaccagcctggccaacatggtgaaatcctgtctctactaaaaatacaaaattagccaggcatggtggcatgtgcctgtaatccca

SEQ ID NO: 46712 - DNA, 571 bp, Homo sapiens
gagtgctgttgtttttatcacaaaaaggtgttagatttttgtcaaatacttttttggcacctcagatgatcattgtggattttgtcctttatccaatttatatrgtatattacatttattgatttttggatattgagccaatcttcattattaggataaatccaactttgtcacagtgtgtaagtcttttttagatgtttccagattccattatctagtgtattgttgagaattgttatgtctataatcataaaggatagtgatctccaattttcttttcttgtgatagctttatttagttttgaaagttttttatttttaaagtgaactggtttgctaccccattttcaactttcctgttaacttctcagagaataatagccagaatctttaacctggtctgcaaaatgctgcaaagccatactcagttattgctggcttcctcacttctttttcctttcacattttagaacgttctctctttcctatatgtctgatatgtagtaggtgttcaattaaatttttattaagtaagcaatatttataattataattttctataattataagt

SEQ ID NO: 46713 - DNA, 591 bp, Homo sapiens
cacaaaagcaaggtgcagaggccgggggacatggagctacctgaaaatggagatctacagacttagggaccactcatggaggagaggagtcaagaggagcacccagccaccrtgcctggctgaacacacattactcagatggggacccaggaggaggaggagcaggttaggttggagtgccaggagctgcggggcaggtgtccagaaggcagatggatctatggagccagggttcagaagaatggcctaaatgtctttaatattctcaggattctacatgggagagggtggggactggggagtgagcctgcccaaacccatccccaatccaagactcgagggagaggccagaccatacacaccatgtccaggcacgttcctggtgttaccagaattagggggcatgggcctgcagttttggggaaggccctgggaccagttatggcgtgagggaggggggcaggaagcatgaggcctactgtgcctgggtcctcatgccccaaactgagctcctccaggcctgctctgccggcacggtcagaagattacaggcccttgggttgggagacagggctgtcactgatttgctgg

SEQ ID NO: 46714 - DNA, 551 bp, Homo sapiens
ggtgacactgttagactgtgccccagccaactctggccggggatacataaatatacaagactaaaaaaggaggatggcactggggtttccagacgcatcttgtaaggcagacagttgcccagcttaaaagtctgcaaaatctttctttaaaaacgtatgttttaatttgaggatattaattgcacggaaattatttgactgtatgatttataacccygccagaattctgcggtctttccctccacatgtgctgttgccattttcccttttgtacacctatcatttcccattgtttatcttccctgattgatgttcgggctcgggatgttttccattatgagattcataattatcactggtaatagagaaggcttccctattatcttcagtgagactgcccaaattattcatcgtaacccactggtaccacacggcaggaaaataagaatttatttcccatcccaggcatatggtagataagaggatgtatttatttctccatgtttcaaaaggattaagctttgaaaaaataaatatcacttaggctgtca

SEQ ID NO: 46715 - DNA, 633 bp, Homo sapiens
tgcatgggctcattgtcaatgtctttcatagttaccttagagtatgaaacaatctgtggtttgatttatccagataattacattggttctgcatttgacatatcagaggactaaaagttgtggttctgctgcagaccaaatgccctttggaaagtgacttttctccccatatgaactgaatagtggcagttcagcctcaaccacagctgaaygtgacccctctgctctcccactagctagcaagttcaaacttagcctctgggcctcataaatccagacatgtatcagttcatctccaaacacttggtatgtctgccccatcaattaaaaagcacaaggcaagtgagccactagaaagttcaagcatgattaggcagctaccgtgcattttcaaatccactttcaacatctccattattttaactaagacctctagttattagtcttattaaaagagaagaaagaagaagaaaaagaagacacaaacttgctttccagacaggttaatacaagcccttcctcagtgttctattcttgatttaaggaacattctcagagtgagagaagagttttgtgttgtatggaaaatttgactcaacccaaaaacccagccaacaccacaaagtggattgg

SEQ ID NO: 46716 - DNA, 633 bp, Homo sapiens
tgcatgggctcattgtcaatgtctttcatagttaccttagagtatgaaacaatctgtggtttgatttatccagataattacattggttctgcatttgacatatcagaggactaaaagttgtggttctgctgcagaccaaatgccctttggaaagtgacttttctccccatatgaactgaatagtggcagttcagcctcaaccacagctgaatgtgacccctctgctctcccactagctagcaagttcaaacttagcctctgggcctcataaatccagrcatgtatcagttcatctccaaacacttggtatgtctgccccatcaattaaaaagcacaaggcaagtgagccactagaaagttcaagcatgattaggcagctaccgtgcattttcaaatccactttcaacatctccattattttaactaagacctctagttattagtcttattaaaagagaagaaagaagaagaaaaagaagacacaaacttgctttccagacaggttaatacaagcccttcctcagtgttctattcttgatttaaggaacattctcagagtgagagaagagttttgtgttgtatggaaaatttgactcaacccaaaaacccagccaacaccacaaagtggattgg

SEQ ID NO: 46717 - DNA, 572 bp, Homo sapiens
gggttagagagattcactaaaggaaggggatgcaagtgacaacttacaagatctgaaaaacttcccatggctgtttggacataaagaacttgctgactaaktgaggaggtcacaggggagaaggagatggtaggaaagaaagactggagaatcaagacaggaaattgtgaatcaaaaatgaggaatgggagagggtgagtatgttccacactttatcaaagactggaggaggcgccagtggggacattgaacaggagtcagagggcaggttgaggtttggggtgtgtttactttcatttctggtttgtttcttaaagtggcacctctgtcagcatctcaactgtcctctctagccatcttcctacctggaataggaatttttaaatttaatttaattaatttatttattttgagatggagtcttgctctgttgcccaggctagagtgcaatggcatgatctcagctcactgcaacctccgcctccctggttcaagcaattctcctgtctcatcctcctgagtagctgggactacaggctcctgccaccacatctggctaatttttgtatttt

SEQ ID NO: 46718 - DNA, 572 bp, Homo sapiens
gggttagagagattcactaaaggaaggggatgcaagtgacaacttacaagatctgaaaaacttcccatggctgtttggacataaagaacttgctgactaattgaggaggtcacaggggagaaggagatggtaggaaagaaagactggagaatcaagacaggaaattgtgaatcaaaaatgaggaatgggagagggtgagtatgttccacactttatcaaagactggaggaggcgccagtggggacattgaacaggagtcagagggcaggttgaggtttggggtgtgtttactttcatttctggtttgtttcttaaagtggcacctctgtcagcatctcaactgtcctctctagccatcttcctacctggamtaggaatttttaaatttaatttaattaatttatttattttgagatggagtcttgctctgttgcccaggctagagtgcaatggcatgatctcagctcactgcaacctccgcctccctggttcaagcaattctcctgtctcatcctcctgagtagctgggactacaggctcctgccaccacatctggctaatttttgtatttt

SEQ ID NO: 46719 - DNA, 1180 bp, Homo sapiens
tacagctccctccctaatcttgctagaaggtagggctaatgcattgtcaattcagaaatagggggtgttcctgagtctggggacactctagtgaaattctatgtgtaaaataatttgtacaagtttatatttttagctaaattaaaatactcacattcccattattttttagaggttgtaagctaagtaataacattctagaaactctctgttttttgaaaggkcatcaccactgttgaaggcgctaatgggagatcctaagtttcaggctctgctacagacgtcaggtcccctaggagttgggctgcctttgctctcctctccgcgactcggtacctggtgtatagttggctaaaaagaagttgttggggctgggtgcagcacctcacacctgtaatttcaacacgtagggaggctgaggcaggaggatctcctgaagcccagaattcaagaccaggctgggcagcatagcactacccatctctactataaatttaaaaattaactgggtgtggtggtgcacatctctagtctcagctgcttgggactactagaaaggtaaggcaagagaatcccctgagcccaggagttggaggttgctgcagctatgttcgcaccactgtattccagtctgggcaacagagcaagaccccatttccaaaaaataaatgaaataaataaatacataataaataaacagtagtggttgaaagaaagggaaggaagaaatgctgttttaggaaatcaataggataatttttttttttttttgaagcggagtctcactctgttgcccaggctggagtgcagtggcacagtctcggctcactgtaagctccgcctcccgagttcacgccattctcctgcctcagcctcccgagtagttgggactacaggcgcccgccaccacactcagctaattttttgtatttttagtagagacagggtttcactgtgttagccaggatggtctcgatctcctgacctcgtgatctgcctgccttggcctcccaaagtgctgggattacaggcgtgaactactgtgcctggccaggataatctttaagaagaagataacattagctattcttctcacttcctacgtagaattccataccctgtgtctttggcctggaaagggtattggtagcaattgtcttcggctttccctgccatgtgt

SEQ ID NO: 46720 - DNA, 447 bp, Homo sapiens
acccagttagcgtttggagaattggttgctggtatagaaaaataccaaatattttatgtcaggggagtgaaagaaaaaacaaaaacccggccgggcgcggtggctcacgcctgtcatcccagcactttgggaggccgagacgggcggatcacgaggtcaggagatcgagaccatcctggctaacacggtgaaaccccatctctactaaaaatacaaaaattagccgggcgtggtggcgcgcgcctgtagtcccagctactcgggaggctgaggcaggagaatggcgtgaacccgggaggcggagcttgcagtgagcccagatcgcgccaccgcactccagcctgggcgacagagcgagactccgtctcaaaaaaaaaaaamaaaaaaaaaaaacaaaaaaaaaaaacccatacactttaaggaaagcaactgacagcatttgttacc

SEQ ID NO: 46721 - DNA, 410 bp, Homo sapiens
tatggtcagccactattcccagaaccacttagtgaatagggtgtcctttccacgttaagtgttttgaagagccattggctgatttttttcctagcattatttcttgagcaaaatccttcagtagaatgttgatgaaagtggtcaaagtgattatttatgtattgtttccaatcttatggagtaaacattctttacccactaacttagttkaggatgtttatcgtaggttttcttagatgcacttgaccagattgtggaagtactcttcaatttctagtttggttagggttttaatcatatgatggatttagccaaatgcttttttttcctgtgtcaatcagattatcacatccaagtctggtggtcaaacctgtagacgtgtatagtcttattacacactggataatggg

SEQ ID NO: 46722 - DNA, 603 bp, Homo sapiens
aaaaggtctgaggcctccaagccattttcagtgtgcaagtataacttcgggcctgttcaaggtaagtgaaagcaagtgatgcaggcaagaaataacacacttttgcactggctctccgttgataaattctagctgtttctccatagtccttactttctaggtrgaccttgcaaagcacattagactagattgcttttcaatgcacaaaacttgtttcccccaaaatgattctaattggaagtgccaatactggcagaaaatgtgtgcaggtactagcctttaaagtgctaatgcatctcttaccaatctacgaagttacaggatggggcatgaaaaaatatatttgacggcacaaaagtatgaagcataggattaagtaaagcagattgaatatgactgttacgggctgaattttgtctctctaaaattcataacctctctaaaaagtcctaacccctagcacttcagaatgtaactgtatttgaaaacaaagtctttaaaggggttattaagttaaaatgatgccatctgggtgcggctgaaatcaagtatgatttatgtcctcagcagaagatgaagagatactgtgggcacacacggacc

SEQ ID NO: 46723 - DNA, 632 bp, Homo sapiens
aaaaccaattttcaaatataaaaataattcttaatattcatcattcgtttcagtctctaaccatcaaaaagcagttgctttaccattattcataatccatcctcaaaatgattaaataaatttctgttgtcctacctataggagctctctaattttctcctgaattgtataattcacttactctaaggtttttgtaattcagacctaaggatctcttggtcttagtttctatcttggcttccttctgcttaacaaaccacatggsagccaggccttttagtaagttaattagatatttttggactaaattgagttagtcttatatggtggctaacaaaacaaacagttctacaacttttctaggccttttgatagcaacttaatgtaacataaactaagatttaatatgtggactctttcccttcctcctatgactcttttctgcttcaggagaagagactaaggtaggaaatggctccttttatccttcctcaggaggtttcctctctgctttgtgtaggatagtttaaggatggccagtttgagcatgtctaggaaccacacaggtaacacagattatacctggcttagaaaaaccacattcctttattcttatgactcatgttttaagc

SEQ ID NO: 46724 - DNA, 525 bp, Homo sapiens
atctgttagtagggtgcctttgactgttttccttttcatttcctatagtttgctttaaaaaattgcagggctgggcacagtggctcacccctgtagtcccagcactttgaaaggcccaggcgggtggatcacaaggtcaggagactgagaccatcgtggctaacacggtgaaaccccgtctccactaaaaatacaaaaaattagccaggcgtggtgacatgcgcctgtagttccagctacttgggaggtggaggcaggagaattgcttgaatctgggaggcagagtttgcrgggagcagagattgcaccattgcactccagcctgggcaacagagcaagactccatcaaaaaaaaaaaattgcagatgtgtaacttgatacataggtaggtatcaatagctgtcttatgttcatgatgaattgtggcttttaacattatgaagactaatttttgaacttcaccaatcctgacatggccagctagcttactgactgaggtaaagacctaatttgggttagaatggc

SEQ ID NO: 46725 - DNA, 525 bp, Homo sapiens
atctgttagtagggtgcctttgactgttttccttttcatttcctatagtttgctttaaaaaattgcagggctgggcacagtggctcacccctgtagtcccagcactttgaaaggcccaggcgggtggatcacaaggtcaggagactgagaccatcgtggctaacacggtgaaaccccgtctccactaaaaatacaaaaaattagccaggcgtggtgacatgcgcctgtagttccagctacttgggaggtggaggcaggagaattgcttgaatctgggaggcagagtttgcagggagcagagattgcaccattgcactccagcctgggcaacagagcaagactccatcaaaaaaaaaaaattgcagatgtgtaacttgatacataggtaggtatcaatagctgtcttatgttcatgatgaattgtggcttttaacattatgaagactaatttttgaacttcaccaatcctgacatggccagctagctwactgactgaggtaaagacctaatttgggttagaatggc

SEQ ID NO: 46726 - DNA, 508 bp, Homo sapiens
tccctgagctttttctccaaatttacacacacttcgcttcagcagaagccagctgcagatcccacccaggttcctacgcttctagcactgacatactctgtacagcggtgtcacttgcaaattagtcttagattgacaccttaaatgtgcaatgtcatcccatttctctttggaaggagactttccaagatactaaaccactcttttgtaccaaagctcccacgaaatcatacaaagagctggaagctatatcccgtttgcacaaaggttttgcaatatctccatggaggaactttatggattcgtgggagtaaaataaaaggaatggaggatgtgtgggaagtttgtgttggaagacatttgtctagcccagtagtgattaaaatattataaattgtgttttgtctgggtggctcctttggtttccgatgttattcctgtttaatgttggckgctgagggtggaggtgggaggcagggaagtttctaagattatggccccatatctg

SEQ ID NO: 46727 - DNA, 582 bp, Homo sapiens
ggttctgtatgtcacatccccttggcttagctctctctcaacaacagctgcggtggacggttctgtgagaactcggactcatgcccttcactgaggccctgttcttcaatcaacacctgcttctagccagctaaagggactagttattctagattagggtttctcaatcctggcactgttgacattttgggccagataattctttgttgtgggaggctgtgctatgtatcgtacaacactgatcagcatccccggtccctacccrctaggtgccagtagaactacctcttcagtgacaaccaaaaatgcttccaaaatggcccctggggcacaaaatgctctctgctgagaaccacttttctagacttatacctagtccatgggctttgtgagaaccagttaaacacatgggtattggcatgagctagagtgggtttgattggatgtgtcttcatgtatgacctatattcccatgggcatcactaaacttgactatgcgttattttgctcacatgtaaaatgaaaatgatactatctaataggcaattatggggattaaataaagtaatttatggagagggc

SEQ ID NO: 46728 - DNA, 558 bp, Homo sapiens
aactcacccattacaggagcacagcaccaagccattcatgagggatctgccccccatgacccaaacacctcccactaggtccacctccaaccatgaaggtcacatttcaacatgagatttggaggggacaagacatccaaaccatatcaccatatcaaccgggaggtcctcttggttccaaatgacagaggagcaaaccggtcagcttacacaaaggggagtgggggagatgcttggctcacatgacataacactgaaggggcaggggcaggggcagggacctcagggatgacttgatccaggtaccaagcatctctgagcctctctctgtgtctttctgattttcacagtctctacccacatggcttggggcagcccctcataatcctcmccacttgagagctacaaagggccttttgactccttctgaagttttcaaacacctgcaggaaagctcaagtggatgtattatgattaccttggctggagttatctgcccactcctgtagcctgggcagtggcctttcctgctacagacaatgggggatggactgggca

SEQ ID NO: 46729 - DNA, 562 bp, Homo sapiens
agcctgagcaacagagccagactcagtctcaaaaaaagacaccagaaagatgcttaaggaataaatccctagggagtagatgggttacgagttgagactgtctcctgaccatcaaaacatccccttccctatagaaaaaaatcaaagaagagtgatgggattggggttggttttctgaaagcatcttgcaacatttaaatatgascttcaaaacccttttccagtttttgctttcaccaatcttctattttgttaatagctaaccctttactgtattgagtgttttactcttttatgccagattttggggaacttagtaaaaaactggctgaggtgtggaagcaattaccagaaaaagacaaactggtaagtacattttcttacaaacatatttttcagtgcttctcgccttccaaaatatgtaattcttccatagactagccagccagacagcactgaaaatagtgaagaaaattacaaatcaacagaaaatggtttagcagaggacattaacactgttagtgccagttcactgtacatgaggatttagctatagcaaggc

SEQ ID NO: 46730 - DNA, 547 bp, Homo sapiens
ttcccatcctcttgggttacaaagttctacctgctagaatgctcttatttccaggaaataataacagcatttttttcatttatatatgctatttataatagcattttcagagtttatgtgycacatagatccttatttggattttcttatttaatcctcataacaataccatgaagtaaatactattgttagtattatccccatttcatggccaaagacattaatacccaaagagatgaaaagacttgcccaggaacacacagccataggtggcagggccagaaatcagctccaagtaggctaaccccagggccggtgttcttcacctattggttgctgctggtgtggaaagaaactagctctgaattccagctctgccactaatgaggtgaatgaccaagaggtcgaggtattggctggatggctcttgggagatggcaacctgaggaagtggagggagggagaccaagagctgggtgctgacgtcatcaggataggtgggcgctgaccagatcattggtagatgccagcaacacagaatgagctg

SEQ ID NO: 46731 - DNA, 500 bp, Homo sapiens
tggacaaactctggtctctgagatttttggaacatatgaacctattaatacagagttttaggggactgggaggaaggagcagagcagctaacaattgtcttaaggctggagatggagtagaaagattttaatttgctaaattgattgctttaactccgtgtgcctcaattttctcatttgaaaagtagaaaaactcatagtatgtgcctcataggattattgtagggatttaagaagacgatccttgtaaagcccttagcaattagcaaaggcccaataaacattagtggttcttgatatgactatacatattagcccctctgggggtytgtttccctgtacttctctctacaatgagagactgaaaggaaggcacatccctggttctaaatccctgtctggagtcatagggagaaactggacttctcctaagggctaggagaggaaagggaaggagaacttggactggagattggtgtttggcctcagcaagaaagcca

SEQ ID NO: 46732 - DNA, 592 bp, Homo sapiens
ttgttattcttcccagagacatttacttagctcctttctaaataaaatttacattcactccctagaatctcactttgtcttacagatttctcacccatcaggttactgttagtgatgatctgcccaaccacataatttctagaagagtgccggtaaaactgaaygtgaaggagttcacctggacatagaccatctttgcggatggcactgaagagaacattaatgttattatcttcaccacagactacaccttgtcttttcttttcttggaggatggctcagcaatcctggacagccagtgctccatgctgaattttgtgttccctcctagctggagaaggcaacacttgttttcactggcttactgcagccaggaggaggcactattcccattttaaaacttcagaaccaatgggctgtacctgtatttaaaagtatgtcttgccctactcaatatcatagcagagtggacttctgaccacatggtataatttgagaggcacccagataaaccagaatgcaatatatattcctgtcagtccagattcaatatctgaaatgcaacaaaccccatttttcttgggttttaaag

SEQ ID NO: 46733 - DNA, 592 bp, Homo sapiens
ttgttattcttcccagagacatttacttagctcctttctaaataaaatttacattcactccctagaatctcactttgtcttacagatttctcacccatcaggttactgttagtgatgatctgcccaaccacataatttctagaagagtgccggtaaaactgaatgtgaaggagttcacctggacatagaccatctttgcggatggcactgaagagaacattratgttattatcttcaccacagactacaccttgtcttttcttttcttggaggatggctcagcaatcctggacagccagtgctccatgctgaattttgtgttccctcctagctggagaaggcaacacttgttttcactggcttactgcagccaggaggaggcactattcccattttaaaacttcagaaccaatgggctgtacctgtatttaaaagtatgtcttgccctactcaatatcatagcagagtggacttctgaccacatggtataatttgagaggcacccagataaaccagaatgcaatatatattcctgtcagtccagattcaatatctgaaatgcaacaaaccccatttttcttgggttttaaag

SEQ ID NO: 46734 - DNA, 592 bp, Homo sapiens
ttgttattcttcccagagacatttacttagctcctttctaaataaaatttacattcactccctagaatctcactttgtcttacagatttctcacccatcaggttactgttagtgatgatctgcccaaccacataatttctagaagagtgccggtaaaactgaatgtgaaggagttcacctggacatagaccatctttgcggatggcactgaagagaacattaatgttattatcttcaccacagactacaccttgtcttttcttttcttggaggatggctcakcaatcctggacagccagtgctccatgctgaattttgtgttccctcctagctggagaaggcaacacttgttttcactggcttactgcagccaggaggaggcactattcccattttaaaacttcagaaccaatgggctgtacctgtatttaaaagtatgtcttgccctactcaatatcatagcagagtggacttctgaccacatggtataatttgagaggcacccagataaaccagaatgcaatatatattcctgtcagtccagattcaatatctgaaatgcaacaaaccccatttttcttgggttttaaag

SEQ ID NO: 46735 - DNA, 592 bp, Homo sapiens
ttgttattcttcccagagacatttacttagctcctttctaaataaaatttacattcactccctagaatctcactttgtcttacagatttctcacccatcaggttactgttagtgatgatctgcccaaccacataatttctagaagagtgccggtaaaactgaatgtgaaggagttcacctggacatagaccatctttgcggatggcactgaagagaacattaatgttattatcttcaccacagactacaccttgtcttttcttttcttggaggatggctcagcaatcctggacagccagtgctccatgctgaattttgtgttccctcctagctggagaaggcaacacttgttttcactggcttmctgcagccaggaggaggcactattcccattttaaaacttcagaaccaatgggctgtacctgtatttaaaagtatgtcttgccctactcaatatcatagcagagtggacttctgaccacatggtataatttgagaggcacccagataaaccagaatgcaatatatattcctgtcagtccagattcaatatctgaaatgcaacaaaccccatttttcttgggttttaaag

SEQ ID NO: 46736 - DNA, 582 bp, Homo sapiens
ctcccctaatcgcttcagctctgtcttgagccacctgtgggaaatggagtgaagtggttaaaggaaacggtttggtytttggtttgtttagggctcatacaccaggcatggagacttctcttctgtgggagggacatctttcttcttgatgggtatggagttgaataggtaattacttttaaggacaagttcaccaatttccataatcaatatgtgtctaaaaagataaaagcagcaaaaatcgggaataaatatataaaatagttttaaatttttaaatgtatgaagtgaatatatattccattaaggtagtccattgttaagtgtttttaatgaccacagtatctttgtcccatctctgtcttctttttttatttttccaccgtgtgtccattgtgttccagatactacgggaggcacttggcacagattggctgatttacttctaaccaaagggggaagtgaggccacaaaggtgggggtaatttccccaaggccaaaaaagctcagcagtaacaaagttggtattagacccttgatgtgtctcattccaaaacccaggattttgtaatagtattaata

SEQ ID NO: 46737 - DNA, 638 bp, Homo sapiens
tgattaaagatggtgcccaataaggcatgatgaaggagaattaaaggaacctgatgttgtgaagtgggtatcattaggtcagatggaaasgtggcattaggatagccataaatgagctgcttctgagtcagggaggacttagttcaaaggtggggaagaaagaggactttagaaccactgatccttagttcacatagcatgctttaaacatttatggattattaagggctgtttcccttaaggcaacagaaatgcaactcagactcaattaacaaaacagggaatttattgttttgaataactggaacgtctcaaggtcagactgatcttctggcaccactagatccagactcccgggcgtcctcagggcctcctgctctgccttcctcccaactgacttcatttacagaaaaaatgctaacagggatgacttttcccacaatggggcaaaattagctcttactgggcaaaaaatcttagctattataatggttttgggaccccacaaaaggccccagtatattaaaatatatatatatatatatatatatatatatatatatatatatatatatatatataaaatactattaaaacataacaagtgggtagtagtgactgcagtaaaattgtctaaa

SEQ ID NO: 46738 - DNA, 596 bp, Homo sapiens
tttaatatcactcgggttctctggaaaatggtcaatttggggcagattttcagtctttcgggttgttttctctcttccccctccttctggcatgctagcacctcctcagaggaagcgtatgtaacgctgtggtggcaaaagaacatctgctctcatcactgcccttcttgggtgggctgctgaagtctgagtaaggcacagctaatcttgcctggtcgctggtggrtgttggcttctaacttcactgtaactgtttctgaagtgtctgggatggtcctctggtcataggcaccaaacaatgcctgcttgtggccatctcccccgactgactagactcctcatctcagctctatctgatgctcagactcagctgtgactccagcttggagaggggcaccctgtaatctctgccaccgatttccttgcttagagctaccaggaccctgcaaggtgtgctgatgcctacttattaggtcacttcatcatctgtctctccagaacatctggctcaattttaagatatgaggtacctggaaaagacgtgagtagaatggctttttcttcaacaggccacttttcaactctactacctgtgc

SEQ ID NO: 46739 - DNA, 598 bp, Homo sapiens
ttggcatgaggactagagagctgtcaccaagcagccagtcatttttcttggcttcccatatgccatgcccagcaatagagcatttcttagtagctgaggaatagcagcagtgctaaacacagagatgacattaacaggaatgagagggtccaagctgttttcctagactaattctcattcagcctgaattcaaagcattttcctatcattatcatagatatttcgcttgtggtattatctatcttttggcaatgttgatttttttctgattatccaaataagtaatgttaatggaaaaaatcagatattaggggaaaaaaaamtctagaaataaatgttaacccaagacaataacaattcaattaatttatatgataccttagggattgtgtcaattattttttaaatgaaattcaaaaaattcaacacctgtgttttctcctatgattacaaattcaaccagggcacaattgtaaatggttgtatttggttgaatttttagattgtttataagttttactcttgcagacaataataatggagtttctttgaaaataaatttagttgttctataaccaaggcataaatattcaattca

SEQ ID NO: 46740 - DNA, 516 bp, Homo sapiens
cctcagccccccgagtagctgggattacaggtgtgcaccaccatgccggaccggttttgtactttagtagagatgaggtttcaccatgttggccaggctggtctcaaactcctgatctcaggcgatccacctgctttggacccccaaagtgctgggattacatgagttagccaccacaccctgcctgagrtgatgtttttgagccacagtattcccatcagtaaaccggacatactaattgtaatttcaggtatttttgtgacacatatattattgaaattattattattaaattactgactttaataatacattcttaaattagttattattataataacataattaatattgaaagcagtttataaacttgcgtggtgctagggggcactacaatgtaaaggaatttatgtaataaaagtaaagatgcaacgtttgattttatttttcatgttttgtaatgcaaaaattaactgtccttttatttaaattacagcacatgcaaattaactttta

SEQ ID NO: 46741 - DNA, 516 bp, Homo sapiens
cctcagccccccgagtagctgggattacaggtgtgcaccaccatgccggaccggttttgtactttagtagagatgaggtttcaccatgttggccaggctggtctcaaactcctgatctcaggcgatccacctgctttggacccccaaagtgctgggattacatgagttagccaccacaccctgcctgaggtgatgtttttgagccacagtattcccatcagtaaaccggacatactaattgtaatttcaggtatttttgtgacacatatattrttgaaattattattattaaattactgactttaataatacattcttaaattagttattattataataacataattaatattgaaagcagtttataaacttgcgtggtgctagggggcactacaatgtaaaggaatttatgtaataaaagtaaagatgcaacgtttgattttatttttcatgttttgtaatgcaaaaattaactgtccttttatttaaattacagcacatgcaaattaactttta

SEQ ID NO: 46742 - DNA, 585 bp, Homo sapiens
gaggttgagggaggagaatagcttgaacccaggaggcttgcagtgagccgagatcatgccgctgcgctccattctgggtgccagagcgagactccatctcaaaaaaaaaaaatgaatgactccccccgccaattaatctccatctgagcacagagtaccaaggtgtacaartcatgtcacttttagggaaccagcaagaaagactttctcatgagtggtctcaattctcttgtcaggctgggttaatagaaaactagcaggtggagctcctccatcccactgtatttcccttaaccataaaaattcttttttacctgttatatattggcctgccatggaaggttttgttatgaagaaaaaataagtgagaaagtgttttcatattttttaaattagatataaaagtttttaaaaatgtttccaaatctctggactaaataatgtctaaggtatttcccaactctaacaatctagcgtttcctctgatatgtattgatggtgtaaggaaaatggctgtgcttcagtcaggagtaggctgaggtagacatccagtacagcatgacacactgggtttggagtgcaggg

SEQ ID NO: 46743 - DNA, 505 bp, Homo sapiens
tgttcaactaaatctatttagtgtattatcctccatatttctatagcacttttctctgctgtaagttctataattaatataaaaaatagcattcctcttcttcatcaagtgctcatgagtacttttaaaatttccttctcaaaaactttactggaacttttttactacaatcaacrgaataatgtagttttatttcctaggcagcatttctgataagcatgaaatagggtagaccactctctccctcaatcattacataaaaaccagtgcaaatacaatgagtatttccttctgctatggcataatgatcacttctgagtcaatctgtagactacagaagaatgtgatagaagaaggtgagttattttatgtaaataatgaaatagatgttctagagttctatgttattggtcagattaggttaggtgattccgcagtaataaaaagaccccaaatcacagtggtttaacacataacagtttatttcttacacttaaaaagttta

SEQ ID NO: 46744 - DNA, 595 bp, Homo sapiens
atatccagaactcttttcatcttgtaaaactgataccctgtccccattaaatgctaactccctaacccccagmcccagcccctggcacccaccattacactctctgtctctatcattttcactactctagggacctcataaaagtggaattacatagtatttgtcctttaatacaaactaataacctggtaaaataatgggctgaagactttaatagctgttgtcttctactcttactttgctaagtgtttgtatcagaatgattgcagttcactgtatatcacttttatgtaaataaagttgttgaaaaaaataatcgaaacttgtgggttgtagctcaacagtgccaagacagaaatttatatgttttttacaatacctatagatgtatacacacacacacaggaggtagaaaaagttgaaaaataattatctacccttctacatcaagaagctaaaaaagaaacaacaaattaaactgggaaaaaagagacaatcataaaataaagagcagaagtcaatatgttatcagcagcgagcccaggtggggtccatggtcctcgattcttgtcttcttggaagaaagaattcagcc

SEQ ID NO: 46745 - DNA, 532 bp, Homo sapiens
tgaggccaggatttgagatcagcctgggcaacacagcaagactttgtctctgaraaaaaaaactttagccaggattagcggggcgtgcctacagtcccagttataggctcacagcaggggaggatctcttgagctcaggagatcaaggttgctgtgaactgtgtgatcaggccactgtacttcggcctctgccacagagcaagaccccaacccccaaacacaaagtgaaacatatctctgggcgtaaataaatgttcaccaaaaattaaataattatgctaaaataacagtttagattttaattttaatctttttatagtttccattattatcttgttaggatgaaaagtagactgtcaactctgccaccccaaaatttcacatgaaggaaaaactccaaaattcatgtatgacatccaacctaagtaatttcaatccagtaataataaagaacagagaaggatgaaaagaaagtattggagaaaaattaagtattcccaaattgctcctccaccaacatcatttaaaagta

SEQ ID NO: 46746 - DNA, 532 bp, Homo sapiens
tgaggccaggatttgagatcagcctgggcaacacagcaagactttgtctctgaaaaaaaaaactttagccaggattagcggggcgtgcctacagtcccagttataggctcacagcaggggaggatctcttgagctcaggagatcaaggttgctgtgaactgtgtgatcaggccactgtacttcggcctctgccacagagcaagaccccaacccccaaamacaaagtgaaacatatctctgggcgtaaataaatgttcaccaaaaattaaataattatgctaaaataacagtttagattttaattttaatctttttatagtttccattattatcttgttaggatgaaaagtagactgtcaactctgccaccccaaaatttcacatgaaggaaaaactccaaaattcatgtatgacatccaacctaagtaatttcaatccagtaataataaagaacagagaaggatgaaaagaaagtattggagaaaaattaagtattcccaaattgctcctccaccaacatcatttaaaagta

SEQ ID NO: 46747 - DNA, 580 bp, Homo sapiens
aacttcctgtcccaggagtatttgctatatgcacggggagagatttgtcctgtttaatctaataagtggggaaggagctaacagccaccaggcattgaactagaactggggatacaaaggtgagaaactgtgtccttgagaagctcgccactcaggcatgtacaarcacaatttcaatatcatatgataagtactataattgcaaaaaccatttttcctttattttcaatagtctgcctagttgtcaatagaggtgtcacatcatgtgttgcaatctttgatgcagaaaatatactttactccaaaagaggtattaaagcaccacagaagtgcagaggcttagaggaacctcagtctggaatgcctgagatatcttcactgaggaggcaaaatcaggccttaatgctgtaggggatgaaagaatatcttttcttcccatcttaagtttatggccgaggcccctataatgaaagacaggtttacaagagaaaagcatatacatttatttaatatatttatgaacatgggaggctttggaaatgaagacccaaagaaacaagtagacttgtatattattatg

SEQ ID NO: 46748 - DNA, 582 bp, Homo sapiens
ctgcaaacagagatatctggacttcctctcttctaaaactgtatacattcacacctaccttcccaaccatgatcttagacatctgttacatctggacaggtaaagcatagaactatacacccccagtggcttctctctttgctccattgggggaggggtggttgaaatggccctagagttaagcagtaggttggtcctgagcctggccaaaattgtaaagtggatagtgttcatcttctgtgcctttctcccctctatgtccccctctatctctgtcaatcttcactcaaggaaggagctctccttgattcttcactaccatctctctacatctaagcctgcactggctcttcctatgcaggtgcaaaccatcacgcatagtattagataagtgttcataagaccagaagcatcagcatcacctgggaactagttaaatctgtgaagtcacattcagaactaccaaatcagaaactctaaggktggggaccttgtcatttgtattctattaagccttttaggtgattttagtggaggatgaagtttgagaatcactgctttagaatcattagtcatcctgaa

SEQ ID NO: 46749 - DNA, 451 bp, Homo sapiens
tatattatttatttgtttgtctgtgttacattatttaatccccacaaaaacccaatgatgtatatgctttagtgtcataattatttcatacataagtatggaggcttacagaccttaaggcatttgcccaaggttacagtacgtggtagaaactagagttgactctctgtgattcagctcttactcagtgtgactggtctttcatgtagtcatttattgccttcctagaacatacattcacagggtaacaggttttttgtgktttttttttcacttacttgacccccctatattttctatgactaggtcataaaaagtccccttgtgaaaacaattaaaggttaaatcagtggatgtatatggccctttggaaacaaatagaaagggctagatggtaaaatcttattaaatcttatgtcatttccctttgtaccattttccaaaaaggatc

SEQ ID NO: 46750 - DNA, 529 bp, Homo sapiens
taaaaaaatctcactagaacatagacacttcaagaaaccttttctgtcttggcctggtctatgtgttgaaaaataatagacttccctaagaaatcacaatcaatggtctgaccttacacaacttggagtttgaatttacagtagcttcatagtctcaaaaggacctaaaccaaaacaattctcataaaaaggctaatggggtcggcgggatgtgtacatggtggggcggcggggtggatatactagcagaagcaagcacagagctgctsttgaaaacaccctcagtctggcttaaagattcccatagatgaagtctcacttaaaataaacttgtaattcaaagttacaaatcacacaaggaaactgtttatcagatagcaaggtgagacttgcctaaatcctttggataaaactgttaaatagaagttttaaattaaaggaaaaataagcatgtaacacataacacaaaagaattaggcactttttttccctcaaaatagtgtattttaggttcatccatcttgcatgt

SEQ ID NO: 46751 - DNA, 629 bp, Homo sapiens
tgcataaaataaatgaatcattctacttcaaasctttctctttctgactaatgttactatggaagtttttcaacgacagaagttttgacaagagttgttactgcaggtttaattttctttcatagttttaaaaatcattatttatagaaaataaagagataaatttaccttatttaacctgatttgacaaacactaactggactggcctttgtaaaatggacaatagggccagaggtggtggctgacacctgtaatcccagcaatttgggaggccgaggtgggaggattccttaagttcaggagtttgataccaccctgggcaacatggtgaaacctcatctccacaaacaatgcaaaaaattagccagacatagtggcatatgcctgcagtcccagcacttggaaggctgaggtgggaggatggcttgagcttaggaggcagagattgcagtaagctaagatggcaccactgcactccagcctgggtgacacagtgagactctgtctcaaaaaataaaataaataaaataaaataaaatataaaaataaaatggacaagaggcagccacaaagaaggcagggcataactagttaaaaataacaagcccagccccaaggtgctcaccta

SEQ ID NO: 46752 - DNA, 1197 bp, Homo sapiens
tgaacatcattcaggtgtcaagtatttgacctggagcctggaaggggaggagagagtccaaaaaaaagtcmaaatataaagaaaaaaaattaaagaacttgtcccacaaatcaggcaaccaaggtctaaacttataccctctgcctgggtaaattgttgttgcttctttctgtgactcttaaaagatgtaccatatacctcatttaatgactttgctttattcatgaaaactctatccccatgggaaaagctgttaaatgaaaaaagatttcttttaagtagaaaaattatgaaaggattccttccaaccctccatacccaaaatatctcaaatgaattatgtatctatcaattatcaatatatatcaaaatataccaattaaaaatatcagttaaacaatacgtcaattgaactatgaaagcaagcttatttaagtagcaaagaataacgtgaaggttagtaagtatagcttatacttaaaatacaatgaattgaaagctcatggcacttcatagagtaggaagaagaaacttaatagaaagtggtagttgggcgagaaggactgcaagggagttatttggaaaatgcattttttatttctgcatcattttgttcacaaattattcctaatcttttgtgaatttgtggatttcttgaactcaaaccagacttaaaaatacagttatagcacagaaaaaaatctttaatggcaaaataaaagctaagcaagagagcctttcaaaacacatgaaaataacacacacatacaaaaaaaaaagaataaagagatgtacaagtgacacctcctcaaccttctcacttggtgtacatatgcacagtaaattattttgggctcagccaagcatgggagcaattcaaatagatccatatgatattctctgattagaaactcttgtggagtaagttggtgagtgtatctttgcctaaaacagtcatgtcaaaatatagcttcctatagcatatttatttagtatcattttggtgaaaaagtggttatacagaatagaaaagagttgtccaaaactaagtggttgacctttccagagccattacctgcagaattgttatgtaagtctgttccatactcataaaggaatactcagctgacccaactgattttctcgtgttttttccttcaagggctagtagaagtctatatgttgtggtggaaaaca

SEQ ID NO: 46753 - DNA, 1197 bp, Homo sapiens
tgaacatcattcaggtgtcaagtatttgacctggagcctggaaggggaggagagagtccaaaaaaaagtcaaaatataaagaaaaaaaattaaagaacttgtcccacaaatcaggcaaccaaggtctaaacttataccctctgcctgggtaaattgttgttgcttctttctgtgactcttaaaagatgtaccatatacctcatttaatgactttgctttattcatgaaaactctatccccatgggaaaagctgttaaatgaaaaaagatttcttttaagtagaaaaattatgaaaggattccttccaaccctccatacccaaaatatctcaaatgaattatrtatctatcaattatcaatatatatcaaaatataccaattaaaaatatcagttaaacaatacgtcaattgaactatgaaagcaagcttatttaagtagcaaagaataacgtgaaggttagtaagtatagcttatacttaaaatacaatgaattgaaagctcatggcacttcatagagtaggaagaagaaacttaatagaaagtggtagttgggcgagaaggactgcaagggagttatttggaaaatgcattttttatttctgcatcattttgttcacaaattattcctaatcttttgtgaatttgtggatttcttgaactcaaaccagacttaaaaatacagttatagcacagaaaaaaatctttaatggcaaaataaaagctaagcaagagagcctttcaaaacacatgaaaataacacacacatacaaaaaaaaaagaataaagagatgtacaagtgacacctcctcaaccttctcacttggtgtacatatgcacagtaaattattttgggctcagccaagcatgggagcaattcaaatagatccatatgatattctctgattagaaactcttgtggagtaagttggtgagtgtatctttgcctaaaacagtcatgtcaaaatatagcttcctatagcatatttatttagtatcattttggtgaaaaagtggttatacagaatagaaaagagttgtccaaaactaagtggttgacctttccagagccattacctgcagaattgttatgtaagtctgttccatactcataaaggaatactcagctgacccaactgattttctcgtgttttttccttcaagggctagtagaagtctatatgttgtggtggaaaaca

SEQ ID NO: 46754 - DNA, 1197 bp, Homo sapiens
tgaacatcattcaggtgtcaagtatttgacctggagcctggaaggggaggagagagtccaaaaaaaagtcaaaatataaagaaaaaaaattaaagaacttgtcccacaaatcaggcaaccaaggtctaaacttataccctctgcctgggtaaattgttgttgcttctttctgtgactcttaaaagatgtaccatatacctcatttaatgactttgctttattcatgaaaactctatccccatgggaaaagctgttaaatgaaaaaagatttcttttaagtagaaaaattatgaaaggattccttccaaccctccatacccaaaatatctcaaatgaattatgtakctatcaattatcaatatatatcaaaatataccaattaaaaatatcagttaaacaatacgtcaattgaactatgaaagcaagcttatttaagtagcaaagaataacgtgaaggttagtaagtatagcttatacttaaaatacaatgaattgaaagctcatggcacttcatagagtaggaagaagaaacttaatagaaagtggtagttgggcgagaaggactgcaagggagttatttggaaaatgcattttttatttctgcatcattttgttcacaaattattcctaatcttttgtgaatttgtggatttcttgaactcaaaccagacttaaaaatacagttatagcacagaaaaaaatctttaatggcaaaataaaagctaagcaagagagcctttcaaaacacatgaaaataacacacacatacaaaaaaaaaagaataaagagatgtacaagtgacacctcctcaaccttctcacttggtgtacatatgcacagtaaattattttgggctcagccaagcatgggagcaattcaaatagatccatatgatattctctgattagaaactcttgtggagtaagttggtgagtgtatctttgcctaaaacagtcatgtcaaaatatagcttcctatagcatatttatttagtatcattttggtgaaaaagtggttatacagaatagaaaagagttgtccaaaactaagtggttgacctttccagagccattacctgcagaattgttatgtaagtctgttccatactcataaaggaatactcagctgacccaactgattttctcgtgttttttccttcaagggctagtagaagtctatatgttgtggtggaaaaca

SEQ ID NO: 46755 - DNA, 1197 bp, Homo sapiens
tgaacatcattcaggtgtcaagtatttgacctggagcctggaaggggaggagagagtccaaaaaaaagtcaaaatataaagaaaaaaaattaaagaacttgtcccacaaatcaggcaaccaaggtctaaacttataccctctgcctgggtaaattgttgttgcttctttctgtgactcttaaaagatgtaccatatacctcatttaatgactttgctttattcatgaaaactctatccccatgggaaaagctgttaaatgaaaaaagatttcttttaagtagaaaaattatgaaaggattccttccaaccctccatacccaaaatatctcaaatgaattatgtatctatcaattatcaatatatatcaaaatataccaattaaaaatatcagttaaacaatacgtcaattgaactatgaaagcaagcttatttaagtagcaaagaataacgtgaaggttagtaagtatagcttatacttaaaatacaatgaattgaaagctcatggcacttcatagagtaggaagaagaaacttaatagaaagtggtagttgsgcgagaaggactgcaagggagttatttggaaaatgcattttttatttctgcatcattttgttcacaaattattcctaatcttttgtgaatttgtggatttcttgaactcaaaccagacttaaaaatacagttatagcacagaaaaaaatctttaatggcaaaataaaagctaagcaagagagcctttcaaaacacatgaaaataacacacacatacaaaaaaaaaagaataaagagatgtacaagtgacacctcctcaaccttctcacttggtgtacatatgcacagtaaattattttgggctcagccaagcatgggagcaattcaaatagatccatatgatattctctgattagaaactcttgtggagtaagttggtgagtgtatctttgcctaaaacagtcatgtcaaaatatagcttcctatagcatatttatttagtatcattttggtgaaaaagtggttatacagaatagaaaagagttgtccaaaactaagtggttgacctttccagagccattacctgcagaattgttatgtaagtctgttccatactcataaaggaatactcagctgacccaactgattttctcgtgttttttccttcaagggctagtagaagtctatatgttgtggtggaaaaca

SEQ ID NO: 46756 - DNA, 1197 bp, Homo sapiens
tgaacatcattcaggtgtcaagtatttgacctggagcctggaaggggaggagagagtccaaaaaaaagtcaaaatataaagaaaaaaaattaaagaacttgtcccacaaatcaggcaaccaaggtctaaacttataccctctgcctgggtaaattgttgttgcttctttctgtgactcttaaaagatgtaccatatacctcatttaatgactttgctttattcatgaaaactctatccccatgggaaaagctgttaaatgaaaaaagatttcttttaagtagaaaaattatgaaaggattccttccaaccctccatacccaaaatatctcaaatgaattatgtatctatcaattatcaatatatatcaaaatataccaattaaaaatatcagttaaacaatacgtcaattgaactatgaaagcaagcttatttaagtagcaaagaataacgtgaaggttagtaagtatagcttatacttaaaatacaatgaattgaaagctcatggcacttcatagagtaggaagaagaaacttaatagaaagtggtagttgggsgagaaggactgcaagggagttatttggaaaatgcattttttatttctgcatcattttgttcacaaattattcctaatcttttgtgaatttgtggatttcttgaactcaaaccagacttaaaaatacagttatagcacagaaaaaaatctttaatggcaaaataaaagctaagcaagagagcctttcaaaacacatgaaaataacacacacatacaaaaaaaaaagaataaagagatgtacaagtgacacctcctcaaccttctcacttggtgtacatatgcacagtaaattattttgggctcagccaagcatgggagcaattcaaatagatccatatgatattctctgattagaaactcttgtggagtaagttggtgagtgtatctttgcctaaaacagtcatgtcaaaatatagcttcctatagcatatttatttagtatcattttggtgaaaaagtggttatacagaatagaaaagagttgtccaaaactaagtggttgacctttccagagccattacctgcagaattgttatgtaagtctgttccatactcataaaggaatactcagctgacccaactgattttctcgtgttttttccttcaagggctagtagaagtctatatgttgtggtggaaaaca

SEQ ID NO: 46757 - DNA, 1360 bp, Homo sapiens
ggcatcagagcaccagaagtctgcccagcggagaatttccaggagactgctgggcaacagacaacaagccagrggtcctaatttcagggttcatgttcatgaggtcaaagaactctgtggactgtaggaagccaagagaatgaattcacacatttccgggatgatgtaaatttatcggcttaaaacagttttttctattactcccataaataaacataacagccattgaacgtgctgttgcttactagtattatagaaacattagagataaggctcagtttgatttaagcagaaaagtgaacctggtctccatgcttcttaaagtcttttgcaccttcttgccacaaccctgaagttgaatcatgattaaattcttccttgagatcctgccagtaaaccagacacctgctcagatgcaagtgttgtttctaccttctctaggaaccttctgcctcagttagcagccctgcccctgtgccccgccccgcatcactccccatttccagcctttcctttcctcctggttctttcctctttgtttcccaacagactgagcatcacggtcccgatgctcaggcaatgctatccagattctctccttccttccgctcgtggccgatctcagatgctgccaatttctcacctttggttccttcccccctcaccctcatgctctctggctttcatcctctgtattagaactgccaaatatcacacctgtaatcccagcactttgggaggccaaggtgggttgatcacgaggtcaaaagatcaagaccatcctggccaacatggtgaaaccccgtctctactaaaactacaaaaattagctgggcgtggtggcgtgcgcctgtagtcccacctgctcaggaggctgaggcaggagaatcacttgaacctgggaggcagaggttgcagtaagcccagatcgtgccactgcactccagcctgggtgacagagcgagattctgtctcaaaacaaaacagaacaaaacaaaacaaaaaagaactgccagataaagatcactcttcatggttcagagtttcatcagcctgattccctggaaatggggtcacctcatgacttctggaggcctgaggcacttttgtctttggggacctttcttctgttaaaaaaaatgaaaattatattttataactatttgatataaagataagtatgatcaagtctaaattgtattcatttttaaaaattattattttaaaatacattaaaacgtgtgtgtgtgtgtgtgtgcgcgcgcgtgtgtgtgtgtgtgtgtgcttttggacagggtcttgctctgtcgcccagattgagatcatagctcactgcagcctcgacttcttgggctcaggc

SEQ ID NO: 46758 - DNA, 837 bp, Homo sapiens
tttttttttttttttttttgagacgaagtctcgctctgtcacccaggctggagtgcagtggcgcgatctcggctcactgcaagctccgcctccctggttcatgccattctcctgcctcagcctcctgcgtagctgggactacaggcgctcgccactatgcccggctaattttttgtatttttagtagagacggggtttcaccgtgttagccaggatggtctcgatctcctgacctcgtgattcacccgcctcggcctcccaaagtgctgggattacaggcgtgagccaccgcgcccggccccagagctagagcttttactttccccctgggctagttggagagcacattatatcagagatctacttagagatctattttgttgccacctttttggaatttgaaaattagtcttgagtcacattaatatttttaggaaggggcagaggtatcagcactgatgtgcctcttgtgtgctcattgatgtgcttggcatagtgggtacagcacaggcttggctgcctggggccgagggttgaatcccttggcaagttacttgtattctttgatctcagtttccacatctgcaacatttgcatggggatgataattgtrtccacctcatcacattgtgagtagaaatggaagtaatccatgtaaacttgcccagcttatagtaagcattgagtaagtgttagccgttgttagtttaactccatttcaccttcactacagccttgagagggaggcatgacggtcccctaattacagatgggaaaaccaaagcttagagaggttaagtgagttgccaggtgttgcatagccgggatttgaactca

SEQ ID NO: 46759 - DNA, 734 bp, Homo sapiens
catctggacctccaggctccccagtgcgggtttgtgctcagggttaaacaatccccctttcatgctttcacactttggatactcacagattttcagctgttactcagggcctgcagcaccaattctctttcttcaaagggtctgtggattctatcggcttttttggtatatycctgtggtagtttctggagcaaaaactcatgatgtgagaatctccacatgctgttctgtctgtccgagtgggagctgaaaattagtcctgcctcctatctgtcattttcctctggaatgtagcatatattttataagaactgctaatgaaaattttcttcagatacaattccttttctgaatattattagcagagataactattttacaaagtattgtttttgtttaatatattattcattaatgaaatatctgacaccctaaaaccaaatgaacatatccacaagtttttactttaattccataaggcaaaaagaaaggattccaggcagtaatttaggtttgtattattttttaatctacttcagaagaatatgaggaagccactaacagtcaattcttatgggaaaaaattaaaataaagtaacttataattgtataagtatactgtataaaataatacaatataaatattgtatttatatttatatacaatatatttatatacaatataaagtatattgtataaaataattaacttataattgtataatataatataa

SEQ ID NO: 46760 - DNA, 590 bp, Homo sapiens
cataggaaacattagtgtaactgggtctaatctaggtggtgtcccagactcttgtggctcaggctggagtgcaatggcacaatctcagcccactgcaacctccacctcccgggttcaagtgattctactgtctcagcctcccaagtagcagggattacaggcatgtgccactacagccagctaattttgtatttttagtagagacatggtttctctgtgttggtcaggctggtctccaacacccaacctcaggttatcctccrgccttggcctcccaaagtgataggattacaggcacgagccaccgaacctggatagagaacatttctgatggctccatattgatggaacttcaaataactctctggtaaattattttctataatacccttaaataaaaaatggagaagctgagatccagatcaatgtagactttggtacagagttggtggtaccagggctgccatatccagtttacaccccaacctgatatatcagcaaatctcctggagtaaggaaaatatttctgaggaggggtttcacatgaaattcagaaaattcctgtgtttgaagcagtccaaatgacattt

SEQ ID NO: 46761 - DNA, 558 bp, Homo sapiens
ttgcacccatctcctgtccgcccccccccaaaaatatatatgtatgtcgatatataatatagaggtatatacacctgtacataaaattgttgccaccaaccactaaatggttacactacaccaagacactaaaatggcagggagccctgggatcctggggttggcagacacagggaatrgggggtagaggcccaggctaatttctcccttcacagcaaagcagggagagaaaggaaggagattcaccccttaacctgtctcagccctgggtcagaagagaagcctcccgcctggccaggcttcacctaccttagccaaattgtagccagacagacagtgccccctgacctcaaaaaaggaggtcaagctgaaatggccctgaccctgaccgtgtgtccaaaaccccagcgtgagagccagggctgcttcttgacagctgctctcctctgccctgcgtggcactgaaccaggagtaagggcttctctgttctagcctcccagggaagggaaaaagcaggggctgtgattgtcaagactcacaaccatgtggagaggccg

SEQ ID NO: 46762 - DNA, 598 bp, Homo sapiens
ggctcctggaacagcgtgggtggcgcaaaagagaggctccccatgtgcagagaagcaaggtatgtgagaacagacctccagctgggtcaggagaaagcactcctgtgtggaggcgtgctctgcaagtggagaccattcctcacagcagctatgagatgagagagaggtgggggctgcacagctgagtgatggaaatgacgggggtggggcgtggtaccactgttgccttgcccagagagyggaagctgttgagcacaggcctccaagtcagactttgccactaagccgctgcacaatctccagccttcactctctgcctcagttttcttctctgcacagtggggatgcttgttttgttcccatgagttggtcagagcatatgttaccaccactggtaagaagggtaccgtttttctccccttttaaaggcagagaaggtgaggctcagagaaggtaagctacttgcccaggatcacatagcaaggagctggagggccaggcagtcagactttggagccctgccctaaaccgtgcttgtgaggatgacatgagatgatgtggggcctggcacacacaatatgtcctgtcagctcttagg

SEQ ID NO: 46763 - DNA, 598 bp, Homo sapiens
ggctcctggaacagcgtgggtggcgcaaaagagaggctccccatgtgcagagaagcaaggtatgtgagaacagacctccagctgggtcaggagaaagcactcctgtgtggaggcgtgctctgcaagtggagaccattcctcacagcagctatgagatgagagagaggtgggggctgcacagctgagtgatggaaatgacgggggtggggcgtggtaccactgttgccttgcccagagagtggaagctgttgagcacaggcctccaagtcagactttgccactaagccgctgcacaatctccagccttcactctctgcctcagttttctyctctgcacagtggggatgcttgttttgttcccatgagttggtcagagcatatgttaccaccactggtaagaagggtaccgtttttctccccttttaaaggcagagaaggtgaggctcagagaaggtaagctacttgcccaggatcacatagcaaggagctggagggccaggcagtcagactttggagccctgccctaaaccgtgcttgtgaggatgacatgagatgatgtggggcctggcacacacaatatgtcctgtcagctcttagg

SEQ ID NO: 46764 - DNA, 598 bp, Homo sapiens
ggctcctggaacagcgtgggtggcgcaaaagagaggctccccatgtgcagagaagcaaggtatgtgagaacagacctccagctgggtcaggagaaagcactcctgtgtggaggcgtgctctgcaagtggagaccattcctcacagcagctatgagatgagagagaggtgggggctgcacagctgagtgatggaaatgacgggggtggggcgtggtaccactgttgccttgcccagagagtggaagctgttgagcacaggcctccaagtcagactttgccactaagccgctgcacaatctccagccttcactctctgcctcagttttcttctctgcacagtggggatgcttgttttgttcccatgagttggtcagagcatatgttaccaccactggtaagaagggtaccgtttttctccccttttaaaggcagagaaggtgaggctcagagaaggtaagctacttgcccaggatcacatagcaaggagctggagggccaggcagtcagactttggagccctgcsctaaaccgtgcttgtgaggatgacatgagatgatgtggggcctggcacacacaatatgtcctgtcagctcttagg

SEQ ID NO: 46765 - DNA, 599 bp, Homo sapiens
agctccctcctctgtggaatgaatgtgggcaatcgcttttgcagtgtttgacgatgccagtttatggctatgtttttctgttcactgaactggctcatttcttcaggagaacaaactgttctccactgaagcaggaattggctgggttctaacaaaaagatttttcccccctgacagtgtttttgcaaaagacccaagtcaatttatagccaagtaacaaaaggtcagaaaggttagtcaagcaatgggcgtaattcctgtgtgtcacagccaataaaggaaatgggtggggataaatagtatgcaattttaacctgaaattatttgtgcaaaactattcttgtaaactatacaaaattacccatgacttccactatataggatttctcactctgatttttttaaaggyacatttactttggaagaactgagatgacctcaaattcctcattcacaaatggaaaatgttaaaaactttcttcacactaatataagaaaaacttggtcattgttttgcagccctgaaacagaattgttcacataaaaaaaaaaatctcatagttaagtcacaattaaatacaatttgcatgactgaattt

SEQ ID NO: 46766 - DNA, 538 bp, Homo sapiens
ttttatattctttgacttttagcatatgcattatatattcagtagtatatttaattatacagtatgcatacatattatctattatagatattttaaaaactraaagtgtctggttttggtgcctagatatctgagcatctaaactaacaaatgaatgttgtgtgtgaatttaacaaatgatttaaaagcgatggtcaaattggaaatgcaaagatttaaagaaataatttcttagtctaggaccagtatgatgtacagagggtggctttgatgagaaaagagtatagatttaacattcaaaaaattatagcctaaacttctagctctattatttactgagtatgttagtctgactcaagtcactaatctctatgagccttactttccacatctgcaactggaataagaacacctgccccatagtgttttctaaaggattcaatgagacaatacgtgtaaattgcctagtacaaagctagtagcatagcaggcactcaatatatgttcatttgtaattttaaaagttattatcaaaata

SEQ ID NO: 46767 - DNA, 538 bp, Homo sapiens
ttttatattctttgacttttagcatatgcattatatattcagtagtatatttaattatacagtatgcatacatattatctattatagatattttaaaaactaaaagtgtctggttttggtgcctagatatctgagcatctaaactaacaaatgaatgttgtgtgtgaatttaacaaatgatttaaaagcgatggtcaaattggaaatgcaaagatttaaagaaataatttcttagtctaggaccagtatgatgtacagagggtggctttgatgagaaaagagtatagatttaacattcaaaaaattatagcctaaacttctagctctattatttactgagtatgttagtctgactcaagtcactaatctctatgagccttactttccacatctgcaactggaataagaacacctgccccatagtgttttctaaaggattcaatgagacartacgtgtaaattgcctagtacaaagctagtagcatagcaggcactcaatatatgttcatttgtaattttaaaagttattatcaaaata

SEQ ID NO: 46768 - DNA, 396 bp, Homo sapiens
aaaggaaggaaggaaagaaagaaggaaggaaggaaggaaggaaggaaggaaggaaggaaggaaagaaggaaagaaggattattcaaaatgttttgccaggatactttgtactgtgctattgtaagcacttttgtgagttttctttggagttttggaggtagaaataagatccaaatatattgatttttttcattaaccccgctctaactggtttaaaataccaaaattaacaggtggcagggttaccaattagcacaacaggagacaagcacactgaatatttttacaatctaaatttagaaggggagattttttgaaaattggcaggatataaaaactaaaaartgttttcctttagttttctatttagatgaaaggattgtttttgcttcaaat

SEQ ID NO: 46769 - DNA, 525 bp, Homo sapiens
attcgagtgtrtcattcattgtctatctctccacttatctaaggcagcacctctaatagaagagacatagagtgttttcattgccttcccttcttgtctctcttgcctggatgcctttatctccaaatgtattcttcatagtgttgttacccttttattcccaatgtaggttgcattatgtcactcacctccacaaaagtcattatttctccttaatctgattccaatcattaatttgtaatgaactaaacatttcttagaatgagttttaaagtttttgattattaactattctcttagttgcttactccattatttacaattaattgtatcacatactgtgccccatcagctctagaatacttaacatgctccaaacacattgttatatttttctgtttctgccaaaaaatatactttacttgtatagtaagagagagccgttaaggttatgggctttgtggttagattgttttagtttgaatctttaatacttgccagttgtgtggccttgggcaggttatt

SEQ ID NO: 46770 - DNA, 525 bp, Homo sapiens
attcgagtgtgtcattcattgtctatctctccayttatctaaggcagcacctctaatagaagagacatagagtgttttcattgccttcccttcttgtctctcttgcctggatgcctttatctccaaatgtattcttcatagtgttgttacccttttattcccaatgtaggttgcattatgtcactcacctccacaaaagtcattatttctccttaatctgattccaatcattaatttgtaatgaactaaacatttcttagaatgagttttaaagtttttgattattaactattctcttagttgcttactccattatttacaattaattgtatcacatactgtgccccatcagctctagaatacttaacatgctccaaacacattgttatatttttctgtttctgccaaaaaatatactttacttgtatagtaagagagagccgttaaggttatgggctttgtggttagattgttttagtttgaatctttaatacttgccagttgtgtggccttgggcaggttatt

SEQ ID NO: 46771 - DNA, 525 bp, Homo sapiens
attcgagtgtgtcattcattgtctatctctccacttatctaaggcagcacctctaatagaagagacatmgagtgttttcattgccttcccttcttgtctctcttgcctggatgcctttatctccaaatgtattcttcatagtgttgttacccttttattcccaatgtaggttgcattatgtcactcacctccacaaaagtcattatttctccttaatctgattccaatcattaatttgtaatgaactaaacatttcttagaatgagttttaaagtttttgattattaactattctcttagttgcttactccattatttacaattaattgtatcacatactgtgccccatcagctctagaatacttaacatgctccaaacacattgttatatttttctgtttctgccaaaaaatatactttacttgtatagtaagagagagccgttaaggttatgggctttgtggttagattgttttagtttgaatctttaatacttgccagttgtgtggccttgggcaggttatt

SEQ ID NO: 46772 - DNA, 525 bp, Homo sapiens
attcgagtgtgtcattcattgtctatctctccacttatctaaggcagcacctctaatagaagagacatagagtgttttcattgccttcccttcttgtctctcttgcctggatgcctttatctccaaatgtattcttcatagtgttgttacccttttattcccaatgtaggttgcattatgtcactcacctccacaaaagtcattatttctccttaatctgattccaatcattaatttgtaatgaactaaacatttcttagaatgagttttaaagtttttgattattaactattctcttagttgcttactccattatttacaattaattgtatcacatactgtgccccatcagctctagaatacttaacatgctccaaacacattgttatatttttctgtttctgccaaaaaatatactttacttgtatagtaagagagagccgttaaggttatgggctttgtggttagattgttttagtttgaatctttaatacktgccagttgtgtggccttgggcaggttatt

SEQ ID NO: 46773 - DNA, 627 bp, Homo sapiens
aaacacaatcatctgcttctactggtaccaggaagaatgtcttccaaacaccaaggagggaggggtcaaggagaccactggcttattaattttcatccwtcattccactgaatcccagaaccaccggacagtgccactgaggatcctgaaagccaagctctacctctttgaggaaaaatttcttgtcacttaccaccctaaagcaatgagaatgagagtgtcctgtggccccagacagcctccattctcagtttacaccataaacatgctgggggaacactaaagggactccctaaaatcgatgccattattttttattttgaaaattttctaccagaaatggaccaggtgctgtggctcatgtctgtaatcccaacactgctggacaccaaggcaggcagttcacttgaggtcaggagttcgagaacagcctggcctacataatgaaacgatgtctctactacatacaaaaaaattaagaatcatttgactccagaaggcagaggttgcagagagccaagatctcaccactgctctccagcctgggtgacagagttggactcagactcaaacaaaaacaaattgataaattaattaattaaaatgttagccaggtgtggtcatgca

SEQ ID NO: 46774 - DNA, 627 bp, Homo sapiens
aaacacaatcatctgcttctactggtaccaggaagaatgtcttccaaacaccaaggagggaggggtcaaggagaccactggcttattaattttcatccttyattccactgaatcccagaaccaccggacagtgccactgaggatcctgaaagccaagctctacctctttgaggaaaaatttcttgtcacttaccaccctaaagcaatgagaatgagagtgtcctgtggccccagacagcctccattctcagtttacaccataaacatgctgggggaacactaaagggactccctaaaatcgatgccattattttttattttgaaaattttctaccagaaatggaccaggtgctgtggctcatgtctgtaatcccaacactgctggacaccaaggcaggcagttcacttgaggtcaggagttcgagaacagcctggcctacataatgaaacgatgtctctactacatacaaaaaaattaagaatcatttgactccagaaggcagaggttgcagagagccaagatctcaccactgctctccagcctgggtgacagagttggactcagactcaaacaaaaacaaattgataaattaattaattaaaatgttagccaggtgtggtcatgca

SEQ ID NO: 46775 - DNA, 627 bp, Homo sapiens
aaacacaatcatctgcttctactggtaccaggaagaatgtcttccaaacaccaaggagggaggggtcaaggagaccactggcttattaattttcatccttcrttccactgaatcccagaaccaccggacagtgccactgaggatcctgaaagccaagctctacctctttgaggaaaaatttcttgtcacttaccaccctaaagcaatgagaatgagagtgtcctgtggccccagacagcctccattctcagtttacaccataaacatgctgggggaacactaaagggactccctaaaatcgatgccattattttttattttgaaaattttctaccagaaatggaccaggtgctgtggctcatgtctgtaatcccaacactgctggacaccaaggcaggcagttcacttgaggtcaggagttcgagaacagcctggcctacataatgaaacgatgtctctactacatacaaaaaaattaagaatcatttgactccagaaggcagaggttgcagagagccaagatctcaccactgctctccagcctgggtgacagagttggactcagactcaaacaaaaacaaattgataaattaattaattaaaatgttagccaggtgtggtcatgca

SEQ ID NO: 46776 - DNA, 627 bp, Homo sapiens
aaacacaatcatctgcttctactggtaccaggaagaatgtcttccaaacaccaaggagggaggggtcaaggagaccactggcttattaattttcatccttcaytccactgaatcccagaaccaccggacagtgccactgaggatcctgaaagccaagctctacctctttgaggaaaaatttcttgtcacttaccaccctaaagcaatgagaatgagagtgtcctgtggccccagacagcctccattctcagtttacaccataaacatgctgggggaacactaaagggactccctaaaatcgatgccattattttttattttgaaaattttctaccagaaatggaccaggtgctgtggctcatgtctgtaatcccaacactgctggacaccaaggcaggcagttcacttgaggtcaggagttcgagaacagcctggcctacataatgaaacgatgtctctactacatacaaaaaaattaagaatcatttgactccagaaggcagaggttgcagagagccaagatctcaccactgctctccagcctgggtgacagagttggactcagactcaaacaaaaacaaattgataaattaattaattaaaatgttagccaggtgtggtcatgca

SEQ ID NO: 46777 - DNA, 627 bp, Homo sapiens
aaacacaatcatctgcttctactggtaccaggaagaatgtcttccaaacaccaaggagggaggggtcaaggagaccactggcttattaattttcatccttcattccactgaatcccagaaccaccggacagtgccactgaggatcctgaaagccaagctctacctctttgaggaaaaatttcttgtcacttaccaccctaaagcaatgagaatgagagtgtcctgtggccccagacagcctccattctcagtttacaccataaacatgctgggggaacactaaagggactccctaaaatcgatgccattattttttattttgaaaattttctaccagaaatggaccaggtgctgtggctcatgtctgtaatcccaacactgctggacaccaaggcaggcagttcacttgaggtcaggagttcgagaacagcctggcctacataatgaaacgatgtctctactacatacaaaaaaattaagaatcatttgactccagaaggcagaggttgcagagagccaagatctcaccactgctctccagcctgggtgacagagttggactcmgactcaaacaaaaacaaattgataaattaattaattaaaatgttagccaggtgtggtcatgca

SEQ ID NO: 46778 - DNA, 1132 bp, Homo sapiens
tttttttaaactctaatctcatgacagagtaactagttgattttattaaaaacctacacagaagtttaaaaatatagtaagaaattcagaatcttaactagaggatttcaaagctttaatgagggaatttaatataccactttcaaacttcatcaacctaagtacctgaaattatacaagagaatagaacttttgaatatgtaacacaattaataaattcaacatgatagcatataagaactttataaaaaagaaaagctataaaatttgtaagagttatcaagaatgaagccataataaatgacgagtcatatattactgtaagaggagagtgaatattataaagatatcaattcatctgtattaaatttacaggtttaaatgttattccaaataaaacttaaatatatttaactttagggctttgaaaaaaatgacttaaagcctttctgaaaaataaagtttcaagtagattagaaaaagcatcgctagagaagacatgaggagggrataatcatattaggtactgctatgcatttgaacactgtaacaatttaatcaacagagcacaaagaccaatggagggaatagagagaagtataacatggtagttaaggccatgaatgttgatttattaaaaacaagatttggagacttctttttttcagctcctttacctaagcagcttggaaatcatcactcttatcctcactgtcaggcctctgagcccaagcctgcatgtatacatccagatggcctgaggcaacagaagaaccacaaaagaagtgaaaatggccggttcctgccttaactgatgacattaccttgtgaaattccttctcctgcacaatgagtctcagaagctcccccactgagcaccttgtgactcccgccccagccagagaataaccccctttaactgtgatttttccactacctatccaaatcctataaaactgacccacccctatttccctttgctgactctcttttcagactcagcccacttgcacccaagtgaaataaacagccttgttgctcacacaaagcctgttggtggactctctctgcacagacgtgtgtgacacttacaagaaaagagctgaacaaacttaaaatcatggacatttct

SEQ ID NO: 46779 - DNA, 1708 bp, Homo sapiens
tctcagcccttctagaactcccaggaatgcacgttgttaaaaacaaataaatagataaaaattcaagtcccttcttgccaagagaaggagcttgaagttacacacttgatattcacttagaactttacagaaatttcttttttcaaactgaaacctttcatgttcagattctgccccagagctgatctttttttaaaaatgcctgagtaaaatctttttagttgcttttgagtcagaagagagagcaagaaaacctccttcagcaactttaaaaaaggccctgacttttgcttggcaataacttaaaaatcagttttaagttgagcaaagtcatgcttcaaacatggcttgaggaacactcagtggatttgaaaaagttttgttttttccccaagactccaaaatgactgaagaaacactgtgaagccagcccagactcctgacttatctttttatcaggttggcaccaccacagcccttggcaactctggcattcatttacccaggtgctgatactgattgcttaataggtgatgttcctgcaacatgccatcagacagtctgagaagactgtggtcaaaccttctttagccaacactgatgaccctaagaccttaatgttgcagcttataaagtattttcatgaccattatttccttaaaccttaaaaaaaacctgacaaggtgtgcagggaagacaggtagcaaaccccatttcaaagatgaggaaaccgaagcacagatgttaactgatgtcactagggtgacgtgactactaagatctccgtgtcctaacctgatgacctcttcatcatgctatactcctggtgagggtagaaaaaatggtcagagatagctcaaagagacagtcttaaacctttcttgggtaagttacataatgtctctaagcttcaactgctttgcctgtcaatgcaaataataactatacaaggataaataaaccacagtgttgtaacaatatatgcaacgatgaaagtcatcttctctattatccaatccatagtagtcactcaataaatggtagctcttattactgttaaaaatcctatcgtctggcatactaaagatataaaatatccatctaatctcatgtcactgtgttcccagcttccatagcccaatccatctaatgtcatgtaattgtgttcccagcttccatagcccgaaccatctaatctcatgtaattgtgttcccagcttccatagcccgatccatctaatctcatgtaactgtgttcccagcttccatagcccgatccatctaatctcatgtaattgggttcccagcttccatagcccaatccatctaatttcatgtaattgagttcccagcttccatagcccatttagggcaggctctaccatttccttatcattatcttcattttattaccaccaccttagtaagaccttatctaattcacctcccactgacccttcaagatgagtattgatgtccccatgttgaagctggtgaaactgaggttcagagtggcacacatctcaaaagcagcraaaacaggttcaaatctcaagtctgtatccaaagccaatgctcttaatcactttgctatgctgtgcagcagccctcaacaaaaatcctagtctaatccacgctctttgggtctaaaaatcccctcaagtactagtggtatcatcctcaggtgttactactcccaggagaatgc

SEQ ID NO: 46780 - DNA, 588 bp, Homo sapiens
aataccacgttattgtctgaatatattcaatttattttcaacataaacatgtaacctcaatagtgaaatgtgtaactaatgcaagctcctccaacaagaccaagacagcatctcttcttctaaggcttaggttttgcccagaattcccaatatagggaatagcccataccaggagtcattgctcccattacaaagccttgggctgccatacacatgtggatcaggtgaagggacattttaatatttcccctgatcttcaatttgttaatccatgtgcaacaattgctgcaaaacctgctattccagtgggattaatggtgtcttttcagcttttcaaataagtttggattcctgatcttcattatatgaagaaagaaaaacatctgtgttggttgacacagtgattgcttgaagaatcttctgasagcgagaaaaactcttacaatccaaatggctcctccaatctttatagtttccaattttttcttattattgagttttaggaattctttgttatattttggatataaatcctttgtcagataagtgtttgcaattcttttcttccattctttcatttttttaaca

SEQ ID NO: 46781 - DNA, 588 bp, Homo sapiens
aataccacgttattgtctgaatatattcaatttattttcaacataaacatgtaacctcaatagtgaaatgtgtaactaatgcaagctcctccaacaagaccaagacagcatctcttcttctaaggcttaggttttgcccagaattcccaatatagggaatagcccataccaggagtcattgctcccattacaaagccttgggctgccatacacatgtggatcaggtgaagggacattttaatatttcccctgatcttcaatttgttaatccatgtgcaacaattgctgcaaaacctgctattccagtgggattaatggtgtcttttcagcttttcaaataagtttggattcctgatcttcattatatgaagaaagaaaaacatctgtgttggttgacacagtgattgcttgaagaatcttctgacagcgagaaaaactcttacaatccaaatggctcctccaatctttatagtttccaattttttcttattrttgagttttaggaattctttgttatattttggatataaatcctttgtcagataagtgtttgcaattcttttcttccattctttcatttttttaaca

SEQ ID NO: 46782 - DNA, 588 bp, Homo sapiens
aataccacgttattgtctgaatatattcaatttattttcaacataaacatgtaacctcaatagtgaaatgtgtaactaatgcaagctcctccaacaagaccaagacagcatctcttcttctaaggcttaggttttgcccagaattcccaatatagggaatagcccataccaggagtcattgctcccattacaaagccttgggctgccatacacatgtggatcaggtgaagggacattttaatatttcccctgatcttcaatttgttaatccatgtgcaacaattgctgcaaaacctgctattccagtgggattaatggtgtcttttcagcttttcaaataagtttggattcctgatcttcattatatgaagaaagaaaaacatctgtgttggttgacacagtgattgcttgaagaatcttctgacagcgagaaaaactcttacaatccaaatggctcctccaatctttatagtttccaattttttcttattattgagttttaggaattctttgttatattttggatataaakcctttgtcagataagtgtttgcaattcttttcttccattctttcatttttttaaca

SEQ ID NO: 46783 - DNA, 581 bp, Homo sapiens
ctggcaaggagatgggatgaccatgattggttttagttaatgatctgtgatgaaatggaagtcatgtagtcaatctctgtgtttttcaaaacatgagagagagattcatcatatacatgtaacaataaaaaggtatggcaagttagctacrtcaagtattgcagtaaattttttatgcacattgcctcattgaatccccaccagagtccacaaacgcaagttgtatttttatttccattttactaatgcagaaactgaggctcagagaagtgaaataattttctgaaggttgcaccaccagtacgtgcctgagatttcattacttgtttaattccacaactattaacaactatgctatcctgcctttttcagcattcccagtatttttaatatcaaaaataatgcttgaaaagaaaatgtgttattttgacacagacatgtatacctctaaacagcacactagcacagaaaacacatatttatacaataatctttttataaagaaactttgaattatcccctctagttttgtcatatgcatttacatatttactttgtgatcatagattagatttgtctcc

SEQ ID NO: 46784 - DNA, 581 bp, Homo sapiens
ctggcaaggagatgggatgaccatgattggttttagttaatgatctgtgatgaaatggaagtcatgtagtcaatctctgtgtttttcaaaacatgagagagagattcatcatatacatgtaacaataaaaaggtatggcaagttagctacatcaagtattgcagtaaattttttatgcacattgcctcattgaatccccaccagagtccacaaacgcaagttgtatttttatttccattttactaatgcagaaactgaggctcagagaagtgaaataattttctgaaggttgcaccaccagtacgtgcctgagatttcattacttgtttaattccacaactattaacaactatgctatcctgmctttttcagcattcccagtatttttaatatcaaaaataatgcttgaaaagaaaatgtgttattttgacacagacatgtatacctctaaacagcacactagcacagaaaacacatatttatacaataatctttttataaagaaactttgaattatcccctctagttttgtcatatgcatttacatatttactttgtgatcatagattagatttgtctcc

SEQ ID NO: 46785 - DNA, 598 bp, Homo sapiens
tccctaagtccaaatactgccccatggaggcatgccaaagcaggttttctattctgaggagccttgctggaagacggctgagtacacaggaccatttaggaatcttttcaaaatcacagtcctcatattgtttgccaagtgctgttctaagatccctaaatgtattaacttcataatccttacactgattccatgaagtagggactattgtgatcactttcccctgtctacttgtagatgtagatcttcgatggaggtgttgaaacacttgcccaagatcaccatttaggagtagggccaagttgtctggctccagggcccatgctcctacccactagtcactgtgtgccagtgtcccaccgcacctccagtgagatgggttcattcgtctgcagttcacatgggtgctttgaaatccgggaggaaaagacatcattcctcgttgcagtcagggctrcaagggcactctcttttttacttctttattgtaaatgtgctactctcttttctagagatactggtgagctctagaaaaatgttcccttctcttaaaaaaaagtttttcttaaaacaaagacagagaaagaaagaagggaaa

SEQ ID NO: 46786 - DNA, 1124 bp, Homo sapiens
tattctcatacaaaacctcagagagttccatgtttataggatgtggtactatattcataagttctatattaatataatgtgtatatatatatttaaacaggatctgggatattttgagtttttccttttattcattattattgtctcacacagcttcaactacactgtttctattttgagattcataagtaggacagggagaaagaaaacgtctcattgaataggagggaaagagtattaaggaaggggaaggaaccagctgagaagagcagtacaaaataatgcagacaatcccaggaaagtgaaaagacagtgaacgatgttgaacttggaagttataaagttttcagagacttcagtagagcaatataagtagagtaatgcggatagatagaagtcacatttcaaaagggtcaggaggaggtctgcatcagaaaattagtgaaaagaaagcacggtttttcttttcatggattttatcctgagagtgtggattaatccaaggaaattttttattattttgaaaaatagatggttgagaattattttaagaagagccaaagggccgggcgctgtggctcatgcctgtaatcccagcactttgggaggccgaggcgggtggatcacgagctcaggagatcgagaccatcctggctaacacggtgaaaccccgtctctactaaaaaatacaaaaaattagccgggcatggtggcgggcacctgtagccccagctacttgggaggctgaggcaggagaatggcgtgaacccrggaggcggagcttgcagtgagcggagatcgcgccactgcactccagcctgggcgacagagagagactccgtctcaaaaaaaagaagagccaaagaatctgatgacataagaagaatggtagaaaaggagagcagaaagagaaggcagaggggtgaaaatcacatggaggacttaaacttgcaaagtgaagtaagaggggcccagagcttcttaactagaatctgagagtgaggtggactaggacttcagaagaatgacggagatttggcaactgcaactgaggaaagaagagaaatactcaaagagatcaaattaaagactagttaagagacagaacggtggtctaaacggtt

SEQ ID NO: 46787 - DNA, 518 bp, Homo sapiens
tgcccctcagtcaaattctttcttctgaggaggcgataattgaggatgctgcagatccgtattcgctgccagtaacatgttttggtgccgcatgacccggataacttccactgctaacatttaccccccgaagaatagtgtaaggactgttcaaatcaattagagtcttctgcttgcataataggctttcttgcttttgtatttactgttatttcaagaactctcctttggctttgccactcaaacctgcctactagataatgactgccactgattgcagacacctcattttggataatttcttgcttttgtcctactcctttcctttttccactttggcccagcctttccttcctgagctggttttattccaggaattatackgcacagctgcgtgctggcctggtcaacttcagaactctatctgtagaaggggccctgagcactgtttactcacaaataaaggtagaatagtaaaggataaagccaaaaattgttacgtgagaaatgccaagaag

SEQ ID NO: 46788 - DNA, 527 bp, Homo sapiens
ttttgtacagtccaaataagattccgacaatggatgaatctgctaagaggttaccttttgctccagatacaatatttatctaaaaggaaaatgaacccttaacccttccatggaatcgtactgcttcactaactttttgagtgaagtgatgggcattgatacagtattgaaaactttcaggcccttttctttactttttgacaatttgaccttttttcacccctgaaatatagcaatcagtatttctcttctggatctggttctacaacctacgttgattttaattactttccttgaaaaccattctcaaaatactctctgccccttacattttaagctttaatgttgaaaatagagctttggtaagagtctcyttgaaaatgattttcttcagccaatatcagaggagtatttccttatttttatatttatatgttttaattccttaagaacagatatctaccaaatttcatggtatagatttataatcatcttttcaattttagacaaattttggaattcagatg

SEQ ID NO: 46789 - DNA, 523 bp, Homo sapiens
tggttggtgttcctctttattcaagaacattactgtgcacacaaatatatgctttttttcctagagataaaatacagcatccaaacttcaatgagtcaactgagataaaaatactattttttgttggccatgattgaagttctctctcttgcaccccccctcccaccgtctctttctctctctgtctttttgcataaatcacaagcttgaagcttcatttattatttccagcttatctttctttaaagtggaacaagataatgtagaaattatrtagattttattttttcctaattttaatttttgccctgttttgacaaattcttcacttataactgacttgataacagtttttcctagtgacttacttttattgaaaacatgttcatttcagtgggtgctgataaatcaattatcgttgaactttctctttttgcattcagatttaacttttaataaataagtacaattacctaattaaaaatatagcacatgtgacataaacagggttgagaatatttat

SEQ ID NO: 46790 - DNA, 1618 bp, Homo sapiens
gtcatgtttgcaacttttaattagaaacaattacctctggcttctattgttttaaccactagtctcttatgtgctaaatctaaaaatccataaaaattcatcaaaagccctgccatggatgctttaatgtatgtgtctcctgacaaagattcattgcttgagtaaactttaggcaggcttctgaaccttctcctaggcccatctttgcatttccttgtaaaaatccagttttagcaaggaagatctcccctaactcatatctgctaacccttgcttttgagattacagatttaattgaaatttcattgtttcttttctcacactaaagaatgcttggtgaagaaaactgcccgccgttgatgaccttcccagccacttttccatctcaagaaaatttaacaaaataaaaacaaaaaacaaaaactatgcacactttaggcttcttggagaaaactaaacatgctcacatttaagtagagacaaatatctgctcttcagcgtgttgccaagaatagagcaatcagaaaataccagttgagttgactgtaaggcatgtcacatgtggaaccctgaaggaaatgggaatgaataacccttgaagagaaaactagggaagacatgagaactgcctttagaaagtgggagggaaccaggatgaaagtaactctgtaaagcccacaagaagtgggacattgggaaatggaaggaaggcatttctaatagagttgtcaaagatagagagcagtctattattgagagtttccaagcttgagatggatgataacttgacagagacgttggagagaaggtctaaatattgaaggagagtaggaaatgttaggggccttccaacactgagaatcaatgaagaaaatttaatcaccagcaagcacacaaatgtctgggactgtctatacattccttatttcccaaggcagtagtaagagggtatatttctaagaaggtaggctgtcaggataatttatgagttaaataggagaattaagcacattgatcattttacttccctagtccatcgtccaattaaaacatcatggccctgagaatgaaccagtggagaatatacacaggacccaattgagatattattataatctacatttatttacatatatttattgcatacatactattcgctatgtactatggataaaaagatgaaatttccttatttccccaggaaaaattaccagtatgcttaatcttctattgtagcatcactcttgtatattataagtttatatatttatatatataattatatatattctatatatataattatatatattctatatatatagaataattatatatattctatatatatagaataattatatatattctatatatagaataattatatatattctatatatatagaataattatatatattctatatatatagaataattatatatattctatatatatagaataattatatatattctatatatatagaataattatatatattctatatatatagaataattatatrtattctatatatatagaataattatatgtattctatatatatagaataattatatgtattctatatatagaataattatatatatta

SEQ ID NO: 46791 - DNA, 1618 bp, Homo sapiens
gtcatgtttgcaacttttaattagaaacaattacctctggcttctattgttttaaccactagtctcttatgtgctaaatctaaaaatccataaaaattcatcaaaagccctgccatggatgctttaatgtatgtgtctcctgacaaagattcattgcttgagtaaactttaggcaggcttctgaaccttctcctaggcccatctttgcatttccttgtaaaaatccagttttagcaaggaagatctcccctaactcatatctgctaacccttgcttttgagattacagatttaattgaaatttcattgtttcttttctcacactaaagaatgcttggtgaagaaaactgcccgccgttgatgaccttcccagccacttttccatctcaagaaaatttaacaaaataaaaacaaaaaacaaaaactatgcacactttaggcttcttggagaaaactaaacatgctcacatttaagtagagacaaatatctgctcttcagcgtgttgccaagaatagagcaatcagaaaataccagttgagttgactgtaaggcatgtcacatgtggaaccctgaaggaaatgggaatgaataacccttgaagagaaaactagggaagacatgagaactgcctttagaaagtgggagggaaccaggatgaaagtaactctgtaaagcccacaagaagtgggacattgggaaatggaaggaaggcatttctaatagagttgtcaaagatagagagcagtctattattgagagtttccaagcttgagatggatgataacttgacagagacgttggagagaaggtctaaatattgaaggagagtaggaaatgttaggggccttccaacactgagaatcaatgaagaaaatttaatcaccagcaagcacacaaatgtctgggactgtctatacattccttatttcccaaggcagtagtaagagggtatatttctaagaaggtaggctgtcaggataatttatgagttaaataggagaattaagcacattgatcattttacttccctagtccatcgtccaattaaaacatcatggccctgagaatgaaccagtggagaatatacacaggacccaattgagatattattataatctacatttatttacatatatttattgcatacatactattcgctatgtactatggataaaaagatgaaatttccttatttccccaggaaaaattaccagtatgcttaatcttctattgtagcatcactcttgtatattataagtttatatatttatatatataattatatatattctatatatataattatatatattctatatatatagaataattatatatattctatatatatagaataattatatatattctatatatagaataattatatatattctatatatatagaataattatatatattctatatatatagaataattatatatattctatatatatagaataattatatatattctatatatatagaataattatatatattctatatatatagaataattatatatattctatatatatagaataattatatgtattctatatatatagaataattatatrtattctatatatagaataattatatatatta

SEQ ID NO: 46792 - DNA, 1618 bp, Homo sapiens
gtcatgtttgcaacttttaattagaaacaattacctctggcttctattgttttaaccactagtctcttatgtgctaaatctaaaaatccataaaaattcatcaaaagccctgccatggatgctttaatgtatgtgtctcctgacaaagattcattgcttgagtaaactttaggcaggcttctgaaccttctcctaggcccatctttgcatttccttgtaaaaatccagttttagcaaggaagatctcccctaactcatatctgctaacccttgcttttgagattacagatttaattgaaatttcattgtttcttttctcacactaaagaatgcttggtgaagaaaactgcccgccgttgatgaccttcccagccacttttccatctcaagaaaatttaacaaaataaaaacaaaaaacaaaaactatgcacactttaggcttcttggagaaaactaaacatgctcacatttaagtagagacaaatatctgctcttcagcgtgttgccaagaatagagcaatcagaaaataccagttgagttgactgtaaggcatgtcacatgtggaaccctgaaggaaatgggaatgaataacccttgaagagaaaactagggaagacatgagaactgcctttagaaagtgggagggaaccaggatgaaagtaactctgtaaagcccacaagaagtgggacattgggaaatggaaggaaggcatttctaatagagttgtcaaagatagagagcagtctattattgagagtttccaagcttgagatggatgataacttgacagagacgttggagagaaggtctaaatattgaaggagagtaggaaatgttaggggccttccaacactgagaatcaatgaagaaaatttaatcaccagcaagcacacaaatgtctgggactgtctatacattccttatttcccaaggcagtagtaagagggtatatttctaagaaggtaggctgtcaggataatttatgagttaaataggagaattaagcacattgatcattttacttccctagtccatcgtccaattaaaacatcatggccctgagaatgaaccagtggagaatatacacaggacccaattgagatattattataatctacatttatttacatatatttattgcatacatactattcgctatgtactatggataaaaagatgaaatttccttatttccccaggaaaaattaccagtatgcttaatcttctattgtagcatcactcttgtatattataagtttatatatttatatatataattatatatattctatatatataattatatatattctatatatatagaataattatatatattctatatatatagaataattatatatattctatatatagaataattatatatattctatatatatagaataattatatatattctatatatatagaataattatatatattctatatatatagaataattatatatattctatatatatagaataattatatatattctatatatatagaataattatatatattctatatatatagaataattatatgtattctatatatatagaataattatatgtattmtatatatagaataattatatatatta

SEQ ID NO: 46793 - DNA, 655 bp, Homo sapiens
aaccagccaggaaagcagtcccgcagtgtttcaggcccactcctttaatctctcccgaggctgagaacagcctctttctagccacccagcccctttattaaacttccttcctgcccccagtcctgctgctgcctttgtgaggtaagttggacttgtgtttctgtctttggagaacagctctgcaatagaaatggcttcctgaaggcaggagctgcctctgagctgcctccaagccagcctggggcctgcagtacagatgctgggaatgggcggccgacagaaccaagccatatcctatccttagacccaatcccagacagcaggaccatgtggctcccaatgtggagataagagggaagcagtagcgacatctgggcatcacttggcagcgtggctttggctgctcagcacgtgcttgctagakaatccctgatggctgttatggcttacacatttaaccacttccctttggtacatgtgtagaggtgctgggtaagcatcttgtcaactttaacacagctgacaaagttatgacaccaagaatgcttagactttgcagttttccccgaactccggctgatcctgttaaaatgtctctccttacagagagctgatttgtgcccccaaattttctcatctcagcaggcagggtctc

SEQ ID NO: 46794 - DNA, 655 bp, Homo sapiens
aaccagccaggaaagcagtcccgcagtgtttcaggcccactcctttaatctctcccgaggctgagaacagcctctttctagccacccagcccctttattaaacttccttcctgcccccagtcctgctgctgcctttgtgaggtaagttggacttgtgtttctgtctttggagaacagctctgcaatagaaatggcttcctgaaggcaggagctgcctctgagctgcctccaagccagcctggggcctgcagtacagatgctgggaatgggcggccgacagaaccaagccatatcctatccttagacccaatcccagacagcaggaccatgtggctcccaatgtggagataagagggaagcagtagcgacatctgggcatcacttggcagcgtggctttggctgctcagcacgtgcttgctagagaatccctgatggctgttatggcttacacatttaaccacttccctttggtacatgtgtagaggtgctgggtaagcatcttgtcaactttaacacagctgacaaagttatgacaccaagaatgcttagactttgcagttttccccgaactccggctgatcctgttaaaatgtctctccttmcagagagctgatttgtgcccccaaattttctcatctcagcaggcagggtctc

SEQ ID NO: 46795 - DNA, 604 bp, Homo sapiens
tagtacgtgaattggagaaaaagttcactggtaagtatgtcgtctattgcttagaggaaaattctgcctaaaccaactcaaaaaaggtgtacaaaaaataagcaaaagcgtcccaggatccacgctccgacagctgcgcacgtcgcaatcctcgaggactcggtcttcccaggtgaaattgtgggcaggagaatcsgcgtgaaatggacacagcagctcacaagggttcattcggacaaagcccagcagaacaacgtggaacgcaaggtccaaactttttctggtatcgataagaagctcacagccaaggctgttaattctgaatccccagagttcccagtttcaattgttaagaaaaatgactaacgtatactcacagtgaaaaaacaaaaagacacacaaaatacaaaaattagctgggcatggtggcacatgcctgaggtcccagctacccaacaggctgaggtgggaggattgcctaagcctgggaggccgaggttgcagtgagtcgtgacctcgccactgcactgcagcctgggcgacagagcaagaccctgtctcaaaaacataaaaaaaacaaaagaaaaaaaacaaaaaaaaacca

SEQ ID NO: 46796 - DNA, 604 bp, Homo sapiens
tagtacgtgaattggagaaaaagttcactggtaagtatgtcgtctattgcttagaggaaaattctgcctaaaccaactcaaaaaaggtgtacaaaaaataagcaaaagcgtcccaggatccacgctccgacagctgcgcacgtcgcaatcctcgaggactcggtcttcccaggtgaaattgtgggcaggagaatccgcgtgaaatggacacagcagctcacaagggttcattcggacaaagcccagcagaayaacgtggaacgcaaggtccaaactttttctggtatcgataagaagctcacagccaaggctgttaattctgaatccccagagttcccagtttcaattgttaagaaaaatgactaacgtatactcacagtgaaaaaacaaaaagacacacaaaatacaaaaattagctgggcatggtggcacatgcctgaggtcccagctacccaacaggctgaggtgggaggattgcctaagcctgggaggccgaggttgcagtgagtcgtgacctcgccactgcactgcagcctgggcgacagagcaagaccctgtctcaaaaacataaaaaaaacaaaagaaaaaaaacaaaaaaaaacca

SEQ ID NO: 46797 - DNA, 604 bp, Homo sapiens
tagtacgtgaattggagaaaaagttcactggtaagtatgtcgtctattgcttagaggaaaattctgcctaaaccaactcaaaaaaggtgtacaaaaaataagcaaaagcgtcccaggatccacgctccgacagctgcgcacgtcgcaatcctcgaggactcggtcttcccaggtgaaattgtgggcaggagaatccgcgtgaaatggacacagcagctcacaagggttcattcggacaaagcccagcagaacaacgtggaacgcaaggtccaaactttttctggtatcgataagaagctcacagccaaggctgttaattctgaatccccagagttccmagtttcaattgttaagaaaaatgactaacgtatactcacagtgaaaaaacaaaaagacacacaaaatacaaaaattagctgggcatggtggcacatgcctgaggtcccagctacccaacaggctgaggtgggaggattgcctaagcctgggaggccgaggttgcagtgagtcgtgacctcgccactgcactgcagcctgggcgacagagcaagaccctgtctcaaaaacataaaaaaaacaaaagaaaaaaaacaaaaaaaaacca

SEQ ID NO: 46798 - DNA, 604 bp, Homo sapiens
tagtacgtgaattggagaaaaagttcactggtaagtatgtcgtctattgcttagaggaaaattctgcctaaaccaactcaaaaaaggtgtacaaaaaataagcaaaagcgtcccaggatccacgctccgacagctgcgcacgtcgcaatcctcgaggactcggtcttcccaggtgaaattgtgggcaggagaatccgcgtgaaatggacacagcagctcacaagggttcattcggacaaagcccagcagaacaacgtggaacgcaaggtccaaactttttctggtatcgataagaagctcacagccaaggctgttaattctgaatccccagagttcccagtttcaattgttaagaaaaatgactaacgtataytcacagtgaaaaaacaaaaagacacacaaaatacaaaaattagctgggcatggtggcacatgcctgaggtcccagctacccaacaggctgaggtgggaggattgcctaagcctgggaggccgaggttgcagtgagtcgtgacctcgccactgcactgcagcctgggcgacagagcaagaccctgtctcaaaaacataaaaaaaacaaaagaaaaaaaacaaaaaaaaacca

SEQ ID NO: 46799 - DNA, 604 bp, Homo sapiens
tagtacgtgaattggagaaaaagttcactggtaagtatgtcgtctattgcttagaggaaaattctgcctaaaccaactcaaaaaaggtgtacaaaaaataagcaaaagcgtcccaggatccacgctccgacagctgcgcacgtcgcaatcctcgaggactcggtcttcccaggtgaaattgtgggcaggagaatccgcgtgaaatggacacagcagctcacaagggttcattcggacaaagcccagcagaacaacgtggaacgcaaggtccaaactttttctggtatcgataagaagctcacagccaaggctgttaattctgaatccccagagttcccagtttcaattgttaagaaaaatgactaacgtatactcacagtgaaaaaacaaaaagacacacaaaatacaaaaattagctgggcatggtggcacatgcctgaggtcccagctacccaacaggctgaggtgggaggattgcctaagcctgggaggccgaggttgcagtgagtcgtgacctcgccactgcactgcagcctgggcgacagagcaagaccctgtctcaaaaacataaaaaaaacaaaaraaaaaaaacaaaaaaaaacca

SEQ ID NO: 46800 - DNA, 530 bp, Homo sapiens
ataaggggctgaaaaaaacgctcagggtgggctgaacagtttatgttaggaagacagcagagactggmttgcttacagccaagggtttttgttctggatggacttatacaattgggaatcttaaataccttgttaagtttagctttattttggaagaagactttagacgttaaagacttcagagaaagtaagagatggtgaaacctgtggttttggaagaatttttctctaaactcccaaggagttaacttcaggaaatggaaaataactcttccacaggattcagacgtagagcaaagtggttagttgagcaaagtggttaagagggcaggttctggagttggtctgtgttcaagtcctatctctgctaccaaatagcagtgagacatgtggtaagttaaacctttctggacctcagtttcctcactataaaaagttgctgtgaggaatgaataaactcccacctaaaacacttccaataacccagtgaccagcacacagtaaaaatacataagtactagatctgttca

SEQ ID NO: 46801 - DNA, 540 bp, Homo sapiens
tcacacaattggcagtgtcagaatttgaactcagaagacaccaaagtcactacacaacacgatatcctacacccttgatctgaggacccaaaatctagtgtcacatggtccagaaatacctggatgaatctcttgcggggcatsgagaagaaactggggatgtatacattttggaaaacgggacatgtcaacaaatctgaaggacgatgatatacaatagaagtgagaattttgttgttgctgcttcaaagggcaaaagtaggctgcaaatgtgaaagccacaggaaggcagattatgcttccctagaaggaaacactatgcagctgtgtattgttaacaaaggaatgggttgcactgagatcttccccaacacagaagtacatttctgcataactctgtacttcttagtatgctgtttcttcatcctggagtattgagtgaactcctattcatccttcaggactcagcacaaatgccattcgtccatgcacccatccatccaaaagtattcattgaatgctatatgccaggaaatatat

SEQ ID NO: 46802 - DNA, 540 bp, Homo sapiens
tcacacaattggcagtgtcagaatttgaactcagaagacaccaaagtcactacacaacacgatatcctacacccttgatctgaggacccaaaatctagtgtcacatggtccagaaatacctggatgaatctcttgcggggcatcgagaagaaactggggatgtatacattttggaaaacgggacatgtcaacaaatctgaaggacgatgatatacaatagaagtgagaattttgttgttgctgcttcaaagggcaaaagtaggmtgcaaatgtgaaagccacaggaaggcagattatgcttccctagaaggaaacactatgcagctgtgtattgttaacaaaggaatgggttgcactgagatcttccccaacacagaagtacatttctgcataactctgtacttcttagtatgctgtttcttcatcctggagtattgagtgaactcctattcatccttcaggactcagcacaaatgccattcgtccatgcacccatccatccaaaagtattcattgaatgctatatgccaggaaatatat

SEQ ID NO: 46803 - DNA, 540 bp, Homo sapiens
tcacacaattggcagtgtcagaatttgaactcagaagacaccaaagtcactacacaacacgatatcctacacccttgatctgaggacccaaaatctagtgtcacatggtccagaaatacctggatgaatctcttgcggggcatcgagaagaaactggggatgtatacattttggaaaacgggacatgtcaacaaatctgaaggacgatgatatacaatagaagtgagaattttgttgttgctgcttcaaagggcaaaagtaggctgcaaatgtgmaagccacaggaaggcagattatgcttccctagaaggaaacactatgcagctgtgtattgttaacaaaggaatgggttgcactgagatcttccccaacacagaagtacatttctgcataactctgtacttcttagtatgctgtttcttcatcctggagtattgagtgaactcctattcatccttcaggactcagcacaaatgccattcgtccatgcacccatccatccaaaagtattcattgaatgctatatgccaggaaatatat

SEQ ID NO: 46804 - DNA, 620 bp, Homo sapiens
tccttgttggtctgcaagcttctccctaccactctcacctcacacctgcctgactcctcatggcccagctacactgatctactctgagttcctccaagtgtatgtgttctgtcttcccacagaaactttgcacctactattacttctacttgaatactttgctccttcttttctcttagttttcttctgctcatcctccaagtctcagcttgaatgtcattttcttgggcatttttctctgaactaccaattaatcagatcattgagasgtgcagtttatccatcaggagcctcatcccggtatacacatttatttatacaattgttcaacccttgcctggcccctcacttgtctatcctccccataagggcagaggtagcacctgtttggttcatgcttttgcccccagcacctattgcagctcctgggattggggaatgttctatacattttggtggaatgattgaataaagaaataactgatgaaaggaaagagctgagcacaataaattatacaccagcagcagcattccatacttgtgatagattattactatggtagtttgtgggggcagcagagaaaaagaatggtgaaaggagcttagaaatatcatcatgt

SEQ ID NO: 46805 - DNA, 620 bp, Homo sapiens
tccttgttggtctgcaagcttctccctaccactctcacctcacacctgcctgactcctcatggcccagctacactgatctactctgagttcctccaagtgtatgtgttctgtcttcccacagaaactttgcacctactattacttctacttgaatactttgctccttcttttctcttagttttcttctgctcatcctccaagtctcagcttgaatgtcattttcttgggcatttttctctgaactaccaattaatcagatcattgagaggtgcagtttatccatcaggagcctcatcccggtatacacatttatttatacaattgttcaacccttgcctggcccctcacttgtctatcctccccataagggcagaggtagcacctgtttggttcatgcttttgcccccagcacctattgcagctcctgggattggggaatgttctatacattttggtkgaatgattgaataaagaaataactgatgaaaggaaagagctgagcacaataaattatacaccagcagcagcattccatacttgtgatagattattactatggtagtttgtgggggcagcagagaaaaagaatggtgaaaggagcttagaaatatcatcatgt

SEQ ID NO: 46806 - DNA, 1404 bp, Homo sapiens
tgtgtgtgcatctgtggatcagtgtgagctcctcgaggtcacagacagtcttgtctcccacaggacctggaaaactgtgaatatctgttgaataaatgaaaacaatttgtgggaatgggaaggggggttggcaatccatcctgtaaatataagtatctgactatatatgactgttacaggttgtaagattgaaagtgaattaatggctatattccgagaattcatctaagaaggtgccatgtgtgcctttgtcaaaggtaaactgtcagtttacagttatggagtcttcatgtccatgttttttaaaaaccttggctctcttcttgatactgcatggtatggaggcaagctgttattatccccagatgaaagaaacctggggactagtgtggtgaaggggttttctggtgtcataaaacaagcatgtggcaaagccggggttaaacctggtgagtggggctcaggaagaggacacaagttttgaaatctgacaagctaaattttaatcttggcttcaatcctcaggagctgggtttcttggggcaagttacttaacctctctgaacttccatttccacttttaagaaatgagcacagtgatacttagcttgtggagattgctgcagagataataatgcatgtagagcggctggcacttagcagggctcagtaaggggcatctcttatcttttatcctcaattgaatattatttttcctcttgcagtcctaggctataatctacattccgccaaaaattatcagggaaatttagagaagcaagcagccaaaccagttggctggcatcaactgttatcaccagggggcttgagttatccctttttgggggtcattggggcgtgatgacctatgacctgtgaccttatgaggcagccagcaggggtaggaacccagtggatttgggggtcatcttagacttctgaaaagacctgatagaccactttccaatctggggtttttcattacgtaggggacagtaaatcaaagagactgccccaggctgcagacttaaaagggcccaaggctggtggagctgggcagggaagatgctgagkgggaggagactatggctcccctggctgggatctgaggcaaacaaagtgacacgcggtggggaagataaaacaccgaaaataaaattgacagcaaatggcacactagattaaatgctttcaatgcctctgctgaaaagggttaatatctttgctatataaagagcacttgcaaatcaatatggatgatgaacaatctctgggcaaaggacatagacaggcaatttatgaaagacatactcgagggctggtagtatatgaaaaatggtctgtcttaccagaaacctcaaagaaaagcaaattaaaacaatgatatgccatgccccgcctatc

SEQ ID NO: 46807 - DNA, 481 bp, Homo sapiens
gatcctgtgagcccaggaagctgaggctgcagtgagtcatgatcttgccactgcactccagcctaggcaacagagcaagaccctgtctcaaaaaaaaaaagtgaccagtatcatggggagcgatagcttgggggtttaacttaatctagtgtgcagatatgacacgtgtgcctgcttgtgtgtgtgcacgcacgcctgtgtgtgtgaggtagtgggggacagaggtaattagagatggcttctttaagaaggtgatggctgagctgagacccaaaakaggagtcaggcttagtcaggtgaggagaaggggagggtttggtatagaaggttcctggcagattaacatacaagaaaaagtttggcacattcaaggaacttagaaagagttagtatagctagagaatagaaagaagtatggcatgcgatgggggtgggtgcataaatcccagcctagacactgttagtctgaagaccatgggaa

SEQ ID NO: 46808 - DNA, 523 bp, Homo sapiens
gaaatgataatattttttaaatattaaattgatatgtttttaaatttctttaacttataatacttctcagctacctgtacatagaatcaatgggttttgttatttctgaaaaataatagatactcctactccagagcagagaagttattttttggttttggttctcagagctgacattcttgaatctttagtaatacaatgtcttatcatcagaaagagattttctaaatcccaaaagcttccctttactcatcaagagtcagcctgattcaaatcagagtttaattgcaatgagtgggttctgaccctggttgtgtatcagaattacytggggaggcttagaaaatactaatgctcaggccttacttctagagactctgattcaattatctggtctgagatgtagttcaggtaatactgctttgcttttttttttttttttttttaaatgcttcctaggtgattctaatgtgcagcccaataggagaacacttctgtaaactgtattgtttgaaggctggat

SEQ ID NO: 46809 - DNA, 622 bp, Homo sapiens
ctcaccagcatctgttgttttttgacttttaaatagtagccattctgactggcgtgagatggtatctcactgtggttttaatttgcatttctctaatgctcagtgatgttgagctttttttcatatgtttgttggctgcatgtaagagacacgtcagcttatttttagaaagccgcgtttaaaaataagtgtttaatttggttggggaaggggcttgatgtgctgaggatggtgaagttttcttagtggacaattaaaattgaattctctgtgatgaatgccagatatgtcagcatgtcattaatttctatctataattagagtaaaattttactcatttaggtgaaattaaaaaaatctttattagtaaaaccttgattacttggccccatagaataataaatgcaactgtattaatttcaaaggcttattttcatttatgctaagaggagtatttgcaaatacagagtttgctcggctttgacgtgcaatggggcaggatcatttggaaacagcatttaattttgcttagcaaaaatgatcacaccaaaatgcttgagaaaggtgatattttaggaatgttaaacctgatagtcacattcttaatgtctttwcggcatgc

SEQ ID NO: 46810 - DNA, 1767 bp, Homo sapiens
tcccttttcataatatctgcactgaatctttgttgcttcgcacttcagtttgcattccagcattctttcatgccaagcctggtgattactttgagtccctgagctacaggcataattatctctcaagaagacattggggactcttgagaggaagcccgaggaagatggagagaagaatactagatgaaggattaaggtatttcttaggtggagtaagtagcagtggggaagaggagtaggtgatgttcatttgccaagtatttagagagtcggggacctgatacttaagctttaatgttgaccagaggtatggtcaacagagctatttaaaaagttaaatagctgaatatctctctattcatggcctagagaagctttgttatttagatttagatgttactttgttttaattcaattacaaatgatcatgtttgtcgatcagtttactcatgatttgtcctagttttgagggaagatcagattcccagatgtcctcaaagatcgctttcactgataacagtgagcaattatgctatccctaaaacttccataaggagtactctatggcctttgaaaccacatcattgactaagtgaaacaatagagtttctgtagcccaagagagcaaagcagagttcatttagctacaaacgaccattgaatggcactagagataaagaaaaaagtatatcacacgaaaaataaataaataaatgataagatgttaggtcagtatgatttcatgatcattgcagaaaagtaaacaaaaaccgtttgattatttacatttctggcttgcttcagtaatgtgtcatctagtcccagttctgtttataggaaacattgcttttgtaataacatgcttataatgaacaataaaatccatgaaaaaggatttcattgcagaataaacttgtagattcaataccctcagaagcattctccgcaatagcatctcagaaacaaaattatgctgggttttttaacaagccacttaacgtatttatcttccaaggcattggggaaaaaatcaggaaccaatcattttctattttactacagggtaatttattacttactatgctaagtgttacctatcttttcccagtaaaactaaaaataggactgtctctcaaacattgacatatacgattaggctaatacagtaatgtgtgtgctttttattataaactaagttactgtaatccagaatacagtttgtgtatggcaaacagataaggaccatatgactgtggggtgacagagtagggttttgtatttagaacagacattgcatctgtaaagctttcttttcagaaatgtagttagcttttttatgaactagtaaatatagtatacagarcacctagggaatttgcgtatagccacatttattcccacacgtctctgggaatcataaatggttgtcttcctccgaaatggattaggacaaattacattaggacatgattgtgaatctgattaaggtggaacacagttggtttttttttttttttttccgcccctttgggatgaccatgtttttatataacaaccagaagacgaagaagcctttggcaagatgtttcaaagacatgttttcgtatgcacataaaaaagaattttcatgttaattcaaaaattggcccatgactttaatttctgtatcttgccaagacaaagcttgaagcacaacctgctctagtatagaacacatttcagatactgatttgggtttcaatgaaagcatgtaaaaaaggaatttcc

SEQ ID NO: 46811 - DNA, 1897 bp, Homo sapiens
taactaatccctcaaaaataagtcagagcatgggactttgttgctcaaactctgcattagtttagcataaaaggcaaagttttcacagggacctcaagtcacagtcaatccacccagccattacctcttcctttcacattcatggatgtatttgcctttattcatactgctctatcatcctggctttttcctatttcccagacatacctgttctttctgccyggcagaccactccatgctttctgttccagctgagatccacacagctaagcgctcccagaggtccacttagctagcttctctttagcacccttgtgcaaatggcaccttctcattggaaactgccactgacctctctattcaaaaattacgtctcactctaccccctccatagaggtccctctaaatctgatcaaccttttcttttaatagtctcacagcccttaagtcttgtattatttcttctgaagatcaatttaactcttcctacttaccgtaattttagtctttcacccatgcacagcccagccactggagaaccaagcacttacacgccttttaaaagcatcaccaaaaattctcctgaggagaaattcttatatcagcagctagaaaagataagtacaggcaaaagagaagcaaaaagcaaaacaaaacgacaataaaaacatcacctacttcataggaattagaggcaagcatttaataaatactcttagaaccaactctgagttaggacagtatgagtagcccctggaaagctgtattttttaaaagcactaaatgtaattctgacaaacttaaaggcatccactaatatagataagatgaataatacaaaaaaatagtataatttatgtagagggatgttcatgtcaaattctcatttcttggtgctactggtgcatttataagaatatatcacacattagggctcttacccaaagaaaaatcaccaattgtacaaaatagaagttgtacaatacatattcagataataatgcacaaaaacaattaagaaattatgaaagtttatattaacagaacgcctgtgtgagaaactttttaaattacttgtgggccaaagaggaaataaaaattgcaatcataagctattaagaaattaatgataatgaagcaattagaatgctatttatgaaaacttatgagatgtggccaatgctgtaatatatttattatttaaaaacaaaagtcaagaatttagggaaaaaaaataaaaaaataaaccttcaaaagctgaaaatcgactgaaaaataaggatataaattaatatttatgatttttaaattgatagaacaatattgatttttttctcctggtaagattgacaaagaaaaatgttgcaaacatatagcattaggaatcagaagtggaatatgaccacagataaagaagaggttaaaatataaggcatttttatgttaagacccagaagtgctatatcaattccacccacgtctcactggccagggctcagtcatatggtcccaaacatggggtgcagcaggaatatagtctccctaaaaagaaacggtttattgtggtggtctatatttgtttctgtaaatggccaaataatattttagattttacaagagttacgggcctgtcacaactcctccactctcttgttatagcacaaaaggccagacaacatgtaaaggaatgggcatagctgtgttctgataaaactttattaccatgtggcgagctggatttagcctactagtcatagtttgctgaatgcttgctagtacgtagcattgtttttgacacagtttaataattgacttggaaatatatctgtaatgtgttttaaataaactaggtggattattcaaaatctaaatatatatttataaaagtttctctaca

SEQ ID NO: 46812 - DNA, 1897 bp, Homo sapiens
taactaatccctcaaaaataagtcagagcatgggactttgttgctcaaactctgcattagtttagcataaaaggcaaagttttcacagggacctcaagtcacagtcaatccacccagccattacctcttcctttcacattcatggatgtatttgcctttattcatactgctctatcatcctggctttttcctatttcccagacatacctgttctttctgcccggcagaccactccatgctttctgttccagctgagatccacacagctaagcgctcccagaggtccacttagctagcttctctttagcacccttgtgcaaatggcaccttctcattggaaactgccactgacctctctattcaaaaattacgtctcactctaccccctycatagaggtccctctaaatctgatcaaccttttcttttaatagtctcacagcccttaagtcttgtattatttcttctgaagatcaatttaactcttcctacttaccgtaattttagtctttcacccatgcacagcccagccactggagaaccaagcacttacacgccttttaaaagcatcaccaaaaattctcctgaggagaaattcttatatcagcagctagaaaagataagtacaggcaaaagagaagcaaaaagcaaaacaaaacgacaataaaaacatcacctacttcataggaattagaggcaagcatttaataaatactcttagaaccaactctgagttaggacagtatgagtagcccctggaaagctgtattttttaaaagcactaaatgtaattctgacaaacttaaaggcatccactaatatagataagatgaataatacaaaaaaatagtataatttatgtagagggatgttcatgtcaaattctcatttcttggtgctactggtgcatttataagaatatatcacacattagggctcttacccaaagaaaaatcaccaattgtacaaaatagaagttgtacaatacatattcagataataatgcacaaaaacaattaagaaattatgaaagtttatattaacagaacgcctgtgtgagaaactttttaaattacttgtgggccaaagaggaaataaaaattgcaatcataagctattaagaaattaatgataatgaagcaattagaatgctatttatgaaaacttatgagatgtggccaatgctgtaatatatttattatttaaaaacaaaagtcaagaatttagggaaaaaaaataaaaaaataaaccttcaaaagctgaaaatcgactgaaaaataaggatataaattaatatttatgatttttaaattgatagaacaatattgatttttttctcctggtaagattgacaaagaaaaatgttgcaaacatatagcattaggaatcagaagtggaatatgaccacagataaagaagaggttaaaatataaggcatttttatgttaagacccagaagtgctatatcaattccacccacgtctcactggccagggctcagtcatatggtcccaaacatggggtgcagcaggaatatagtctccctaaaaagaaacggtttattgtggtggtctatatttgtttctgtaaatggccaaataatattttagattttacaagagttacgggcctgtcacaactcctccactctcttgttatagcacaaaaggccagacaacatgtaaaggaatgggcatagctgtgttctgataaaactttattaccatgtggcgagctggatttagcctactagtcatagtttgctgaatgcttgctagtacgtagcattgtttttgacacagtttaataattgacttggaaatatatctgtaatgtgttttaaataaactaggtggattattcaaaatctaaatatatatttataaaagtttctctaca

SEQ ID NO: 46813 - DNA, 1897 bp, Homo sapiens
taactaatccctcaaaaataagtcagagcatgggactttgttgctcaaactctgcattagtttagcataaaaggcaaagttttcacagggacctcaagtcacagtcaatccacccagccattacctcttcctttcacattcatggatgtatttgcctttattcatactgctctatcatcctggctttttcctatttcccagacatacctgttctttctgcccggcagaccactccatgctttctgttccagctgagatccacacagctaagcgctcccagaggtccacttagctagcttctctttagcacccttgtgcaaatggcaccttctcattggaaactgccactgacctctctattcaaaaattacgtctcactctaccccctccatagaggtccctctaaatctgatcaaccttttcttttaatagtctcacagcccttaagtcttgtattatttcttctgaagatcaatttaactcttcctacttaccgtaattttagtctttcacccatgcacagcccagccactggagaaccaagcacttacacgccttttaaaagcatcaccaaaaattctcctgaggagaaattcttatatcagcagctagaaaagataagtacaggcaaaagagaagcaaaaagcaaaacaaaacgacaataaaaacatcacctacttcataggaattagaggcaagcatttaataaatactcttagaaccaactctgagttaggacagtatgagtagcccctggaaagctgtattttttaaaagcactaaatgtaattctgacaaacttaaaggcatccactaatatagataagatgaataatacaaaaaaatagtataatttatgtagagggatgttcatgtcaaattctcatttcttggtgctactggtgcatttataagaatatatcacacattagggctcttacccaaagaaaaatcaccaattgtacaaaatagaagttgtacaatacatattcagataataatgcacaaaaacaattaagaaattatgaaagtttatattaacagaacgcctgtgtgagaaactttttaaattacttgtgggccaaagaggaaataaaaattgcaatcataagctattaagaaattaatgataatgaagcaattagaatgctatttatgaaaacttatgagatgtggccaatgctgtaatatatttattatttaaaaacaaaagtcaagaatttagggaaaaaaaataaaaaaataaaccttcaaaagctgaaaatcgactgaaaaataaggatataaattaatatttatgatttttaaattgatagaacaatattgatttttttctcctgktaagattgacaaagaaaaatgttgcaaacatatagcattaggaatcagaagtggaatatgaccacagataaagaagaggttaaaatataaggcatttttatgttaagacccagaagtgctatatcaattccacccacgtctcactggccagggctcagtcatatggtcccaaacatggggtgcagcaggaatatagtctccctaaaaagaaacggtttattgtggtggtctatatttgtttctgtaaatggccaaataatattttagattttacaagagttacgggcctgtcacaactcctccactctcttgttatagcacaaaaggccagacaacatgtaaaggaatgggcatagctgtgttctgataaaactttattaccatgtggcgagctggatttagcctactagtcatagtttgctgaatgcttgctagtacgtagcattgtttttgacacagtttaataattgacttggaaatatatctgtaatgtgttttaaataaactaggtggattattcaaaatctaaatatatatttataaaagtttctctaca

SEQ ID NO: 46814 - DNA, 611 bp, Homo sapiens
ggcagaatggccttgtagaatgcacccacccaccccattggagctaaccaccgcagagtggcaggtagaagctagtatgcttgattctgggctgagaaatggtcaaatggcactggctctggatagtcttcatgtaaaggccccagttataattttgttagactgcmtaactatctaaagtggctatgaggttattgtatctggtacattttagggaaaatagtatgcaggatgtattggttaaggacctttcacacatactttttttctttctttttttcttttttttgagacggactcgccgtctatcgccaggctggagtgcagtggcacgatcacagctcgcctccgcctcctgacctcaggtgatccacacgcctgagcctcccaaagtgctgggattacaggcatgagccaccacacccggccacacatactttctctaattagaaagattcaacctcatgaagatccagtgagctgaggaccatcaatgactggagagctaaacatgggtatttatcagcaaactaggttttcccgaacagaatttatatgtgtgttataaactgccaaatgttttcttatttaaagataatggtgggcgttga

SEQ ID NO: 46815 - DNA, 546 bp, Homo sapiens
cacatcaagcaactgtttggtgattttgggggactgttaatagtacctgtgtcttggaataattaaccatatcttagttgggcttcttagagtagatgtgttcacattgagatgtatgaaagaaaagagttatttttgttcaatgggtgagcagcacttatccttagcaataagggaaggcgacaaacagtttagcttctgaatagagaatggtctattcaacactatattttgtcggtaaagtttctttttggtcccaaagtttctcttcggtgccttaatttcttccttctgattttcgggaaaagtcagaggtataggtgaaactggcattggagacctccatggcagacatcttgtggagaycattttaaccattgattgatttgtatggccaatagtaggtttgaatgagagttcttggcatggacttaaaatagaacttttgggattcttatcataagtttcaatcaattgttttggggtggaagaactttttagagacagtggtctagaattccatctatatttgccagcattgctcca

SEQ ID NO: 46816 - DNA, 564 bp, Homo sapiens
ttttatgtatggggaaaaatggatactttttaaaccttttttggcagctcagatggtgtaaattttaaaattttgtataggtatttcataacaaaaatatgtatttcttttttgttattttatcttgaaaacggtacatattttagtatttgtgcagaaaaacaagtcctaaagtatttgtttttatttgtaccatccacttgtgccttactgtatcctgtgtcatgtccaatcagttgtaaacaatggcatctttgaacagtgtgatgagaataggaatgtggtgttttaaagcagtgttgcattttaatcagtaatctacctggtggatttgtttttaaccaaaaagatgaattatcaatgatttgtaattatatcrgttgattttttttgaaaagatgaaccaaaggatttgactgctaatattttattccttacactttttttctgaataagtctctcataatgagtgcagtgtcagactgtgcctactctgatggtatgtgccatttgtaaaataaaatagagcagaaaaacacaaaaagagaacactggttcagacat

SEQ ID NO: 46817 - DNA, 655 bp, Homo sapiens
tagtcacagttctctagagaaataggaactatataaagatatatatactagatatatctctatatagatatatatacatatatatctatatagatatatatgtatatatatctatatatttacagagatttatacatgtatctatatatctatatgtagatatattatctagtgtatagatatatctagcatatatctctgtatatctatatataggtcctatttctctagagaactaatacaacacaatgactaatataacacaagctctgtcacccaggctggagtgcagtggcgcaatctcggctcactgcaagctccacctcctgggttcacgccattctcctgcctcatcctcccaagtagctgggactataggcacctgccaccatgaccagctaattttttgtatttttagtactttttacttttctattatcacacagtattgatgtgatattccattgagcatttggctcacaaaaataaatattttggaatgcagttattttaaggaaggasttggatattgaatcctcactgcgatacctgatgaaaacactttcctgtaatggaaattaaagataagatattgcagatcaacaaagaatgtgtgtagagtcaggactgttactgccccctgttttgtgcttac

SEQ ID NO: 46818 - DNA, 540 bp, Homo sapiens
cagccagctgcgtctacactgccctattcgacttccaatcagccagctgcctctacactgccctattcgacttccaatcagccagctgcgtctacactgccctattcgacttccaatcagccagctgcgtctacactgccctgttcaacttccagtcaccacaggtgcatcaccactccccagctacactccagtgtgcttccttcaacactccagtcaaatcttaactgtttattctttgccttggttctttcttgtggarggacaagtgccagacatctctagtcactctagtccctgctcctgaagagaaattttgctaatgaattttgacagtagcttcaacttgaagaaattaatgaggaattgaaagttatttgaaattagaagaaagagaactggcaggggacgggcggaacagtaaatggacctaaggaagtagaaaggagagtctgtggcatcacagtgacataggttatataaaaacagacctgcagagctatggtttggttcagtgtagttgatttggaaggtggactt

SEQ ID NO: 46819 - DNA, 1741 bp, Homo sapiens
tgttgaatgataaaatggctttatttatatcaaaagatttaattcttaaacattataaaaatttaaactttactttgaaatattttatttaatattttgatttataatgatttgtcttttgccttttaattttataggcaattttgaatattttgaaagaaaagattttgaaaatatgaacaataacttttttacatttaatttacatcttcaatgaaaatatattccagttttgtatactttgaatactttcaatcttttatatcrttattatctctagaacattaattatatacacatcttcaacatgacataattagtaatttttctaaaattgatattacagaatatataatcacaaatacatttttgtgacttacttttcattttaacatcatcagactctaaaaagaatactcagaaatgtacaataatacagtttagttatttttactttgtccctaaccacattcctgcaacaagcatagctttacatgtatgttgagattttttcagtatggaggcatatttttcacagaagggggacatattctgtttatcagcttgttatattgatttatagtttgtatagatttaactctatgttgtgggtatccatctgtactcttgccccaggccctgcaatgtgttaagagtgggtctggttactgaatatcttcagcaagggagtagcgtgattgatactgcatttgaggacgattactccagtggagacaatgacatcagttaggaggttgagctacctcttcgtgagtagcgttttctatctgtagctggagcttctgaatgaaccctctgacttcttcccatagcctatcatctgagaagttttgagccctgcaactataggtttccttgtcagcaagttcctggccataggcctatccattttcagaccaggcattttgacagctcaaccacatttctggataaattgaaggtcttctactcttaactaaaaggaaaattgagaatccacaggagtctatcttgagtttcaaacccaaggttcatgcaatatctaacaacaaccattaaccacagagattgttcaggcaaaataacaatgttttgagtccatagcaaactcattggcaagaaagcccaccagatttgagcagcaaaataaagacaactctcatttagagtatgtgaaacctccaacctgaccactaccccaggggctctgtaaggtttccctcaatcctctcaggttgcagttttccactctgatccaccacaggctcctgtggagtcagccatctgatgtcttcaagtaagaaatacagaagagccaggtgggtttgagatgctattgcaaatatcctgcatagattcgttttatgggcagaagggaattaggagaacagaaaccagttttttctttttctaaagcactttttattctggcttcgacctaaaattgaaggggaagtctcctgcctactgtcaagctgaaataagttgtagaatgcaacctaaacaacagccagagattctaattaaagtttttcttagactgacacacttagaaagctttcttctctatttttatctaaagaaaagtagagaagttaaatttgatggtgatgccttgatgacatcaactttctaaaacgagaagcgaattttgtttagaaaacacactctgtataatcttagaacgctttcgttttatcatgtttgagaggagaatgtatcttgatgtgaatactgaagg

SEQ ID NO: 46820 - DNA, 535 bp, Homo sapiens
acagtttgaaatataccaaagacataaattcctttactatgattctgctcttctagatgagaggtcacgactttcatcttggcttttatgttgataaaacaaaatgctgcagaggctctggggaatgaggagtgggtcacatgtgtggttacatttaaggtccacaacctcgtaggtggtgtgatgttggrcctttgccttaacctttctgaggctcaatgtcctcatctgcaactacttgtgcagtccctgtgaggactgagtgataggacaagctgaaatgattatttcattatatatttcatatatatttattcatatatatttcatatatatttattcatatatatttcatatatatttattcatatatacttcatatatatttattcatatatacttcatatatatttattcatatatatttcatatatatttattcatatatacttcatatatatttcatatatatttattcatatatacttcatatatatttcatataatgaaattattatttcattatatgccacgg

SEQ ID NO: 46821 - DNA, 535 bp, Homo sapiens
acagtttgaaatataccaaagacataaattcctttactatgattctgctcttctagatgagaggtcacgactttcatcttggcttttatgttgataaaacaaaatgctgcagaggctctggggaatgaggagtgggtcacatgtgtggttacatttaaggtccacaacctcgtaggtggtgtgatgttggacctttgccttaacctttctgaggctcaatgtcctcatctgcaactacttgtgcagtccctgtgaggactgagtgataggacaagctgaaatgattatttcattatatatttcatatawatttattcatatatatttcatatatatttattcatatatatttcatatatatttattcatatatacttcatatatatttattcatatatacttcatatatatttattcatatatatttcatatatatttattcatatatacttcatatatatttcatatatatttattcatatatacttcatatatatttcatataatgaaattattatttcattatatgccacgg

SEQ ID NO: 46822 - DNA, 594 bp, Homo sapiens
attttgcatcaggctgtttttcatgatttcactttgttcccatcctcacggccttctactacgcaaggtctcatgatataaatgaaggttatcttcttttccttccagtcactcctctttacagaaatctcctacataattgagaygctgtcatcaatcagtcaaccaaccaagccccctgaactgggtccttgtgatgttccaggggtttaattacaaggaatgctagctcctaacatctcagataccatgggctcgaagacttgtaacatgtgatattagggcagcaatggtttcctctactggtccgggatttggggttttaggggctctcttcacagatgagagaattttgcagcttcttgccactggctgcaatgacgctccccagtgaggtggaggcctagagagaggggagggtgacttaaggtgggcagggcctagccttgattacaggctctcaaggattaacctcgggaggacagagaggagagaagacaaggtgaagctttgtgagtggacagaaattaaataaaggggtttccaagttaagtacagtgctcctggagaagcaagttggaggctgctggtatc

SEQ ID NO: 46823 - DNA, 1670 bp, Homo sapiens
tgcaactcagaggaaggctctgtaaaaccagtggcatgcctctggttagcttagagcatgagtgaaatttcaacaagtcagtaggtattgggaggaggaatactcttaggccaggtgcagtggctcatgcctatagccccaactatttgggaggctaaggtgggaggattgcttgagcccaggagttagaggctacagtgagctgagattgcaccactgcattcctgcctgggcgacagagtgacamcctgtctcaaaaaaagggatattcttgatggagggggaaagtgaatgtacgtggtatgtttaaagagcagttaagttatgctctcttgtgccttggagttgggtcaaactccaagaagatggaactgcaaaagcagactgggttcaagtttgcaaggcctagaaggtcatgactaccagagcctggctacgtttctcctttcctcgcgtgactcagctggactgcattcccccagcttctcccacagttaagtctgaccatgtgactcaatgctggccaacagaaggtagtagaagtgatgtaatgtacaccacttccaggactggcctgaatcccacctcctcaggccgtgactgggcctccatccaggggtttctgcctggacacactctctctctgctagtttggatggcaacacccatggcaagcttggagcacaccatggagacaacagaacctccaccaacgtcatccttggttgattgtgtgccggggagcacaccaccgcctcccacccagccccacttcccaagggacttttcctgagtgaggaagttacaggatgctaggctgctgagatgtcaggattcacttgcatgaactctgaagtcagcatttctccaactaaaataccagggttggggtcgcatgttcttccttaggccgtgctttgggaagggaagcctgggggcagcgtggaagctggtgtggacgcaggaagaaagccacagcaggaccctgttgaaagactactgaagggcagataagagatgagaagtgaggaaagacagtgactgggagaggaaggaaaggaggagatatttttcatcatccactccctctttctattcaacttttatatcactgttaattgaaacagatttctcatagctcaccagtgacctcctcatccagaaccaaggatcatctttcttattagcggtgccatcctgtagcatttgaccactgcctccttttttggaggctgtcttccctttcgccacccccagtccttcttgtctctgaacctccgttctctctccctctttctcttccacaccaccccccgaccccgccacaccacacacactcctctcttccacctcaaatgtaagctgtcccaaggttctggctttgcacctgctcttctcttttctctatgtgtggaatccccagggggcttcatttgccatctgccttctccctttctactcgccttccccctttctactcaccatctccagaactgcctcaccagccccaacttctcttctgagctctagatcaaaatgtttgatttgccatctgaacagccacacacagatggtctgcaggcacctcgaaagcagcctggccaaaacaaaattcattcccttgtcaccccctctcattactccccacccactgagcaatgctgctgttt

SEQ ID NO: 46824 - DNA, 1670 bp, Homo sapiens
tgcaactcagaggaaggctctgtaaaaccagtggcatgcctctggttagcttagagcatgagtgaaatttcaacaagtcagtaggtattgggaggaggaatactcttaggccaggtgcagtggctcatgcctatagccccaactatttgggaggctaaggtgggaggattgcttgagcccaggagttagaggctacagtgagctgagattgcaccactgcattcctgcctgggcgacagagtgacaccctgtctcaaaaaaagggatatycttgatggagggggaaagtgaatgtacgtggtatgtttaaagagcagttaagttatgctctcttgtgccttggagttgggtcaaactccaagaagatggaactgcaaaagcagactgggttcaagtttgcaaggcctagaaggtcatgactaccagagcctggctacgtttctcctttcctcgcgtgactcagctggactgcattcccccagcttctcccacagttaagtctgaccatgtgactcaatgctggccaacagaaggtagtagaagtgatgtaatgtacaccacttccaggactggcctgaatcccacctcctcaggccgtgactgggcctccatccaggggtttctgcctggacacactctctctctgctagtttggatggcaacacccatggcaagcttggagcacaccatggagacaacagaacctccaccaacgtcatccttggttgattgtgtgccggggagcacaccaccgcctcccacccagccccacttcccaagggacttttcctgagtgaggaagttacaggatgctaggctgctgagatgtcaggattcacttgcatgaactctgaagtcagcatttctccaactaaaataccagggttggggtcgcatgttcttccttaggccgtgctttgggaagggaagcctgggggcagcgtggaagctggtgtggacgcaggaagaaagccacagcaggaccctgttgaaagactactgaagggcagataagagatgagaagtgaggaaagacagtgactgggagaggaaggaaaggaggagatatttttcatcatccactccctctttctattcaacttttatatcactgttaattgaaacagatttctcatagctcaccagtgacctcctcatccagaaccaaggatcatctttcttattagcggtgccatcctgtagcatttgaccactgcctccttttttggaggctgtcttccctttcgccacccccagtccttcttgtctctgaacctccgttctctctccctctttctcttccacaccaccccccgaccccgccacaccacacacactcctctcttccacctcaaatgtaagctgtcccaaggttctggctttgcacctgctcttctcttttctctatgtgtggaatccccagggggcttcatttgccatctgccttctccctttctactcgccttccccctttctactcaccatctccagaactgcctcaccagccccaacttctcttctgagctctagatcaaaatgtttgatttgccatctgaacagccacacacagatggtctgcaggcacctcgaaagcagcctggccaaaacaaaattcattcccttgtcaccccctctcattactccccacccactgagcaatgctgctgttt

SEQ ID NO: 46825 - DNA, 1670 bp, Homo sapiens
tgcaactcagaggaaggctctgtaaaaccagtggcatgcctctggttagcttagagcatgagtgaaatttcaacaagtcagtaggtattgggaggaggaatactcttaggccaggtgcagtggctcatgcctatagccccaactatttgggaggctaaggtgggaggattgcttgagcccaggagttagaggctacagtgagctgagattgcaccactgcattcctgcctgggcgacagagtgacaccctgtctcaaaaaaagggatattcttgatggagggggaaartgaatgtacgtggtatgtttaaagagcagttaagttatgctctcttgtgccttggagttgggtcaaactccaagaagatggaactgcaaaagcagactgggttcaagtttgcaaggcctagaaggtcatgactaccagagcctggctacgtttctcctttcctcgcgtgactcagctggactgcattcccccagcttctcccacagttaagtctgaccatgtgactcaatgctggccaacagaaggtagtagaagtgatgtaatgtacaccacttccaggactggcctgaatcccacctcctcaggccgtgactgggcctccatccaggggtttctgcctggacacactctctctctgctagtttggatggcaacacccatggcaagcttggagcacaccatggagacaacagaacctccaccaacgtcatccttggttgattgtgtgccggggagcacaccaccgcctcccacccagccccacttcccaagggacttttcctgagtgaggaagttacaggatgctaggctgctgagatgtcaggattcacttgcatgaactctgaagtcagcatttctccaactaaaataccagggttggggtcgcatgttcttccttaggccgtgctttgggaagggaagcctgggggcagcgtggaagctggtgtggacgcaggaagaaagccacagcaggaccctgttgaaagactactgaagggcagataagagatgagaagtgaggaaagacagtgactgggagaggaaggaaaggaggagatatttttcatcatccactccctctttctattcaacttttatatcactgttaattgaaacagatttctcatagctcaccagtgacctcctcatccagaaccaaggatcatctttcttattagcggtgccatcctgtagcatttgaccactgcctccttttttggaggctgtcttccctttcgccacccccagtccttcttgtctctgaacctccgttctctctccctctttctcttccacaccaccccccgaccccgccacaccacacacactcctctcttccacctcaaatgtaagctgtcccaaggttctggctttgcacctgctcttctcttttctctatgtgtggaatccccagggggcttcatttgccatctgccttctccctttctactcgccttccccctttctactcaccatctccagaactgcctcaccagccccaacttctcttctgagctctagatcaaaatgtttgatttgccatctgaacagccacacacagatggtctgcaggcacctcgaaagcagcctggccaaaacaaaattcattcccttgtcaccccctctcattactccccacccactgagcaatgctgctgttt

SEQ ID NO: 46826 - DNA, 605 bp, Homo sapiens
tggcaaatgaaatccaggaacttcatattggtaaaaagacatattaattttttaataacacatgtcttttaatgtttttcttttaaggaactgtgactatgatcttctagaaatgaatatttttgagagctataagaatgtgtgtctagtccttgtgacagacgacttgtagacaattgaccagttagaaaaagcctagaagctatgttatctataaatgcaaccttcaaattccaatatttatgaacaggtctctcacactttaccatgayaaatgatgttacaggagctaattaaaaatgaccaacttttaaaataactttcatgtctacaattctttagaccctatgactcaggaatcacatttcccttacatggtgtttggtaaacttcaatgtgtgtgctgtagttgatatccaggattagcttgtttcttttaaattgtctagggatgtgtccaaaagaacatttaaaaatgtgccttgtgatacataaacagtttaaaggtcaatggaaatttaaaaatccaaacatccaatagaaagtataatgaaatagcaaatcagaattaattttctcttatttttcatccacatttactttgg

SEQ ID NO: 46827 - DNA, 2673 bp, Homo sapiens
gagataagtccccaagagtttggctccctggggtgaaggtctttaaactcctggggtttccaaaacaatcctgcttattcttctttgtcttggattccatggaattcccaagaataaatgcccttttcttgagctaatttgattatttctattgcatgcagtaaaatgccctggctaaaactactccgtccctcccccgcatgtacccaatgagccagaccgtgagcctcaggaaggcagggtttatatcccattctgctttctgctccccctgtctggtgtgatagatgcttctccaaagagtttgtggttgattgaacaaattcatcttccttgtcccctacaaattcatatccacaaatattctcgctactctcattaaaacccttctcatattcattcagtcttctccaggaattctagtcacatcttaattttgcaaagcactttcacagttctcttattttattcttgcgacaactccgttgggtagagagggtactggtatctgcacatggcagatgaagacactgaagttaagagatctgtccaagcatcacaaaactgcctgcacttccttccacctcttatcccttcagtgctcagcacatacttgttgagtggataagctgggggccaggactcagatactcccacataaagcccagttttctctcctatcctatcagaagcatcgtttctgcctagctcagagaccagaggcggcattcatgcattccacctggtaaggctgagtgataaatcctggattccaggaatccgtacgtgggacaaggtggaaagggggaaggctgaaagggaagccagtgagtgatgaacttcttgaccctggagtcagtgccctgagaaactctcatgcttctttgggttggcaagtggctgcttgcaggagccagagagagagccacgaatggggtcctgctccctgcagccaatgttgaaggccacttcctgcaaacggtgtcccttcctaggctctagccacaagcctctggtcttcagtgtttccygaagcgaagatgaagaccacatgacatggaattctcagaagctgcttgtgaaaatgcagaagcccaggccccacccctgatcaaccagaatccctggtgtggtgcccagtgtctcgatatctgcatttacaacaagctgcccaggagaatctgatgcgtcatgaagttggagactcaccggtccagacacccagatgcccagaaaacactgagcacgtgtgaaatatgtatatgccaggagccttttgagcctcaggagtggctgtgagagcttcctgctctctgttttctggatcatatctgtcctgtgtgccctcctcatccccctccaagagacagtccttggggagttaccctccctctccacagacggagtctctgtttattcaaattgtcacatgtgaatcctggcctatctaggagatgaatttcttgtacatttacatggtttactttgtctgagtgggttttaacatgtgctctggggaaaagggcaacagatctccagacaggagcggccaaggctcagggctgtgagtgagaggaccaggagcagggaacagagccgtagagaagtgtgcaggccgcggaaccccaacagctatccttctcctattcatcaccctcataaccacagctatgaaatgaaaagatggagaagaaaagataccaggaggaaaaaacaggggagaggagtgtggggcttaaagagacagccagcagctataagatggaaatctatgcgttcagtgttgatgaaacacacgcacacatgggcgcgtgcatgcacacacaccccctagtatatatcagtgtggacacacagcagagttattagtgtaaagaatgacaagctcctcctgtcttcccaagcaatctctcatctaaagctgggaaagtcggtcaggcgcatcccttctgtgtatatatttaaccaactcagttccttctgcagatttttcatttgcaaacagtcctttaataatcacttctaattcagaagctcctaggtatgaaattgataaatattaatagacattctaaccacagacttaaacacataagcatatatacttaaagtctctaattccttggtagaagtgcaagtgcatttttttccctccttgaatctttcttggtgtgtgtgtgtgtgtgtgtgtgtgtgtgtgtttcttctttccctgttcggggccttacaagagaatatgtgtgctggcctgggttctcgactctgtcacagcctctgtaagtgacagggaaaaacaaccacagccaagcaaaatatataacccagagacaaatatttccaccctcagagaaatatcactacactccaaagacctggttcaacccctgggcatcttgcctgactgacctcttgccctctcatgcggtggctgtgtccatggggggggggcactatttgattttccagcaacccagaacagtttctgagaggtccccccaacaaagctaaagaggatagggtcaagtgttctagccactcctacactctcctaaatctgctctaatttcccattttagcgaaggcaccctctctacagcctactagcaggaggatgttagctgacgtcatcaatgatctcatcccgcctttggtgtcgggggaggggtagctcca

SEQ ID NO: 46828 - DNA, 618 bp, Homo sapiens
tccatgtggaggctgcagggatacaaagctcgtgaaatatcccaggatggcatgggcactggagtcagctgccccaagttcaaatctgaaatcagtctttttgttttttttttttttttgagatgcagtttcactcttgttgcccaagctggaatgcagtggcgcaattggctcactgcaacctccgcctcctgggttcaagcgattctcctgtctcagcctcccgagtagctgggattacaggtacatgccatcacgcccggctaaatttttgtattcttagcagaaaccgggtttcaccaccttagccaggctggtctccatctcctgacttcaggtgatccrcctgcctcagcctcccaaagtgttgggattacaggcgtgagccaccgcgcccagcctgaaatcagtcttatacgaccagctgggtggtcttgggtaggtcccttaccttaactcttcttgtctgcagaatggaggtgacttactgtttttctctgtctccctttcacatctttgcactcttcaccccttctcttccctcagcttttagtttaaacatcacctttctgataagccctgctgaaaatggccaccctcagtcatgacggagaacaa

SEQ ID NO: 46829 - DNA, 618 bp, Homo sapiens
tccatgtggaggctgcagggatacaaagctcgtgaaatatcccaggatggcatgggcactggagtcagctgccccaagttcaaatctgaaatcagtctttttgttttttttttttttttgagatgcagtttcactcttgttgcccaagctggaatgcagtggcgcaattggctcactgcaacctccgcctcctgggttcaagcgattctcctgtctcagcctcccgagtagctgggattacaggtacatgccatcacgcccggctaaatttttgtattcttagcagaaaccgggtttcaccaccttagccaggctggtctccatctcctgacttcaggtgatccgcctgcctcagcctcccaaagtgttgggattacaggcgtgagccaccgcgcccrgcctgaaatcagtcttatacgaccagctgggtggtcttgggtaggtcccttaccttaactcttcttgtctgcagaatggaggtgacttactgtttttctctgtctccctttcacatctttgcactcttcaccccttctcttccctcagcttttagtttaaacatcacctttctgataagccctgctgaaaatggccaccctcagtcatgacggagaacaa

SEQ ID NO: 46830 - DNA, 602 bp, Homo sapiens
tgttggccaggctggtctcaaactcctgaccttgtgatccgcccacctcagcctcccaaagtgctgggattacaggcgtgagtcatcgcagccagccctagatttttctaaaacagcaatttgagcggggcttgtgaacacagacaaaacatgagcagataggctacaagcagggatggcagccttaggcgcagggctgaaggttgaaaatcctgattgcaggtcattgagaaaaggctagaaggaaacacacctgagtgctaaccaggagttggacaagaggtggatttttatttccttcttaatatagcccttttcaaaatgtttaataaagtacctgtgtcagtcactctcatactcagcagaaatatccaataagctttyggaggtccaggaatgggtctcaaaggagctttcaaagggtctcaaagatctcaaagtttctctcaaaggaggattgaggtgtagatgctcacacaaaaattctgttcggcaaatttccatatgatccaaacatatcacttgaagcaaatcctttgcatataaatataaatatatacaaatttatttgtatattatatataatatttatatatcatgca

SEQ ID NO: 46831 - DNA, 545 bp, Homo sapiens
cggtgtggtggtgcatgyctgtaatcccagctacttgggaggctgaggcaggagaatcgcttgaaccggggaggtggaggttgcagtgagcggagattgtgccactgcactccagcctgggcgacagggtgggactccatctcaaaaaataaataaaataaaataaaataaaataaaataaaataaaataggtatctcctattttaacgcatgatgtggctgttgcaggtggcattatcggcgggaggaccacacccggtagagcatataatgcctctgtaaggtgagcctcagcatgcacatagggacctcactggggatagtgaagtttctcctttttgtgttttgtaatgtgagtgagggacttcgatgactccaaccacatgactggggagtgaggccccggtgtactccagtgcaagcactgaggctgtgtcaacaagactaaacacagacgaaaactgaaagattcagtaagtcaacactttggggtttgtggagggagggaaaggccattgatgactcagactgaataggtctctccc

SEQ ID NO: 46832 - DNA, 606 bp, Homo sapiens
tgcaaagtactttcttattagctgtcttaattttgattgtatataaataaataaaaagacaatgtcattttaattccaattaaaaaataccacaaccaaaactttaaaactacctgaaaactccactgatctgtaaaaggaaaaagtgatatcyaggtccagtttcattcccaacaccataaagagactatcctttccccagtgtgtcttcttggtgggcttgttgaaaaaacttcagttgagtgcatatccttggtatgcttggctttatctctaggctctctattctgttcccattcgtctatgtgtctatttttatgccagtaccatactgttttgattactatagcttttttttttttttttttttttttttttttttttttttttccagaaacagagtcttgctctctttcccaagctggagctggagtgcagtggcacaatcacaacaactcgccacagcctggaactcaccacagcctggaactcgccacagcctggaactcctcgactcaagcaaccctcctgcctcagcctcccaagtagctggaactacaggagtatgccatcatgccaggctaatttttgttattgttattatta

SEQ ID NO: 46833 - DNA, 606 bp, Homo sapiens
tgcaaagtactttcttattagctgtcttaattttgattgtatataaataaataaaaagacaatgtcattttaattccaattaaaaaataccacaaccaaaactttaaaactacctgaaaactccactgatctgtaaaaggaaaaagtgatatctaggtccagtttcattcccaacaccataaagagactatcctttccccagtgtgtcttcttggtgggcttgttgaaaaaacttcagttgagtgcatatccttggtatgcttggctttatctctaggctctctattctgttcccattcgtctatgtgtctatttttatgccagtaccatactgttttgattactatagcttttttttttttttttttttttttttttttttttttttttccaraaacagagtcttgctctctttcccaagctggagctggagtgcagtggcacaatcacaacaactcgccacagcctggaactcaccacagcctggaactcgccacagcctggaactcctcgactcaagcaaccctcctgcctcagcctcccaagtagctggaactacaggagtatgccatcatgccaggctaatttttgttattgttattatta

SEQ ID NO: 46834 - DNA, 527 bp, Homo sapiens
cagcaaagcatccagtggctaggcagctctgtggactgcctagaccccctgctggactcagtcgtttgtctggggatagctgctggaggatccgggttgaccttgactgagacaatgagaattactcacctctactccccaagtctcttttcctccagcaggccagccaggtatgtccttctcatagcaggagaaggggctccagagatgaaagcttaacacacgggccccatgcaagcctctgttggctccatgaacatcccaatggccaaaccaagtcycatggccaagctgttgtgactcaggagggcacaccatggcaaagggtgtagtaagagaggtgtgaagaattggggctatttgcaatctaccacaagcaggaaatgaagtcctacaacagcctaaagtgctgtcgtggtcctgagaaatccatttgtagatgctggctgagctgaacatgaagttgggctccaaacctaagttgccactcttaaacatcaaaagcagtggttaaaaatagaggaatt

SEQ ID NO: 46835 - DNA, 600 bp, Homo sapiens
ctctggaggctgggatgggaagatggcttgagcctgggaggtcaaggctgcagtgagctgagattacaccactgcaccttagcctgggtgacaaagcaagaccctgtctaaaaaaaacaagcaaacaacaatgaaaataacagcaacaaacttatctccagcttcagccttccatgttgcatagtgtctggcatatatccggtagatgttcagtacgtgggagctgtgttttacataagttttctcattccaatgctgaaaacagagaaaaagattgaatgtcatgcctgcatcgacagcacatatactaaaattggaatgatacagagaagattagtatggcccctgcgcaaggatgacacgcaaatttgtgaagtgttccatatttttccgctgccaccaccacaccgcactacctcccacccccttttgtgtacaaaacacaaggaaaaatatttttgtttgaaaaaaaaaaagatcgaatgtcaaaacaagcttaataacrtagcctgctttttaatttttttgagacagagtctcactctgttacccaggcggtagaacagcagcacactcatagctcactgcaacctcaacctc

SEQ ID NO: 46836 - DNA, 597 bp, Homo sapiens
tccagcctgggcaacaagagcaagactctgtctcaaaaaacaataataataaaacaaaattwaaaaaaaaaaagaagtaggctaaagaagaagccagggaatacggaaaaagagcaaccagaaaagatgaaggaaatcaaggagtccaggtgtcaaggaagttaaggaaaccacatcccaaggagggagtagtcagctgtgtcaacaaggggtcaagtggttaaagtattcaggttgggtttaactccatgtcccctggggggacagaggcacaggcagtgattggaagccctgggtcagacagaagagctggctcacatgaaagcaggatcagagatccagtcctcaaattccatacatcagagactacaccttagtgaggggaaacattttgttcaaggtcacgcatcacaactatggcaaaacaaggaccagaaacctgtcacactaaatcccaggcctaagctctttcagaattgctcctgtattagcccattttcacattgctataaagaactgcccgagactaggtaatttatttcatttgtatttatttatttatttttgagacggagtcttgctctgtcacccaggctg

SEQ ID NO: 46837 - DNA, 597 bp, Homo sapiens
tccagcctgggcaacaagagcaagactctgtctcaaaaaacaataataataaaacaaaatttaaaaaaaaaaagaagtaggctaaagaagaagccagggaatacggaaaaagagcaaccagaaaagatgaaggaaatcaaggagtccaggtgtcaaggaagttmaggaaaccacatcccaaggagggagtagtcagctgtgtcaacaaggggtcaagtggttaaagtattcaggttgggtttaactccatgtcccctggggggacagaggcacaggcagtgattggaagccctgggtcagacagaagagctggctcacatgaaagcaggatcagagatccagtcctcaaattccatacatcagagactacaccttagtgaggggaaacattttgttcaaggtcacgcatcacaactatggcaaaacaaggaccagaaacctgtcacactaaatcccaggcctaagctctttcagaattgctcctgtattagcccattttcacattgctataaagaactgcccgagactaggtaatttatttcatttgtatttatttatttatttttgagacggagtcttgctctgtcacccaggctg

SEQ ID NO: 46838 - DNA, 597 bp, Homo sapiens
tccagcctgggcaacaagagcaagactctgtctcaaaaaacaataataataaaacaaaatttaaaaaaaaaaagaagtaggctaaagaagaagccagggaatacggaaaaagagcaaccagaaaagatgaaggaaatcaaggagtccaggtgtcaaggaagttaaggaaaccacatcccaaggagggagtagtcagctgtgtcaacaaggggtcaagtggttaaagtattcaggttgggtttaactccatgtcccctggggggacagaggcacaggcagtgattggaagccctgggtcagacagaagagctggctcacatgaaagcaggatcagagatccagtcctcaaattccatacatcagagactamaccttagtgaggggaaacattttgttcaaggtcacgcatcacaactatggcaaaacaaggaccagaaacctgtcacactaaatcccaggcctaagctctttcagaattgctcctgtattagcccattttcacattgctataaagaactgcccgagactaggtaatttatttcatttgtatttatttatttatttttgagacggagtcttgctctgtcacccaggctg

SEQ ID NO: 46839 - DNA, 597 bp, Homo sapiens
tccagcctgggcaacaagagcaagactctgtctcaaaaaacaataataataaaacaaaatttaaaaaaaaaaagaagtaggctaaagaagaagccagggaatacggaaaaagagcaaccagaaaagatgaaggaaatcaaggagtccaggtgtcaaggaagttaaggaaaccacatcccaaggagggagtagtcagctgtgtcaacaaggggtcaagtggttaaagtattcaggttgggtttaactccatgtcccctggggggacagaggcacaggcagtgattggaagccctgggtcagacagaagagctggctcacatgaaagcaggatcagagatccagtcctcaaattccatacatcagagactacaccttagtgaggggaaacattttgttcaaggtcacgcatcacaactatggcaaaacaaggaccagaaacctgtcacactaaatcccaggcctaagctctttcagaattgctcctgtattagcccattttcacattgctataaagaactgcccgagactaggtaatttatttyatttgtatttatttatttatttttgagacggagtcttgctctgtcacccaggctg

SEQ ID NO: 46840 - DNA, 566 bp, Homo sapiens
gatctatcttagtgagtagcatgaagctagccaagcagaggtctactgctttctcactgggtcccacatttcatttagtcactggggcctcctttacatcttaatgtttgttccttgatcaccattttttccactactgtttctctctactggcttctaccctgctcttttagtctattatttttgctgcatccagaacaatcttggtaaatcacaactcatcagaggctctccattgcctgtagcaaagctcttctcttaggaataagactgtgatctttcctggctgatacttccagtattgtcttcctccatccttgcatatgcccccatactccaacttaaggctttttttgtctttctttcattgcccatacctctgaacaaactgagccctttacggtcaagagttacatcttactttttgactcgtaagttcctgacccttgttaagcatcartgcatgtttgtttgaatggatttgtctgagtaaaaccatcaccagctagagggggagatagttgataaattctaatttaaagaaaaaaaacaagaacagacccttg

SEQ ID NO: 46841 - DNA, 328 bp, Homo sapiens
ttgggcctcacttcgtaaaagtccaggaaattactctccctttctgtttgcactcggcctcatgccatgggcctcstgggcaggtgcactgctgctccaccggtgctcaacacatttttgctaaaggaatggatgaccccagaaaacacatacaagctgggcacaatggcatgtgtctgtaatcccagctacttgggaggctggggtgggggatcgctcaacgccaggagttgaggctgcagtgggctgggatcgcacctatgaatagcccctgccctccaacctgggcaatgcagcaagaccctgtctctaaaaattaaaaaaagac

SEQ ID NO: 46842 - DNA, 632 bp, Homo sapiens
ataccattatctcacctcgttctatagcttgctaataagatgatgttgaagttkttgagacacaaagacttaggcagcatgaaaatggaggaaggtgcatctcttgcaggaaatttatgagcttagactcataaagctgagggaaggtaaatttcctactgtcataaagaatctgtttaggacagctccatatcccaacatcttcttgtatattttttttcctctttaggtctacaaggaagtcttcacgaggagcagtgagaactcagcgtcgtcgacgttctaagtctcctgtccttcatcctccaaagtttatacattgcagtacaatagcgtcttcttccagcagtcaactcaagcacaaaagccagactgactcacctgatggcagcagtgggctgggaatttcatcccctaaagagttcagtgcaggagaaagctctacttctctcgatgctaatcacacaggggcagtcgttgagcctttgagaacttctgttccaaggctcccatcagagagtaagaaggaagactcctctgacgctacccaagtcccccaagcaagtctcaaagccagtgatctctctgactttcaatcagtttccaagctaaaccagggcaagccatgcaca

SEQ ID NO: 46843 - DNA, 541 bp, Homo sapiens
taacaatatggagctggtcctatcattatccttacttgcttatgaagaaacagatcagagactaaactgcccagggttggccaggcacggcggctcatgcctgcaatcccagcactttgggaggccaaggtgggtggatcacctaaggtaaggagtttgagaccagcctggctaacatggtgaaaccccatctcaactaataatacaaaaattagctggacgtggtggtgggtgcctgtaatcccagctactcgggaggtcgaaacaggagaatcacttgaacctgggaggcggaggttgcagtgagccgagattgcgccactgcactccagcctgggcgacaagagcaaaactccatctcaaaaaataaatacataaaataaactgcccagggttaactagctagcaagtggcagagctgtgatctaatcaaagtctagagtccatgtctcayctccatgaaggaagatgaagccctagaagtcatataacagcaatagagaaggagggatatttgggaggtggcttggacaggagcgag

SEQ ID NO: 46844 - DNA, 551 bp, Homo sapiens
ctaatactatgttattaagtttttgctccaaatttttccagatttcgccagtgagactctttcagttgggtcctatgtattattgacatacttcatcaatgtttgtgtgtgctttgttttgtttgttttttcaaatatttcctttctggcattacagaatactccaggcttcttgtacatttcttatcctagtcctaaaagcaaccatttctccaaagaacccttgttcttttggagaatggtgttagtaaccaagatctgaagcctagatgtgctcattgctactggggtgttcttgyttgtaggccttttcagatgtcagggcaaaaaataatatatgcatatatagcatcccatatgcacacacacatttataaatatttttgtgtgtatctgcatatattaagctaaacatgagtccataaagatattaccaaatgaatcattatactttcctccccttgcttatctctagcttcctactccaacattgagaaacctggttcctaccatctgccatctatttacttaattgttcaataccagtatac

SEQ ID NO: 46845 - DNA, 551 bp, Homo sapiens
ctaatactatgttattaagtttttgctccaaatttttccagatttcgccagtgagactctttcagttgggtcctatgtattattgacatacttcatcaatgtttgtgtgtgctttgttttgtttgttttttcaaatatttcctttctggcattacagaatactccaggcttcttgtacatttcttatcctagtcctaaaagcaaccatttctccaaagaacccttgttcttttggagaatggtgttagtaaccaagatctgaagcctagatgtgctcattgctactggggtgttcttgtttgtaggccttttcagatgtcagggcaaaaaataatatatgcatatatagcatcccatatgcacacacacatttataaatatttttgtrtgtatctgcatatattaagctaaacatgagtccataaagatattaccaaatgaatcattatactttcctccccttgcttatctctagcttcctactccaacattgagaaacctggttcctaccatctgccatctatttacttaattgttcaataccagtatac

SEQ ID NO: 46846 - DNA, 596 bp, Homo sapiens
cagtgactaccagcaattgctctaagactggcctctgtccagcaattgtacgacactgggtgtttggcaagaatctgccatgcagaaaatggttcttaaaaaaaaaaaaaaagcaatcctacaaaatatgcaaatcacactggatttcaactttagacctctgacatttaataacacaaaaataagttatgtcttaccaatctgacactcctcattacttgattttaggcccttaatacagatcaatttttattaaagaaagggcagcatttaggaaaagaagtggaacatgctgaattatcaactacgtttaatgacaaagctgcttcctaggttcaagaaaatgtgttaacttgagttataccaattctgtcagtgctttattgatagacctaggcgrtaaagatgttttgatgaatgttatgatcactttagaaattgcactcaagcaaatggttacttccaaagcatcctttccaaattgtgtcaaaaggaaagctagagatgtttataggtgcctaatgggaaacaaggctttcgcggtcggatggaacattctgtttgatattctccctcttggagatttctaagatgca

SEQ ID NO: 46847 - DNA, 528 bp, Homo sapiens
ccatgtcctgggacgaaaggtatttacgcaaatctgcctgggtctctgttgccagggatactactcactgggcacccgactggccccatcatgaagcttctgacagcaggaaaacaccagtcagccctgtaacgatcagccacaaagtcatccaccagggcgattcaggtcatccaccccacctcaattgtgtttgttagggacaaatatttagaagtttcatgtttgtgggattatctcaatgtctttgcagtctggagggtgtctttacagagctgaatgagtcaagtgcctattctgaygccatagaatcatataattaaaaaggtccttaaaagatgacgtcactccagctcaatgggttgggggatctcctctgggagaaatgttttggatctagacagaggggcattacacaacattgtcaatgtagtaaatgccactaaatttgcacctgaaaatggttaattttttgttgtgtgaatttcatctcaatttttaaaaaagattatatcgttcagtctttta

SEQ ID NO: 46848 - DNA, 490 bp, Homo sapiens
cgttacagaggttaagcagcttaaattttttaagcagttattaccaagtattgttatatatcctgaataggcaatatataggcagacatagaaaatctctttaaaggtaaactttcgcatattgattttttccatttttgttgtttacttaacatacatggagcacctactatgtgccaagcagtatgtgaaccactgaacacattagtaagataatctgagttttaaacagctgaattttcaaggatgagtgtcaaccaayagattattgatgttccaggccaaaggaacaaatacaatgaaaaagattgggatggcatgtttggaaaactaaataaatataatctctatggctacaaaggctcaaaagggaagagatgagattagagacataggcatggaaggccttaaataccatgagggtgaggtcaggagtacagcactcaatagttttatatccaagaatgttaagaaaaaaaaagtttctaga

SEQ ID NO: 46849 - DNA, 590 bp, Homo sapiens
ctgggtaggtgagaaaagatcaaagatctttcttaataaattgttacggtaattagtgtttgtcttgtacttcttttccagggggtcttttatacccaagcttgggaaacctgcttagcgaacaaggaagcttttggaaagacaaatcttgctaagctcccaaaactgacttaaaatcagtggagtgaggaaaaaaaggaatacaagaaagggaagataaaaaagaccatgaattcctctgggggagtccctactctgtttaatagcttaagaataaaatatggaaaagaactatcacatcacatgtagcctatttatatactagacaacagctttccctacccaccacccgcaccaagacatactgtgtatagctttctctgaaaataatgagagtactgtagtgtctatacttctcaaaaaatgttactaaaaagtacctaaattttaggaagataaagtcctccagaaaatgccccaccctccctcagcattacmtgggcttcctcctgctccattctatctaacacatcacctactttacctagattctttggctgtctcttccaattagaaagcccatgcatgat

SEQ ID NO: 46850 - DNA, 548 bp, Homo sapiens
ccggggatgccaagaaagagccaggcgccgagtgcttccacttctcgctgtgcctgcccccgggcctgcagcctgaggacgaagaggacgccgacgagcgcggcgtcgcggtccacttcgctgtctgctaccgctgcgcgcagggcgagtactgggacaacaacgcgggcgccaactacacgctgcgctacgcgcgccctgcggacgcgctctgagcctggagagtttcgaagagccgtggggcggggttgattagcacgtggagctcgggctgccgcctcaaggaacttgctgggacgctttgctgagcgtggcgagtctggcgtgaggggcgcgtggagggaaaggagggagactttgaaccgtcgactcgcacccccgcagacaagtgagcgagcttagagagcccgggcaatgctccgaaagcctctgacctcagtcttctcgtccgtttgaccttcctacaaggcctctagaattcccagcctgcgtcagartaggaagaaacttccaaggcccggagcagctgcctccaagaaaaaggctcc

SEQ ID NO: 46851 - DNA, 607 bp, Homo sapiens
atgtggccctctgtgcatgggtgggcaggagggcatcccgagtaaggtctgtcrccccttgactctgcctcagtgatttccctttttttaagtcttcccattttccagcacatggcgagtacagtcagtcgttttagggatggtagtctctaaggagggacagtttcactgttgcttgatagaacagggctgggcatacgtacatttggcccatgggccaaatttggcacacagcttattcttgtagggcctgtgacctaagaatagtttttacatttttatttttaatttaattttcttattattatttttcgagacggagtttcactcttgtcgcccaggctggagtgcaatgtgcgatcttggctcattgcaacctccgcctcccaggttcaagcgattctcctgcctcagcctccagagtagttgggagtacaggcatctgccaccacacctggctaatttttgtatttttggtagagacagggtttcaccatgttggccaggctagtcttgaactcctgacctcaggtgatccacccgccttggcctcccaaagtgctaggattataggcgtgagccacctcacctggccttacatttttaa

SEQ ID NO: 46852 - DNA, 501 bp, Homo sapiens
ttcttctttccttccccaacatttacttatagcaagttcacatttgagtgaaagatgttatactgagtttccaagttagtgacattaattccattcagtttttcctgtatgcccagaagtgagttaaccttgagggtgtagaaaaagaaaatctcacacttgctgctccagcataagaaaagaattgtccttctgccactttttttctctccatgtcactgtcataatgttacaaaacaagagtatggaatggccaaggtatttaattctgaaagcaatttamttttatatgtaaaaatttatccagaggaattagttcgtctcatttcattcttgtgtactcaaggaaatagccttccagtcacagagatcattcttaattagttttcttttttgtaaaagaaaaaaatctaaagccaatgggatattcgagaagacttattgtgaaagtttgcacaagtgcgggctgattctttagagctacaacttctctagtttagc

SEQ ID NO: 46853 - DNA, 589 bp, Homo sapiens
ttgaggcttattcagttttcttggctttagtccttaaaaataaatcaaaactgatttagagaatgtttgggcttatcagaaagtcattwtcccctggctgtccttagcaagacctcacagcatcacagtggaaacaaagtatgctaaattgaacaaacagatggacatgggccctatgcccggaatcaccggagacccttaaggaacccctttggtggaagagctgcaccagtgttgggctgaggagtcagcagacctggatttgagtctggactccaatactgtgcaatcctggataagttacttaacctctctgagtctcagcttccttttctccactttgagtaatggtctcaaacagtgtgttttaaaccacttactttaatctgctgtctcatgtccgaaacaaggtcaaatccccctgttggggatgttcatcataattattctttcctctataggcctcatccctattgttgtcatatatttgtttgggggatcatttgattacagtttatttcacttgaatacaagctccatgaacaagaacctcatctgacttgctcattgctgtaaatccaggctagcc

SEQ ID NO: 46854 - DNA, 589 bp, Homo sapiens
ttgaggcttattcagttttcttggctttagtccttaaaaataaatcaaaactgatttagagaatgtttgggcttatcagaaagtcattatcccctggctgtccttagcaagacctcacagcatcacagtggaaacaaagtatgctaaattgaacaaacagatggacatgggccctatgcccggaatcaccggagacccttaaggaacccctttggtggaagagctgcaccagtgttgggctgaggagtcagcagacctggatttgagtctggactccaatactgtgcaatcctggrtaagttacttaacctctctgagtctcagcttccttttctccactttgagtaatggtctcaaacagtgtgttttaaaccacttactttaatctgctgtctcatgtccgaaacaaggtcaaatccccctgttggggatgttcatcataattattctttcctctataggcctcatccctattgttgtcatatatttgtttgggggatcatttgattacagtttatttcacttgaatacaagctccatgaacaagaacctcatctgacttgctcattgctgtaaatccaggctagcc

SEQ ID NO: 46855 - DNA, 574 bp, Homo sapiens
ggaggagaacaagaagcactggggccttgccaggaaggtgcgggagggagagcatcaggataaatagctaatgcatgtggggcttagtacctaggtgatgggttgatgggtgcagcaaaccaccatgacacatgtttactgatgtaacaaacctgcacgtcctgcacatgtatcccagaacttaatatataattaaaaaaaataaaaatattagttcagattaaaaataaattactgggcaggccaaacataatatgcctgcaggatggacttggtggagctcctgcagacctgtgacttctactgctgtcaaatggggcatcttcctacagtccacmcgttgatttgggtgttggcttttagtagaaccctgctgtcttacgaggtactgatggccatcagtgcctgcccagtgggagggtggcatattcaactaacggccttttgctgcaatcccctcttggaaaatagttttctcacaacagagaagtcctcttcgggctttaaaagactctgtaggagatgatagattggagtgcaagtcaggtttgaaactgtcttgttttctcaatct

SEQ ID NO: 46856 - DNA, 611 bp, Homo sapiens
atttctcctgtacaaagcatacgctttgtgaaagaatgactgtaatgcctggcagcggagagcctcagaggtgcagggtctgagatccaaagagatgtgagtaatgaagaagctctgaccaatgacccacattagcaataccaagtgacctgaagacatggtcattcccaagatatgaggaggatataatttacggcattatttacacttaacgcctcccatcagcttgctgtaatggtgtcaagatatttcctacccattataagaggttataatgttgcagagcttcagcctgttttaccttcagaaagactgttgatcctcatttcttctttttgtaatccctatgtttaaatctgtagatctgaggcctgaaatcctagagactgtaaatattatctaccttcccttttcctattaagccattctaaatttgtctgaaatataaaggctaagctagaaggaaaaatgtactcatgaaakatttagttttccctgattatcatctttttgtttaccatttctgttggcatatgcaggtaaaattgaatgacaaacgtcattttactcttcctcttgtttatgttaaagtaatgacattgcagagcatt

SEQ ID NO: 46857 - DNA, 614 bp, Homo sapiens
ggaaactrgaacatatataagagatataagaacctaagatttaaaaaaaaaaaaaaaacaacttgtctgaatgtaacatatctcccccatatttgtaaaacaattagaggacaaaagctaacctgtggtaataaaatatcaactatatttttgttgattaagagttccacataaaataatgctttgaaagactcactgctctaaaatactcactaaagcatgtgacttttgtgtcttatcttggaagtagtgacatggagggttttatgtaggaaagatgacattctaaatagaaggtaatatgcatttaagcatagagactacccttccttttttcacagacatatgtaagaaattaataacagacaaagtcaggtacagaaacaaaaactaggggccaagtgaatacatgactgaagaagttatatttcaaaggtattaaaagaggaggcactaaagttctttgagtgacctaattatatttttgaaaaatattccattcaacactcatttattggctgtgtgttattggtatatttctgtgccttgatgactatgctgtgaaaacattgaaaagatggcatagtcctttcctttgaggagctacagactat

SEQ ID NO: 46858 - DNA, 614 bp, Homo sapiens
ggaaactagaacatatataagagatataagaacytaagatttaaaaaaaaaaaaaaaacaacttgtctgaatgtaacatatctcccccatatttgtaaaacaattagaggacaaaagctaacctgtggtaataaaatatcaactatatttttgttgattaagagttccacataaaataatgctttgaaagactcactgctctaaaatactcactaaagcatgtgacttttgtgtcttatcttggaagtagtgacatggagggttttatgtaggaaagatgacattctaaatagaaggtaatatgcatttaagcatagagactacccttccttttttcacagacatatgtaagaaattaataacagacaaagtcaggtacagaaacaaaaactaggggccaagtgaatacatgactgaagaagttatatttcaaaggtattaaaagaggaggcactaaagttctttgagtgacctaattatatttttgaaaaatattccattcaacactcatttattggctgtgtgttattggtatatttctgtgccttgatgactatgctgtgaaaacattgaaaagatggcatagtcctttcctttgaggagctacagactat

SEQ ID NO: 46859 - DNA, 466 bp, Homo sapiens
tttaatttctattttaaattactaggggtgctctctgtgtaaaggaaccctgaagtgaaatatttttaaatgtgtagaatcattcttaagttacaattttaaaaataggatttttgccatttttatataggcaattgtaattggctccttatataggatagatagatagatagatgatagatagatagatagataaacagataagacagagacagaaaggtatctatttmtacatatatacaaatgatctaagaacatgcttttttatgaaaaaaaaaggtggctcactgaatacataaaacttgttatagtctgagataacaatgttaaatataaaattggaccaaggatctagaaataattactactttttcaagccttggtacaaaaagataagagtagtaccacaccacaagggttcacaaggcaaatgccttcttttggcattgacattcctaacacatgc

SEQ ID NO: 46860 - DNA, 598 bp, Homo sapiens
ataagtggaaaggaaatccctcaacactacacaggtaactttatcttattgagtgattcatgctttgagagaaacttaaattcacagaagctaaaataaggaatctgaaggattaccaaagaagtccctgggtgtgagagtgagtatgacaaaagcttgctctccctgggcttttcttgtgtttattttatttttattaagattttttttttttttttttttttttttttttgkgagacagagtttcactcttgttgcccaggttggagagcaatggtgcaatcttggctcaccacaaactccgcctcccgggttccagtgattctcctgcctcagcctcctgagtagctggaattacaggcatgcaccaccacgccaggttaattttgtatttttagtagagatggggtttctccatgttggtcaggctggtctcgaactcctgacttcaggtgacccacccgcctcagcctcctaaaatgctaggattacagtcgtgagccaccacgcccggcccctcctgtgtttattttcttggagtctccagaactctgaattaggccaaggagcagttatcttttcactttcaagatggcta

SEQ ID NO: 46861 - DNA, 565 bp, Homo sapiens
tggaacaatgagaaaaataacttttctttctgtaggctgttgcaacctcaccagaacagctgaagaatgaatttcagcctggactctaccttattagttgggcacccttggggagggtgcaacctgcccaacattttctgctggccctgtcttacctcatgactaagagagccttcctaggtctggaaggtagcagtcagtctgttctggagggtggagagagacaccagtgttttcccatggtttctgggtagtagataaaattggtctattctaaggttaatttgatattttaaaattttgattctgactagcttattggatttttttgaataatgtttgattaatgtaaaggttaaaaataaaacctaatatttcagctaagcaaatggtatttctttaataaggaygtatttctatctatttatacctgcctcattccataggaattttataaagccagtccaggaatgtagtctgaatcaatctagtttgctagcctgtgagaccagggcaaagatgaaaatagtcatgggaaagttttatccttttaggggtatctgtc

SEQ ID NO: 46862 - DNA, 543 bp, Homo sapiens
tgcattccagagatgcactccgctctggaactcactctcagccacagggagctgcatgcaccacaggggcaatgcacctttgcaggggtaccttctggccccaacccttgactcaacggggacaactccagaaggtcattccagatccagagatccccatcgaactgaaggatcactgggttgcagacacattgcaggtcagcttcttcctctgcccagtcctgccctcactccccagtgaatcctcaattttctgtctcgttgtctgtccagataattgattctaagacatgttaggtatataaggagtgtagataaggcttcagccatgagtcaccccscagtaagccccagagtatattgaatagaaattctgcatgtgtggggagaatggacaaggacttaggaaaaagtcctcatcaaagaacagcttttttgggacaagctttacatgggtggggagggaaaatgtgaaacacattagcaataagttaaacctcatcttgtactaaaggaggacacactcagggagaagacctctgt

SEQ ID NO: 46863 - DNA, 1689 bp, Homo sapiens
aaaaaattatgaaaaggaggagatatccaaatagccaattacaggttggtgtaaaagtaattgaggtttttgccagtgaaagtggtggtaaaaatcacaattacttttgcaccaacctaataaaacatggaaacaaatttcacctccctaaatgcaacttccaaaattaatgtttttttggacatgcacattcattttcttcttttctattatatttaagtcaaattttaggtgattaaatatgacatcctcatgatggaatattattcatttgttaaagatcctatttcagaaaatatgtagcaaaatgggaaaatataatctttggaaaaaagataaattattgtatttgcaatttcttttgaacttatctaaatacatatttttatgaatgaagaaaatgaaccaaaatattcaccatagttatattttagggttgggatttcaggagactttaatgttctccctaaatgcctgtattttccaaatatctaaaatcaaaccataaaataattagatgaaataatagatataataaaactatatcaagagccaacatagaagtttaaaagattctgttcttggcactgcaatttcactaacgcagagttctctagaacatcttataagattcactcattcaacaattacttattaaatgcctaccatctgtcaaggactagaatatctgtctggaataatacagagaaatcctctatgttatgaacaaattgaagagctttcccccatgcagcttaccttcagagatggaatttggaaaaccatctacttcaagccccacttgtgcatagttatcgaaggcccagcctaggccaagcactaggctagtgcagggaatcaaagggagcaagactgacagtcctcattctcactgaacttgagtgcaaaagaatgttcctgaaagcattgttcaatatgccaggaagactgttctcatggttatagtgtgaagttcaggaacctgcatttcaaaagttgttcagatgatttggatgcacaatgcagtttgagaaccactgggctagtagagcttcattgtcaaaaagatggataatgcactgcccagaagttttcagagagtgcattaatttgctaaggctgctctaacaaaataccacagattggrtggcttaaataatttacttcctcatagttccagaggcagggttggtttgcttcgaggcttctttcattggcttgcagatggcggctccctcgctgcttcttctcatggtcagccctctgtgcatgctcactcctagtgtctgtttctcttcttataaagacatcaggcgtattggactagggctccaacctaagattctcattttaacgaaatcacttctttaaagaccttatcttcgtatatggttatattctgatactgggggatcagaacttcagcacatgaattttaggggggatacaattcagtccatacaccactgtattctttaatcgtctttagggacctctcctattctcatccaccgtctatttgcttaccttcagcgatgaggagtgcactactcccctgtgtgttggcggacagaatctaaatcttctctgaatagaacaccataaggcccagacatttccagtagtacgtggttgaactcttcagccctctgtcttccctaagatgcctgtgacatttttcattcttaa

SEQ ID NO: 46864 - DNA, 564 bp, Homo sapiens
atgcccttatatagaacgttatgtttccrctaatctagtccttgctagaattgcactgtaatttgacttatttgtctgaatactctgcaataatctgctgcagagctagcacccttgctgccacatttaacgggatcaaatacagcacctgacacatagtagggtttcagaaatatttaataacataagtaataaaatgcagataccattcatatactaaagaaaaaaaagaaaaaatctataatatcaagatgaagtttaatctggaaaagtgcaaagaaaacaactgttaaggagaagtacacaaggcccaggagtggtagaatgaacatgaatttttgttgggacattaaggaaatctgagaaagtgatgctatagctatgagagataatgatgtaataactagacatttatagattatgatatacaaggaagaggaaacaattccatagctgtatttcacactgctttgtccatcattataagcatgtggatgtctccacatccacattttcttgttattaatgattctaacttacccattcaattatttagatatccat

SEQ ID NO: 46865 - DNA, 564 bp, Homo sapiens
atgcccttatatagaacgttatgtttccgctaatctagtccttrctagaattgcactgtaatttgacttatttgtctgaatactctgcaataatctgctgcagagctagcacccttgctgccacatttaacgggatcaaatacagcacctgacacatagtagggtttcagaaatatttaataacataagtaataaaatgcagataccattcatatactaaagaaaaaaaagaaaaaatctataatatcaagatgaagtttaatctggaaaagtgcaaagaaaacaactgttaaggagaagtacacaaggcccaggagtggtagaatgaacatgaatttttgttgggacattaaggaaatctgagaaagtgatgctatagctatgagagataatgatgtaataactagacatttatagattatgatatacaaggaagaggaaacaattccatagctgtatttcacactgctttgtccatcattataagcatgtggatgtctccacatccacattttcttgttattaatgattctaacttacccattcaattatttagatatccat

SEQ ID NO: 46866 - DNA, 564 bp, Homo sapiens
atgcccttatatagaacgttatgtttccgctaatctagtccttgctagaattgcactgtaatttgacttatttgtctgaatactcygcaataatctgctgcagagctagcacccttgctgccacatttaacgggatcaaatacagcacctgacacatagtagggtttcagaaatatttaataacataagtaataaaatgcagataccattcatatactaaagaaaaaaaagaaaaaatctataatatcaagatgaagtttaatctggaaaagtgcaaagaaaacaactgttaaggagaagtacacaaggcccaggagtggtagaatgaacatgaatttttgttgggacattaaggaaatctgagaaagtgatgctatagctatgagagataatgatgtaataactagacatttatagattatgatatacaaggaagaggaaacaattccatagctgtatttcacactgctttgtccatcattataagcatgtggatgtctccacatccacattttcttgttattaatgattctaacttacccattcaattatttagatatccat

SEQ ID NO: 46867 - DNA, 564 bp, Homo sapiens
atgcccttatatagaacgttatgtttccgctaatctagtccttgctagaattgcactgtaatttgacttatttgtctgaatactctgcaataatctgctgcagagctagcacccttgctgmcacatttaacgggatcaaatacagcacctgacacatagtagggtttcagaaatatttaataacataagtaataaaatgcagataccattcatatactaaagaaaaaaaagaaaaaatctataatatcaagatgaagtttaatctggaaaagtgcaaagaaaacaactgttaaggagaagtacacaaggcccaggagtggtagaatgaacatgaatttttgttgggacattaaggaaatctgagaaagtgatgctatagctatgagagataatgatgtaataactagacatttatagattatgatatacaaggaagaggaaacaattccatagctgtatttcacactgctttgtccatcattataagcatgtggatgtctccacatccacattttcttgttattaatgattctaacttacccattcaattatttagatatccat

SEQ ID NO: 46868 - DNA, 518 bp, Homo sapiens
agaacaaattttcttgctgatgagagaataagatgcacagtaggtcactgggctcaactctggacaggtttctcaagacctagcattcactactagctacctcactgtgaccttggataaggagttgacacttaactcataatagcatgtcatggagggtgtgggtggcaggccttcagataaaataattcatttaggaatgctctaagggataaaggctctacaaatagaggcattttaatgcctactgcttgactttctatcaaccttgatctacaatccatgttcttttatctgctgaacttaaaaataatctaacactrtattatttataaggcattaaaggaaaaggaagaaggaattccagtatataaacatgaaaattcagcagaatcactagagggaaaaataaataaataattcaaaaacggaacaatgctgacctttctgtggtttgatattgtgcttgggattgactagacagagacatctcttcaaaataccaaggaaaatgagaa

SEQ ID NO: 46869 - DNA, 1487 bp, Homo sapiens
ggcaaaaatgaccatgctaagaggtaaagatctattccaaagctaggagagagggaaaactgaycactagtcagtcacagaaggcaagttaaattattaagaaaaatgagagaggataggaccattaggttggtacttttcacactgtaggctgtgacctatgaaattgccttagaagactacatttaaaaagatgaaataggaaagaaaaataatcaggagtgtgctctatgaagtaagcattgtttttaaaacttagtttatatatcacatatatacacatacatatgtaaacacacaaattatatacctaggtgcaaactggagtaggatgtaaaatgctattcctaccgtgaaatatagtttttaaaaaagcgtttggaaaacaccatactaggtgatcagactctgttaaaacttaggcaatcactttctttttccatgtccctttgattcagaggctgacagatggatgaaactatccctgggtgaaataaaaccaaggccatcaccccactcccaatcttggtggaagagggtaaacacacaaagcacccactggcatgtgttgttatcagcttatctcacggatggagggaagtgctgtacctggggaggagagagagtcattcgctggctctgtagctgaggccaggtcctcagagaggctgtctttgcagtcctggcactgggagtgctggtgtgagtttacacagagggcatagatggcatacttcatggcacagaagccctggtagagtgtcaggttctgacactggctcaggtgctcagggactggagcatcaactgcatctgaattacaaagagaaacaggctgaacttgagagttaattaattcaggatgcaagtatgggtgaagcaaagagatgctgtgccatacttagaggtccacttgtaggttcttaccctctctcctttctgtcggtctgatctgtgtcacttctagggcttttcctcaagtcagtatcaactttcagttccctgcacttcctttcccccactcacctcccttctacatatctcatgacttctacatggcattattgcccagggccaggacttgcacctgacagtgagtgcctccttaaattttgcaccttaaatgtctctcttgcctcaccctagttgcagccttattattgcctcttttttgcctttttgaagtgtgccccagtgggtccagggatcagacttaaaatactgtatttctttggaaggcctgtatacttgcatgtaagagcagagttcgtattcctacaggaaatctgttaaacaagctgcctatctttccagaaaaaaaaaacatggaatgtaataacactggttctccaattagtagtaggtccttttgaaaagtaaagcaacatccaggctgggaaacctcaaatgccatgtaagaaagtttgtgtctctcaaagtaagtgtctctgtcctgtggggcagattgtgactatacaatgatacgt

SEQ ID NO: 46870 - DNA, 546 bp, Homo sapiens
tgtttctttaacaaaggccagaaagattagatttttgaagggagcattgctcatttctgtcaacatctgattatttatcctccttagttaaacaaaaccctggttatgacaaaggctaaactttgaataaatctgcaaatttaaattatacagctgagggagamaagaaagcataaataatagggccaacttttttcacctgagcagaatcttgttcttcctaattaaaggtgatgctactgagccagtcacaggaggaaatatgcttaatctatttcgaggcaatgagtttctgctgttgcatctatcctttatttcctggtctcccttttgaccttttcatccacagcacatgggacaggtactagggtcccatgagaaagacaaatggccaaaaaacacagatcttacagaacttacattccattctgcaccattgcgttttgattttcatattgataatattgtcatgaggactaaacaaatatatatatgtgtgtgtgtttataggagtatacatatatgtatgtatatctgtgtataaat

SEQ ID NO: 46871 - DNA, 633 bp, Homo sapiens
agcagtaataatagtcaaaacagtgccgtaataaagtgcatgtgagtcctaagaaaagggctgctaccagtagttccaatgccaggatcgtgcaactcaaagagaagtaatgtccagcttttggaattgagcaaatgaatggatggtgttccaattaaatgaagtaaagaataaagaactagatagaattttaaggtaaatgagggtagaaattataagctttatttaggcacatttttagtttttcatgctactgggcattcaaatgcttgaaatgcagatcggcgactcagaagaaaattctgagttagggataaggcttgagaacattgtcatgtacagggtagtgaaagccaccagcttggtagattttacatagcacatagagagaagaaggaggraaaaatctggagatagtaaacctgggagaaccaaaatgtaatgagtgaaggaaactggggaagaaaaatgagacgtggtcagtgtgggaaagagatgactaagtgatgtcatggaaaccaaaggatatttttcaagctatacatgcccttgccttcgcagacatttgaatttactttttttttctagtgggtccccacactaagaataacttattgttaatgtttggttttt

SEQ ID NO: 46872 - DNA, 633 bp, Homo sapiens
agcagtaataatagtcaaaacagtgccgtaataaagtgcatgtgagtcctaagaaaagggctgctaccagtagttccaatgccaggatcgtgcaactcaaagagaagtaatgtccagcttttggaattgagcaaatgaatggatggtgttccaattaaatgaagtaaagaataaagaactagatagaattttaaggtaaatgagggtagaaattataagctttatttaggcacatttttagtttttcatgctactgggcattcaaatgcttgaaatgcagatcggcgactcagaagaaaattctgagttagggataaggcttgagaacattgtcatgtacagggtagtgaaagccaccagcttggtagattttacatagcacatagagagaagaaggaggaaaaaatctggagatagtaaacctgggagaaccaaaatgtaatgagtgaaggaaactggggaagaaaaatgagacgtggtcagtgtgggaaagagatgactaagtgatgtcatggaaaccaaaggatatttttcaagctatacatgcccttgccttcrcagacatttgaatttactttttttttctagtgggtccccacactaagaataacttattgttaatgtttggttttt

SEQ ID NO: 46873 - DNA, 475 bp, Homo sapiens
ttatgggactcaaaaaatgyacacttatttttaaaaattttccaaagcaatactatgatacctgattcaagaaatataggaatggagagtgtattagtgtactagggctgccattacaaagcttaagtgaagtggcttaaacatagaaacttattctcacggtgctggaggctagaagtccaagatcaagggatctgtgggccatgctccctctgaaggcactagggaaggctctgttccagacctccctcccctgtacctccctccttggcttgtggccacagactcggatcttcacatgcagtgctccctgagtgtgtgtgtctggtccaatgttcccttgttataaggacaccactcgtattggattagggcccatcctagtgacccattttaacttaattacttccagaaagaccctatctgtaaaaagggtcacattctgaggtactgggggttcaacatatgaattttg

SEQ ID NO: 46874 - DNA, 591 bp, Homo sapiens
ccacatatctggtcaccattgaactttgattttggtaaagactagatttttaaagcaatattcaccgtgtgtctttccagtgtcacccttccctcccatgaaatggcacaccgtgttccttggccctccacatttgccattaaaacaaaacattgttttcacatgtcccttctatttaacaggttatttttttatttttggtactcctgcacttgcatttattgaatcataatatttaattttatttctgatgtcctggacctctttctttagaatttctatttacagtgagctttctgtttagctgtgatttaggtcacattggtttatgtttttgagttttttaagaaaatatttggtctcacaatcacaaccattattacattttttgttttgattaagttttttyagaaaaatagctcttaaaaatatgacactatatcacacataaaattgctctattcagtcagttgatccatattcaagtggactgacatccttccttcctccgtccctccctctctctctctctttttctttccttccttccttccttccttctttccttccttctttctttctttttgatat

SEQ ID NO: 46875 - DNA, 591 bp, Homo sapiens
ccacatatctggtcaccattgaactttgattttggtaaagactagatttttaaagcaatattcaccgtgtgtctttccagtgtcacccttccctcccatgaaatggcacaccgtgttccttggccctccacatttgccattaaaacaaaacattgttttcacatgtcccttctatttaacaggttatttttttatttttggtactcctgcacttgcatttattgaatcataatatttaattttatttctgatgtcctggacctctttctttagaatttctatttacagtgagctttctgtttagctgtgatttaggtcacattggtttatgtttttgagttttttaagaaaatatttggtctcacaatcacaaccattattacattttttgttttgattaagtttttttagaaaaatagctcttaaaaatatgacactatatcacacataaaattgctctattcagtcmgttgatccatattcaagtggactgacatccttccttcctccgtccctccctctctctctctctttttctttccttccttccttccttccttctttccttccttctttctttctttttgatat

SEQ ID NO: 46876 - DNA, 593 bp, Homo sapiens
taataaatacattagtaatgcagacagcctacaaaatagtttgctagtttgctctaaagatatttctggctgtgataatgattaatttcagataccctgcatcataattttcttgaaatatgtaaattacttccctctcaaaatttcttatgtagaaacacacacacgcacagacacacatacacacacatatttagcaggtcgaaatgaggttcttgaatctgcacaaaagttgttgatgccaagcccaaacagtacaattgtgagtgcagctggtcaggtcttcaatacygttcccttctcctcaccattcttcatgcccaaggggtctatttgcatttcctagaacatgccttgcgctttctagccttcagaccttttctcccagtttgtccttcacttaggatgtcttcttttagtatctccaactaaatgaaccccaccctttcaccaatagggttgaaaatacattttctcaatatctcagacaatcccaggccagacaaaaccccaagggccagttatcttttgcatttcttgagcactggttgagcatcgtgttagtaaaattaaatgttaatctcaaacacaga

SEQ ID NO: 46877 - DNA, 593 bp, Homo sapiens
taataaatacattagtaatgcagacagcctacaaaatagtttgctagtttgctctaaagatatttctggctgtgataatgattaatttcagataccctgcatcataattttcttgaaatatgtaaattacttccctctcaaaatttcttatgtagaaacacacacacgcacagacacacatacacacacatatttagcaggtcgaaatgaggttcttgaatctgcacaaaagttgttgatgccaagcccaaacagtacaattgtgagtgcagctggtcaggtcttcaataccgttcccttctcctcaccattcttcatgcccaaggggtctatttgcatttcctagaacatgccttgcgctttctagccttcagaccttttctcccagtttgtccttcacttaggatgtcttcttttagtatctccaactaamtgaaccccaccctttcaccaatagggttgaaaatacattttctcaatatctcagacaatcccaggccagacaaaaccccaagggccagttatcttttgcatttcttgagcactggttgagcatcgtgttagtaaaattaaatgttaatctcaaacacaga

SEQ ID NO: 46878 - DNA, 542 bp, Homo sapiens
attattatcctcatttttcagatgaagaaacaggcctaggggggtaagttacttgcctaacgtcttttagtacaagatggggcttggattatgaacacagaggatcagcctccagaatttcagttcttaagcactctgccaaatggtgcattatacaagtaggtacacacccctattttcaaaccttgactggaaacacaagcattatggttcattttaaaatacaatgttaacttttcagtttataagcatgatgttcacaatttagatgatacactttggaatggtacactctgtatatttgggacatttcatttggcagccactgaagcttgttaatatcaacaactggcttcattggctccttcaaataaacccgtttaatctattatagctggcctctagcaaatatgccataagtagaaataaattttgagttaaagaatattcaccgtgattagaagctcaaaagaagtattttaaatgtgtgtgtctgtatttgggtatgtataaatarataggtagatagacagatgggtaca

SEQ ID NO: 46879 - DNA, 603 bp, Homo sapiens
tgccttttgtacccagaacgtgcctggtaaatttgttaaagaataccccaggctaacacatcattacacttccaaactcatctatcttttactccggattaattccttttttccctctctcttcacctcctccataaatcctggtgcacttaattaatttcagttccactataagatccataatacagaattgttcaagcaaacasaaaattaattattctatttacagctttctcattgagaggagcatttcatctttcataattacattttggaacgtccaattatgaattcaggcgcctgctgttttgcataaggggacagtccccgagtgtcctcgaggtagaggagtcgggctggtggcctcttgtgccgtctgccactgactcaggcactgctggttcagtccctgaaaggccttttaaggagacattgagggaggggcaggatgggaaggtctggaagggagtggagcccagagatggggtgaagagaaggaggaggaggtaagaagggaagaggaagggtgggggatgtgccaatttaactgagaacctatcatgattaagagcttttcaaaggggacgaaacagacttcttcat

SEQ ID NO: 46880 - DNA, 603 bp, Homo sapiens
tgccttttgtacccagaacgtgcctggtaaatttgttaaagaataccccaggctaacacatcattacacttccaaactcatctatcttttactccggattaattccttttttccctctctcttcacctcctccataaatcctggtgcacttaattaatttcagttccactataagatccataatacagaattgttcaagcaaacagaaaattaattattctatttacagctttctcattgagaggagcatttcatctttcataattacattttggaacgtccaattatgaattcaggcgcctgctgttttgcataaggggacagtycccgagtgtcctcgaggtagaggagtcgggctggtggcctcttgtgccgtctgccactgactcaggcactgctggttcagtccctgaaaggccttttaaggagacattgagggaggggcaggatgggaaggtctggaagggagtggagcccagagatggggtgaagagaaggaggaggaggtaagaagggaagaggaagggtgggggatgtgccaatttaactgagaacctatcatgattaagagcttttcaaaggggacgaaacagacttcttcat

SEQ ID NO: 46881 - DNA, 522 bp, Homo sapiens
gcatgcctatttaaaataatttaaatatagtttttgtttgtttgtttgtttgtttcgagacggagtcttgcttgttgcccaggctggggtgcagtggcatgatctcagcacgctgcaacctccacctcctgggttcaagtgattttcctgcctcagcccccgaagtaactgtgactacaggcatacaccaccatgcctggctaatttttgtatttttcgtagggatggggtttcaccgtattggtcaggttggtctcaaactcctgacctcagtgatccacccgcctcggcttcccaaagctttgggattccaggcgtgagccaycgcgcccagccttaaatatagattttaaagaaactcaacttgccataggaaacacatctggaagttgcttgccagccaagagtgtttgtcttctgacctagtcaattccctcaaccttacaaacgaggaaattggtccagaaagtgacttacatggccatggctagttcatgccagagcaaaaatagaattaaggtc

SEQ ID NO: 46882 - DNA, 522 bp, Homo sapiens
gcatgcctatttaaaataatttaaatatagtttttgtttgtttgtttgtttgtttcgagacggagtcttgcttgttgcccaggctggggtgcagtggcatgatctcagcacgctgcaacctccacctcctgggttcaagtgattttcctgcctcagcccccgaagtaactgtgactacaggcatacaccaccatgcctggctaatttttgtatttttcgtagggatggggtttcaccgtattggtcaggttggtctcaaactcctgacctcagtgatccacccgcctcggcttcccaaagctttgggattccaggcgtgagccatcgcgcccagccttaaatatagattttaaagaaactcaacttgccataggaaacacatctggaagttgcttgccagccaagagtgtttgtcttctgacctagtcaattccctcaaccttacaaacgaggaaattggtccagaaagtgacttacatkgccatggctagttcatgccagagcaaaaatagaattaaggtc

SEQ ID NO: 46883 - DNA, 569 bp, Homo sapiens
agtctggattttgaattccagaggaaatattacagcaaaacttcattttactcaacagtagtactgaaggagaaaactatgtaggatacttagatgattattatatttaggactgaaagctgtgaaatcctagaaccgcaaaaggccatatcagccaggatttggtgcgagaaacagaaatttctcttgaattttgaagataaagggacttaatataaagtaagcacttgacagaaaaactggaagggttggaggagcaggctttaggttggctctccatgaatgatctcagaacatagcagcacagacccttggggagagctaytgtatctaccacattcagaaaggtgagaaatcaagaaggaactcccggggtccaaacaaaacaccagctttgttgaagccaaagaagtgtaagctgccaacagggagtggccactgtcaccactgcctctcagagacactgaagaactattacagaaagtcccacctcttttagcttctcacgtatctgtagaaacaacccaaaggatgcaggaaattggcccctttaatgtttctgccctcca

SEQ ID NO: 46884 - DNA, 1614 bp, Homo sapiens
tcaaagaaatgtgaacagtttacataactagaggccagtggggcagtttttacccccaggggacatttggcaatgtctggagatatttttgattgtcacagctgggggtggaaggcagcactgcaggtgggaaatggaggccacccatgccactaaacattctgcaatgaacaggatagcccccccgctacaaagaattatggggcccccaggccgggcgcggtggctcacgcctgtaatcccagcactttgggaggccgaggcgggcgggtcacttgaggtcaggagtttgagaccagcctggccaacatggcaaaacctcctctctactaaaactacaaaaattagccgagcgtagtggtgcatgcctgtaatcccagctactcgggaggctgaggtaggagaatctcttgaagccgggaggcggaggttgcagtgacccaagatcacatcagtgcactccagcctgggcgacagagcgagattctgtctcaaaaaaaaaaaaaaaaaaaaaaaaaaaaaaagaattatggggccccgaatgttactaatgctgatgtagagaaatcttgcatttaaagagagtaacatagtgactctctcttcctctgtctaaagtgggaccaattaaagaaagccatttcctgccgggcgcagtggctcatgcctgtaatcccagcactttgggaggccaaggcgggtggatcacctgaggtcaggagctcgagaccagcctgaccaacatggcgaaaccccgtctctactaaaaatacaaaattagccaggcgtggtggcgggcgcctgcaatcccagctactccggaggctgaggcaggggaattgcttgaacccgggaggtggaggttgcagtgaaccgagaacacgccactgcactccagcctgggcagtaagagcgaaactctgtctcaaaaaaaaaaaaaaaaaagaaagaaagaaagaaagaaagccatttccttcactttgtcagaacaactacaacaatagcaactaggaactcttagtcccttactctgttcctagcaacgttagaaggtaagtagctgtccggtcatcagccccctttttaaggacaagtcctagaggggtaaagaaattgctaagttcacacacagagtaggtaatagaccccaggcaacctgacacagagatggctgtgtcagtcagggaggcagtcttgctaacattcacaccttggtcttaaacttgccacacacagatatttcttgcatgtctaccctattactaagcaaacagagaaggtgctaaaggaacatgaaactttgactaagaagttccatcccaggccagctgtggtgtctcacatctgtaaccccagcacttcgggaggctgaggcgggcggatcacgaggtaaaaagatcgaaaccatcctggccaaaatggtgaaaccccgtctttactaaaaatacagaaattagctgggcatggtggctcgcgcctgtagtcccagctcctcaggaggctgaagcaggagaatcacttaaacccaggaggcrgaggttgcggtaagccgagattgagccactgcactccagcctggcgacagagagagactctgtctcaaaaaataaataa

SEQ ID NO: 46885 - DNA, 541 bp, Homo sapiens
ctcttaagaattcccatttgttgattcattgttgtcatactctaattctttaaacatggtttccttcagatatttaagcatatttataatagctacatsaagtctttgctaaatccagcatctgggaaacacatagtttcttttgacctctgctattcctgattgtgggccacattttcctgtttctttacatatgtcctaatttttattgaaaactgaacattttagataccctattgtagcaactctggattcttattcttccctgcttgttgctactgcttgattttgttgtttttattcattttttaaataactcacctgaattaaatatatgagacttgcctctactagtatttggcttctgatatttctgctaggttcttaaattattattcctgtttttatttttaagcctgactttctcagagttgcccctatctccacagctgagcgtgtatccaatgactaggctcaaacaccctaacccagcaaggcttctgtcctccaccgatggatctgtatgtggctggagaatgca

SEQ ID NO: 46886 - DNA, 541 bp, Homo sapiens
ctcttaagaattcccatttgttgattcattgttgtcatactctaattctttaaacatggtttccttcagatatttaagcatatttataatagctacatcaagtctttgctaaatccagcatctgggaaacacatagtttcttttgacctctgctattcctgattgtgggccacattttcctgtttctttacatatgtcctaatttttattgaaaactgaacattttagatacyctattgtagcaactctggattcttattcttccctgcttgttgctactgcttgattttgttgtttttattcattttttaaataactcacctgaattaaatatatgagacttgcctctactagtatttggcttctgatatttctgctaggttcttaaattattattcctgtttttatttttaagcctgactttctcagagttgcccctatctccacagctgagcgtgtatccaatgactaggctcaaacaccctaacccagcaaggcttctgtcctccaccgatggatctgtatgtggctggagaatgca

SEQ ID NO: 46887 - DNA, 557 bp, Homo sapiens
tggagagatatggatttatttttttcttgttatccgtgatgtaactatttgcatagctctcattatcttgatctctctgcctctcgtgggcatatacatcaaaagaaacatttattgttaagctcataaatggtaggtcatgttccctagctgcctttcacwccttcatagctggtagtacataatgacaaatctaattactacttttgctattgatggccatgtgtgctcctctgtagataggcatcatacaggcaggccccttaataactttgccacaggacagatgaacgtcaacaacttctcagtatgattaagtagaggcttttcttctgctcctttgtctttttttcactgcagcttagcaataaaaagaaaactggtagtgttgaaagacaatagtagccaaatccacaggagctgcttaaatgaaatatcaagcactacctcttcagtataagtggtttccacatagccatccattgtgaacccctagtaggctgaagcaaagtgtctaatgaattagtatgcttactcctacatctaaaatcagtcat

SEQ ID NO: 46888 - DNA, 1821 bp, Homo sapiens
gatctttacccaacttaaccaagtctccaaattgaaagaatcgccttcaatcagatttcaaactctcaatagatatcctgattttgctctttcctctctgagacactaccatggctctgtggaggcagtgttctcccctttacgccactaagccgtaaactcacttagtctgatcaacaggctgctttggtattattttggggagccagcatttgatagtacttcacttccatacaatatgacacatattaaaaagaagggattctacaccagttaacataaagaaattccaggatgtcatgttaagtgagaaaagccgaatgcagaggaaagttttctgtttttgtatttctattttgtattttgttttctatttttgatttaaacaaacagcatcttagatgaatatatatgcatgtgtatgatgacatgrcccatgagatagctttggatagaatcatgccagttaataaacattgattatctgggggaaatgatgtatattggagggtaggaaggtgggagtaataaaaaaaaaaaaaagaaaaaaaaacagggaagcagaaaaaatcacatatccaaagaaaaagaagtgtccataatccagcagcatttgtattacgcacccatttctatgcttagagatagcttcaaactgttactcgaaataatgtcaagtttctttgaattttcctgaattaacaaacacacagcaaaaactattattttattaccctctctgttacttctatctctaattttacaggtctaatctcattaattataataattctagtgtagtgaatagtaaattttggaataataagatctctttaataaggatttttttctacaaacagcaataacttttgctttatcatttgttttacaaatctcattaaaactttactggttgatcaatatttgagaatttttaaagatataaatcttctactgtgtttttttaaaaaagaaaactgttctaatgcccatgttttcacttttacaaaactagcttaattccatacaaactgcaaagaccttggcactgcctttgtctccagtgaaaaatgagctccatttgatggctgaccttccaaacaactgtagcttccacagaaatatataggatctatcggcccacagctgttaccttataagaatcattacttgagtgctcaagggaaaactagttccacgggtaaggctgcgttgatggaacactcaaaaatacaataaaataaaatggatgcatataaaccgtgagtgagagctttgattagaagcaaagatgagtatttttgctaccgaagataggcagagtggtgtcagtgttggagaaaattggctgttaacattcgcaattatgggagacacttaaatggatgcttttcacggcccttcctcaaaatggagatgagtgaaaatttcgcaaataatgcagcttataaaatagaagtgtagctgagagtatattaggttgcttggagaggtgaattagcatcttttgtctatgtgtggtgttttgtggaatgttcatgaaggcagtgagaaaagatggttgaatttcctgaccaattcctttttatgctgttgacttgtggtttggcagaagcgacagattccttcatcttttaacgttaaccaagtagctctttgctacccaaacgaccagaaacagatgctcccctccttatttcctttaaaggtgggacattacctactttgatagacgatggaaatggtttcatttataaccctccaatgtttaaattcctcatgctccagtcacgttacggcggtcaccttgggaagtttggg

SEQ ID NO: 46889 - DNA, 1821 bp, Homo sapiens
gatctttacccaacttaaccaagtctccaaattgaaagaatcgccttcaatcagatttcaaactctcaatagatatcctgattttgctctttcctctctgagacactaccatggctctgtggaggcagtgttctcccctttacgccactaagccgtaaactcacttagtctgatcaacaggctgctttggtattattttggggagccagcatttgatagtacttcacttccatacaatatgacacatattaaaaagaagggattctacaccagttaacataaagaaattccaggatgtcatgttaagtgagaaaagccgaatgcagaggaaagttttctgtttttgtatttctattttgtattttgttttctatttttgatttaaacaaacagcatcttagatgaatatatatgcatgtgtatgatgacatgacccatgagatagctttggatagaatcatgccagttaataaacattgattatctgggggaaatgatgtatattggagggtaggaaggtgggagtaataaaaaaaaaaaaaagaaaaaaaaacagggaagcagaaaaaatcacatatccaaagaaaaagaagtgtccataatccagcagcatttgtattacgcacccatttctatgcttagagatagcttcaaactgttamtcgaaataatgtcaagtttctttgaattttcctgaattaacaaacacacagcaaaaactattattttattaccctctctgttacttctatctctaattttacaggtctaatctcattaattataataattctagtgtagtgaatagtaaattttggaataataagatctctttaataaggatttttttctacaaacagcaataacttttgctttatcatttgttttacaaatctcattaaaactttactggttgatcaatatttgagaatttttaaagatataaatcttctactgtgtttttttaaaaaagaaaactgttctaatgcccatgttttcacttttacaaaactagcttaattccatacaaactgcaaagaccttggcactgcctttgtctccagtgaaaaatgagctccatttgatggctgaccttccaaacaactgtagcttccacagaaatatataggatctatcggcccacagctgttaccttataagaatcattacttgagtgctcaagggaaaactagttccacgggtaaggctgcgttgatggaacactcaaaaatacaataaaataaaatggatgcatataaaccgtgagtgagagctttgattagaagcaaagatgagtatttttgctaccgaagataggcagagtggtgtcagtgttggagaaaattggctgttaacattcgcaattatgggagacacttaaatggatgcttttcacggcccttcctcaaaatggagatgagtgaaaatttcgcaaataatgcagcttataaaatagaagtgtagctgagagtatattaggttgcttggagaggtgaattagcatcttttgtctatgtgtggtgttttgtggaatgttcatgaaggcagtgagaaaagatggttgaatttcctgaccaattcctttttatgctgttgacttgtggtttggcagaagcgacagattccttcatcttttaacgttaaccaagtagctctttgctacccaaacgaccagaaacagatgctcccctccttatttcctttaaaggtgggacattacctactttgatagacgatggaaatggtttcatttataaccctccaatgtttaaattcctcatgctccagtcacgttacggcggtcaccttgggaagtttggg

SEQ ID NO: 46890 - DNA, 615 bp, Homo sapiens
agataactgagagagtaagataatggatggtgaaggttcaggatcagagagagagagagagagagaacaagagagagagacagagagagagacacagagagagagagacagagatcttgaataaaagactgataagctcctaggaatttcaggctaaacagtagaagaggaggatgatataagatgagttcctgtgtactaagtatctcacccctcaaattttgagacagactcaaataaagatcagaattcttgactggaccacatatatcaaaatgcaacatgtatgtaaatgtttatggatgtttccattaggktctgagagcattgagcgttgggatataataacaatagcacaattctagtcccagtcttcctgctgtagacctggctctgacattgatagatcttgggcaagttactcacttctctgaccttcagtttattcatttgtaaaatgaccagtctcagctagatgataagtgcagaattgcagtcccttactgctctaaaatccatattacattgatagtagaatacctttgtgatgctgatatgaggagctggatttactaataggaagtgctctggccagattttattatttgaagtaat

SEQ ID NO: 46891 - DNA, 452 bp, Homo sapiens
gaaacaaatatatactatgtggaaaggtttaggtacttcaaaagaaattaagtagaactgagaagagagaaggaactctggattagagtaaatccgtgaagctgctggtgggattgcagtggagaactatttgggagaagaagggaatgtgtatcttatctggaagttcttttagttctctggattgtatttgggacatatatagctctgttcatagaaaaaaaagatgaatgagaaaggggtaggttactgattgggaaagaaatgcaatgttaaccaaaaaaaaaaaccagagtctctcagtttctgttttgcttctttctcccctatcaatgagcatgattttgaaaatgsggaagaatagaatgatgattaagagtaaatgaaatcccagaataggcaatactccacaaaggggacattaacttaggtatctgggtctaggattaacc

SEQ ID NO: 46892 - DNA, 550 bp, Homo sapiens
tgggccctttatctcagaaattagtcttaggaattttgttattgtgtatgtgaatatgtgtgtttaaagttaaagctccaaacatttatgatctcataagttctgagggtcaggaatctgggggcagcttagctgggtggttttggcccagggtctttcatgaggttgcagtcaaagtgtcagtcggtgcttcattgtctgaaagcttgacaggggctctagggtccgctctaagacagtgcatctttggctcaagctggctcattcatatggctattggctggaggcctcagcttcttccatcttgccatcaacctatctgtgtggttgcttgagtgtcttcatggcaaggcaactagcttccctcaaagtgaacaacctaagagagaagggaggactgcaattaacatggctttttaaattgcatttttgagatttacagcatcttggtatcactaagttgcttcatggcttcatgcccctggcagccaatatagtattgggggtgatrtggactttccaagggttactcacttgctttcaaaggaag

SEQ ID NO: 46893 - DNA, 598 bp, Homo sapiens
ggatgcctcgcagaaggctgtgccctaagcagagaaaggaaatctttcttctaaattgcaccaattgttttcaatcttcttttacttttaccttcccacacactaagtctatcagttctgccagtctgatgtctaaaaatagttgctatagggatatttgcgtttgataaaatgccacggggtccttgaggctaattggcaggttgaattatttcatgatcaatcctttagatatttgttctcaattaaattgaccatcttaaagtttttttaagggagcatgagcaaatgtcaagttcaaagtgccgtataaaagcaagaarcagatctgaggtgaagaatctgtagggttagtgtggtcagagggacacattcatcacctgcctgtggctatgtctacagacaaagagaggagaatagcaaggttgcttgggcagaaatgagagcactgagggagctggggttaacccaggttcacagagagcccacggtcagtagtggagttggcgtggaacccagccccacgggcttaacacggttatgttatttctgtctccactaaactccaggaacttactagaagaacacaagacatgca

SEQ ID NO: 46894 - DNA, 598 bp, Homo sapiens
ggatgcctcgcagaaggctgtgccctaagcagagaaaggaaatctttcttctaaattgcaccaattgttttcaatcttcttttacttttaccttcccacacactaagtctatcagttctgccagtctgatgtctaaaaatagttgctatagggatatttgcgtttgataaaatgccacggggtccttgaggctaattggcaggttgaattatttcatgatcaatcctttagatatttgttctcaattaaattgaccatcttaaagtttttttaagggagcatgagcaaatgtcaagttcaaagtgccgtataaaagcaagaagcagatctgaggtgaagaatctgtagggttagtgtggtcagagggacacattcatyacctgcctgtggctatgtctacagacaaagagaggagaatagcaaggttgcttgggcagaaatgagagcactgagggagctggggttaacccaggttcacagagagcccacggtcagtagtggagttggcgtggaacccagccccacgggcttaacacggttatgttatttctgtctccactaaactccaggaacttactagaagaacacaagacatgca

SEQ ID NO: 46895 - DNA, 1621 bp, Homo sapiens
aaatatctccctaccatcttgatgaaaagttttgaagttttaaattaattcacattaaaaattgataaataaaacacttgacatttattcattcatctattcattcgacaaatgtttattgagtacctgtcctgtgccaggttatcttttaggcactagggatacaccagagtaccaaacagaccaagagtttcttttgtgtgtgtgtgacagtatatacagtggtacaaacatggctccatgcagccttgatctcctgggctcaagcaatcctcccacatcaacccccctaagtagctaaggctacaggaacgtggcaycacccccagctaacttctgtatttttagtagaaacagactttcaccatgttacccagcctggtctctaactcctgacctcaagagatccgcctgacttggcctcccaaagtgctgggattacaggcctgagccaccacactcagcccagaccaagagttttaccttcatgaagctaatagtctactgataaagataagaagagcatgttttaatatataataaatgatgtcattattttacatcatttattcaacaattagtattatgcattcattcttacatttaactaaacatgtcaatgttacttacagatcaataaaatttaaaaactagggtattttattttaatttaatatgtagctattttctcagctatgcaatgctgataaaatatatatgaaaagtgtgacatgtctcatgtttattcaaatgtaagaatacatagattcatatacgccgcacaaaacataaaaaatgcaggtattttccaatctagaaatagttaatttgctaacaacttgtacatactaatgatcactacagctcccattttctccaaccttaatgcctcctaattcccaactctggtttgcacttgccctttggttcttctctgctgtcggactgttcaccaaccatccatttattcattgcacaaggacgtactaggaaccactggagtgagaccctctagaactccttcacccttgtctcttaggactagggcctcttggaagttgaaagagacccaagactcttctactaattgggaactctcaaaatactattataaaaaataaagaaatgccagttaacagcgttattaaaatttactttaaggacttacatttcacatagtaattcttttaacagacacaattgcaatgacaaaggcaatgactttatatctgcccatatttgaaagaaatgtcaaaaattcaaatttataaagccctctgtgaaatatgaggccctattcaaatggccctcctggtcttgtctgtcaccctttccttcttggctgctggcaccttcctatctcattgtcaacgagaagccaccacactatctccacatctgagtatctctatcccattctccaccagttagagctcttaaaacctccagggaagctagcctcagaaggacagaggaccctatatttgggcttaggaatcctaaatgccctagggcttagagctgccattactggtatttcacacttatttcaggtttttttttttttttaaaaaaaaggaagaaaatttttgtggcttgcccatgaattgcataacattgt

SEQ ID NO: 46896 - DNA, 564 bp, Homo sapiens
tgttgccataatatgtctatactttttgtggattattattttctagtcttatttgcaaatctactggaaatctattctcaggcaatgacagaagagaccatgatctccttcttttattggaaggtggaaagttgccacaagtttcaacagccactgaccaaagaacttccatattttggattcttatcaatatgtatgatgactgtttgatgagataatatatcatgagctgtaaacaactagaagataagctctcagagggcagaacagmgtttgttttgtactgctttattctgcatgctaacatcatgctctgcctacgataagcactgattaaatttgattgaatgagagcatggtgggtcagaggtgtgactgttagcagtgccgtgtttaggtacaggagaaaggcttctagaggacttaggcactgagaagaacaggcctgacctggcctcagttcttgtgaaaaggatgtggtggttttatttggccttaagtttcatgtgtgcttgctctgaaatgtggatacaaaaaaggtcaagggtaatcgtattacatatt

SEQ ID NO: 46897 - DNA, 488 bp, Homo sapiens
ttcccatttgatacacctttcaacttgcaagctgctgaaggaagaaatagggacatttcgtttcagtgacaaactaaggcaaaagcagcttctaatatgatggatagcaaaataaaaacagatatctctgttgtgatcgtgtgctgaaggcttaatgaactcacccctagtctagctataggctcacatataggcargcagacaggcctggagtcacctggagactgagcccacctggggattagagcaaagtgcaggtgcctttgcttcatctgtttccctgaatggtccttacctgttgtcatccctcacagtttcatttgaatttatatcgagacaacctgaagattccatggatcgattacagatgttaacctctaagtattctgaattccagtctctttgtcatcactttttccacttcagatagattttgctaaaagcatactaacacatagaactaagggcattctccaaatcactttaaa

SEQ ID NO: 46898 - DNA, 600 bp, Homo sapiens
gagagttttgttaagttttgttgaattgtgcactcgaatatttttgacattttatactcctagcaagtgtgactgcccttttcttcatgtccaacactagatttcacatatatgtgcatattgttatacttttgataatttggcaagttgtttatattcatggatctttgcctaatactcagcttgaacatttttatatatgctttttagctattaaaatttgttaaattgattttaaattgattttttttactttaagtttattcttttattttatttttattcttaaacttttaagttccagggtacatgtgcaggatgcacaggtttgttgcataggtgaaaacrtatgtcatggctgtttgctgcacaaacatgtcaaacatgacaaacatgatatatgatcaacccatcacctaggtattaagtccagcatgccttttctgttctttctgatgctccccgatccctgacaggccccagtgtgttttgttccctctactactgtgttcatgtgttctcatagttcagctcccccttataagtgagaacatgcagtgtttgattttctgttcctgcattagtttgctgagggtaatg

SEQ ID NO: 46899 - DNA, 521 bp, Homo sapiens
gtgcttctcttttttacttctgcctttgtttttaaaaaatttcattttaaaacacgaaaagccttgctctctcaaaaattgytttagagtacaatatattctcttaggcactgctaaggctatgataaatccaagttgtttattagtattgttatagtttatgtaataagtgagagttgttacatccatggcatatttttggaacctgtcatactctgtgacttggagggagacccctagctctaactactcaaaatgagtggaattagaaccacagagcagggctgccaatggactgagccagtggggtctgtgcccctgtgacctcacacttgctctgattggtgactcttcctattgtagctgcttcttcatatccttctatttatcctcataaactcatggcacaccttgcgcccaggtgtcctctattataaataacctggatcatgcaggtttttcctcccattgggcattcatgtgcttctactcgcatttccccaaatcaacctcctgggttc

SEQ ID NO: 46900 - DNA, 1784 bp, Homo sapiens
tgcatcccccaaacaaataaaaatatttgcagtttatccattcattggataaaaaattgagagtttgtcacgcagaatattatgtgctgacactttggaagatgacaatgtgacttcacatttctaagggttttttttttttttccttgcttaatttaaagcaaccaaagtggtgttgggagtcatcagtggttcaataaaacttgaatgatttgggtgatggtaactgacacataccattgttctccatcctattaactaataagtcagtctttctcttagtgtaactcttgcagttaataaggtggctcatttacttgtcaccagaacaatgtaagtgaaaagactagatttagagagcaaagctgcagcaagtgcagactcaggagcataacccacaccatccccaccccatcatagagcagagagcagatcaaagctgccccctgggggcattccctctgatttgtaggtttaccttgcaatcaatgcagacagattttttttcttttatttcagaaacctcttacatactcattccagcaccaggctagcagacatttaggaccagggcaaagtttctctgtcaatacacccttcttttctatgcctatgccattccccaagtcctccttaaacaatagaaaatagtgagtaaatctagaaccatatctatgcaagtcccaaaatatagtttgtctaattttgcagtcactttatgtagcaattatctgtaccttcacataattgattgcatcagctatttgaaggttgttggtgagaaagggattgctcaattaagaggtggtcatccaatccaattagcttaatcatttgaccttaaccagtatgattcagttatttgaatcacgagcagacagattgaattgagcattttaaaattgatttttttctctgtgattaactttaatgatgacataaataacaaatgtgatgcaaaaatggataaactggtaactttccgaagaactcttgttttttcaggataaccaaagattactgagtaataaatctaattgaaaaatttattaagcatttccaagttcaagattctgtattaaacaccgaagaaacacaagatgactcacacctagttcctcacttgaaatgtttgatcttaagcagaagacaagtacataaacaggtattcacattgcaaagaacaatacaacctgctaaataaagttgtaataataagtaatgagagcaattaattctgagagagagaaggcagaaaaggcttggggctgggacttggagggagagaaaaataattaaaggtagaaaaatgaaatgccttcagggccagccaggcgatataaatatgagaaattcaagagagttagagcctgaggaaaattataccatccatgtccatcaaaaggatctgaaagtcaattttaaaatctatttcttggcaagcaaaattataatkgtgggtcttattggacctacttttgtcatatgaacttcatttagttagaaatagaatgatcaagaaagcattgtatgatgaagaagcagaatgcactaagtgccaggtactgtctactccctaactgtcatcctttttctcccagcccgcttttattctttatcctgtaacctctgggatttagaccaaacaattgagtcccacacactaggactcaacattcaaacttctttcctattggttttggccttgctcccttaggaatgataacagaactttaccctgaactcatgacccctcaaagcatcacaggctttagaacagagtt

SEQ ID NO: 46901 - DNA, 1414 bp, Homo sapiens
ttctggaatttcatctactaagctaagatgaacataaataatcaagatataaacagttatctctgaaaacatagactaaacacattcctcagggagtaattaagcatgtgggagttatttatatcctactgctgaaggtcatcgccaaggtctgattgtaaaaattcaaaaaattgcaacctcaggcgtaaacgggttacccatggcaccggtaaccacaagtgtgctaaataaatgctaaaactcttagtcttcaacagccttggtgataaccatattctcagatatgggcaagagagggtggtaggaaaaggctgttcttcccagttgctaatatttataaatcccatgacaacaagagttccaatttataataaaggaataagaagaaactggaataaaggcaaaaatcctaccattaaaaatgatgaattggccgcgcatggtggttcacacctgtaatcccagcactttgggaggccgaggtgggtggatcacttgagatcaggagttcgagaccagcccgaccaacatggtgaaaccccgtctctactaaacatacaaaaattagcttggcgtggtggcaggtgcctgtactcccagctactcaggaggctgaggcaggagcatcacttgaacccgggaggtggaggttgcagtgacccaagatcgcgccactgcaccccagcctaggcaaaaaagttagactccatcccaaaaaccaaaaataatgatgaaccataaccaaaggctgtacatttctcttggatgctctgtgctgccacatacgtccccaacaaattgagacacatctgccaactcatctctttttaagaagccattcagggctaggcgcaggggctcatgccttataatcccagcactttaagaggctgatgcggacggatcacctgaggtcaagagtttgggaccagcctggccaacatggtcaaacccctgtctctacaaaaattagctaggcatcatggcgggcgcctgtaatcccaactactcgggargctgaggggggagaatttcttgaaactgggagatggaggttgcagtgacccgagattgcatcactgcattccagcctgggcaacagagtgtgacttcatctcaaagaaacaaacaaacaaaaaaaaaagaagacaaagaagaagcagccgccaatcagggctttgaaaaagatgcagaccttctatcactgattcccagtgatagctatgcatcagaatcccctgagttctttagaaatatattgcactagatgtcctccccccaaccccatctccccattccttatctttatttagccccttgccctctgattctaattctgcaggtctggggtaagatccaggaatctgtatgcatttatgttgtatttgtttgtctttaccagctttctcag

SEQ ID NO: 46902 - DNA, 600 bp, Homo sapiens
tgtcagtctcaatgagcttatctgtttaattttgcttgtatattaaaagtatttgcatcacatgcagagataactttattctctccttgcctctttcgtcctcaaatttaaggtattttaaggatggtgcagttaagaaaccttattctgcaaagacactgtccaacaagaagtcttctgcatcctttgggatccggagggagttacctagtaccagtcatctagtgcagtatcgtggcacacatacttgtacccgacagggccggttaagagaactgcgcatcaggtgagcttatgagtggccaccagtctatgggtactttgcttttgttctcctttcttggttaaaatgggggaatgattcttattcttccaccgcaattagtgggagatcttgatgcctgttcttggtagtagaatgttcagatgaaaaggatattcaggaacctgcagacataaaatctgtcattgagtgttttcatttctccacttgtgcctcacaatatgacrctatcaagattcttccagaaaaagtctaaacgtggtccaagaaagaaggaactactcttttttgctattctttttttccccccagatttt

SEQ ID NO: 46903 - DNA, 536 bp, Homo sapiens
acttacaactacatatttttctatatatctttgaccagttttaataaaatacgaagttatcatttttgttattttatgaatagtatataattgatcattgattacctctttgacccatgatatgtctttagtaattgagattaaataaataaatcactaatggatgacatacaattttttatttcagaaatgttaagtgaatctgaaatcagcaacctgtttttaagtgttcaggatctatgccaatcagcaattgttgtgcaatagactctctcaaaacacagaatgagaacagtcacttcaagcatctttgagtcaggtgagtaccagctgatcttggctgaaatcagtgggcagtgggcagccttgctgtctgcttcaagttctgatggctgggatggttctgcttccatgtatttgtygtcattctctatggcctgccaatgtgaatattgttctattaggtgtgctgcttttacctgaatagaaaaccgaccaaaattttacctactgtagaagaaaatgctgaatgatca

SEQ ID NO: 46904 - DNA, 568 bp, Homo sapiens
tcagccaggaggtagctgagatttgtagctgacactagatgtcaaataatccctttgcttggatgttcttaaatttcactaaaatgtgttagtctgggamtgtgtctctgttttgttactatctgtaactattgttcccttaacatggttatttatcctgttattcatcactacatgccctgcattactccatgtggaataatttttctcatgggaaaatgaagttttgtgcaaaatattatcagcctctatctgaatttgtgaaatgtgtatatatatatatatgtgtgtgtgtgtgtgtgtatgtgatatatatatgtgatatatatatacagacctatatatatatatttcagaaaaatatattcaaatatttttaaaatgttgaatcttattaaaagactaatagtgaagacagaaatatactcttcctgacaccacaatccaattactttgaaacaaagactttcatttgtttgtgactttttcggatattttcctgcatacatgattaacatgcttatactaatatttcttgagtaatcaatgttagatttaatgtactgac

SEQ ID NO: 46905 - DNA, 542 bp, Homo sapiens
ggccttcattttgatataattgcattttcatatatatacacacatacatgtttttgagatggagttttgctcttgttgcccaggctggagtgcaatggtgcaacctcagctcactgcaacctctgcctcccgggttcaagcaattctcccacctctggagtagctgggattacaggtgcccgccaccagacacagctgattttttgtatttttagtagaattgttgtttcaacatgtttgccaggctggtctcgaacttctgacctcagatggtycacctgcttcggcctcccaaagtgctgggattacaggcacgagccactgtgcccagccgcattttcatattttaaaagaaaattttaatagcacaaagttaaacctttgtaacttaaatttgaagtcggaatttaggtgggtcagcttgatctttccagttaagtcaaaaactactgataaaaatgtgagaatgagatgtattccctcaaagatgatgatgcacatgcccaagtttaatactgcagtagtggggagtggagaaatta

SEQ ID NO: 46906 - DNA, 657 bp, Homo sapiens
catgagaataacaaaaggaaatcttttatgctcaactgatttttttaatttttaatttttatgggtacataggtgtatatatttatggggtatattaaatgttctgatatacgtatgcagtgtgtaatagtcacatcatagaaaatggggtacccatcccctgaaggatttatcgtttgtgttataaaaaatccaattactatttagttatttttaaatatacaattatcactgacaataatcaccctgttgtgctatcaaatactatgtcttattcattctttctaatttctttgtacccattaaccacmcccatcttccccccaccccgcccctcactacatttcccaggctctggtaaccatcattctactctctatctccatgagttcaattattttgatttttagatcccacaaataaatgagaactgtaatgtttatctttctgtgcctggcttatttcacttaacataatgacctctagttctatccatgtttttgcaaatgacagtatcttattcttcttcgtggctgaatagtactccactgtgtatgggtaccacattttctttatccattcatctgttgatggacacttgggttgctttcgaatcttggctattgtgaacagtgctgcaacaaacatgggagtgca

SEQ ID NO: 46907 - DNA, 657 bp, Homo sapiens
catgagaataacaaaaggaaatcttttatgctcaactgatttttttaatttttaatttttatgggtacataggtgtatatatttatggggtatattaaatgttctgatatacgtatgcagtgtgtaatagtcacatcatagaaaatggggtacccatcccctgaaggatttatcgtttgtgttataaaaaatccaattactatttagttatttttaaatatacaattatcactgacaataatcaccctgttgtgctatcaaatactatgtcttattcattctttctaatttctttgtacccattaaccacacccatcttccccccaccccgcccctcactacatttcccaggctctggtaaccatcattctaytctctatctccatgagttcaattattttgatttttagatcccacaaataaatgagaactgtaatgtttatctttctgtgcctggcttatttcacttaacataatgacctctagttctatccatgtttttgcaaatgacagtatcttattcttcttcgtggctgaatagtactccactgtgtatgggtaccacattttctttatccattcatctgttgatggacacttgggttgctttcgaatcttggctattgtgaacagtgctgcaacaaacatgggagtgca

SEQ ID NO: 46908 - DNA, 606 bp, Homo sapiens
tggcaattattacataagatatacttacatcaaaacaccatgttttacactttaattttcttttctttttttttttttttttttttgagacggagtctcactctgttgcccaggctggagtgcactggcacaagctcagctcactgtaacctctgcctccygggttcaagcgattctccagcctgggcctcctgagtagctgggattacaggtgtgcaccaccatgcccagctaatttttgtatttttagtaaagatggggtttcaccatgttgaccaggctggtctcgaactcctgaccttgtgatctgcccgcctcggcctcccaaagtgctaggattacaggcgtgagccaccccatctggccaattttctatttttcaatcatatcttaataagcctgggggggaaaggatagtatttagaaagtggcttctatgggctgtttaccactgtctccttctatggaaccaagaatataattgtataatagaagtttaaatgctttggctttgggtgaattggccaaaggtaatgcttgtgaccacaggttagagtgtttcctctaaaccacgagaactgacctgaaaggaaacagacagggaat

SEQ ID NO: 46909 - DNA, 448 bp, Homo sapiens
tgaggcagagaatcgcttgaacccaggaggcgaaggttgcagtgagccargatcacaagatcacgtcactgcactccagtgactctatcccaaaaaaacaaagcaagttctagagacctaatgtacagcacagtaactgtagttaataataatgcattatatgcccgtaatttgctaagagaggaggtcttaagtattctcactgcacgagcacgcacgcacacacacacccccaaaaaggtaactatctgaggtgatgaatatgttaattagcttgtgataatcatttcacaatgtatacatgtatcaaaaatcatgttgtacaacttgaattatataattttttataaattatacctcaataaagttaaaaaaacaaggttcaagttataaaacatagatatgtataaggatgtgaatatgtatataagcaatcaatataggaaaa

SEQ ID NO: 46910 - DNA, 448 bp, Homo sapiens
tgaggcagagaatcgcttgaacccaggaggcgaaggttgcagtgagccaagatcacaagatcacgtcactgcactccagtgactctatcccaaaaaaacaaagcaagttctagagacctaatgtacagcacagtaactgtagttaataataatgcattatatgcccgtaatttgctaagagaggaggtcttaagtattctcactgcacgagcacgcacgcacacacacacccccmaaaaggtaactatctgaggtgatgaatatgttaattagcttgtgataatcatttcacaatgtatacatgtatcaaaaatcatgttgtacaacttgaattatataattttttataaattatacctcaataaagttaaaaaaacaaggttcaagttataaaacatagatatgtataaggatgtgaatatgtatataagcaatcaatataggaaaa

SEQ ID NO: 46911 - DNA, 560 bp, Homo sapiens
taaaagtgtattttaataaaatcctcaggtaatttttatgcacattgaaatttgcaaagcactgatcggagatacagcatagagtttcaatttaccctcagaaccttgacttcatctaaggattctattgctctcatctccccgaggggctaattactgagggagaggtatggggaagtagggtctggtgatcttttctaagagagtttygtcaatgtcttaacaatcttgtttcccatctccactatatcccttttcttctcttagtccagataaaggtttaagttattttcttctgagagaggaaaatgctccagcaagtatttgatttaatctttctatcacataggtgggcattttaaactgaaaagccaagaatgtgttatatttattttctgattgtgctgtaattccctctccttcccttcttcctcacatctctgcttgggccattggaacaattcagtttagttgcctggataggggaggttcagggtcaaggtaatataggagaaagcaattaatacttgtccatatcatctcatggggataaggatttt

SEQ ID NO: 46912 - DNA, 547 bp, Homo sapiens
cagtgcctgcaacaggctgggggcccagcccaacactagctcctcactgagcaccccctccatgtctttcttaaccagggtgtagaggcaagcactgaaggcccatgatcagccgtgggagccacgggaatcaattgcttccagtacgactggatgcatcggaaagagcctggggcaaggctggaggccacaagaggagctgccaggccacataagcagggaacaaagccgatgatcacacgcccatcagtgagccaacttggtgaagggaaatgcccaagttctcagcacctgcagagcctaagacataacaagcagcatgccctgacgctcaccaaggccaggtgctgtggtaagtatttcccatacattgccttgcttgttaaaatttcactrtattcctacatgggactaactatggcttagaaaggcaaccactgtggtagagagtgacagagacttgccaactctgctgtcccacagccttttcccaggagtggagcctcggacaacaggcttactccacccagcctccttttctgcccct

SEQ ID NO: 46913 - DNA, 2044 bp, Homo sapiens
ggtgcgtgcctgtagtcccagctactcaggaagctgaggcaggagaatcgctggaacccggaaggcagagattgcagtgaactgagatcacaccactgcactccagcctaggtgacagagcgagactctgtctcaaaaaataataataataacaacaaaacacacccctgagtggagattttaaatgctaatgagacaggcaatgtgtttactagcgcgtacaaacacacaacattcacagccagggggaccacctaaaacatgattgtaagtgacgctccctcatgcccctgcacgaataatcatgtaagattctcataaagagggtcccccagcaccagctgctgctggctcgttctttcagagtgtactgtctctttaaataaacactgctactgctgttttttgccygatgctgttttccagccaggtcagcccactcctttctaggaacgtactttatctttcttcaataaactctgctacttcacctttgctgtgtgtctcttggctgaaatctttcttccaagcagacaagaactgaagattcccgcacttccctgtaatgtgaccataggaaatattggcataagcctgaaacaacaggaattttcctgtgtctaacagcagtatatgttggcttaatggcattggggcatgatttggccaatctagtggagttgaagaagcacagaacctgtataaccctccagttctacttgtgggtgtgtgcacttgtgcatgcatcaggagacacagtgaaactgtctctgtttgggatagcgagaaactggaacaactaaggtctccatccatcaacagaaatcacaaatgtaatatgttaatacaatggaatactatacagttctgaagatgaatgaattagagttacaggtaaccaacctggatataactcaaatgttgagtcagaaagcaaggttgagaatgatctgtgtagcaaagtgccattaatcagtgccatttagatagaatttagaaatgtgcttgactaggcctggcattccccactttctcaggccaatgacatgtagctgctctctgggcggtgtgtcttgtggagaggacggactattcttgacctggctggcacctcctctcactgcaccccgataccgccaccccaatactgcatgcagcagggctgccatccttgggttgtcaggttataggaagcccctgtcaaatggtgtttgctccttttcttcctccagctctaggtctaacctgcagggggaaatggagggtcctcgagcccgaggagagtggcgtgaatagacctatctctcacagggagcagtcacaaagtctgggactttggcagccttgatgggggttccttggggcaggaagagcatgggacaagaaccatgggaagggaaggaaagagctaaagaagagctgcaggaaggagaaaacagaaggggagggagagaaacggatgccctgattcagggatcttggagtgtagtcactgacatcaaggcatcagatctgaaggcccaggcaggacatgtaatagtggcctgttggcccttagtgggggctgtggcatgccccctgctctgtctttggtgggtcatctcacctgtgcaatgcctggggccccaaagcagcagaagggctgggctgaggagttctgtctcccatccattccccaccctttctatctgtggtcagcaggtttcccagagtccccacgaagggccttaaattgttcatcttttgttatatttgtcttctttagtggacttgcctccaccttgctcccctgccatgtccctataagtccctggatccaagcagggccaactttctataggattttacaactgagtctgtggtgagtagggtcatctgacttctgaagttgcccgataaggggcccaggcactgtaggctgccatgctccttgtcatggggaggatagtgactacagtttatagttagaattgcataacaatagcctaatgaaataatgtaactataataattatttagggcttcttatgtgccaggtgctgca

SEQ ID NO: 46914 - DNA, 601 bp, Homo sapiens
acttcattctttcccattttaagttgagtaatttcctctccatttccccgatggaatttccagcgatgatttatcatcttggggttgagttttatgtggcattcatctctgttaatgttttcatctgttttgtttctcccctacaatgtactagctcatttttctcctctcattttataacttccatggataattcttctttgaattgtgactcttttctctgagtctgagtttttgtcattctgcctctggttctttggcgattcctcttgggaggcaggttcctcctttcttcgctcttgtgctcatcctctttatcagagaggcatttcctgtgtgtgggggggcgcccgttttgctcttgctggtctttacraatctcaagggggtggccatttgttggggggcaggggaactgagctgggtaatccttaactccaacgtgggatcatcatcccgaaaccttcagagaaaatacataatttcctttgccctgggcgtggggggttctatcttcctcacttttcagggtcaagaagttgttgctacttttggcaaagcttgttaagtctccaggtctctgtgaaccaaggcccagggt

SEQ ID NO: 46915 - DNA, 531 bp, Homo sapiens
cactccagcctgggtgagagggagacccccaacagaaaaaaaaaaaaaaaaaaaggtcaacaggactatcaaaatttttccacataattttcatggataaaacaaaaaggtaaacttcaaaaagaaagctttaaacataattaagatgaaccggaaaaaggaaaaaacaatacataggatatataagaaagattaaagcgaacatgaaatagtgtattagtgattttaagttaggtttctagagttaaaactatttacctagcagagcagaaattgttcattcatttttaatcattagtatacagccactctcctttcgttaatcttagagcttcaaataaaagasgtcatgtatctcttggaagatgaaatgggtgagagagctcagaatggcttatgaaaatacgtaccttgacaaaaacaatcttagcctttgtgttcatcttgcttttttgtttttggagacagggtctcactcttgtcactctgtctgtgtcacttctggctgaagtgcaagtgcagtggcgggat

SEQ ID NO: 46916 - DNA, 587 bp, Homo sapiens
tcccagtaggagttattataaacattgttaaactaaacatatatccaaaagaaaaaaagtaattgccaactaaaacactttcgattatcatttaaaactcattcttttggaatataatgagaaaagctaaatctgttcctaactttaaatactcaaccacctgtgtctgagtgtcactcttatttactcacratgtagttattttgtggaggaagttaggaggtacaagataaataagacaaaggctaagtatcttttttttgagccgaggtcttgctcttttgcccaggctggagtgcagtggcacgatcatggctcactatagtctcaaattcctggctcaagcaaatctctcacttcagcctccccagcagctgggattacaggcatgtgccatcatgcccagctaaattttaaatttttttgtagagactgggtcttgctctgttacccaggctggtctcaaattcttggcctcaagcaatcctcctgtctcaggttcccaaaacagctgagattacaggcatgagccactgcacctggccaagactaattattattattattattattgttacttttttttt

SEQ ID NO: 46917 - DNA, 614 bp, Homo sapiens
gtttgctaaatatttgaaggtatttgtcattggattatacatttatataaaatgataatgagttctacacataaaataaactttatattctataacagtcctaatattcctcctgtggactcattcttccagttgccaactttcacttacttctggcttaaattcctgattttggataattcagccttttttgtttttccagcctctctttaccctccctggagatggcgcatcagggcaggaggtttgtgaagttccacagaaccaataaagatgttcactgtcctcagatcatcaatggctgttgccactggtgacgtgtctcttctgttccctggactggtgactgctgacgcatgactggtcctgcctttccttctgacttgctttccaggtatccacagataatatctcagggtccaccmttctgcctctgctctaagtctgcacactgtggcttcttcattacatactcaggccattgccacacatctgtgagtccacccctcccttctgaggcacagaaggatttctgaaatctcgaaatgcctccttgaagagtgtgagaaaacagatcttcttcagaagtaccctgtgcaaatgctattttccca

SEQ ID NO: 46918 - DNA, 1264 bp, Homo sapiens
ctcattgtcaagaaggaaaaagaggcagtatactgatacacacaaaaaggattatgtatttgcaaattacgctgacttccaggaaataacataatggaagctatgagagagacaatagaagaacytctgactgggcgcagtggctcacgcctataatcccagcactttggtccaagatgggtggatcacctgcctcgagttcaagaccagcctgaccaacatggtgaaacaccgtccctactaaagatacaaaaattagttgggtgtggtggtgggcgcctataatcccagctacttgggaggctgaggcaggagaatcacttgaacccaggaggttgcagtgcgccgagattgtgccattgcactccagcctggataacagagcgagactctgtcaaaaaaaaaaaaaaaaaaagaagaagaagaagaagaaacttctgataccctgttagagaagatctctctgaggaactgatattagctgatatcagcatggtaagtaggaactgttgaggtaaagttgggagaagaagttcaaaaaacactgagaacagcctctgggatggctcagggtaagaaaaatccctgtgaaatgaacaaattggaggcatggcagaatgagggtgcctgttctagggtagagaatgaaggcatggtattttaaaagagtaggcagcaaaccactgggggcaagatactaaacctctctgtgccccagtttcctcatttgtgaaattgagctaataatagtgtctagtattaggttgaaatcaattaatatgcagagagaacttaaatgtgtgctcaacacacagtcaaatgtttgtagaaatgtatcattcttattacattcatgtaaatacaacttgttattttcaagttgttgactcaatcattagtgacagctcagaaaatgtaattatggttaaaagcataacgcaaatgttttacaccttggcacacagcccagctgacagaaattggcaggaagaaagggggaagaaaagtagaaaagtagaggtcttaataactcatcttacagagtgacagtcaagggccaaaactgctagaataaaaaaggcagagtgatgaaagctatttcaagttgctgaatataaccacaaggtgaattaaaaacagggatataactacagagaagaggtgaaaaaggaagatagtagtgggagatacacgggctaaatacccatggagctgagaaccacaaccacctgcatcaacattacctagctattaaggccaaaaa

SEQ ID NO: 46919 - DNA, 1264 bp, Homo sapiens
ctcattgtcaagaaggaaaaagaggcagtatactgatacacacaaaaaggattatgtatttgcaaattacgctgacttccaggaaataacataatggaagctatgagagagacaatagaagaacctctgactgggcgcagtggctcacgcctataatcccagcactttggtccaagatgggtggatcacctgcctcgagttcaagaccagcctgaccaacatggtgaaacaccgtccctactaaagatacaaaaattagttgggtgtggtggtgggygcctataatcccagctacttgggaggctgaggcaggagaatcacttgaacccaggaggttgcagtgcgccgagattgtgccattgcactccagcctggataacagagcgagactctgtcaaaaaaaaaaaaaaaaaaagaagaagaagaagaagaaacttctgataccctgttagagaagatctctctgaggaactgatattagctgatatcagcatggtaagtaggaactgttgaggtaaagttgggagaagaagttcaaaaaacactgagaacagcctctgggatggctcagggtaagaaaaatccctgtgaaatgaacaaattggaggcatggcagaatgagggtgcctgttctagggtagagaatgaaggcatggtattttaaaagagtaggcagcaaaccactgggggcaagatactaaacctctctgtgccccagtttcctcatttgtgaaattgagctaataatagtgtctagtattaggttgaaatcaattaatatgcagagagaacttaaatgtgtgctcaacacacagtcaaatgtttgtagaaatgtatcattcttattacattcatgtaaatacaacttgttattttcaagttgttgactcaatcattagtgacagctcagaaaatgtaattatggttaaaagcataacgcaaatgttttacaccttggcacacagcccagctgacagaaattggcaggaagaaagggggaagaaaagtagaaaagtagaggtcttaataactcatcttacagagtgacagtcaagggccaaaactgctagaataaaaaaggcagagtgatgaaagctatttcaagttgctgaatataaccacaaggtgaattaaaaacagggatataactacagagaagaggtgaaaaaggaagatagtagtgggagatacacgggctaaatacccatggagctgagaaccacaaccacctgcatcaacattacctagctattaaggccaaaaa

SEQ ID NO: 46920 - DNA, 1264 bp, Homo sapiens
ctcattgtcaagaaggaaaaagaggcagtatactgatacacacaaaaaggattatgtatttgcaaattacgctgacttccaggaaataacataatggaagctatgagagagacaatagaagaacctctgactgggcgcagtggctcacgcctataatcccagcactttggtccaagatgggtggatcacctgcctcgagttcaagaccagcctgaccaacatggtgaaacaccgtccctactaaagatacaaaaattagttgggtgtggtggtgggcgcctrtaatcccagctacttgggaggctgaggcaggagaatcacttgaacccaggaggttgcagtgcgccgagattgtgccattgcactccagcctggataacagagcgagactctgtcaaaaaaaaaaaaaaaaaaagaagaagaagaagaagaaacttctgataccctgttagagaagatctctctgaggaactgatattagctgatatcagcatggtaagtaggaactgttgaggtaaagttgggagaagaagttcaaaaaacactgagaacagcctctgggatggctcagggtaagaaaaatccctgtgaaatgaacaaattggaggcatggcagaatgagggtgcctgttctagggtagagaatgaaggcatggtattttaaaagagtaggcagcaaaccactgggggcaagatactaaacctctctgtgccccagtttcctcatttgtgaaattgagctaataatagtgtctagtattaggttgaaatcaattaatatgcagagagaacttaaatgtgtgctcaacacacagtcaaatgtttgtagaaatgtatcattcttattacattcatgtaaatacaacttgttattttcaagttgttgactcaatcattagtgacagctcagaaaatgtaattatggttaaaagcataacgcaaatgttttacaccttggcacacagcccagctgacagaaattggcaggaagaaagggggaagaaaagtagaaaagtagaggtcttaataactcatcttacagagtgacagtcaagggccaaaactgctagaataaaaaaggcagagtgatgaaagctatttcaagttgctgaatataaccacaaggtgaattaaaaacagggatataactacagagaagaggtgaaaaaggaagatagtagtgggagatacacgggctaaatacccatggagctgagaaccacaaccacctgcatcaacattacctagctattaaggccaaaaa

SEQ ID NO: 46921 - DNA, 557 bp, Homo sapiens
cctgtaaggcaagaatcaattggtgagcataggttaatataaagatcaatggctatgttatgctgatattgaattgggaagccaaaacttaggttttgaatccaagccttgcctgggtcccttcagttacacacctaagctctttgaacaataatttattgaactgggctatgacttggtttgggttgacccagaagctgcccttgaggtaagaatttgagtacaagtagagaagggagcccaggaaaccctggcagggaaggggattgaggaagcaaggcagcaaagggagagcagctggtaggagatgtattatcagggttaccaatgcaggcacctggagcttaatcccactgaggaagcctgggagtasggcagaccagatgcctcagagatatcctgtgtgtgagagtagggagctggggtgtttatacacccactgccatcagtctttggttcagggctgctcccaggagacgttacttgcctggaatgtccagccagcctatggcagaggaggctcctgcagccagcgaaagtctttaggcaaagatatg

SEQ ID NO: 46922 - DNA, 597 bp, Homo sapiens
ttcatgcataatggatgagaggaaatggggagaaagaaaagaaacatcctgaaatttaagcacccgtaaatgttttcatagatgttggtagtytatttcagtgtttttcaaaggatattcccagattacccacttcaggataagctgcattgttgacaatgcagattgccaggcctcaatattagacctgaatcagaatttatgggactaggaccctggaatctacattgttagcaagtgtctccagggattcctgtatacactgaaatggagcctactcatctatcttccatagtctaaacagtgctgtgctcagtatctccctccctacacctctcccttgttaatcaaatcaagtctctcatatttaaatgtctttttgtatgcagatggctctcaaatttatatccacagcccacacctcttccctaaaactccagaatcctataccctactgcctgattgacatttaataggcatattcaaaaacaaactcttgaattttctctccaaacttgtccttcttcatctccataaatagcaccatgattaccataaaaccttgaagtcactgttgactgcatccttggcatcttc

SEQ ID NO: 46923 - DNA, 597 bp, Homo sapiens
ttcatgcataatggatgagaggaaatggggagaaagaaaagaaacatcctgaaatttaagcacccgtaaatgttttcatagatgttggtagtctatttcagtgtttttcaaaggatattcccagattamccacttcaggataagctgcattgttgacaatgcagattgccaggcctcaatattagacctgaatcagaatttatgggactaggaccctggaatctacattgttagcaagtgtctccagggattcctgtatacactgaaatggagcctactcatctatcttccatagtctaaacagtgctgtgctcagtatctccctccctacacctctcccttgttaatcaaatcaagtctctcatatttaaatgtctttttgtatgcagatggctctcaaatttatatccacagcccacacctcttccctaaaactccagaatcctataccctactgcctgattgacatttaataggcatattcaaaaacaaactcttgaattttctctccaaacttgtccttcttcatctccataaatagcaccatgattaccataaaaccttgaagtcactgttgactgcatccttggcatcttc

SEQ ID NO: 46924 - DNA, 597 bp, Homo sapiens
ttcatgcataatggatgagaggaaatggggagaaagaaaagaaacatcctgaaatttaagcacccgtaaatgttttcatagatgttggtagtctatttcagtgtttttcaaaggatattcccagattacccacttcaggataagctgcattgttgacaatgcagattgccaggcctcaatattagacctgaatcrgaatttatgggactaggaccctggaatctacattgttagcaagtgtctccagggattcctgtatacactgaaatggagcctactcatctatcttccatagtctaaacagtgctgtgctcagtatctccctccctacacctctcccttgttaatcaaatcaagtctctcatatttaaatgtctttttgtatgcagatggctctcaaatttatatccacagcccacacctcttccctaaaactccagaatcctataccctactgcctgattgacatttaataggcatattcaaaaacaaactcttgaattttctctccaaacttgtccttcttcatctccataaatagcaccatgattaccataaaaccttgaagtcactgttgactgcatccttggcatcttc

SEQ ID NO: 46925 - DNA, 530 bp, Homo sapiens
ccttcttatctcctggcctaggggtgttactagccctaaaatacttcagtgtctcttgtagtttctctaaaatgtgcccacatctttgtaaatagtctcacagttaagcccttttttatcctaatttgctgtgtccctgattaatagaggstttgttaaggtagttaagctgacactagtaagatgactagagggttgataggaagaaaaatttgcatggaggcataagaagcagattgcgaaaggagaatattgtcagagtgggacttgcatatacgaagtctttaaggcaaaaatgagaaacacattttagagatcaaataaaggtcagtatggttggagcctatgagcttattatgattattcattcttatgacaaacattcagagagttccttctgctatgtatttgctacttctagagggagatactagggactaaaaggagggatcagacaaatttgaacagaatgtagttgttatggtagagacaaacgtgtttgtttcctccactagactgcagtggagtga

SEQ ID NO: 46926 - DNA, 530 bp, Homo sapiens
ccttcttatctcctggcctaggggtgttactagccctaaaatacttcagtgtctcttgtagtttctctaaaatgtgcccacatctttgtaaatagtctcacagttaagcccttttttatcctaatttgctgtgtccctgattaatagagggtttgttaaggtagttaagctgacactagtaagatgactagagggttgataggaagaaaaatttgcatggaggcataagaagcagattgcgaaaggagaatattgtcagagtgggacttgcatatacgaagtctttaaggcaaaaatgagaaacacattttagagatcaaataaaggtcagtatggttggagcctatgagcttattatgattattcattcttatgacaaacattcagagagttccttctgctatgtatttgctacttctagagggagatactagggactaaaaggarggatcagacaaatttgaacagaatgtagttgttatggtagagacaaacgtgtttgtttcctccactagactgcagtggagtga

SEQ ID NO: 46927 - DNA, 589 bp, Homo sapiens
tcacaaaacaagctactgcaatgggcaaatggagcctaatcccatggtgaagctctggaacgccatggaacacatgtgtaaaaggctgattctattgagggcatgatgacagctgtgttgtgaccccayacaagtgagtcactggttcaggtctgttcctggagaccatcaatttgtgggtacttctggcttgccatgttctccagccaagtctgagggcagctctctgatgcaaatgcagtaactagctgtcagaaaacctgctggcttgcacggaaggtatggttctggacagtgtgtcaacagtgcctgctacactggggaatttttcaaacaaaccagcccatgtcctcctcttcccctcactcactaatgaccctgagtcctgatcaccattatgtacagcagaacaaagaagaggtgtcagtagacatattttcttcataaagatgccccaatgatgaatagcctatgtttattggttatgaccgtagaaatgaaatggaaaagcttccactgggcctgaaagaggccacagtgggactgggagactggagaggagagaaaaatcctttctaagcattcttgg

SEQ ID NO: 46928 - DNA, 605 bp, Homo sapiens
ctttgcttactctctcccctggctcaggctgcctcccttctccggtctgctacccgactcccaggtgtttcctgggattaatttctcataaatcactttcacacaaatccctctctcagggtctccttctgaggagcccaacctgagacatgactcagtttccccttcagggaggtgctgcccaggagtgtggctggctgagracatgctgttctggggggcccctgccaaagactggacaaggtggggaggtggagcctggtcaattcctggcactttgccatgtctgcaccacagtttgggtggtaccctttatcccaatattgcactcaccctttttcattcgaaggtgctactacacagtaaatcctctgcactcctaactccatcttggtgtctgcttcttggaggaaccagcctaggacggtcttgtgaatgtcacgttccttctcgcaagcatgctgacctgtcctgggctacagagacaataattatgttatacttttgtttcccacttggtatttgcttgttttacctttctttgttaaattgcacatttactttatctacttcagagagaggttcccagaaaattctttctcgaa

SEQ ID NO: 46929 - DNA, 547 bp, Homo sapiens
tccacagccatgtgggggacaaggcccatttccaggacaagagaagcccactcccatttcattcattccttcagggacctggtgttttctgggtgcctcccacaacccaggtgccgttctagactctggggatacggcagggaacaagacaggcccctgccttcacggagctgacagtctaatgggaatgacagaagtaaatacaataaaaataaactaataaaacagaaaccggatataactaaggaaaggtaatgaaggcataaatcaggcagatggaccaagaggcgtagtagagtgggcaacaccaggggcggggtcccagggcctctgcaggcccctggggtgtggaagggcctggaatgcagcgacagactgaacagggcttaaggcagagaggacagagcrtgctgatgtcacagccagggctcttgtgcctggtgtgggagccagtcaagctggagacaggggtgaggtcaggccctgcagggcccgggcactaaggcagaggtgtggatctcaaataccaagagaaaccacccagcgc

SEQ ID NO: 46930 - DNA, 606 bp, Homo sapiens
aagctcctaaagctagagctttcatttaaaacttcacagcagcccacttagagaaatggcctgtggttcccamcccccaaccccttttctaaggctgctcaagtttgagtttttaaaaagagttcggtagagctaaaggaagctacagtaactcactgcttattaatcaattgcacttaagatctatgttactgattctgaagcgaggcaagcccttgacggaccgcagcctctggccagccagaagtcagggggctcccagacttaggttccacagtggggcccttgtcatcagtggcttttggagctgggactggagcacgtgggtcttttcagaagcccttcttgatgcaaaatttcttatcaatggtatctggagttttgttcatttggcttcaaattgttttttttttttttctaatatattttactgacaagcccttgagagctgctttgctacttgcatgcaggcctctgtgtgaccaggcacacagactacatgtgctccatcttgtctctccgctgctccaggggccttgctcaaaaaccccctatattactggaaactgctggttttacctatgtgcttcttcctaaggcatgcaa

SEQ ID NO: 46931 - DNA, 1221 bp, Homo sapiens
attctgactggtgtgagatggtatctcattgtggttttgatttgcatttctctaatgatcagtgatgttgagcttttttacatatgttcgtttgctgcataaatgtcttcttttgagaagtgtctttttgtttgcctactttttgatgaggtttttttttcttgtaaatttgtttaagttcttgtcaatattatgagccatttttaagaaacacacgtttatacacaagatgctacattccttttattatgagtttccttgtgaagttaaaatcttctgtagtagtaaacagatatacaaagtgtcccgcaaaaacctcacttctttgggaatgaaagtccaggaggtaaactttagtccaygttcagttctttcttctgtgggaggatatgtttacttgttttaaatataaattatttttatcattagcctcaggagtttcaggtctcctgcatgcttaagagttagtgcatattgagaccccgaaaatatgatgtcatgttgcaagcctgggatcataattaaaaatagcaaaactagacccagatcagtccttggagcatggaccatcaattgagccatgcattcacagacatcactttgtgtctgtcagcagcagactggtgacagtcaccccttgaggcttgtagattctaagggctgttatcatttcttgttatttctagaccactttgttcctttcattgcggggaaaaatattgaggaggatttttgggcatgtataataaacagatagggaattgtattattttcttctataaatcttttcaggtaagtaaaaaaaataattgtttgatttcttaaatgccttcaaacgctatataattcaaagcattagataatttacaattatacttcccatatgtaatgtctgtgatctagccagtaggacaactcatttttattcagtgctcaagtgggtataatatattgacacatgcttgaatctgatttatatattgttcttattttcagataaatcatatgaatttgtctgcctaatacctgaaacaattacaaaaatcacttctttcactcaagagccacattctagacctatgcattggtaacaatataaagagctgtccttcatgtatcctctatttttaaattatcattattttgaaactgtcattccttttttaatagcttaaaacaaattaatttttacacttgagggtatataacatgccaaattag

SEQ ID NO: 46932 - DNA, 1221 bp, Homo sapiens
attctgactggtgtgagatggtatctcattgtggttttgatttgcatttctctaatgatcagtgatgttgagcttttttacatatgttcgtttgctgcataaatgtcttcttttgagaagtgtctttttgtttgcctactttttgatgaggtttttttttcttgtaaatttgtttaagttcttgtcaatattatgagccatttttaagaaacacacgtttatacacaagatgctacattccttttattatgagtttccttgtgaagttaaaatcttctgtagtagtaaacagatatacaaagtgtcccgcaaaaacctcacttctttgggaatgaaagtccaggaggtaaactttagtccacgttcagttctttcttctgtgggaggatatgtttacttgttttaaatataaattatttttatcattagcctcaggagtttcaggtctcctgcatgcttaagagttagtgcatattgagaccccgaaaatatgatgtcatgttgcaagcctgrgatcataattaaaaatagcaaaactagacccagatcagtccttggagcatggaccatcaattgagccatgcattcacagacatcactttgtgtctgtcagcagcagactggtgacagtcaccccttgaggcttgtagattctaagggctgttatcatttcttgttatttctagaccactttgttcctttcattgcggggaaaaatattgaggaggatttttgggcatgtataataaacagatagggaattgtattattttcttctataaatcttttcaggtaagtaaaaaaaataattgtttgatttcttaaatgccttcaaacgctatataattcaaagcattagataatttacaattatacttcccatatgtaatgtctgtgatctagccagtaggacaactcatttttattcagtgctcaagtgggtataatatattgacacatgcttgaatctgatttatatattgttcttattttcagataaatcatatgaatttgtctgcctaatacctgaaacaattacaaaaatcacttctttcactcaagagccacattctagacctatgcattggtaacaatataaagagctgtccttcatgtatcctctatttttaaattatcattattttgaaactgtcattccttttttaatagcttaaaacaaattaatttttacacttgagggtatataacatgccaaattag

SEQ ID NO: 46933 - DNA, 633 bp, Homo sapiens
cagaagtcagattattgcatcataggttagagttagggttgagtcaggatgtcagattcgttaattgaatgaggtagaaaagacagccattatttctcacacttcacagttgcaaaagttstaagacttagttataatatgaacgatatcgtaggcttcaactctaaatgttttcttagaaaaagaaaacaggagagtttcaagatgtaattgatttccaaattagtcttttgcatggatttcttttttataatatgccattctctttcttgatttaggcatatatttggatttttatatgcaatcaatttgttcttaacactaatagtgccaaactcaggataatcagcatgtttattatcatttcttctacctccttaaaggtagcttcttactgatgtcaggataccttctctttacttctgcttaataagagctatttggctcattctttatgtgtgtaaaaaaaatctacgagctaaatcacttatttttttaatagataagaattattatttgcttctctgaaaatgtcttcaagctagtatttatgataatttttaacataatgactttggacatcaatcattgaagactggcagacatcatttctaaatgttttaaaagatttta

SEQ ID NO: 46934 - DNA, 633 bp, Homo sapiens
cagaagtcagattattgcatcataggttagagttagggttgagtcaggatgtcagattcgttaattgaatgaggtagaaaagacagccattatttctcacacttcacagttgcaaaagttctaagacttagttataatatgaacgatatcgtaggcttcaactctaaatgttttcttagaaaaagaaaacaggagagtttcaagatgtaattgatttccaaattagtcttttgcatggatttcttttttataatatgccattctctttcttgatttaggcatatatttggatttttatatgcaatcaatttgttcttaacactaatagtgccaaactcaggataatcagcatgtttattatcatttcttctacctccttaaaggtagcttcttactgatgtcaggataccttctctttacttctgcttaataagagctatttggctcattctttatgtgtgtaaaaaaaatctacgagctaaatcacttatttttttaatagataagaattattatttgcttctctgaaaatgtcttcaagctwgtatttatgataatttttaacataatgactttggacatcaatcattgaagactggcagacatcatttctaaatgttttaaaagatttta

SEQ ID NO: 46935 - DNA, 538 bp, Homo sapiens
tctgtggtctaacttgtaaccagtggtttaacctgtgacccatgggctgctctgtgacctgtggccttcttctgcttaggaagaggtgaattcagtaggtttggggtagggctaaagaactggtgtttctaacaagtcccaggtgttgctgctgcttgctgggggaaccatagtataggagccactgtattacttcatttagtcccctaaatgagatgggtagctattactctctatgacatgggtactattactcttcccattttagagtaggcctgcatacatgctgttcacttggccttgtaagggatgcttgtcatcatttcatagacaacagcctgaggctcagagaggttaagtgacttgtctgatgtctcacagcagttagggggagatgcgggggattgaactaggtctctcttaagccaagattttttccactctcttaggtggggaagatgtctagtttctgaccctagacactgcctcagaaaattctaccyccccttccgagctcaacaggctccggagggtgtgg

SEQ ID NO: 46936 - DNA, 1162 bp, Homo sapiens
gtctttttatgaagtagatggagaagttgttattggactcttttttttattttgagactgagtttcactcttgttgcccaggctggagtacaatggcatgatctcagctcactgcaacctctgcctcccgggttcaagtgattctcctgcctcagcctcccgagtagctggcattacaggcatgtgtcaccatgcccggctaattttgtattttttagtagagatggggtctctccatgttggtcaggctggtckcaaactcccgacctcaggtgatccgccttggcctcccgaagtgctgggattacagaagtgagccactgtacctggccttttggactaattttttagattaaaaaacattctgtgcgtcagacaccagcggcccagtagaaaaagccagaggtgctgatgacttctaaggtggcgctccctgcagctgcgactcaggtcctgcgttagtgtctgcacctgtgaccatcaggatgagctggggccccgggtgcttctgtggtcaggctgggacagtgaaaggcaggtttgagctgctgaagagggagcccttgcatccagggctctcaagaggcaaaggcccgcctggcagtgtcctggggcaggagcatggaaggctgtgtcatgtgcggagacagcggtgatgggggaggtttggggtgcggtgagggggagactccctccatggtggaagcccttggagttgccagatggctggtcaatgctgatgccaatgtggaaatggggcgctgttgtttgtggggtggctggaccctgcatggagaagtgaattcagttttggctttctcagctgttggctgaaggccatggcccctcatgaagtcttcctgcaagcttgaggactttgttctcactcacagggagcccggtcagctcttagacaggagggctgtggtgtaccctggaggtgtttcctgtctctctagaagctggccatggggagaactgaggggtaggtggggaggggccacgcggacccctgcagcctctttgatcttgtattcagaaggtatgagtgtgcatttctatggggcgaggagctatagcatccaccagattctatggatggagctttcgtggatccagagggtgccatgttcttccgaagcctggagaggctcctgagcgg

SEQ ID NO: 46937 - DNA, 599 bp, Homo sapiens
cctacagaagcaggcaggcctgcttgagctgtggtgggctccacccagttcgagcttcctggctgctttgtttacctactcaagcctgagcaatggcgggcgcccctcccccagcctcactgccaccttgcagtttgatctcagactgctgtgctagcaatgagggaggctccgtgggcataggaccctycgagctaggtgcgggatataatctcctggtgtgccgtttgttaagcccattggaagagcgcagtattagggtgggagtgacccaattttccaggtgccttctgtcacccctttctttgactaggaaagggaattccctgaccccttgagcttcctgggtgaggcaatgctttgctctgcttcagctcacgcacggtgcactgcacccactgtctggcactccctagtgagatgaacctggtacctcagttggaaatgcagaaatcacccatctgctgcgtcgctcacgctgggagctgtagactggaactgttcctattcggccatcttggctaagacttaagtctacatttctattatcatttcttattatgtgcaatcttttttttttttttgagatggagtcttgc

SEQ ID NO: 46938 - DNA, 599 bp, Homo sapiens
cctacagaagcaggcaggcctgcttgagctgtggtgggctccacccagttcgagcttcctggctgctttgtttacctactcaagcctgagcaatggcgggcgcccctcccccagcctcactgccaccttgcagtttgatctcagactgctgtgctagcaatgagggaggctccgtgggcataggacccttcgagctaggtgcgggatataatctcctggtgtgccgtttgttaagcccattggaagagcgcagtattagggtgggagtgacccaattttccaggtgccttctgtcacccctttctttgactaggaaagggaattccctgaccccttgagcttcctgggtgaggcaatgctttgctctgcttcagctcaygcacggtgcactgcacccactgtctggcactccctagtgagatgaacctggtacctcagttggaaatgcagaaatcacccatctgctgcgtcgctcacgctgggagctgtagactggaactgttcctattcggccatcttggctaagacttaagtctacatttctattatcatttcttattatgtgcaatcttttttttttttttgagatggagtcttgc

SEQ ID NO: 46939 - DNA, 582 bp, Homo sapiens
tgtgtttgcttctaaacaaaccattcagacagaaatgaaggaattactcattctgcagaatctatttaccatctgttgctgaagggaagtctttactgaatgagaggctgggttggaggacctctgagtgaattaaaccctaaaagaaaatgcaccttctaagtttcaagtcactttgattctatgattgtatgtataattcagaccaaactaattctatctttgagaagagatacataaaagaatattaagaaggtgcaacattggtggtagttcccaacctgctgcccccaggctgccaaggatgggagcagggagggaggttggaagaaattaattatgaattgagaaagactgatggattaacaacaaaaaaaaactttcaaacaggatgatggtgatgaaacacaaaccttaaagaaatcctggtgggacagaaagaagggagagaggggaawggggaaggaaggcgggaggggagaacgagatggacgagggagacgcagacacctctggcctcctgccctcagccagcatgctctaaccatgccacccccatgactccctttgacgagatatgca

SEQ ID NO: 46940 - DNA, 1173 bp, Homo sapiens
cacagactaagacaatgaccttttgtgttttttgggaaaaaccctaaaatacaaggaatccctggcttagtaaagtcggtcaatttatcacttatgtcttatccagaatgagaataatccgctcccttttctctgtgattggaaattaagaccggctcactggggcaaatgcgttaccacttgggagagtgcttatcagccaggtggcatcatgaaggccctggaagccagcctgtagggtaggagagggtgcagggagtaagggacgggtacagaaaaggaaacaagagggcccagagaacctgccccctgctgtataattgtgcccaagctcccgcctcccctgcagggagaagggaagtctctccctcacccatgggggagcactgagtggccacctctgcacaggccctctgcaggggcagatgaggcagcccgaacagaaccctctgcccgcctggccaaccaaagagcccacgacactccatctggcccaaccgcagccgaaggcggcaccaactcgctgcgccttcagggacttgccagggccacttgagtgtggtaaacatgcattttaggctaagtgtttaaaaataattattagaaaggtcatatttattgtagaaaactggcaaaggctgggcgtggtggctcatgactgtaatcccagcactttggtaggccaaggagggtggatcacctgaggtcggaagtttgagaccagcctgaccaacatggagaaaccccatctctactaaaaatacaaaattagctgggcgtggtggcacatgcctgtaatcgcagctacttaagaggctgaggcaagagaatggcttgaacccgggaagcagagtttgcggtgagctgagatcgcacctttgcactccagtctgggcaacaagagcgaaactccgtctcaaaaaaaaaagaaaragaaaactggcaaaatatagagaaatagaaacattcctttaaaagaaaacactcataacctccccatgtggagacatgtgcttctagtatttatttaagtttatttcatacacatttttaatttatttttattgttatttatttatttaatctatttatttatttatttttgagacagagtctcattgtcacccaggctggagtgcagcggcaagatctcggctcactgcaacctctgcc

SEQ ID NO: 46941 - DNA, 569 bp, Homo sapiens
gcaaatctccaccataggacccaagagcaatatccatctaacagttttttgaaatgaacaacaaacaacctattttatgctaagcaatatttttttttcrtctaaaacatccagttgactattcttttaataaataggagatgagaacagttttatctttgggactagtagttattatccattagtgttagggctctatctttgaaagttatgtggcattattaaataataatattccccttgttagggtgattaaacaaacatttaatgatctctctgtgagagataaaaataaaaatacctagatgacaaagcaaaagcctttcaaatacccttagaagaaaccaaccacaaggcccttgtgacagcctccacatgctatcaaaaaccagtagctcaatcttattaagttagactcacctggaaaggttaaaagttttaaagtatagattcccaagacatcccagagattcaaacataaccctcctgggttggagcccagtcttggtatttgttaaatgtttttccaggtattttcagcactgagatcagcactgttctgatcccga

SEQ ID NO: 46942 - DNA, 569 bp, Homo sapiens
gcaaatctccaccataggacccaagagcaatatccatctaacagttttttgaaatgaacaacaaacaacctattttatgctaagcaatatttttttttcatctaaaacatccagttgactattcttttaataaataggagatgagaacagttttatctttgggactagtagttattatccattagtgttagggctctatctttgaaagttatgtggcattattaaataataatattccccttgttagggtgattaaacaaacatttaatgatctctctgtgagagataaaaataaaaatacctagatgacaaagcaaaagcctttcaaatacccttagaagaaaccaaccmcaaggcccttgtgacagcctccacatgctatcaaaaaccagtagctcaatcttattaagttagactcacctggaaaggttaaaagttttaaagtatagattcccaagacatcccagagattcaaacataaccctcctgggttggagcccagtcttggtatttgttaaatgtttttccaggtattttcagcactgagatcagcactgttctgatcccga

SEQ ID NO: 46943 - DNA, 562 bp, Homo sapiens
ggaataacaagacagagatgattattacttgatgataggactactgaaaacagtttaaactttttttcagttctttttgttttcaggtttcattccactggggatattcagtcacatcactgtgcttctccttgaaatcattctgttgtgtgtacttgtgccaccaactggatacatggtcaggctcatttgttttattttgcttttgattttccaggatttctgttttccttctattttgatttccttttgtcctgtatctaaaagattctgggagaggtgggcttcaggatcagatgccaggttctgtttctctggttcttccctgctgtgggactttgaasaagtcactttaattccatgagctgagtgttctcacctctaagcagagtgatcacacctacctggccaggtgcagggggtgaagtggagtcggggcagggacttagtcttgggaatgacactgaataactaaaatacactgaaatagctgggcgcagaggcttatgcctgtaaccctagcactttgggaagccgaggcaggaggattgcttgagactag

SEQ ID NO: 46944 - DNA, 562 bp, Homo sapiens
ggaataacaagacagagatgattattacttgatgataggactactgaaaacagtttaaactttttttcagttctttttgttttcaggtttcattccactggggatattcagtcacatcactgtgcttctccttgaaatcattctgttgtgtgtacttgtgccaccaactggatacatggtcaggctcatttgttttattttgcttttgattttccaggatttctgttttccttctattttgatttccttttgtcctgtatctaaaagattctgggagaggtgggcttcaggatcagatgccaggttctgtttctctggttcttccctgctgtgggactttgaagaagtcactttaattccatgagctgagtgttctcacctctaagcagagtgatcacacctacctggccaggtgcagggggtgaagtggagtcggggcagggacttagtsttgggaatgacactgaataactaaaatacactgaaatagctgggcgcagaggcttatgcctgtaaccctagcactttgggaagccgaggcaggaggattgcttgagactag

SEQ ID NO: 46945 - DNA, 562 bp, Homo sapiens
ggaataacaagacagagatgattattacttgatgataggactactgaaaacagtttaaactttttttcagttctttttgttttcaggtttcattccactggggatattcagtcacatcactgtgcttctccttgaaatcattctgttgtgtgtacttgtgccaccaactggatacatggtcaggctcatttgttttattttgcttttgattttccaggatttctgttttccttctattttgatttccttttgtcctgtatctaaaagattctgggagaggtgggcttcaggatcagatgccaggttctgtttctctggttcttccctgctgtgggactttgaagaagtcactttaattccatgagctgagtgttctcacctctaagcagagtgatcacacctacctggccaggtgcagggggtgaagtggagtcggggcagggacttagtcktgggaatgacactgaataactaaaatacactgaaatagctgggcgcagaggcttatgcctgtaaccctagcactttgggaagccgaggcaggaggattgcttgagactag

SEQ ID NO: 46946 - DNA, 553 bp, Homo sapiens
attctttcagggtttggggtatgcggggagggattcccatcactgccagccgttgtcccacggctcactcggcctttctggcgttctctccccaggcgagaagcccttctcctgtccccactgcagccgtgccttcgctgaccgctccaacctgcgggcccacctccagacccactcagatgtcaagaagtaccagtgccaggcgtgtgctcggaccttctcccgaatgtccctgctccacaagcaccaagagtccggctgctcaggatgtccccgctgaccctcgaggctccctcttcctctccatacctgcccctgcctgacagccttccccagctccagcaggaaggaccccacatccttctcactgccatggaattccctcctgagtgccccacttctggccacatcagccccacaggactttgatgaagaccattttctggttctgtgtcctctgcctgggctctggaagaggccttcccrtggccatttctgtggagggagggcagctggcccccagccctgggggattcctgagctggcctgtctg

SEQ ID NO: 46947 - DNA, 560 bp, Homo sapiens
tggtcagggtcttgccactgcagaaggctgtgcatggcaaggaagtgtgcaagacagagagaaaatgggggccaaatgtatcctcttatcaggagcccactcctacgataactaactcactcccataataacagtattaatcaccttttaaaggtcccacttcttaatatggtcacaatggcaataaaatctcaatgtgagttttggaagggacattcaaacaatagcaggatctgttctatctctaaactctttgtactgtcttatgttctggaaaaatatgttagaaaaatgtataaatatgcacttatctatgacagagaaacatacttagaaatcaatgctgcattatttacaaatctttcagtgaatatgtcaaatgtgttcaatttaactataagctcccaatggggagacattatggtgtatttttcttttataacttgtagatcttagcattgtcccaggagtataatatattataaactagtgtttttgaatgaatttgtttattgrttttacatggggaatgactttggcatgcaatcacacctcctacc

SEQ ID NO: 46948 - DNA, 1508 bp, Homo sapiens
tcattaatgtcagactagataaagaaaatgtggtacatatacaccatggggtactatgcagccataaaaaagaatgagatcatgccctttgcagggacatggatagagctggaggccactatcctaagcaaactaacacaggaacagaaaaccaaataccatgtgttgtcacttatcagtgagarctaaacaatgagaacacatggatactaggaggggaacagcagatactggggcctacctgaggatagagggtgggaggagggagaggctcagaaaagacacctatcggatacttatgcatattacaaaattatctttacaccaaacccgcgtgacatgcagtttagctatataacaaacctgcacatgtacccctgaacctacaagttaaaaaagacgtttgcctgtgtggggcctccttctgtccccagtcctgcttttgctgtacagaaacccagtggcccccgctggtcctacccataacatatcctcatcctccctcctaaagagtccccttgggtcacggatggtgttgtgtggtgaagcgggtgcatgtatcataagatgtggctggaagcaggtgtgcaattctggttcacacaccctctccccaactctcatttaccatttccctcaaaggatagcacagcaccaatgtcccatggccctggatgcctttgtctagggatatcttttatctcttccactgaggatgtctgcgatgggaacagtaaggttttggagctataggctttattcccagttcaaactcaaatgatacagaggccaaaaatgtgccaccagctgcacaatgtgaactcctgaggctgcaagccaccccagcacctcccagctctcatccctaccaaaggatttctgaacttaaatgctagataccttctgttttaaaagacttgcatgtgtgtgattcaggccatttattgggcatgtagtttctcaaaatctactcccagttccctgaacaagctacgcctttggataacctggcatctctcatctccccatccttgccccagatcagctacaccccagccttcacttttcaaagtcttgcaagccacgtgtgttacacagagctggtcctcaaaaacagcatgatgaacttgtcactgcttttaactttctcttcccagcttgtgtgtgtttttagtgatgttttcaactggtagagcttcaaaaaatgtacaaactgaattaaatgtaggagaaaagccccaaaaccgaatgttttacttttaaaatgaaagaaaagcagtcacacaatcttggctgatacacaatattacaagagagaaaacaaaatgcccctctgttgggaagatgttctgctgtttctaggcaggattcattaaggcccatttcttctagtcaatgatttccatcagagtgtttttagttttccttttttttctttttgataggaaacttggtaaagaatgaatactcaaagaagccaagaaagtgttattgataagtggaataag

SEQ ID NO: 46949 - DNA, 593 bp, Homo sapiens
catagtgaaatgagaaaaagaacacgacttcaagtgatgtgtttagaagaataaagagaaaaaacagattaacaaccaaagacttcagttaaaagttttcatgtgagtggccttaaaagatggagagaaaaaaggaatgttgcagttaaaatatttggctaaacaccaaaacaaagggaataaaattgtgaaattttacttattctcacattcattttgatgaattcatggctcagagcagcttmtgatgataaattttgaatctagtgctaagtcatttgttacagggttaggtgagcatgtgtcaacttcttgttgctcttaaagtcttagattatttctaacagaaaaccaaaaatgaatgaaatattcttatctaaagtaaagacgatttattattttccagataacatttgaaacaattcagcattctataatgtattgacaataactaggtaaaatcatttatcactctggtagtaaattagccatttatatatgatataataaatgatcacatagaatcaattgtcatatgattgccagtaaagatattcagagattagctgacaaggtatataaaggtataatat

SEQ ID NO: 46950 - DNA, 593 bp, Homo sapiens
catagtgaaatgagaaaaagaacacgacttcaagtgatgtgtttagaagaataaagagaaaaaacagattaacaaccaaagacttcagttaaaagttttcatgtgagtggccttaaaagatggagagaaaaaaggaatgttgcagttaaaatatttggctaaacaccaaaacaaagggaataaaattgtgaaattttacttattctcacattcattttgatgaattcatggctcagagcagcttctgatgataaattttgaatctagtgctaagtcatttgttacagggttasgtgagcatgtgtcaacttcttgttgctcttaaagtcttagattatttctaacagaaaaccaaaaatgaatgaaatattcttatctaaagtaaagacgatttattattttccagataacatttgaaacaattcagcattctataatgtattgacaataactaggtaaaatcatttatcactctggtagtaaattagccatttatatatgatataataaatgatcacatagaatcaattgtcatatgattgccagtaaagatattcagagattagctgacaaggtatataaaggtataatat

SEQ ID NO: 46951 - DNA, 593 bp, Homo sapiens
catagtgaaatgagaaaaagaacacgacttcaagtgatgtgtttagaagaataaagagaaaaaacagattaacaaccaaagacttcagttaaaagttttcatgtgagtggccttaaaagatggagagaaaaaaggaatgttgcagttaaaatatttggctaaacaccaaaacaaagggaataaaattgtgaaattttacttattctcacattcattttgatgaattcatggctcagagcagcttctgatgataaattttgaatctagtgctaagtcatttgttacagggttaggtgagcatgtgtcaacttcttgttgytcttaaagtcttagattatttctaacagaaaaccaaaaatgaatgaaatattcttatctaaagtaaagacgatttattattttccagataacatttgaaacaattcagcattctataatgtattgacaataactaggtaaaatcatttatcactctggtagtaaattagccatttatatatgatataataaatgatcacatagaatcaattgtcatatgattgccagtaaagatattcagagattagctgacaaggtatataaaggtataatat

SEQ ID NO: 46952 - DNA, 611 bp, Homo sapiens
tggtgtgttaaatgttttgctagtgtcactttttaaggctgattcctttgtttttcagtgtgttttcaatactaaaatgattttaagaaaatataaaacaattctgtaacaaacatttatatttttacataataatttgcacatttatgtctattttttcatatttraacatcagatttccttttttttttgtttgagatggagtcttgctctgttgcccaggctggagtgcagtggtgcaatctcagctcactgcaacctctgcccctgaggttcaagcaattctcaggtctcagcctcctgagtagctgggattacaagcacccatcaccatgcctggctaatttttgtatttttagtagagacaggattttgccatgttggccaggctggtttcgaactccttgacctcaggtgatccacctgccttagcctcccaaagtgctgggattacaggcgtgagccactatgcccagcctaaacatcagatttctgcatgaattgtcattgagtcatgactctcagtgcagcgtggaagaagtgacaggtccagacaggcttcccttactgaacacctaacactgagaaggctctgggctaagtgttgatgc

SEQ ID NO: 46953 - DNA, 526 bp, Homo sapiens
tgtgtgtgtgtgtgtgtgcatgcgcgtgcacgcttacgtgaacaggactgtatagatatacattgagagaagagagcacacaaatttagcaaatgtaatgatttaacrcagtctagttcctcccgacattccagattcacccccagctgaatccagactaaaagtaggtggatatatgattcttccatcttttctgtggattagaattttcaagatcaggaaagttggggaaaataaataatggattttgattggttttgtcatgaaggttctccattcattgaagaagtatttactgagtacctgctctgtgttaagccgttttaagtgctagggttatagcaatggataagacagagtaagttggagttcttatgggcctacaagtattgtggagggcaaataagaaaacaagacagtttaaattattgtaagtcctagaagcaaagtaaagcagagtgatgtgatagacagtaatttagggaagtgcaacgttagatgggatggccaaggaaggcttccctaa

SEQ ID NO: 46954 - DNA, 670 bp, Homo sapiens
ggagactgaggcaggagaatcacttgaacccaggaggcagaggttgcagggagccaagattgcgccactgcactccagcctgggcaatagarggagactcagtctcaaaaaaaagaaaaaaagagacagggtcatgctgtgttgcccaggctggactcaaactcgtgggctccagtgatcctcctgcctcagaatactcagaataactgggactacaggcataccactgcctggcatagacatacttcatctctttctttttacatttttaagtgcagctattagacaactcaaaattacatttgtgactcccatttttattggtcaccactggtcttcaatatatatccaaatttcttattcttggcattcaaaacttccaaaatgtggctgctgctaagctccatattccatgtttctatagacgtattctttttttttctttgttttttgagacggggtcacgctctgttgcctaggctggaatgcagtggtgtgatctcggctcactgcaacctccgcctcccgggttcaagcagttctcctgccttagcctcctgagtagctgggattacaggcgcacaccacaacgcccggttaatttttgtatttttagtagagacagggtttcaccatgttggtcaggctattgtcgaattcctgacctcgt

SEQ ID NO: 46955 - DNA, 596 bp, Homo sapiens
aatctgtttacctatgtatgccagaaatatgctggggtcttcaactctgtattgaagtcagttgaaatatatattttggtgagatctagttgctaaaatacactgtgttctaggagttcaaggtcagttgcaacattggaaacatgctcctaatataagcacatttcgttttatatttcaaaactatgtagattaaaaaaatgtcaatgtttggatttcatttcttctgtttaactcagatttgttttgaatgatatcccttcatttcagaaacttgtatttccttgyttcttcataccaatttccagtcttgaactgtcagataacttatattacattatattagtaaaaataatcaaagtagaaataactcaatagtgatttctcacccaggaaatttgaaggtaaggtatttccaatttacaataagcttcttcagttacatataaaacaaatttatgaattaaagtgataacttaccacatactttaatccatgtaaataaaatgcataagatgtgcaaactaattgttaacgccattaaaaaaaactagatcataacttttttactaccttaaagagaaactcaaatatta

SEQ ID NO: 46956 - DNA, 596 bp, Homo sapiens
ccccctccacctagccctcctggggaggccctggcatcaccccatctgagccagagcttctggggagtaggggagcaggcagctgggtgacccagccagggaagagtttacggggtcctggcatgtgcctccggctggccagcgagacactgtggtggggtccagtgacccttggcctggggaggtgggcagtggctcctgtagtagaggatggcaccagggcttgtgtctaggagggctcctgcccctcccagggattcaacacccccyatgctggggacgatcccagcccgtatccaggaaactcaaggtgccacctgatgctggggttggagggcaaggagggtggctgtagccaggagaggcccacagaggtcctggagtctctgtgtctcaactgggtggctcccaagggtcatcctgctctggggcagcgctttagggcaggtgggctgaggtcagaactgccggatggggaagacgaaagtggcgggtcccggccaggctttgtgggcctggggtccgttcttggctgaagcctggtctcggtctctggccagcttggtggggcatgggcagtaacgctgcacagctcc

SEQ ID NO: 46957 - DNA, 596 bp, Homo sapiens
ccccctccacctagccctcctggggaggccctggcatcaccccatctgagccagagcttctggggagtaggggagcaggcagctgggtgacccagccagggaagagtttacggggtcctggcatgtgcctccggctggccagcgagacactgtggtggggtccagtgacccttggcctggggaggtgggcagtggctcctgtagtagaggatggcaccagggcttgtgtctaggagggctcctgcccctcccagggattcaacaccccctatgctggggacgatcccagcccgtatccaggaaactcaaggtgccacctgatgctggggttggagggcaaggagggtggctgtagccaggagaggcccacagaggtcctggagtctctgtgtctcaactgggyggctcccaagggtcatcctgctctggggcagcgctttagggcaggtgggctgaggtcagaactgccggatggggaagacgaaagtggcgggtcccggccaggctttgtgggcctggggtccgttcttggctgaagcctggtctcggtctctggccagcttggtggggcatgggcagtaacgctgcacagctcc

SEQ ID NO: 46958 - DNA, 628 bp, Homo sapiens
gtccctgggcccccaggacacgcatgcccccagcctgcccgcacaccaggcatctccctggcccccaggacacgcgtgcccccagcctgcccgcacaccaggcatctccctggaccccaggacacgcgtgcccccagcctgcccgcacaccaggcatctccctggcccccaggacatgcgtgtccccagcctctcctcacaccaggcatctccctggccccaggrcacgtgtgtccccagcctgcccgcacaccaggcatctccctggcccccaggacacgtgtgcccccagcctgcccacacaccaggcatctccctggccctgccagttcagggcactcctgggtgaccagtaccctcgaagggtatcacacccagtgagatgcctggtacgacccggggcccactgggctgtcttgggggcagctgcttcactcagtgagatccagaggggcagggaccatccctgttcccttccttttctgggaggcgtggggaccacaggccttgtgggtggcagatgggacatagcacagtcccacctatacagatggagcacaggctggggcatcgtccatgaagtggcccctccccagcggtctgtcaggcgttggaggctgggccgctc

SEQ ID NO: 46959 - DNA, 2878 bp, Homo sapiens
  misc_feature (1)...(2878): n = A,T,C or G
taggggtttgcctggtaactgtaacaatttgctctgtaatagaatatagcagagagcagctgcctgaaaacacattttattaactgtgttacccaaataagttggcctggtccattaaataagttatatttccacaaactttctattttcatatgtttgtggaaatttagacaaggagctgtgcattgccaaggatatcagtctggcaaatctttatcttgtaagtcaacttgatcattttcagagaccctataaaactgcggtaatgtgtcttttactagcagcaacttctrtgttcaggcttagtttcttgcaaagggaatcttaatcctgagtacaactgccaagttaaacccattgtgacttaatgtggggctcttttaggtcaatgactaaatttttaaatatttaatatgcatgaatttagcccagaaccatggattttctgcaaaacaaacaaaaagtgattctatgtgacaacagaatctgacttgtcattgtaatcaggaaatgcactgggctgcatagtcaccaaagctcagtaaccaaatgtagccctagtaagcatgttgctgctcccttactagagcagagctgctgtgtgacaatatagacaggttaagaaacatggttgtggaatcaggtacgtctgtgttctggtctgctacctgccacttcgctgcatgacttgggtaaggtgcttaacccctccaagcctgtttcccgtttcccattctgtaccgtggggctagtaatagtgctaacctcatacagttgttaccgtatatatccatggcccgactatgcagaaggaggaaactgtgacatcactcattcctgtaatcttccttctacttatgactagaccaagcagagaatgatccaactggctttttttgtttttgtttttgctctaggaaatcaggtgatggcttctcaggctgtgtttaagttaacagatgtataagaagaactatgtcctctctcctcccctttatatgcatacccttcccttgacatgtatctcaaggattttacatgttcttctattgtcatttccacctctacctttagagaactgtctcaccctttggccttcacagcctgggaaattagggaaggggggacagcgaactgcatggtattaactctggtaccttgtgtttgctgggtggtggctttttgcctggcattgagggccaatgattcatcctcctggctcaacctgaccttgctgactatagctgtcatgtgtataaacttatttccttccccatcccgcagtggggtgaaaaataaatgcaagaacaagattttaattactttccaagtgtgttagatatagtaaatgacatttaaaaaattctcctcttccagactgtacgctgatcagagttgcattccacaaggacttagtaataagactgtggttggcccaactgtttcagaatgatgcctggaaagatgggcgataacctagtatgttcctccaatctcagcttacaatggcatactctcacttgggtccaaactctgttagcattttgattttttaatttttatttatttatttatttatttatttatttttattttgagacggagttttactcttgttgcccaggctggagtgcaatggcacaatctcagctcgctgcaacctctgcctcctgggttcaagcgattctcctgcctcagcctcccgagtagctgggactaccggcatgtacctccatggcccagctaattttgtatttttagtagagacggggtttctccatgttgatcaggctggtctcgaactcccgacctctggtgatccacccgcctcggcctcccaaagtgctgggattacaagcgtgagccaccgtgcctggcccactgttcgcattttgtactgcacttccatgaaatttgttctggagctgtctcagttttagagctactgtattagcatcattgcttgatatggaaaaatattgactgtagcctaccttcttgttctacctcacttttttgttgtgataaagaccttataaggctgggcgcacgttgctnnnnnnnnnnnnnnnnnnnnnnnnnnnnnnnnnnnnnnnnnnnnnnnnnnnnnnnnnnnnnnnnnnnnnnnnnnnnnnnnnnnnnnnnnnnnnnnnnnnngtctcaaaacaaacaaaacaaataacctcatgagaaggtactgtaatgcatctatgtgtataaagacaaaaatgcaagtttgtcttgttattaataaaacaaagtataattagtctggatgtacaattaggataattatgtggattccatccttaggacatgtttatattgttaccctgggtctacatcttcatcatgatagtggacctgtttaattctcggagggatgagatacaaggatagcctgtgggctcattgtaggatattttaagtatgatagagaccgaggaagagtgctgagtgatttcagatctctgttagcccctgcactgaagctctttgtgtaagcctacacaccctgcctcaaattcctcttgctctaaaaaggggagaatctaaagatggtgcttgaaagggttgccaaaatcttagctttgtggtggagatgtcttccacccaatctcatcacatgaaaccagaaccaaaggtgtttctaaacgaaggttcagaagaacaaatgcatctggactgatatctgggcaaggcatcaggccttccacctggtttctgagaagaaagtgctcgtggctcaagccaggtgacaagcgttcacttcccacctccgtgtcttgtagtctgtttgatgtttggcttgtaacttaaaccaaccacctctgccttaagtttacagtacaccaagtggaggggaaaagttgctgtg

SEQ ID NO: 46960 - DNA, 622 bp, Homo sapiens
tcacaatgggaaaaattaaataaatctataatcctattacactttgagagagtataaaacagtacaacctttttggaggtaaagaggcaatttctatacagatatcagataaagaaataccacggctgggattttccctgcagatttcatgtatgtatgtatgtatgtatgtatgtacatacatacatacatgtatgtawgtatgtatgtatttttgagacagagtctgagtctatcgcccaggctggagtgcagtagcgcaatctgggctcactgcaacatctgcctcccaggtttaagaaattctctgcttaagcctcctgaatagctgggcttacaggcacgtgccaccatgcccagctaatttttttgtatttttagtagagtcaggtttcaccatcttggcaaggctagtctggaactcctgaacttgtgatccacccgcctcggcctcccaaagtgctgggattacaggtgtgagctaccgcacccggcctcatttatgtatttaacaaatattaatgaacacttactatgtgaccttttctatgttaaataccagggatatagcagtgaccaagacaaagtccttgcccttacagtgcaatctaaaatgtagtgt

SEQ ID NO: 46961 - DNA, 606 bp, Homo sapiens
atttaaaagtgtttggaatataacaagcatgacacttcttttaagtctcttctgttttatctaaaattaatgtgaatttctcattctgtttcagaaacatcagtgcttgttttaatataaaacatttttcttccatgttctttgagtaaagttgatgctactagatacattgtttttgatcttgacctgcttgagaaacacgtacaggttgaatataccttctccgaagtgcttatractagaaagtgttttggattttgggtttctttttttcttttttttttttcggattttggcatatttgcactatacttaccagttgagcattcctaattttttaatctgaaattcagaatgcttcagtgagcgtttcctttttttttttttttgagacggagtcttgctttgtcgcccaggctggggtgcagtggcgcgcccaggctggagtgcagtggcacgatctcagctcactgcaagctccacctcccaggttcatgccattctcttgcctcagcctccctaggagctgggactgcaggcgcccgctaccatgcctggctaattttttgtgtgtgtgtttttagtagagacggggtttcactgtgt

SEQ ID NO: 46962 - DNA, 584 bp, Homo sapiens
tgggttctttttagcctgatttactgctctataaaaagaaaccctttttgcctaacccttgagaggcttgcagaccttatgttcacagggttcaccatattgcaataacaaggaggtaacactccccaccccaagctgcaataatcctttgaataaaatctctccttactaggtccaggtttttcatttgtttatttgtttgttttcaatttgacagtgggtatcttgatgtccattctgtggaagtggaaattaaggtttgacgtgtatcttggtctggttgtcaggttcatgggcagtggcagaagttgaattcaaactcaagtcctcttagactttagtcctggractctccatactgccatgtggattccttctcaatgcatgggcaaaagacttcacttctgtaagcagaggaggttggaagagaagttcctctcagttccacctgatttagggatgagactgagagggccaaaagctccaggttactgcccaaaatagctgcgttaaatgggaagcccagatatttgggcacctggggtcttcctaagtggggctgtcttggtagaaaatattcctat

SEQ ID NO: 46963 - DNA, 1943 bp, Homo sapiens
atgcattccagacaacttgtacttatggcttaaggcgaatgagccagggacttcagcgatccttcggatgatggcctagagatacttatctgggctgtctgtgcctcgcacccactccataaacttttgggttttttcatcctctagcacatgccccacatactccctactgaccacaaaataggcactgcctgaaaaaatgggtgcttccagcggaggatgccctttgacagtccccacatgtgtcagctttccattaatatctgcataccactttttccacctttcttctttattggatggcatcctcttggctttgagactgtcttcacccattaacaacttgagcttcctaacaattttaggttggttttaataggaaaatccatactacaaacatgtattaagtacttccagtctgcactcactgtgcagaggtccctcatgcagttgaggtcagccagaacccgactccacaaggcataaaccagactctccaactgacaggccacaaagatgttactgaaatgacccaatgcccatcactgcagctaaaaaggaatctgctgattttttttgtccacatgaatgcaatagaaattctgaggcatatagatggctctctggagcctgtcaagcgtttcagttttataatgaaccagtatagaatatgctattggaaacctcacctcttccttcttaaggggttctacaatatatctacatctcttgatgaaagaagtacatgaagaagtacataactggtcatgtttataaagccgtcaggtatacaccaagggcacttagtaaatttcactgttagcatctcaagttttaccttttggatttcatctacatcccccccgtaaaactttggtgcaattaatatgactactaggattctctccaacaagctccacatatgtgacgcttacagatttggacttttgatgaatccttaaaacggaggtgactagggaaaaaataagaaccacaaagtggtatttagtgggataagaaaaatgtctccacagcaactgcctcagcatttcaaatgccaatcagggactttgcttggttaagggcagtcttctaggctttaagcaccaactatttcccctccattgtgccttgagggttgtcagtttgcatttatcagaagctcaaaggcaccttgaaatgaagaatgccgcatttagaattaaggaaagtccagatcacttaggactctgattccaggtgacatcctgcacttattccaagtacttttcatgctgtcaggcatcttaaatgtactaggcatccaggaataatggtatgtcccataggcttttgaaaaaatctctccctgggtggcttgcaatgctcagctggatttgcaggtgcctcatccaccctggagcatcatctggccccagagcacagcagkttgccctaccatgcagcttctgctagcagaagccatgcaggactgctccctttgcccatttttaatggcattatttgtttacttactattgagttgtttgagttccttatatgtactggatattaatcccttatcagatgtatggtttgaacatattttcttccattctgtaggttgtctcttaactgtgttcattgtttcctttgctgtgcagaagctttttagtttgatgtaattctgtttgtctattttttgcttttgttgccggtgctttgggggtcatatccgaaaaaaatcattgcccagactaatgtcataagctttttccctatgttttccaatagaagtttttcagtttaatccattttgtgttgattttagtatatggtgtgagataaggatctaatttcatgcttctgcatgtaaatatccagtttttcccaaaccacttattgaagagactatcctttccccattgtgtgttcttggcacttttgttgaaaatcaattgatg

SEQ ID NO: 46964 - DNA, 1943 bp, Homo sapiens
atgcattccagacaacttgtacttatggcttaaggcgaatgagccagggacttcagcgatccttcggatgatggcctagagatacttatctgggctgtctgtgcctcgcacccactccataaacttttgggttttttcatcctctagcacatgccccacatactccctactgaccacaaaataggcactgcctgaaaaaatgggtgcttccagcggaggatgccctttgacagtccccacatgtgtcagctttccattaatatctgcataccactttttccacctttcttctttattggatggcatcctcttggctttgagactgtcttcacccattaacaacttgagcttcctaacaattttaggttggttttaataggaaaatccatactacaaacatgtattaagtacttccagtctgcactcactgtgcagaggtccctcatgcagttgaggtcagccagaacccgactccacaaggcataaaccagactctccaactgacaggccacaaagatgttactgaaatgacccaatgcccatcactgcagctaaaaaggaatctgctgattttttttgtccacatgaatgcaatagaaattctgaggcatatagatggctctctggagcctgtcaagcgtttcagttttataatgaaccagtatagaatatgctattggaaacctcacctcttccttcttaaggggttctacaatatatctacatctcttgatgaaagaagtacatgaagaagtacataactggtcatgtttataaagccgtcaggtatacaccaagggcacttagtaaatttcactgttagcatctcaagttttaccttttggatttcatctacatcccccccgtaaaactttggtgcaattaatatgactactaggattctctccaacaagctccacatatgtgacgcttacagatttggacttttgatgaatccttaaaacggaggtgactagggaaaaaataagaaccacaaagtggtatttagtgggataagaaaaatgtctccacagcaactgcctcagcatttcaaatgccaatcagggactttgcttggttaagggcagtcttctaggctttaagcaccaactatttcccctccattgtgccttgagggttgtcagtttgcatttatcagaagctcaaaggcaccttgaaatgaagaatgccgcatttagaattaaggaaagtccagatcacttaggactctgattccaggtgacatcctgcacttattccaagtacttttcatgctgtcaggcatcttaaatgtactaggcatccaggaataatggtatgtcccataggcttttgaaaaaatctctccctgggtggcttgcaatgctcagctggatttgcaggtgcctcatccaccctggagcatcatctggccccagagcacagcagtttgccctaccatgcagcttctgctagcagaagccatgcaggactgctccctttgcccatttttaatggcattatttgtttacttactattgagttgtttgagttccttatatgtactggatattaatcccttatcagatgtatggtttgaacatattttcttccattctgtaggttgtctcttaactgtgttcattgtttcctttgctgtgcagaagctttttagtttgatgtaattctgtttgtctattttttgcttttgttgccggtgctttgggggtcatatccgaaaaaaatcattgcccagactaatgtcataagctttttccctatgttttccratagaagtttttcagtttaatccattttgtgttgattttagtatatggtgtgagataaggatctaatttcatgcttctgcatgtaaatatccagtttttcccaaaccacttattgaagagactatcctttccccattgtgtgttcttggcacttttgttgaaaatcaattgatg

SEQ ID NO: 46965 - DNA, 548 bp, Homo sapiens
ccatcccagtgttccttgacgcctcaccaggaagcagaggcgtgattatgcaaatcacgctgctcctgcacctctgccagcctgcttatctcccaagccttctgcctgctgctcctggctccctgcgcaagtgcgtgcctctccctcttatctcccaacaaagctctgagaggcaaggattgaggccagcgatgttaaacaatgatgcatggctgattttatttgtaagtgatttatttcactggatttaattttttttcactttgtgtataagatatttgttaacaagtcagaataggagaagtaaggcagtgttcagagacaattgacacaggttagaaatctattaagcactctaacagtttcatttaaagcagtggaagaagaaggaagctcctcactgagaatctcaacatgcattggctaaatatcccatttattctctgaaaggcaattaatctgtaattatatgcagaaatttacaagtaataattctattatttgaaagaaacacacagtaatcayataatctgtttaagtggcaatac

SEQ ID NO: 46966 - DNA, 558 bp, Homo sapiens
tgactcatcaactataacaaatgtaccacactattgcaagatgttaaaagtgagggaaattggggtagaggctgaggaagacatgtgaatgcttattcacttctttttgcaaacctaaaattgcttttaaaaagtcaattaataaaaattaaaacaaggcagggttttcatgcaatggaaaaaaacacacaattttagtaagtgactgataattatgcttatgccactttgctagattacatttcattaataaatatagtttcattctttatgttataaagcagaataaaatcagatatctagagaaattgattagagtaaaagcattttcacctctcaagtcagaatgagctctttagaatcagcccattttatagctaaatcaatcattgtttgatttwaaaaaaaattgagaaaaacattaacttcactttttccacgaaactcaatgtcatgacagcattgtgagtcacctcaatgtaggattaaaagctatttctggacccaatagacttactgtgctacattctgaaaatgtaagacattaaagtccagtct

SEQ ID NO: 46967 - DNA, 1225 bp, Homo sapiens
ggacgaatgggcacaagccccaggcgctggtgtctcaacctatgtggcggtgcctggccaggcaactggccactcctgccagctggatggggccagagagtgcttggagggagagcaaagaggagccagcagctgcatccttctgcagggccgggtccaggtctgctttactgcctggagagggagaccctctcagagcatcctctcctgtcatgagctacagacggatgcacagacacattccccaggccctgggctcagggcatcccatgctggccccttcctcttttatgccactctgccagcagacaggtgtgggcttgtgctgatggccacttccttcatcacctgtgcaccctcatcacccacacaccgtcaacaccaggctctgttcttgacacctccctctcccaaggtcacaggtctgccagacacgggcctcctggagcccaccccacttgtttcaggtctcccacccccacccccaccctcacccccaccagggtttagctcctaccttccctttcctggacaacctcaacactgagtcttggttctcttcctcttaccggttttcctgcagaacaggaagtttccaaaatgcaaatgtggtctagtctctcctttgcctcaaaccctctaatgctgcccccttcctgggcgtgggagagggcggaggcaagagcctcttttgtctgtaccatggctctttctagcttccttcctcgaatgttctcttattctggagtcctgggttctgaggatctccctctggctccttgtagagtgtctacatggcttaattagtagtagaactatgcagtaattaccttgtcagcttcttcagggttattaaaaacataaaagctagatgcttaaaaaatactgagtttaagaactcagagcttttttttgattatgaaagcattgcctgttcattatagaaaayggatgctttaaaattccttttcctagctgggcatggtggtcacacctgtaatcccagcagtttgagaggcctaggtgggcagattgcttgagcccaggagtttgagaccagcctaggcaacacagtgaaaccctgtctctataaaaaatacaaaaagttagctggttgtgatggtgtgctcctgtcgtcccagctacttggggggctgagccgggaggatcgcttgagctggggaagcagaggttgcatggagctgacatcatgcctctgcactcc

SEQ ID NO: 46968 - DNA, 1809 bp, Homo sapiens
aaaatagagatagatggagatacagagatacatatttccttgtatgccttaaatacaaaatacacattgttttaaaattcacttgagctattcacttaatgtgaccacttagtaaaccagaagaaaatttctacaattttcaaaatgcaaaattcacaaaaatcacatttacttcccacaaacaatacaattagaaataaaacaaaagtaaattttaaaaamctttgtccacttgaaaaatttaaaactgtcttttaaatagctcttgtgttcaagagtcaatcaaagtagaagttaaaattgaaaacaaatttctatgactaccctacatattaaatccaataaacagggaaaaaagataggtagagcatcaatacatttgtggaaatgcaagaaagctttaaaataattgaacaaaaatttcttacttaataaactaggagaataccaatgaaagaaacacaaagatggtataacacaaatagtaaagaaaaatgagggcagaaattaatgaattaattagagttgattaagaaataaaaagctgatcttaaataatacgtataaataaatggtttggcaaagcttatcaagaaaaaaaagagaccacaaatgtacactattaagaacaagaaaagcataaatgcttatagaacagaattttgttttcatttatttttaattgtaatatacatgatatggaattttataccaataaagttgaatgtctaaatgagaaatatgatttttttaaatgttcataaaaattcagctcaagaaaaattggaaacttgagcagtaatatagaagaaagtgaaaacattgctgcattcacctaaaataggagcatcagcccgaggtgttcaacagtgaggactaccaatcagtcctttgctttccaataaactgcgttagagcaggaaaaagaggaaaatgtccccagttaattaagaacagcatgactatggttccaagaatgacataaaagcaaaagttacaggctaatctcacttgaaaagacagaatgtactaactgaattatgataaagtatgaaaagattcgatctagctataccatgtataatgaaggaacaacacatcatgaactgtaggttttatatgagaaatgtaacaatcgttgaacatcaaaaaagttgttaatgtaattaataagacttacaaataaaagagaaaagtatttcaaaaagactaataaagtttaaagtacatttaaaacaatagaacagttcactaaggcctggctaaggagaattctctagcttgataaatggtacataaaaaagccttagcagacatataaattaatgttaaaattatagaatctttaccattacatgcagaatagacactgttattgtttgaatttttgtggaagacatacttttcttataattaaaataaatttttaaaacctgatttataaaattattacagaatagaaaaagtaaaaaggcaccaatattaacattgattgctttcctttctgttaccatggttagaatagggtaattgtttacttgattattaagaataaaagactttaataactgtaagtcaatacttttccattatttaaaacaagcaacattaaataattgaattttaaaatagccatattaaatttttatgtttgagaaaattacaaaattggaaataagagtgtccaagtttacccattaataataatagatattttctctacccatatgtgctaatctctggaggagagaagaaaatgaggaatataaagtagattaaaaaattgaggcatggagagattacacaaca

SEQ ID NO: 46969 - DNA, 1809 bp, Homo sapiens
aaaatagagatagatggagatacagagatacatatttccttgtatgccttaaatacaaaatacacattgttttaaaattcacttgagctattcacttaatgtgaccacttagtaaaccagaagaaaatttctacaattttcaaaatgcaaaattcacaaaaatcacatttacttcccacaaacaatacaattagaaataaaacaaaagtaaattttaaaaacctttgtccacttgaaaaatttaaaactgtcttttaaatagctcttgtgttcaagagtcaatcaaagtagaagttaaaattgaaaacaaatttctatgactaccctacatattaaatccaayaaacagggaaaaaagataggtagagcatcaatacatttgtggaaatgcaagaaagctttaaaataattgaacaaaaatttcttacttaataaactaggagaataccaatgaaagaaacacaaagatggtataacacaaatagtaaagaaaaatgagggcagaaattaatgaattaattagagttgattaagaaataaaaagctgatcttaaataatacgtataaataaatggtttggcaaagcttatcaagaaaaaaaagagaccacaaatgtacactattaagaacaagaaaagcataaatgcttatagaacagaattttgttttcatttatttttaattgtaatatacatgatatggaattttataccaataaagttgaatgtctaaatgagaaatatgatttttttaaatgttcataaaaattcagctcaagaaaaattggaaacttgagcagtaatatagaagaaagtgaaaacattgctgcattcacctaaaataggagcatcagcccgaggtgttcaacagtgaggactaccaatcagtcctttgctttccaataaactgcgttagagcaggaaaaagaggaaaatgtccccagttaattaagaacagcatgactatggttccaagaatgacataaaagcaaaagttacaggctaatctcacttgaaaagacagaatgtactaactgaattatgataaagtatgaaaagattcgatctagctataccatgtataatgaaggaacaacacatcatgaactgtaggttttatatgagaaatgtaacaatcgttgaacatcaaaaaagttgttaatgtaattaataagacttacaaataaaagagaaaagtatttcaaaaagactaataaagtttaaagtacatttaaaacaatagaacagttcactaaggcctggctaaggagaattctctagcttgataaatggtacataaaaaagccttagcagacatataaattaatgttaaaattatagaatctttaccattacatgcagaatagacactgttattgtttgaatttttgtggaagacatacttttcttataattaaaataaatttttaaaacctgatttataaaattattacagaatagaaaaagtaaaaaggcaccaatattaacattgattgctttcctttctgttaccatggttagaatagggtaattgtttacttgattattaagaataaaagactttaataactgtaagtcaatacttttccattatttaaaacaagcaacattaaataattgaattttaaaatagccatattaaatttttatgtttgagaaaattacaaaattggaaataagagtgtccaagtttacccattaataataatagatattttctctacccatatgtgctaatctctggaggagagaagaaaatgaggaatataaagtagattaaaaaattgaggcatggagagattacacaaca

SEQ ID NO: 46970 - DNA, 1809 bp, Homo sapiens
aaaatagagatagatggagatacagagatacatatttccttgtatgccttaaatacaaaatacacattgttttaaaattcacttgagctattcacttaatgtgaccacttagtaaaccagaagaaaatttctacaattttcaaaatgcaaaattcacaaaaatcacatttacttcccacaaacaatacaattagaaataaaacaaaagtaaattttaaaaacctttgtccacttgaaaaatttaaaactgtcttttaaatagctcttgtgttcaagagtcaatcaaagtagaagttaaaattgaaaacaaatttctatgactaccctacatattaaatccaataaacagggaaaaaagataggtagagcatcaatacatttgtggaaatgcaagaaagctttaaaataattgaacaaaaatttcttacttaataaactaggagaataccaatgaaagaaacacaaagatggtataacacaaatagtaaagaaaaatgaggrcagaaattaatgaattaattagagttgattaagaaataaaaagctgatcttaaataatacgtataaataaatggtttggcaaagcttatcaagaaaaaaaagagaccacaaatgtacactattaagaacaagaaaagcataaatgcttatagaacagaattttgttttcatttatttttaattgtaatatacatgatatggaattttataccaataaagttgaatgtctaaatgagaaatatgatttttttaaatgttcataaaaattcagctcaagaaaaattggaaacttgagcagtaatatagaagaaagtgaaaacattgctgcattcacctaaaataggagcatcagcccgaggtgttcaacagtgaggactaccaatcagtcctttgctttccaataaactgcgttagagcaggaaaaagaggaaaatgtccccagttaattaagaacagcatgactatggttccaagaatgacataaaagcaaaagttacaggctaatctcacttgaaaagacagaatgtactaactgaattatgataaagtatgaaaagattcgatctagctataccatgtataatgaaggaacaacacatcatgaactgtaggttttatatgagaaatgtaacaatcgttgaacatcaaaaaagttgttaatgtaattaataagacttacaaataaaagagaaaagtatttcaaaaagactaataaagtttaaagtacatttaaaacaatagaacagttcactaaggcctggctaaggagaattctctagcttgataaatggtacataaaaaagccttagcagacatataaattaatgttaaaattatagaatctttaccattacatgcagaatagacactgttattgtttgaatttttgtggaagacatacttttcttataattaaaataaatttttaaaacctgatttataaaattattacagaatagaaaaagtaaaaaggcaccaatattaacattgattgctttcctttctgttaccatggttagaatagggtaattgtttacttgattattaagaataaaagactttaataactgtaagtcaatacttttccattatttaaaacaagcaacattaaataattgaattttaaaatagccatattaaatttttatgtttgagaaaattacaaaattggaaataagagtgtccaagtttacccattaataataatagatattttctctacccatatgtgctaatctctggaggagagaagaaaatgaggaatataaagtagattaaaaaattgaggcatggagagattacacaaca

SEQ ID NO: 46971 - DNA, 544 bp, Homo sapiens
gaaatgccaatcagagggaataaaaatccacaatcgtttttaattggctgaagaaaatgaaatatactagtagattacaaatgatattatagtatttctccttgcccactaccagatttcctctctcaaaatgcaaccatttacattttaaaccacatattaacatcaaatctgtgctcccaagctacccatgctcactgtggaagagayaattaatgttcattgcatttaccagcctctcttgcagttaggcggaaatcatgtgactgagtcctcaccaatggggatgtgagttgaagtggtgtgccctgctggtccaaggcatttaaaagtgtttgtgtagtcaagcaaatgaaatggcaaagataagcaaatacatttaaaaaaagtaaaaaaataaaaattaacaaaaattaaaagtatttgtgaagcccagcatggtggctcacacctgtaatcctagcactttggtaggctgaggcaagcagatcgcttgacatcaggagctcaagaccagcctgtgcaagacagtgggatgccatct

SEQ ID NO: 46972 - DNA, 592 bp, Homo sapiens
tcagatgttctacattattatttgatatagtgtagaaaaaggaaatgttgaaactaaaaaatgagcacatgttggtcatcagttgggstgtaggctttgttcatttatttgttaacccagcaaataattgagtggccaagcattgtattggatgcttgagaagttaaggaaaagaccttgccctcctccagttgaaagctcgggtgcagtggtccaggaggcaggaaggcatggaaaccgcatgtgcgtggtatactgtctgcgactccctgggccccatctggtggctaagagggatccagctaaaaagcttcatcaggaaggttagtctcaaggcttttgaagatggtagggcatgtgattttacaaaaagatggctgtgaggggtggggaagcaagccaaggaaactaaatagacctctttgggagggtgaatgtttcctaagtctttgattcaaacttggctaagggcaaaggacaagggaaatcccataattttgagaaagggaatgatgtaaatataatgtgatggtagttttacatcttttaaatgactttatcttttaggctgggaaagagtaaatgcaggtca

SEQ ID NO: 46973 - DNA, 524 bp, Homo sapiens
aaactttcaatatatttatttaaagtctttacaaaagtaaagtaaaaaatttaagcaattaattgattaaaaaaatctgttagcattttagttactaatccaattcaaaggaaatagactacagtacaaattggccaacttttctaggtaataggataaaaggcataaaaataagtaaaatcaatgctaacagaaaaatataaattggatatattctataaagatttaaaaaagtatattaaaatgatgtagtaaaaaatgctatattgataatttagcaaatttagtgttttatatctccagttgtgtaattatgattaatattaaaggagattttcttgaggcaattcattaagcagaactgaaaaaagaccaaattacatttccyatgatgggcagaaagtaacaatagcatacagaaatattttcagcatttttaaaaataaaatcagtttatgtaggccagtatattctcagtaacttataatttcagacacttttacatacaggaaaaatccttggcc

SEQ ID NO: 46974 - DNA, 422 bp, Homo sapiens
gatggagatcagaaaatgtcctagttttcagacatgggaagaagtttagactcttcagtccacaaaacagaatatttgatactgatactgaaaaaactctgaaatatattgtcatgatgagaccatcatgggaagaggccatcactaaagtcagaacaagatgaataatagagagggaagaggccatcactaaagtcagaatgagatgaataatagctcccttgccagatctcacttccttttgatagggcctctgagctgccagattaagatggtctcttgatgactstgcagctgggtgggagggcaaatacgttggaacccaaaataacttgacaggatggaacaatggaccaaatctaacaggataaaaagtaaaagggagatatataaaggttgccctcagttccagaaaattagca

SEQ ID NO: 46975 - DNA, 558 bp, Homo sapiens
tagaattctcctttctggacttctcatatgttattcaagtaggaagagatgtaatcttggtcaatctctgttgtctaattcattcagtatttttctgtcctttactgtgatgacacccttccaacatttgtgattacatcagaaatgatattgctgatttgtttgtctccatttgcagacattgtgtaaatggagaaatctcttcaggagttgtcacaggtttaggctgcttcttaagtttggtaattacagtatcagcacataacatcacacctttcctggtttccactggattaacacctttgctaatctctaccaagccttccatggtgayggagcatgccagtacagtagcaatggtggtgccaccccaccctcttcatttgtgtgttggcaacatcctgatcaaatctggtgccaacatttatcttgtaagtcaattgacccgcaacagacacatcatcttctgttactttgaggcttccctatctctgttcaggaatcactgttcttccctttggcatcatagtaatggctacagcacctgctagaaggtct

SEQ ID NO: 46976 - DNA, 1676 bp, Homo sapiens
tcaatatttttaaaatgtacacctcttaatccagtaatttcacttccaagaattcatcttatggataaacatttgtttatctagcatggtttttcataatggaaatctggaagcaaccaatttaataagtatggccatttgataaaacactctatggatgataaaaaaactattctgtaaaagattggtttcttatttacctgagaaattattaatttggggaaaataagtactaaaaagcaaagttttaaaaggaggctacaaaaatagaatgaccatcagcaaytgatccagcaatttcacttctgggtgtatacccaaaagaattaaaggtagggtcttgaggagataatttgtccacacatgtttatagcaaccaacaataaaaacaacccaaatgtccatccatagatgaatggatgaacaaaatgaggtacatacatacaatggaatttaattcagccttataaaggaaggaaattctgatacgtgctaccacatggttggaccttgagaacattatgctaagtgaaataagccagctacaaagaagacaaataccgtattagtccacgtgcatgaggcatctagagcagtggaattcctagaggcggaaggtagaacagcgatcgctcgcagcggggagagggaggaatgcagagacactgtttaatgtgtgtacaggttcagttttgcaagatgaaagagctctggggatcgggtgcacaacaatgggaatgtacataacactgctgaactgtacacttaaagatgggtaaggcccagcgcggtggctcacgcctttaatcccagcactttgggaggccgaggcaggtggatcatgaggtcaggagttcaagaccagcctggccaagatggtgaaaccccatctctactaaaagtacaaaaattagccaggcatggtggcaggcacctgtaatcccaactactcaggaggctgaggcaggagaatctcttgaactcgggggggcagaggttgcagtgagctgagatcacgccagtgcagcactccagctggggtgacagtgagattctgtctcagaataaaaaaaaaaagggtaagatggtgtattttatatctattttactataatttaaattttttttaatttacaaagataatgaagagttaatgaggcagataggaaggagtgttttaggccccccaaaaaatgatgttaaaaaatatggcagcacggaagagcatggtacattccgggaactggataggagtttttacggctggatgtgccagacaagattgggactttatctagagaagcagcattgagttgatttgcttaaggtcactcatgaaattgtgggcagaacaccgacaggatcactcagacctgattcccagcttggaaggtgtatgtctgtgtagacatgtgatgtatgtttaacaatcatcataaatgggaaacatctaaataaaacgccggtatcacaacatttaacatttgacgcattaactgagttgtaacatacatcttcccgggggtaaatatcccttgtatagatccttaattttctgtcattatcatgcaccaagcctttttgaagctataaaataaatgtaaattccttaaaaaaagcagactacaaaataacatgtatgatactatttttctaagaaacatatatatatatat

SEQ ID NO: 46977 - DNA, 611 bp, Homo sapiens
atccagggaaaaagaccaaggagaattccagaatggtctagaggaagcccactggtgccatgactggccatccagcactgatgatgctaggaacagaaccatcatccccactgctccagaaaagtcaaatgcttctgctactgcacttgctgaaagatccaaccyccctgcacatgaacactgacaacattgctcacctttgcctttcaagcctcatgttggtgtctttgcgtggtggacctgtgtcacatatggaacagtagctgcaaagaatctggaaatgtaatttttagcttttcagcctctttagttcaggaaggctgtttagaagcaggttgaagtagatgttgaatgcctgactcaatggcattatcatcttttaaccctattgccctcatatccatgtatggtggaaaatgtgtttgaggtccctatactccaagttggtatcacacaacttcacatttagaaggggtctcagaaatcacctaggtaggtcagaatttttcaaactggtttgcaggtcatggaagttccttgaggggaattagagactgccacagtcatcaaggagaaaggttggggagaagagcaaacacacaagattttat

SEQ ID NO: 46978 - DNA, 628 bp, Homo sapiens
cacccttctctgctcagaatcctcctatggattttcatcacagagtcaaagtcaaagtctttctggtggtctaggccctgccacctctctaacttcagctcaccctatgcttcctcctgctcattcatagctgtttccttggttacatcaaacgaattctcacctccatgctgtttttctcccctagttttcaatgggctcttctctcgctcatctcaggtctgtgctgacacatcatcagtgaggccttccctgacttccctcatgaaatagcaacccacattctcccccaatccagccccacctaacactccatatcccccttcctgatttgttttactccacagcaacctactaccaccatctgacctgtgatccatttacttattaactatatctctgaaaagaagatacactgcatggtgccagaggctttaaaaaaattttactgctctttagcatgtcataaacattcaayaaagaattctttaaagaacaaatgagtccaactgctaacttacagatcaagaaactcagtgtcagggagccctgtgccttgtcttctgtcttgtggtgacacagtgtagaaccctgtctaaaaccttcatctccctctgcccattaccat

SEQ ID NO: 46979 - DNA, 573 bp, Homo sapiens
gtggtacccctccacattatacgcctcttacaggaaacgttccaagactcctagtgatgacactacaataagccaataagccacttccttctttggaataagcttacagcaaaagaattacatgttgtatattaaagaggatctttttactacaaaataatacttctatgtgtttcatcaagttcatcaataaaatttattatatatagtaactaaaacaaatatcacataataattgcacacgtttttragcacatgctatgtattatttatgttaactgttttacataaataatttcatttcctactctcaaaagctctgtaagattgttgttatctcgtttcatagatggggaaactgaggctgagaggataatgtcgcaggtcacagactgagtaactggccaagcggggatttaaatccaagtgtgaactattcaaaagcctgaacttataaccagtacgttattctcttacatgttggagagataaaatgcaaaaattcctcatagctattccaagtcagctgagagatacgtgtcaagtttgaatgtggttttgatatatgataca

SEQ ID NO: 46980 - DNA, 1807 bp, Homo sapiens
tttagattttcatatggacttgatgytgtccatcttcttaaaatctctatagaagagacagaaattaccaaacgagtgcacagatgaagcttgatgtataccttccactttttggacacagacctgtcatcatatccttccaaaacacattttcacctgcatgcccacactcgcacattcatcagactcatttcttgaaacattcttgatggcattcattctactttaaaccacctgtcaaaacaagcacttaattaggttaagctgtctggctttgtgaaaaggtttactgtactcagttgtccttgccataaaattaatagtttgacgaacttctaaggagacggattttgcactcgtgaaagtcaaattaaatccacctttgccaaacaggtgaaaaaactggtgtgtctgaaactttgaaggcagcacttcatttattataatctttcgagtgccaaagtacaaattaggtagaactgcagctgcaagaaagcccaagttatagcgcgctgctcttgtgacccttttaataggcaatgcaactacaagatgatgaacagagagaatgactgtaccagagttagcagtgccaaatttccgaccgaatttgcaataagcaaccaatccttcattaagttaatattccacagactcaaatattacacacactagtcactgcacatcatttctcaaccacaattctgaaaagattttccaggaactgggctcattttattattaagactccggagaataaaagctgtttaaaaaatgctttaaaatttcatttaggtcttgctaaaactgcttttgaatcaacattctttgagttgaagtagcaaaggaaataatactcaaggctgcttaatcctaaagacagagtaatttggagttttggtttgggattttgttttttcctcaacacattacaaagatgggtcttttattgacttggagataaaaatgattcatgattccaattattgtttaaggtgtgtaaagtcttaaggcctccaaggcagaactcaaaatggactgtagaattaactgagacaaagtgccttgctacttttgggatgaaaggaatcatcagaaaagttgcaaaagcactaagttttgtcttagagcttaagatagtaagaattaatttaacacaaaatattattgattactttctcttaactcttcatttttaattcagtaagtgaatataagatattaagtgactaaactgaatatggtcattgtctttaatcacagttttattgagtttactagaagtcataaaacctggtttcttgtttcttcttttagtattgttagatggacggtcataaaacagtcacttaaccctgagaagattggcataatatctcaaactgatccacaagtgaaattctgaaaggctaggcgctcaggaaagagacatcttgatggagatcatcttctcactaatacttcttaagctaataaaaaaccttttaataatgatattctaacatttcatttgctattctgaaataaaattcatgtataacacttatacaataacattcttaaaagtcaatataaggccctgttacatagaataacaataaaacaacttatgatgaaaaaatccatttcaatttgtaactgtgcaagctgactgtactaggagacataataaagtcatcagattatttttactaattttaaagagttaagtcaagaataaaagaaggaagatcatcagaagcaattctgcacaagttttacaggaaaatgaaagcagagatataggaaaatattggaattaaaccca

SEQ ID NO: 46981 - DNA, 1807 bp, Homo sapiens
tttagattttcatatggacttgatgttgtccatcttcttaaaatctctatagaagagacagaaattaccaaacgagtgcacagatgaagcttgatgtataccttccactttttggacacagacctgtcatcatatccttccaaaacacattttcacctgcatgcccacactcgcacattcatcagactcatttcttgaaacattcttgatggcattcattctactttaaaccacctgtcaaaacaagcacttaattaggttaagctgtctggctttgtgaaaaggtttactgtactcagttgtccttgccataaaattaatagtttgacgaacttctaaggagacggattttgcactcgtgaaagtcaaattaaatccacctttgccaaacaggkgaaaaaactggtgtgtctgaaactttgaaggcagcacttcatttattataatctttcgagtgccaaagtacaaattaggtagaactgcagctgcaagaaagcccaagttatagcgcgctgctcttgtgacccttttaataggcaatgcaactacaagatgatgaacagagagaatgactgtaccagagttagcagtgccaaatttccgaccgaatttgcaataagcaaccaatccttcattaagttaatattccacagactcaaatattacacacactagtcactgcacatcatttctcaaccacaattctgaaaagattttccaggaactgggctcattttattattaagactccggagaataaaagctgtttaaaaaatgctttaaaatttcatttaggtcttgctaaaactgcttttgaatcaacattctttgagttgaagtagcaaaggaaataatactcaaggctgcttaatcctaaagacagagtaatttggagttttggtttgggattttgttttttcctcaacacattacaaagatgggtcttttattgacttggagataaaaatgattcatgattccaattattgtttaaggtgtgtaaagtcttaaggcctccaaggcagaactcaaaatggactgtagaattaactgagacaaagtgccttgctacttttgggatgaaaggaatcatcagaaaagttgcaaaagcactaagttttgtcttagagcttaagatagtaagaattaatttaacacaaaatattattgattactttctcttaactcttcatttttaattcagtaagtgaatataagatattaagtgactaaactgaatatggtcattgtctttaatcacagttttattgagtttactagaagtcataaaacctggtttcttgtttcttcttttagtattgttagatggacggtcataaaacagtcacttaaccctgagaagattggcataatatctcaaactgatccacaagtgaaattctgaaaggctaggcgctcaggaaagagacatcttgatggagatcatcttctcactaatacttcttaagctaataaaaaaccttttaataatgatattctaacatttcatttgctattctgaaataaaattcatgtataacacttatacaataacattcttaaaagtcaatataaggccctgttacatagaataacaataaaacaacttatgatgaaaaaatccatttcaatttgtaactgtgcaagctgactgtactaggagacataataaagtcatcagattatttttactaattttaaagagttaagtcaagaataaaagaaggaagatcatcagaagcaattctgcacaagttttacaggaaaatgaaagcagagatataggaaaatattggaattaaaccca

SEQ ID NO: 46982 - DNA, 626 bp, Homo sapiens
tatggtgtgaattttattatcttatttttatttaaagtttctataaaatctgtagagaagcaaagaacatggaaagttaggacgtgtatgtgtcaagatgtgggtataaatgcatgatggyctctcacttttatagcacagtatcattgcctcaatccaatcctgtactgagtatgctatgttggccgaagtttttaacagccatgaagagagaggttacttgacttcttgatcattggaaagtccactcaaggtctggatatggcaacacaccatcttgatgttgagaaccactggtaatgagattggcctcccagagaactgctgctagggtggaaccctggaagctacagtcaggtcctgcaaggagcagttaggagaactccctctccacccatcctcttgtgtattaatctccaaccttcagtaggttcacgggtgtctgcccacggtgtggcaggcttaggagctacaaagcagtcaggttccctctcccaccactctttaatcatgaagccgttttttcaaagagtgttctataaatattagctttttcatgatgccctgcaggaaacattctctagacaatcaattttttgctggtttctggactggatactgaggat

SEQ ID NO: 46983 - DNA, 1563 bp, Homo sapiens
ttaccaaattcaggaaatttaacattgatgcaatactttaatctgttgcccrtatttcagtttttccaattatcccaataatgtcatttacagcattttttttcagttaagcatccaactgaggatcatttattgaattgagttgtcacttctgtttagagactccttcactctgaaatgtatccttagcttttgttgccttttaagacctttacgtttttagagcatgcaggccaatcatttttgtagagtgaccctcagtttaggtttgtctgatgctcctcacagtagattcatgttttgcacccgtggcaggaatgccccagagtgatgcggtggcctcctcagtcccagatatcaggaggcacatgtggcaggtttgttttattcctggtgacaccagctccaatagtttagttaagatggtggtgtccaccaagtttctctgcagtgggagaattttaagagttgtggtttgtctaaaactgagagatgaatcaaactgggagggtatttagactttgctggatgatggccccaaagctgctctgaaaatgctgtgcagctgggtgagccggcctgctctctgaactgcaaggcgttttcgtgggacaagaaagggcagcatcagcagcctgttctgtggctggggctgcaaaagccatcagtgtcgtcatgtctggcgtggggcatgctggtgcacaaagagccgaaccaagctccacagcaggaactgacaccaagccaggccccaaggaggcctgtgagtgtggccagttccctgctttggtgacgtgatatttatgcaccacggctcttctgaggtttctccaactttcccatataaaatgaagatggcctttcttctgagccagggctgcccaagtggcaggccacaaaccacgcatcgcctgacccaggctggggcagcagcgtctcggagaaaaacaggaaattgggacatacgcgctttccaccgcctggctacgttatgagtttcttagtggttccatgtggcttgagtaacagggtaattttccttaatgcagtaaaatacccaaaggaatgaagatgtattttattggacaacgttttattttagtaaattatttagtgtccagcactgtttgaagtactcttacagattcgctcctgaattcataccacacactttcactgggccaggaaacacgtgaaatgagcagggcaggtcttagggtttcatccgggttttatgatatgctgggcagaccgtgaacattcgacaacaggccgtgctccatcctgtaggggcacacagcctatgtgagataaacagacagctataatcatgatgttgtggaggctgtcagagggaccttggggacccagaaaggggaagggctgataatgggaataggtaatgaagggaagctagcacagagatgatctctgacctaagtcttgagggataaaaaggtgttcactagctgggcatgctggctcacacctgtaatcccagcactttgagaggccaaggggggtggatcacctaaggtcaggagttcaagaccaacctggcca

SEQ ID NO: 46984 - DNA, 1563 bp, Homo sapiens
ttaccaaattcaggaaatttaacattgatgcaatactttaatctgttgcccatatttcagtttttccaattatcccaataatgtcatttacagcattttttttcagttaagcatccaactgaggatcatttattgaattgagttgtcacttctgtttagagactccttcactctgaaatgtatccttagcttttgttgccttttaagacctttacgtttttagagcatgcaggccaatcatttttgtagagtgaccctcagtttaggtttgtctgatgctcctcacagtagattcatgttttgcacccgtggcaggaatgccccagagtgatgcggtggcctcctcagtcccrgatatcaggaggcacatgtggcaggtttgttttattcctggtgacaccagctccaatagtttagttaagatggtggtgtccaccaagtttctctgcagtgggagaattttaagagttgtggtttgtctaaaactgagagatgaatcaaactgggagggtatttagactttgctggatgatggccccaaagctgctctgaaaatgctgtgcagctgggtgagccggcctgctctctgaactgcaaggcgttttcgtgggacaagaaagggcagcatcagcagcctgttctgtggctggggctgcaaaagccatcagtgtcgtcatgtctggcgtggggcatgctggtgcacaaagagccgaaccaagctccacagcaggaactgacaccaagccaggccccaaggaggcctgtgagtgtggccagttccctgctttggtgacgtgatatttatgcaccacggctcttctgaggtttctccaactttcccatataaaatgaagatggcctttcttctgagccagggctgcccaagtggcaggccacaaaccacgcatcgcctgacccaggctggggcagcagcgtctcggagaaaaacaggaaattgggacatacgcgctttccaccgcctggctacgttatgagtttcttagtggttccatgtggcttgagtaacagggtaattttccttaatgcagtaaaatacccaaaggaatgaagatgtattttattggacaacgttttattttagtaaattatttagtgtccagcactgtttgaagtactcttacagattcgctcctgaattcataccacacactttcactgggccaggaaacacgtgaaatgagcagggcaggtcttagggtttcatccgggttttatgatatgctgggcagaccgtgaacattcgacaacaggccgtgctccatcctgtaggggcacacagcctatgtgagataaacagacagctataatcatgatgttgtggaggctgtcagagggaccttggggacccagaaaggggaagggctgataatgggaataggtaatgaagggaagctagcacagagatgatctctgacctaagtcttgagggataaaaaggtgttcactagctgggcatgctggctcacacctgtaatcccagcactttgagaggccaaggggggtggatcacctaaggtcaggagttcaagaccaacctggcca

SEQ ID NO: 46985 - DNA, 584 bp, Homo sapiens
cacgttgccttccagttctctgtgtgaccttgggcaagtcacttcagctccctgagctttgtttttaaaaatattttttaaatgtataaaaccatggaccattacatatgaagagaaatgtgtgtgcaaacattcagttaataatcacaaggtggaggagtgcctgctcagacccagagctgacacagggaactctcccagaaggctgcagggcttccctcccaaccctccaacggcccasttgctgagcccgtgcttatctgttcagtggaaatgccatgtgccacgttcctcagaagtaaagccactaggtaagtgtgacactctgtgcccagcttggtgcaaagcctcttgtgtgtgctatcttattgacctcccaaatagcatggtaaggtcagtactgtcacttcccccactttgaagatgaggagagcacaaattctagatggaaatggaggtcacgcagtggaaataggatccagacagattaatccaatctcaagcctgaattcttccattccacgctacgcttgaagctcaatctctcttcctggttgattctccccacttccccacccccagat

SEQ ID NO: 46986 - DNA, 584 bp, Homo sapiens
cacgttgccttccagttctctgtgtgaccttgggcaagtcacttcagctccctgagctttgtttttaaaaatattttttaaatgtataaaaccatggaccattacatatgaagagaaatgtgtgtgcaaacattcagttaataatcacaaggtggaggagtgcctgctcagacccagagctgacacagggaactctcccagaaggctgcagggcttccctcccaaccctccaacggcccagttgctgagcccgtgcttatctgttcagtggaaatgccatgtgccacgttcctcagaagtaaagccactaggtaagtgtgacactctgtgcccagcttggtgcaaagccycttgtgtgtgctatcttattgacctcccaaatagcatggtaaggtcagtactgtcacttcccccactttgaagatgaggagagcacaaattctagatggaaatggaggtcacgcagtggaaataggatccagacagattaatccaatctcaagcctgaattcttccattccacgctacgcttgaagctcaatctctcttcctggttgattctccccacttccccacccccagat

SEQ ID NO: 46987 - DNA, 575 bp, Homo sapiens
tgcatttttaaatttaatttccaaatattaatcaagttagaggttatatccccattttacatttgaagaagaaacccagaaagattaagtaacttgttcaaggttgtattagtgacaaagctcagattgaatcctcattggttcaaggatgacttcaaaaacgttttcttttttaggaatattgaacagccttctgactcaagatggtagtgtaagctcaactatttattttctatccctctcaaggctctgttaaaaaaatagtcaaagattagcaaaaatgwctaaacccacaacaatgggaagaatatgaaggggcctcagcagataaaatatttcaataattttctgcaagatggaaagtaggcaattaaattatagactcatgaagcgaagtagaggaaactgccaccaagttatatgcagaggcagctgtagtgaaggcggtaaccaggttttccaccacagcccccaagaaatgccagactgatgaattgtttttggaatgagaagttgggtcaaaaaaaaggcagtttgaaaagcctgtatacagaacaaactcccaattccctcat

SEQ ID NO: 46988 - DNA, 575 bp, Homo sapiens
tgcatttttaaatttaatttccaaatattaatcaagttagaggttatatccccattttacatttgaagaagaaacccagaaagattaagtaacttgttcaaggttgtattagtgacaaagctcagattgaatcctcattggttcaaggatgacttcaaaaacgttttcttttttaggaatattgaacagccttctgactcaagatggtagtgtaagctcaactatttattttctatccctctcaaggctctgttaaaaaaatagtcaaagattagcaaaaatgactaaacccacaacaatgggaagaatatgaaggggcctcagcagataaaatatttcaataattttctgcaagatggaaagtaggcaattaaattatagactcatgaagcgaagtagaggaaactgccaccaagttatatgcagaggcagctgtagtgaaggcggtaaccaggttttccaccacagcycccaagaaatgccagactgatgaattgtttttggaatgagaagttgggtcaaaaaaaaggcagtttgaaaagcctgtatacagaacaaactcccaattccctcat

SEQ ID NO: 46989 - DNA, 575 bp, Homo sapiens
tgcatttttaaatttaatttccaaatattaatcaagttagaggttatatccccattttacatttgaagaagaaacccagaaagattaagtaacttgttcaaggttgtattagtgacaaagctcagattgaatcctcattggttcaaggatgacttcaaaaacgttttcttttttaggaatattgaacagccttctgactcaagatggtagtgtaagctcaactatttattttctatccctctcaaggctctgttaaaaaaatagtcaaagattagcaaaaatgactaaacccacaacaatgggaagaatatgaaggggcctcagcagataaaatatttcaataattttctgcaagatggaaagtaggcaattaaattatagactcatgaagcgaagtagaggaaactgccaccaagttatatgcagaggcagctgtagtgaaggcggtaaccaggttttccaccacagcccccaagaaatgccagactgatgaattgttkttggaatgagaagttgggtcaaaaaaaaggcagtttgaaaagcctgtatacagaacaaactcccaattccctcat

SEQ ID NO: 46990 - DNA, 632 bp, Homo sapiens
ttgacaatataggcagataataatgttcaagttttcttggaagatcaggaaaaaaaatagtgaaatagatcatctttattcctgcattatttttgtgcagagagggatgttcccattctaccatcctctgcagcttttctctagacaggatgtctacttttctactgactaccttttccagggtaggagggtagggcagggcattggaaagaggtgagctttaggtcagttttaacaaaacacaatgttatagatacaattgaagccccttttgaagctctttgcaatctcaattccctgactcctttgccaatatgtattcttcctatattttcatacttttggtacatatgaatgtatctgtaaataatggatattaatactattaagtcttacataaatggtatcttaaatgtatccttttgcaaattacttttccattcaccattatgatttgagatttactcatatggattcatgttgttccttcacrtaacttcattgctatattctacatttattcatccatttccttacttgtgatagacaatactatggtgaatattttctgtatgtgtccccttaggcacatccatgatggtttcttcagggcagtgatactcaaagtgtga

SEQ ID NO: 46991 - DNA, 984 bp, Homo sapiens
ttttcacacagtaagtaacacatgaatcttagccgtttgttattgctttgttattgctgttgttactggcatgtgctgcaaagagcctttagggacagaggtttgggattgaggctcagtggcaattacttgttagttctctgtccttagccatgctgcttaatttctccttgttacccagtgcatgaagtaaggatgggtgaagcacttgtcttggtgtggtgcttgtgaagagagagagtggagtacctgacagagcacttggtgaatggtaatgacccaggtcagttttagtgggtaagaggatgtcactgcagcctggagggctggcatctactaaggcgtggtcttcaagggcggtgctgagaacaggcatgctcagctctgaccttgggttagggtggaggtgtgttcttctaggcccgctttctagggcctcctgagaaaggggtcaccggacttctctaggtcagttgtccctaaaagtaggtcgaggacctgcaggtagagcctggtatagyttgagtcagggacagaggtattagtgttctttcacaagtcatttttttttttttttttgaaatggggtctttgtgtcccagactggagtgcagggggacagtcatggctcactgcaacctcaacttcctgggctcaagtgatcctctcaccttagcctcccgagtagctgggaatacaggcattcaccaccatgcccagctaacttttttagaaaaattttttgtagagatggggtctttctgtgttgcccaggcttgtcttgaacacctggcctcaaatgatcctcttgtcttggcctcccaaactactggcattacagacaagagctactgcagtaggctacagttacttttgtttccaatcccaggtaatagacatcccctcactactgactcatcctcttcctgactgtttttcactagcttagccttacctacttccagaggaagacttcatccgaaa

SEQ ID NO: 46992 - DNA, 582 bp, Homo sapiens
ggggacagtgggtggagaggaaggagggagagggggagtgggttgccctgagtcagcagccccctacccagaccaggagaggggtcatgtgcccccacccaccgggcgaggtgcccaccccagcatgctccaccccaaacagagaaagaggcttggctgacactaagtaagacatattaatgtactaaagacttaatgaagttggggcgggggggtgaggggtggaaagtgattgctttattagtttatggccgattaatggggacgccattactgtgatggagatggattgctgctgtcagcagcctgggccggggcggccgccgctcctttccacgggtggtgggtgccccaaacagagtcagagagaacttcattagaagcatctacaggatcccacctgggaagggcccaaggctaagctggaaggrtggcgacagggactcagctctaggctttggaggggaattccaaggggtcaggggctgggagctgacatcagttgggatggggcagtggggctgtgcggtggcctggctctggacctgcacatgcgaggggttccatagtcacctggggaaa

SEQ ID NO: 46993 - DNA, 369 bp, Homo sapiens
ctaaaaatacaaaaattagctgggcgtggtggcgcatacctgtaatcccagctactcaggaggctgaggcaggagaactgcttgaacctgggaggtagaagttgcagtgagcctagatggagccattgcactccagcctgggcgacaagaacaaaactccatctctaaataaataaacaaaagaaccaagcctgtttctattcaccatgaattcttatttcttgataaaacacaaatccccacccacagggagaaatgaagctttaattgcctactacagggagctccactcttgctctaagggattagagactatatgtctggcctagttrtgtccatcgtggaatgtagttatgcctgtcatggtat

SEQ ID NO: 46994 - DNA, 592 bp, Homo sapiens
acttaagtgtaattcaattaacagtaaaatttatctctggtttcttcccatacagagcaatgaataaggagttggaagaatgagaggcaaataagtgacagaagcagtgatttcaagaagtccataatcacgtcagcacacatcctgccacttctaggcasggaggcagaagcgttgttggtgtgaagtaagcaaggaaacaggatcagaatgaaatgctttaggatatatcgctcaaagtaggagtcatatgatgattgaatatgcaacatcacactgcagacatacatgagatatacatgtgggatgtataatggaagggttctcaagaagaaggaaggagaaagaaaggagagccttggagtggctaaatactttatatacaaaatttatttaactcccacaacaatcctaggtattatcatgcccattttacagatggaactgaacatcagagaggttatgtaactttcccaaggtcacaagctagtaagtactagccctgatcccctgatttcctgcctgtactcactggcagtaagcctctttcatgcaccctagataggaaatgccaaaacatagggacttttca

SEQ ID NO: 46995 - DNA, 592 bp, Homo sapiens
acttaagtgtaattcaattaacagtaaaatttatctctggtttcttcccatacagagcaatgaataaggagttggaagaatgagaggcaaataagtgacagaagcagtgatttcaagaagtccataatcacgtcagcacacatcctgccacttctaggcagggaggcagaagcgttgttggtgtgaagtaagcaaggaaacaggatcagaatgraatgctttaggatatatcgctcaaagtaggagtcatatgatgattgaatatgcaacatcacactgcagacatacatgagatatacatgtgggatgtataatggaagggttctcaagaagaaggaaggagaaagaaaggagagccttggagtggctaaatactttatatacaaaatttatttaactcccacaacaatcctaggtattatcatgcccattttacagatggaactgaacatcagagaggttatgtaactttcccaaggtcacaagctagtaagtactagccctgatcccctgatttcctgcctgtactcactggcagtaagcctctttcatgcaccctagataggaaatgccaaaacatagggacttttca

SEQ ID NO: 46996 - DNA, 592 bp, Homo sapiens
acttaagtgtaattcaattaacagtaaaatttatctctggtttcttcccatacagagcaatgaataaggagttggaagaatgagaggcaaataagtgacagaagcagtgatttcaagaagtccataatcacgtcagcacacatcctgccacttctaggcagggaggcagaagcgttgttggtgtgaagtaagcaaggaaacaggatcagaatgaaatgctttaggatatatcgctcaaagtaggagwcatatgatgattgaatatgcaacatcacactgcagacatacatgagatatacatgtgggatgtataatggaagggttctcaagaagaaggaaggagaaagaaaggagagccttggagtggctaaatactttatatacaaaatttatttaactcccacaacaatcctaggtattatcatgcccattttacagatggaactgaacatcagagaggttatgtaactttcccaaggtcacaagctagtaagtactagccctgatcccctgatttcctgcctgtactcactggcagtaagcctctttcatgcaccctagataggaaatgccaaaacatagggacttttca

SEQ ID NO: 46997 - DNA, 591 bp, Homo sapiens
aaagtacctatatataggtggagaccttgtaaatattttaagaatgaatgaatgaatggcttcttcatgcaataggcaaaggctccatcccaatttgatcatctctaagtccagtcactgtgtccaggggtttgaggtactctgatgggctcatcttgagtcacgcacacacctgtgtctggtggtcgggaggaggcacagcaccagaagtagaacagaggtgaagaggagagagcaacaagtagcgtaacaagtagtgtcttaggccctgctgagwgtaaggcactcttgtttctgagctctttttggaaatatgtgggcattatgccttccagactcctcactgctgaattataattacttagacatactttgaagacacattctctgagaaatatagttcaaccttcagtatataacactgttcttcaaaccagaattcaaaatgcataatctgataaatacagggacaacaagatgccacatctaaatcagagcctttccaaaaatttcatgacagatgttgtttttcctgtaggcatccactctaagttagctggaaagccattcaccatttgagccttgactcca

SEQ ID NO: 46998 - DNA, 1606 bp, Homo sapiens
tcatcaaaggccttcaggatacatgcgtttcctccatgctgtggggataacaagagttcctacmtcacagggtttttatgagggttaaatgaataaatatttgtaaagtgcttggaatagtgccaaccacagagtaagtgttatatgtttgttggataaaatgcaaaaacatacaactgttccacatttctggtcccatctttacgtaactcttatttaaaaattatttcttggctgaatgcagtggctcacacctgtaatcccaacactttgggaagctgaggcaggtggatcacctgaggccagaagtttgagaccagcctggccaacatggtgcaaccccatctctactaaaaatataaaaattagccaggcatggtggtgggtgcctgtaatcccatctactccggaggctaaggcaagagaatcacttgaacccaggaggcggaggttgcagtgagccgagatcgtgccactgcactccagcctgggcaacagagcaagactccatctaaaaaataaaataaaataatttttaaaattaattcttagacagaatggaaggctatctcccttgtaacctggaataacaatctagaatgtgctgctttgtggatgaaaggtggaagttctctcctgtgacagctctcaggaatctgaactctcctgtcctgtcccctccctttcccagactggagaccagccttcttgacctgactgggcttggggtggggggtccctgaccacctcctctggtcaggccaccacccttttctagccaggcactaatgttctctggccctggagtggaggagcccagacgcttgggagagggaagtgctgttgcacactggggctgccagccaagaaatagcccctggccctgcccctccccacccccaggctctgtggagcccttccccagacactttgggggcggtgcttggctttgacctcaaatccaagcactttcagatccgaccccgccctccccagcctcctcacctctcatctgcctctggtttcccgagtccatcctggtctccctgcccccaggctgtcttccagaatctatcacagctcctggcacacagtgggcactggagagacagttgttagattgatttgttccagaggtgggggaaattggggcaagagatggttatgccaacaattgattgtagccttaagcctggtgctgcaatccgcacacttgagtaagcctaagaaagataagaatcgcctgtcttgggtgatccctgagccccacccctgagatttagataggtatgagctgagtcctgggaatctgcatttccagcaaccaactcaggtggttctgttgctgtccatggaccttgttttgagaaattctgctcactgtgatttgggctaaagagaggcccagacaaaatgggggaggaggccagaggacacagtcgggggagcaggaaggcttcatggaggcggtgctgctgcgggtataaacgaagggcttcaggaaccaaggggctagagaaggtggttccagaaggcttccctggaagtggcaatgaggatgggagatggcgcaaatgagggagacccagaagatgctgtcatccca

SEQ ID NO: 46999 - DNA, 1606 bp, Homo sapiens
tcatcaaaggccttcaggatacatgcgtttcctccatgctgtggggataacaagagttcctacatcacagggtttttatgagggttaaatgaataaatatttgtaaagtgcttggaatagtgccaaccacagagtaagtgttatatgtttgttggataaaatgcaaaaacatacaactgttccacatttctggtcccatctttacgtaactcttatttaaaaattatttcttggctgaatgcagtggctcacacctgtaatcccaacactttgggaagctgaggcaggtggatcacctgaggccagaagtttgagaccagcctggccaacatggtgcaaccccatctctactaaaaatataaaaattagccaggcatggtggtgggtgcctgtaatcccatctactccggaggctaaggcaagagaatcacttgaacccaggaggcggaggttgcagtgagccgagatcgtgccactgcactccagcctgggcaacagagcaagactccatctaaaaaataaaataaaataatttttaaaattaattcttagacagaatggaaggctatctcccttgtaacctggaataacaatctagaatgtgctgctttgtggatgaaaggtggaagttctctcctgtgacagctctcaggaatctgaactctcctgtcctgtcccctccctttcccagactggagaccagccttcttgacctgactgggcttggggtggggggtccctgaccacctcctctggtcaggccaccacccttttctagccaggcactaatgttctctggccctggagtggaggagcccagacgcttgggagagggaagtgctgttgcacactggggctgccagccaagaaatagcccctggccctgcccctccccacccccaggctctgtggagcccttccccagacactttgggggcggtgcttggctttgacctcaaatccaagcactttcagatccgaccccgccctccccagcctcctcacctctcatctgcctctggtttcccgagtccatcctggtctccctgcccccaggctgtcttccagaatctatcacagctcctggcacacagtgggcactggagagacagttgttagattgatttgttccagaggtgggggaaattggggcaagagatggttatgccarcaattgattgtagccttaagcctggtgctgcaatccgcacacttgagtaagcctaagaaagataagaatcgcctgtcttgggtgatccctgagccccacccctgagatttagataggtatgagctgagtcctgggaatctgcatttccagcaaccaactcaggtggttctgttgctgtccatggaccttgttttgagaaattctgctcactgtgatttgggctaaagagaggcccagacaaaatgggggaggaggccagaggacacagtcgggggagcaggaaggcttcatggaggcggtgctgctgcgggtataaacgaagggcttcaggaaccaaggggctagagaaggtggttccagaaggcttccctggaagtggcaatgaggatgggagatggcgcaaatgagggagacccagaagatgctgtcatccca

SEQ ID NO: 47000 - DNA, 1606 bp, Homo sapiens
tcatcaaaggccttcaggatacatgcgtttcctccatgctgtggggataacaagagttcctacatcacagggtttttatgagggttaaatgaataaatatttgtaaagtgcttggaatagtgccaaccacagagtaagtgttatatgtttgttggataaaatgcaaaaacatacaactgttccacatttctggtcccatctttacgtaactcttatttaaaaattatttcttggctgaatgcagtggctcacacctgtaatcccaacactttgggaagctgaggcaggtggatcacctgaggccagaagtttgagaccagcctggccaacatggtgcaaccccatctctactaaaaatataaaaattagccaggcatggtggtgggtgcctgtaatcccatctactccggaggctaaggcaagagaatcacttgaacccaggaggcggaggttgcagtgagccgagatcgtgccactgcactccagcctgggcaacagagcaagactccatctaaaaaataaaataaaataatttttaaaattaattcttagacagaatggaaggctatctcccttgtaacctggaataacaatctagaatgtgctgctttgtggatgaaaggtggaagttctctcctgtgacagctctcaggaatctgaactctcctgtcctgtcccctccctttcccagactggagaccagccttcttgacctgactgggcttggggtggggggtccctgaccacctcctctggtcaggccaccacccttttctagccaggcactaatgttctctggccctggagtggaggagcccagacgcttgggagagggaagtgctgttgcacactggggctgccagccaagaaatagcccctggccctgcccctccccacccccaggctctgtggagcccttccccagacactttgggggcggtgcttggctttgacctcaaatccaagcactttcagatccgaccccgccctccccagcctcctcacctctcatctgcctctggtttcccgagtccatcctggtctccctgcccccaggctgtcttccagaatctatcacagctcctggcacacagtgggcactggagagacagttgttagattgatttgttccagaggtgggggaaattggggcaagagatggttatgccaacaattgattgtagccttaagcctggtgctgcaatccgcacacttgagtaagcctaagaaagataagaatcgcctgtcttgggtgatccctgagccccacccctgagatttagataggtatgagctgagtcctgggaatctgcatttccagcaaccaactcaggtggttctgttgctgtccatggaccttgttttgagaaattctgctcactgtgatttgggctaaagagaggcccagacaaaatgggggaggaggccagaggacacagtcgggggagcaggaagscttcatggaggcggtgctgctgcgggtataaacgaagggcttcaggaaccaaggggctagagaaggtggttccagaaggcttccctggaagtggcaatgaggatgggagatggcgcaaatgagggagacccagaagatgctgtcatccca

SEQ ID NO: 47001 - DNA, 1606 bp, Homo sapiens
tcatcaaaggccttcaggatacatgcgtttcctccatgctgtggggataacaagagttcctacatcacagggtttttatgagggttaaatgaataaatatttgtaaagtgcttggaatagtgccaaccacagagtaagtgttatatgtttgttggataaaatgcaaaaacatacaactgttccacatttctggtcccatctttacgtaactcttatttaaaaattatttcttggctgaatgcagtggctcacacctgtaatcccaacactttgggaagctgaggcaggtggatcacctgaggccagaagtttgagaccagcctggccaacatggtgcaaccccatctctactaaaaatataaaaattagccaggcatggtggtgggtgcctgtaatcccatctactccggaggctaaggcaagagaatcacttgaacccaggaggcggaggttgcagtgagccgagatcgtgccactgcactccagcctgggcaacagagcaagactccatctaaaaaataaaataaaataatttttaaaattaattcttagacagaatggaaggctatctcccttgtaacctggaataacaatctagaatgtgctgctttgtggatgaaaggtggaagttctctcctgtgacagctctcaggaatctgaactctcctgtcctgtcccctccctttcccagactggagaccagccttcttgacctgactgggcttggggtggggggtccctgaccacctcctctggtcaggccaccacccttttctagccaggcactaatgttctctggccctggagtggaggagcccagacgcttgggagagggaagtgctgttgcacactggggctgccagccaagaaatagcccctggccctgcccctccccacccccaggctctgtggagcccttccccagacactttgggggcggtgcttggctttgacctcaaatccaagcactttcagatccgaccccgccctccccagcctcctcacctctcatctgcctctggtttcccgagtccatcctggtctccctgcccccaggctgtcttccagaatctatcacagctcctggcacacagtgggcactggagagacagttgttagattgatttgttccagaggtgggggaaattggggcaagagatggttatgccaacaattgattgtagccttaagcctggtgctgcaatccgcacacttgagtaagcctaagaaagataagaatcgcctgtcttgggtgatccctgagccccacccctgagatttagataggtatgagctgagtcctgggaatctgcatttccagcaaccaactcaggtggttctgttgctgtccatggaccttgttttgagaaattctgctcactgtgatttgggctaaagagaggcccagacaaaatgggggaggaggccagaggacacagtcgggggagcaggaaggcttcatggaggcggtgctgctgcgggtataaacgaagggcttcaggaaccaaggggctagagaaggtggttccagaaggcttccctggaagtggcaatgaggatgrgagatggcgcaaatgagggagacccagaagatgctgtcatccca

SEQ ID NO: 47002 - DNA, 560 bp, Homo sapiens
cagcctacctagtagctgggattacagacgtccaccaccaygcccagctaatttttgtatttttagtagagacaggattcactacctgttgaccaggctggtctcgaactcctgacctcaggtgatccacccacctcagcctcccaaactgctgggattacaggcgtgacccactgcatccggcctatactgttgttgaaactggttttcttcttctttcctcagttcttttcttttacatcttcccccatcattgctctgcccatccgaaggctgtggctggcacaggacagaacagaacctcctagcctcaagttccaaacccacactctccaatagccaggctctcagatgggaagcttcaaagccttgtgacagcctggctgaacctctccagcctgggcgctccctccgtttcctgccccggaaacaggcatctcctctggccacctcccaaagcctgtctggaagcctcaggcacccgctcctggaagcctgtacgattcacaacaaagggcctgtccacccagtcgtgctgagcacacccctattcccccgag

SEQ ID NO: 47003 - DNA, 559 bp, Homo sapiens
tgagccaagatcacaccactgtactccagcctgggcgacagagtgactccatctcaaataataataataataataatttaacacttcaagaatatttatcaggacttaaaaatggcataaaagcaaaacatttcagatttatgacatacgtagtactttttttggaagcaagctctataagtgaaatcagagattataaagagacaactcttcaaattgactttttgccaagtattggccgattttcatttaaagytcattgattctccagaactttaaaatagcatattttaaaagacaatttgattttacattttgagaagctctcaatctgtgagttcatccaggagtggcctggtcccagtagaaagattcatgacaaagatacactgaatgtcctttaaaattctaagtagcatgtgctgaaaataagcacttccagaaatgctcataacttcctgcagcaactataatattatactctgctttattcaaatctgaaaaaaaaaaacccaaaacacaaattcatgtctttgattttaaaggtatattttcaaat

SEQ ID NO: 47004 - DNA, 583 bp, Homo sapiens
cccagtggctggccctctgccatttgtaggccatctcagggatgacagctcacgtgattaaagggctaaatgaagccctttttggtggggaaagaggsggcttggactcaaggcagtgcccagtcagaacccgagctccaccatggatagcagtgacagaatcactttaccccaccccccatcacattactgtttcctcacctgcaaataaggactatactatttattttaaacagccatttatgggttaaaggagataatgtataggaaaccacttttttattctcacaataaactgggaggcagggaaggtagaaataaaacttattaaaaacatggaaaccaatgttcacagggattaagtgatttaccccaggttgtgggcaaaggatctgagcaaacatttctcaaaagaagacaccaaaatggccaactggcttatggaagaatgctcaacacctctaatcatcagggaaacgcaaattaaaaccacaatgaggtgccacctcatacctgttagaatggttactaccaaagagaatgataacaagccttggcaagaatgcagggaatagagaaccct

SEQ ID NO: 47005 - DNA, 571 bp, Homo sapiens
tctgataattccacttcacagattaaaattctgcattcgctcctcatattttctagaataaagctgaaactccttaatttagccactcttggctctccgtgatcagattcctacgtatttttctcacatccagtgacatagtttggatacttgtccttgcccaaatttcctgttggagttggggcctagggggagatgtttggatcaagggagcagatctctcatgaatggcttgggccattccattggtgataattaaactctmtctgtgagctcatacaagatctggtcatttaaaaatgtgtggcaccttctccctattctctctctctcttgttccggctttcaccatgtgacttgccagctccctctttgccttccaccatgactgcaagcttcctgaggtcatatcagaagccaaacagatgcctggctgtacagcctgcagaaccatgagccaattaaacttcctttcttataaattacccagtcccaggtatttatagcaattcaagaaggtactcatacattcagctacaaaatatactgaaaagccagcttcggacatcat

SEQ ID NO: 47006 - DNA, 591 bp, Homo sapiens
gcatctttcttatcttggtggggggctcttactgggcataatctcttgaattgaaaataaacttttacccttacttgacatataactaattgtatggcaatgaacacaagaattgagtcttacacttacctatgaacacaagcattgagtcttacacttacctatgtactccccccatgaatcaaatatagttctaggaacagagtgggtaaacacatttttcttaaattaaattgaagtttacctattagtacaacagtatagatctgaagtccaaggtaaacgatgaatcagacaattaaacatggcgatagctatagttwgatcagcctagattttcattgtctctctgtttgggggagataatagcttagtaatggtgtctgaaattgtattctgggtcagactagattgtagtgatgatacttcatgtgagttacattctctggggtacctcctttgataaaaatactacaagtaacaccagattaacagattttatttaccaattgctatttttttttaaagagacagggtctcagtatgtagccccggctggtctcaaactcctgggctcaagcgatactcctg

SEQ ID NO: 47007 - DNA, 967 bp, Homo sapiens
tgcatgagctatgattgtgccactgcactctagccctgggcaatagagtgagatttagctttaaaaattttttcaaaaaggctgggcacagtgggtcatgcctgtaatcccagcattttgggaggccgaggcgggcagatcacctgaggtcaggagttcgagaccagcttgggcaacatggtgaaaccctcccccccaccatctctactaaaagaatacaaaacatagccaggtgtggtggcaagggcttgtaatcctagatactctggaggctaaggcaggagaatcacttgaacctgggaggcggaggttgcagtgagccgagatagtgccattgtactccagcctgggtaacagcagtgaaacttcatctcaaaaaaaaaaaaaaaattaaattaaatagaagagacctagattgaatttggacaccaatcctagcctggttttccatctaatatgccagcactcctgtctgtgccatgtgcccataatcatcagtgtaacaccatcaaactggaattcagtgcccagagatgtgagcctccagctctgccactgtttgrgttgggccatttcattctgatatggcacagggacctacttgtagggtcatagacttgggtctagagacctgggctggtgatggcaatcagccaatgtaccccatttgaaaaaaataactcaaaatgttttctggcatctgagtcacagtgcaaacttaagaattgtatttttgtccagtaggttcagtttgggccgctgaccagctcatatgtctttataagttgtgtttgaactgaaggccaattctttacacttgtccgcaatagacattaatgccatttgttgtgttggaagcttcctccttccattcaggtgactgttctgtgacctgtgcctgttacagtagctcgagcttcttacagtcttgtttttatgatccagctgacatcaggagggcggccac

SEQ ID NO: 47008 - DNA, 522 bp, Homo sapiens
tgcatactattttgcaataatttgaactcttattayctgtatttcatgcccttagttttattatcttatttttctgttgtcgattatactactttaagcttgtgtgtataactgtaaaccatttttattcaaagtctgtgttctcaagtttatttttgtatattcaactattttgttatttatttattcagttatttttatttactccttacgttccttatatttttgttctatattttattatctaggttctttcatttaataagtaacttttatggctatagatttgattctgagaaatactttgagcattattcttattttatataaagttttttaaaaacttggctcatgcctgtaatcctaacactttggaaggccaaggcaggtggatcatctgaggtcaggagttcgagaccagcctggccaacatggtgaaaccccgtctctactaaaaatacaaaaaaattagccaggcagggtggtggatgcctgtaatctcagctactctggaggctgagg

SEQ ID NO: 47009 - DNA, 532 bp, Homo sapiens
aacctccttagctaaaagtttcaccttccccatggaatatgcaaccagaaaatattgcctagatttatatacacaatatccaatgagaaatagagaataaaggaaaagatattagaaaaaacgagatttccatttgaatcattgctttcacatacctttccatatctcccattacaaaatactcttaacttgatgttattttattcttctagttttcgcattcaaccagggccaggtaaatcatttatggggtccagggcaaaatttttcaaaatcattaagaatttcaaaatggcaagaacaagaaacattaaactaagcatgggaccctctaagcatgggttcctgtgcaastgtacatcacacgcccatgtaggtggtcctgcgaggaaatgtaaattataaaacatattgaacaatctgataataagcattgaggccatgatatatatacatgatttttaaccatttatcccatctccgaggctctatataggggacataccatagcttttaatattaatatacaaaa

SEQ ID NO: 47010 - DNA, 551 bp, Homo sapiens
gaatttataatgaaaaaaatcaaaagggaaagatctttgattagtaacatcatgacaaaaattcwaactatatgtccagccttggaattgaaatccagtcacaggccaggcgcggtggctcatgcctgtaatcccagcactttgggaggccgagatggtcagatcatgaggtcaagagattgagaccatcctggccaacatggtgaaaccctgtctctactaaaaatacaacaaatagctgggcgtggtggcaggtgcctgtagtcccagctacttgggaggctgaggcaggagaattgcttgaacctgggaggtggaggttgcagtcagctgagatcgcaccactgcactccagcctggtgacagagcaagactccatctcaaaaaaaaaaaaaaaaaaattcagacagagagaaggcattggggtgatgggagaaggagacacactttgctgaacctcagccatgagttacatttggatgtgatggggaaacttccttgagcgatcacttttaaatgatagattttatgaagttaatatccaaagtgac

SEQ ID NO: 47011 - DNA, 551 bp, Homo sapiens
gaatttataatgaaaaaaatcaaaagggaaagatctttgattagtaacatcatgacaaaaattctaactatatgtccagccttggaattgaaatccagtcacaggccaggcgcggtggctcatgcctgtaatcccagcactttgggaggccgagatggtcagatcatgaggtcaagagattgagaccatcctggccaacatggtgaaaccctgtctctactaaaaatacaacaaatagctgggcstggtggcaggtgcctgtagtcccagctacttgggaggctgaggcaggagaattgcttgaacctgggaggtggaggttgcagtcagctgagatcgcaccactgcactccagcctggtgacagagcaagactccatctcaaaaaaaaaaaaaaaaaaattcagacagagagaaggcattggggtgatgggagaaggagacacactttgctgaacctcagccatgagttacatttggatgtgatggggaaacttccttgagcgatcacttttaaatgatagattttatgaagttaatatccaaagtgac

SEQ ID NO: 47012 - DNA, 567 bp, Homo sapiens
tggaggaacacaaaaagccaagaatagagaagacagtgaagagggaggacgaaggtcrggggaaaggagagggaggtagggtgagggtgaagaggaaaaagatctcaccttttcagaatcaagacttactataaaatgataggcttttttttcttttcttttttgagataaagtcttgctctgttgtctaggctggagtgcagtggcatgatcgcagctcactgcaacctcaaattcctgggttcaagtgaaccttctgcctcagcttcccgagcagctgggactaaaggcatgcaccaacacactcaactaattttttaaatattttgtagagatgaattcttgctatattgcccaggctggtcttgaactcttggcctcaagcgatcctcctacctcagcttcccaaagtgctgagattacaggcgtgagccaccacgcccggccagccagatgctttaagatattttggttctgatacagagcgaggcaaacagacaaatggaattcaatgaagagcctaaaaacagactcgtaagtatgcttgggaacttagttatatgacag

SEQ ID NO: 47013 - DNA, 1963 bp, Homo sapiens
tcatcattgttcagaatcaaattcaaacctaacttagccttagaataattactttcaaaagcaaatgataatgtatatataattcttatatgtaacccaagtccattggccctcacagctagaatttctttaggggaaaattgtatcaactgatgaaagtagcttgatcctacctcagagtattaaaatacaattctctcatatttcataaagttgtctctattgtttgtgtgatgggaagaaaaggcctatccagggaaaatactaaagaactcatacaataaaacataatttaatctttcaagtaatgaaaatattacaagttttagtctcctactgtctttctaggttaacacagacattcaagtaatggaacgttggaagggacacattttctactgatagaaagaaacaattctcgaaaataccagccatcatatggtaggacttaaaaccacctactgtaaaaacaagattaaaaaatatatgtgacttcattctccattgttcccactttctctgttctaaaaacatacaggtattcttagagctaaaacacctgcctctttttaaaactacccttgaaataaaaattggaaggttaattgttggacacccaacttcagttaaaagatacggtgagtaggtgactctaatcactaagcagagcccatccagcccaagtaaagcaattcctaaagactttaatactttactcagaaaactatagagaagacaagaataagcaacattctagaagaagcagtgtgttctaaaaataaacatctaaatttataaattaatgtaagtagagggaggttggtgggttagtgtcctctaagatgacccctaattatccccaccctctgtaattcacacctctatgtagtttcctcccacaatgcaccagcattggtctgggtgaccaatagaatattgcaagaagtcatggtatgttacctgtgagaaaaagttgtaagagacattgtagctgccatattggttgtgtgccctctcccatccacctccctttacctcttcacttattgggaagaagccagttgccaagtggtgagcagcctcacttagaggaccataaggagaagaactgaagcctcctataaacaaccacatcagtaagccttgaaatagagcctccagctccaaccaaacattcacatgactgctgcatcaacaggttaacggcaatctcataagagaggttctgagccagaatctctcacctaaggtgttcttaaactcatgaatgccaaaaactgtatgagataataaatatttattattttcagcaactaagtttgagagtaatttgttatgcagcagtagataactaatgcaatttgctctctagaatatgttttagataatgtttttcttattactctggaatagtttgggttgaccctgaggttatctatgtaagctttactgtcttctttctagcatttatttattttgcaccagtcacttctactgcactctgatgaaagggtgggctaggatctttggttgaagagttatttcctgattggaaaccaaatcagaaaagttttctgctttaccaagatgttttccatgtaatacataaagcattccctttggaaacaaaaaggctttaaaaccaagagtgtggcagtggaagtgttctgccctaggtgtacataataagggaatttgttgtatatagaaaatttagaaacaataataaaactaaaaaaatttggtctgctttttattgtcaacatgtgctgtaattcaaaatgtcagttatagactattcctcttaccaaaatattttgctgacctaatttctaaacaactgtagcagatactaagcttcaacttagatttttttwaaattatccttttattttacaagttaattcacagaagtcccaattatacagctggcccaagggacatgaggactcagatacatgca

SEQ ID NO: 47014 - DNA, 576 bp, Homo sapiens
tcaggaagtgtgtttcaggcagagacacggtgggtgaatgctctgaggctgtaacaagctgagggggaacaagaaacactaaaattctgtgaattccagcggcatcagttgaatgttaattatggcacatcaggtactttcccttagcagccaacagagtaaaagggagtcggtctatgtacatagatgattgcttttgaggtggcacttaacacctgtgtttccatcatatcccagtgrtagactagaaaatggcaacaaataatagaatttgtgttattctcataggatctttttaataagttatagattcatctgagggagtaccagactattgggttttagagattgacagcaaagaagaacttaggcatgaatcttcttaataacagctaatatagaaatagaggaaaaaatcattctcacaatacagatagattagaaagtaatcatttatattcaacaagtatttattgcataactaaaagattctatgtgagagtactacacgtaatgattttctgtgaagcagttaagatacaatttgttcctctaagaaggaaaacaggatgtatg

SEQ ID NO: 47015 - DNA, 1896 bp, Homo sapiens
aaaataattaaaccacccctggtgtcatcataaataatgatgcttgggaatggaaacagtgtacatttgaaaaagtgctgtgctcctacttattacaggaactttggaaatcatgttggtaacaaatcttatctaaagcaaaacttcattttagaaagagaaatctggagatctcgtataaaacatttgctggccaccatataacacaccaaaggaacaaacatgcttatgagccccttctagatgccaggccttgtggcctttagaggcattattttatttaatcctcttaaatgttcttaagtgagaggtgattttttcatcacttttttgttttttgtttttcacacgctgtcgcccaggctggagtacaatggcgcgatctcggctcactgcaacttccgcctcccaggttcaagcaattttcctgcctcggcctctcaagtagctgggattacaggcgctggccactacgcctggctaatttttgtatttttagtagagacggggtttcatcatgttggtcaggctggtgtcgaactcccgacctcaggtgatccacccacctcggcctcccaaagtgctgggattgtgggcatgagccaccgcgcccagccctttcatcactattttataggaaagaagctgagtgaaatgaagtgtcttgcccaagagctgacagctagttaagtagaaaggtataccttgaggtgaaagtgcaagacaataatcatttctccatcacagggctggaacaaagcatgcttaatattattgtacaaaatatccactttgtctcctcgaacagatgtgaagcggaagcctggggaaaagaatgaagaaatgtcaagcagtataattaagttaggccaaaaggcactgcaactcttctggctgatttgcacagggtcagaggaaacaccaacagctgtatagagctttcctttccttctggccacacagcagtgtaagtagattcctcccagcatttccttgtcatactttattagcaccatgctttaaccaactgagctaaccggcggatggctctttgtcatattttattatctgatctgtcattcctaacaaatgtgccctgaagagaaagcctaggtacaggagagatcatccataccattgacatgggcctccagtgagccttgcatcctcttttgggcaatatttgggcgaatgtatagatctttcagtttcggattactccggtttagattgatcaccagtgagtcttgttttacaatcccctaagcaagaagaaaattaatgtgaattgtcacatatccttacaagtctccaaaaaatacatgtccttctttgtgtaagaatgttttgcctgtgttcaggctcacctccttctctttctcttcagcttctcgagttttataacgtttctgtacttctttaataattcggaaagcattctgaaggttcaaggctggtactgtctgttctccgggtgccttaatatttgatgctcggtatgtactgcagaaaagcaacagcatttatagacattyctttttcaggccagggaaattgtactgatttactttatcttctaagcagcttaatctctactttgctttttttttttttttttttttttgagacagggtgtgcctctgtcacccaggctggagtgcagtggcccaatcttagctcactgcaaccttcgcctcctgggttcaagccatcctcccacctcagccttccaagtacctgggattacaggtacacaccaccatgcccggctagtttttgtatttttagcagatacagggttttgccatgttgaccaggctggtcttgaactcctggcctcatgtaatctgcctgcctctgcctcccgaagtgctgggattacaggcgtgagccacc

SEQ ID NO: 47016 - DNA, 503 bp, Homo sapiens
cgggcagatcatttgaggtcaggagtttgaaaccagcctggccaacatggcgaaaccccgtctctactaaaaatacaaaaattagctgggcatggtggcatgcatgtgtaatcccagctacttgggaggctgaggcacgagaacacttgaacccaggaggcggaggccacagtgaaccgagatggtgccacttcactccagcctgggtgacagagcaacactctgtctcaaaaataaaaaagaaagggctgctcttccttgatgactcactgaggtacacctatggtgggacctttagaatcagatttggagaggggagacagtgcaaagtcagtcacctccactagcttgcctagtgcttttaagagtgtggcattccaatccatcacattcctggaaaatagtcaacccyctgcaaaaataatttgtgcattttaccttcagctactgcacgttggttcttctctccaaaccataaatgtcaagcactgtggaaggttttc

SEQ ID NO: 47017 - DNA, 608 bp, Homo sapiens
attataatttacgaaaaagtaagaaatgcaaaaagtttaaaccccatgcaaatggagtacatcttttttacaaactcacttttgtcttgcaaaaagtacatttttttcagaacaagtgttccctaatagcaattagcacacttaccacgttttgaatgctaagtattattgtcagaaaaagaagtcaataaaaggtagtaactgatcccagtgctgattcagggaaagcatacaatgagcctgcaatagtragctgtgtgtgaacatagcatagagctcaggaaatgatgggactatggcaaaataataattaatcataatgataataagagccagattaaaagaactctcacaggcttaatttaggaaatctgacaatcaaaataaataatgatgacagtgaactataatgtattgaactagaagaaaaattcacatgttaaaacagatatcaaataaataaataaataaacaggagaatagtgaaagttcatcctcacagcagactaccactgctaaatgtagaagatgttagaaaaatgccctattaaatccaccatagttataattaatcgatacagacaatggatgctaaaatcagtagacaa

SEQ ID NO: 47018 - DNA, 608 bp, Homo sapiens
attataatttacgaaaaagtaagaaatgcaaaaagtttaaaccccatgcaaatggagtacatcttttttacaaactcacttttgtcttgcaaaaagtacatttttttcagaacaagtgttccctaatagcaattagcacacttaccacgttttgaatgctaagtattattgtcagaaaaagaagtcaataaaaggtagtaactgatcccagtgctgattcagggaaagcatacaatgagcctgcaatagtgagctgtgtgtgaacatagcatagagctcaggaaatgatgggactatggcaaaataataattaatcataatgataataagagccagattaaaagaactctcacaggcttaatttaggaaatctgacaatcaaaataaataatgatgacagtgaactataatgtattgaactagaagaaaaattcacatgttaaaacagatatcaaataaataaataaataaacaggagaatagtgaaagttcatcctyacagcagactaccactgctaaatgtagaagatgttagaaaaatgccctattaaatccaccatagttataattaatcgatacagacaatggatgctaaaatcagtagacaa

SEQ ID NO: 47019 - DNA, 458 bp, Homo sapiens
ttgaccattagtcaatggagaaggagcatggagaggagcatggagaacagccagagctgggcacagaggaggataagccaggcatgcctaagggccctgccagcgattctgctgtgctgtggtggaaagtgtgggacagtcgtggkgggaagaatgggactaagttcaggatgatgtttcggggcctgggctgggggtagtgacgtgatgggacgtggggctgagggaccgcagcctgatggggaggcagaaggagaactgaggaagaaatctgaggtaaagaagccaaatccagagggcacggggcccaaggccaccggtgcctggggaagtttggaccacctccctgggcagcactggaagcagctggtgtggctgtgcctgccggttctagggagagaccaagtcctgctgtgaacgtgaattgcagagaaccccagggcctgttcccttggctg

SEQ ID NO: 47020 - DNA, 593 bp, Homo sapiens
cgacccaacatcctccttagagctcaggacagatagaggtgcctgcctctggaatatttcagtgcgtgtcatagattaagtgccctggaaatagtgtgacatggtgtatttgtcagcttgggccaccataacaaaaatgccaccgacttggtggcttaaacaatagaaattcattttctcacagttctgaagactaaatgttaatgatcacggtgccagctggttttgggcctggtgaggaccctctttctggtttggagatggctgccttcttcttaagacctcatatggcctttcttcagtgtgtgtattcagagacagggagagagctctttgctgcctccttttataaygacacgaatcctagaagatcagggccatgaccttatggaggagcattcttggggttacacctgtaaggaactgaagaagacagggatgggcaaaagtgctgacatgcaatgtggttgccattaagacttccacctgcctaaggagagctctagaactgggatagtccttcaagttagccccaagtcacagaaaagggttggctgttcacgttctcacaacagtcactagtcagaaactgc

SEQ ID NO: 47021 - DNA, 676 bp, Homo sapiens
tgcatgcctacaaatgaaacattccagcatgaattatatatttacaaacagttgcacaaaaggagagtctagctcatcatggggaaagagtgtgggaacatttcagtctatcctaaggcagtgttgtatgttctaccatatttcatttcatcattatggctgtgtcggtggtcatttgttatcctccagtatatccctcgctacccatcagtaattagacatggtcttgctgtcatctccaactttatctcataccggattaggcttaaaggtcaacacattcattctgttacccttctcggwtccttgaaagaacttgtgtacctatttttaaatattcgctttaaatttactttatctatggaagggcagctcagtatcacttaaacataattttagatgaccaggtacaactaaggaaaattgcaccttaatatttaccagtatgggcctcctttcattgtatttttagaaacaagaacaagaaatagatcaagatttccctcatgtttccagtgtgtgtatgtcataaggtgaatcccagacagtgctaaaaaccccagaaaattgcaagcaagactcagtctgtgagttaagaagtaggtcgcaggggtgtggcgcttaaaaatggaaaataaaaaaactagctattactcaaagcaagaatatttgtaag

SEQ ID NO: 47022 - DNA, 676 bp, Homo sapiens
tgcatgcctacaaatgaaacattccagcatgaattatatatttacaaacagttgcacaaaaggagagtctagctcatcatggggaaagagtgtgggaacatttcagtctatcctaaggcagtgttgtatgttctaccatatttcatttcatcattatggctgtgtcggtggtcatttgttatcctccagtatatccctcgctacccatcagtaattagacatggtcttgctgtcatctccaactttatctcataccggattaggcttaaaggtcaacacattcattctgttacccttctcggatccttgaaagaacttgtgtacctatttttaaatattcgctttaaatttactttatctatggaagggcagctcagtatcacttaaacataattttagatgaccaggtacaactaaggaaaattgcaccttaatatttaccagtatggscctcctttcattgtatttttagaaacaagaacaagaaatagatcaagatttccctcatgtttccagtgtgtgtatgtcataaggtgaatcccagacagtgctaaaaaccccagaaaattgcaagcaagactcagtctgtgagttaagaagtaggtcgcaggggtgtggcgcttaaaaatggaaaataaaaaaactagctattactcaaagcaagaatatttgtaag

SEQ ID NO: 47023 - DNA, 626 bp, Homo sapiens
aagaaacaactataaacaccagggaaatacaaaaagttgtataacaaagtcgtgtataataaagatgcaactaacctatgtgtcatgatttttagcaattaaaggaaatgcaggggccaggcgtggtggctcatgcctgtaatcccagcactttgggaggccaaggtgggcggatcacctgaggtcaggagttcaagaccagcctggccaacatgaaaccccgtctctactgaaaataacagaaattagccaggcgtagtggtgcacacctgtagtcccagctactcgataggctgaggcaggagaattgcttgaacccaggaggcagagggtgcaagtgcctctgcactccagcctgggcgacagagccagactctgtctcaaaaaataaataaataaatgaaataaaggaatgtaggaaaagagaatctctttaacacttaaattctcctttgggtataggtttgaagatatggggttacaggctataggaratatgggttataacctagaatttatcagttaatgtttataaattactccacatattgctgattaattttgttttatatgacctgtaaaccaagcgtgtctgagttaactataattatgcaaaagaatatgca

SEQ ID NO: 47024 - DNA, 416 bp, Homo sapiens
ttcttctccagggaatggtaataagtcctccaacagctcagaggagagaactggcagaggaggtagtggttacgtaaatcaactcagtgcggggtatgaaagtgtagactctcccacgggcagkgaaaactctctcacacaccaatcaaatgacacagactccagtcatgaccctcaagaggagaaagcagtgagtgggaaaggtaatcgaactgtgggttcccgccacgttcagaatggcttggactcaagtgtaaatgtacagggttcagttttgtaatattttttcagcaaatttttatacagtgtcatttaatttgggagaggatactgtccagaaaattaatgcatacttttgtcacaatttgcctttttgtgggtgtacgttttggtttttttttgttgttttttttctt

SEQ ID NO: 47025 - DNA, 565 bp, Homo sapiens
tcagatcctcatttcttttcccttcctagatttttgaaacatgaayccttcactcctcctggctgccttttgcctgggaattgcctcagctgctctaacacgtgaccacagtttagacgcacaatggaccaagtggaaggcaaagcacaagagattatatggcatggttggtggcatctgaaactgtccaggggaaccccagagagatgggcattgctattgggatcgtatggccagaaagtggcttctagaggctggctcctaccaataacctaacgcaataacttaatagcactgattatgagcacgatatgggcatacacccttgttgtgtctcagcttggagaacatctcctagaagtgtcaagccttccctggccatggttactcttacatccctgtctgaagattcacttggttagcatatgttgggttttaattagaaataaatagcatcggcggggcacggtggctcacgcctgtaataccagcacttcgggaggccaaggcaggtggatcacaaagtcaggagattgagaccatcctggctaacatggtgaaaccc

SEQ ID NO: 47026 - DNA, 564 bp, Homo sapiens
ctataaggacaaaggaaaattgttttaataaagaaaaaattcacatttttctttaaagtgatcagacatacatgtaatttcaatactgaaaaagagccttagagatcatgtttatctcacccacaatgtttgcaacccagccaagttacagggcaaagctatcagggccagtttctggagcatcttccccagctgctggtgaagaccccatggccactttgcagttgaggtgagacaaggcactagtgcgttggcaaggctgtttgtctttgggtcctcaagggatgagggataaactccagggtgtgaggctgggcttcaggaatggtatgctggccttggaaggtggaagacagataaaaggacccaaactttgagtctgtggccacattcacaccaagctacctgtaagcacctgaattattttaaccaacagaaaaacttcccacattgtattggctaaaagagcacatagtttmatcacctgtgttttttcaaaagtctcatgttcccactgaaaaaaaatataaaagatagttagaagtgtttagtgaatagactcca

SEQ ID NO: 47027 - DNA, 593 bp, Homo sapiens
tgaaatgtccaggactcaatctcctgtccaccagctccttaggatcttttcagcctgcagactggacgtgcacacagtggcaggcaatgtatctctggattttcacgctcctggagtagatgagctgtgtttgctataaaatgtcatgtttgctgtgtatctgggaagacttaatgaagcattgtgcacgcagaggcaggatgatgctgacattaatcattgctgctaacttctggatgtgaaagcagrtggcgacacccatggcttctcagacagcacaggttgaggatgtgagttgatcctactggttttcctttaggagcctattttctttttctgttgtcatttctatattcctactgaaggaacaactgttacagaaacacttaaggaatacatggaaacatgtgtgagtgtgtaaagctgtgtgaaaccagctttactttattcatccccttttttcaaaggaagttaataaatatgatcagaaacactctcttgaggaacaagcaacaggaaaaaaataatactttccaagaagaaccaaaatatttcagtcctttgaagggctaaattctgggatccctaaaact

SEQ ID NO: 47028 - DNA, 537 bp, Homo sapiens
ttttgtgatgatggaaatgtcctgtgtctgtcctgtccaatattatagccactaactatatgtggctcttgagcacttgcagtgcaactagtgcarctcattgcatttttattcatttaacacaatgatttatttatttatttgagacagagttttgctcttttcccccggctggagtgcagtggtgcgatgtcagctcactgcaacctctgccttccagtttcaagcagttctcctgccccagcctcccaagtagcttcaggtgcctgccaccacactcagctaatttttgtatttttattagagtgggggtttcaccatgttggccaggctggtctcgaactcctgacctcgtgatctgcctgacttagcctcccaaagtgctgggattacagatgtgagccaccgtacctggccaacaacattaattttaagttgaattattctgaatgtaaagggccatgtgtggctagtggttgccatgctggacaacgcagttttagcctctctaattcattaagtcattgtacacttact

SEQ ID NO: 47029 - DNA, 623 bp, Homo sapiens
atagtggggctatcatcatgcctgtgaatagcatacaccagcctggggcaatacagtgagaccccacctctaaaaaaatagaaagaattactacccctattttacagaggacaagagcagaacaattatttaaatggttgagtaagcagtgatggaggaggtcacagtagaagtaaaagcagcaacactacttgctaggcacagtgccaacagtktcctatatatcttctcacttaatccttccaactcctcaaagttatcatcagtttacaaatgagaaagacaagtagggagaggttaagttgtttttcgaggtcagaaatctaagtggtagagccaaaacacacaccaagtctgtatgacatcagaacagaagcatttaactgttgccattatttttctttagtcttatcctatactaagagaagagagggaaaatctttaaagattaattcttagttcagtgtttcgaagggtaccttcctaagatttccttcacttgttcatagagattctcttttaaacaatgaaattctatgaagtacatttgcatattcaaatacctaatagtctcttcttgtttttttatccctaaagttgagctctgaccttaagtactccca

SEQ ID NO: 47030 - DNA, 623 bp, Homo sapiens
atagtggggctatcatcatgcctgtgaatagcatacaccagcctggggcaatacagtgagaccccacctctaaaaaaatagaaagaattactacccctattttacagaggacaagagcagaacaattatttaaatggttgagtaagcagtgatggaggaggtcacagtagaagtaaaagcagcaacactacttgctaggcacagtgccaacagtgtcctatatatcttctcacttaatccttccaactcctcaaagttatcatcagtttacaaatgagaaaracaagtagggagaggttaagttgtttttcgaggtcagaaatctaagtggtagagccaaaacacacaccaagtctgtatgacatcagaacagaagcatttaactgttgccattatttttctttagtcttatcctatactaagagaagagagggaaaatctttaaagattaattcttagttcagtgtttcgaagggtaccttcctaagatttccttcacttgttcatagagattctcttttaaacaatgaaattctatgaagtacatttgcatattcaaatacctaatagtctcttcttgtttttttatccctaaagttgagctctgaccttaagtactccca

SEQ ID NO: 47031 - DNA, 582 bp, Homo sapiens
tgaaaagcattcaagggcttactgaatttgcattcacatctggagttttcaaggccactaagctgtggaaacttgacatcaatattcaaatagatgaaaagggaccttaagcatatccatcagggagtcaccgagatgataaaggcctgagaagcagtatgctcttgtccggcatttgtgtcctttgacgactgcaccatccacccaaattttgctgccttctttataggaagggccttttcctcatgtggtgggctgcccactgtttcttctctgtgcatttgctcatgtagtttgaccacaaggaatgcttttccttctttctctcaactatctatagcctacatatcctttaaggcccagtttctaaaatatgtcttccaaatttactgtttcttccattcagaattcctggagcacatgaggtagcccccagttagatagaatgtggtattgtttgctgctattttgcctgttttgtgctgtatcacctcatccatctccccagcttaattgyaagctatttgacgggcagaaattgtgtcttatttgtatttgttttccccattgggcccggcacac

SEQ ID NO: 47032 - DNA, 552 bp, Homo sapiens
gcatcttttcaacagaggtaaagcccttgggtttattgctatttttagggggcttatctgttcactaacagtaccatgttatgtcatcggctgctcaccaacaagtagatatctctagaagatgcttttaatttgtcatattagctctcttcataggagttattacattccttttagagtttaatatgatctatggtagatgtggtatttcaaatattagtggggaacatgtgcctaattcaagtaataattgggacaacttgataaccatttggaaaaaattcaaatcaagtcccaacatcacactttacatcaaaataaattccaaatgatctgaagatgccayagtaaataagcaaaaaaaggaaggaaggaaggaagggaagggaaggaatttaattataaaagtattgaatgagaaaaaccagagaccatatggaaaatatttctaaatgtgactatataaaaattttgaattctgtaaggcttccagtataatacaaagtccagaaacaaaaggcaagtcagaaagagatatttgcagatgacatt

SEQ ID NO: 47033 - DNA, 582 bp, Homo sapiens
ggcctggccgagagtgggtgggccatgcgcagttcagcgtggagcttgtgcctcattgttgctcctaatgtatgtgcagtgcccaatagccaccctgcttacagcgggtgtcaagcagcttcctgggtgcttctcagaggagcctcacatcactgtggaaggggaaggtctttctcctgggttaatggctgtggacactgaagctctgagaggcacatgggcttgaggtagcccattcagggccaggaccagggttccagtctgtaagagcctctttaggtctctaagaccctgccactcaggccttccttgtttycaggctccttatccatccttcaacgccaccattggcatcatcgctccacagcaccgcctggcttgtcccttcattaaacaacctgaaaggactttgaaaagcaaacaaaaccaccttttacttacagaaactttcaaagaaatatggaagggaacagtgtaacagcaccatcccccaatacccccagctttggcagccacctctcctctcattccatctggccccacatgctcctgccctccttgttgtttgaagcagtcctagat

SEQ ID NO: 47034 - DNA, 547 bp, Homo sapiens
cttctatgttatttatgttaatttttcaaaataactctatgtgggaggcattattaggtaacaaccctatgaaggagatagttgcaaaaactaagccttgtagagcttaggtaacttactctacagttacataaccattgggtggatggaatgtttgcatctaagtctctccaggaaattttgtgatatctccactagtatttgttgctgtttttctcaactaattaataaatccatagtgtgcaattttagtaatcttactttgatttccattgatctgaatgcatgcagcatgcttttctgttgctctagtcccaaacgtccttgttcagtgggtgtatagtgaaaaagcaaacawcgggctttatcagaagcaaattcctttctagtatcttcttaatgaccctgtctttgatgcagctattttcctgcagttttacatttctatggtagcaaccctactgctgaaaagccctttaaaaaacattctgatcctctgccatagaggcaacctgttattgagcaagtgattgctcttaggacaaca

SEQ ID NO: 47035 - DNA, 544 bp, Homo sapiens
tgagtagaaatctggtgacctaaggctcagtgyggtcaacagaaagctgccttcttcacttgaggctaagtcttcatatatgtttaaggttgtctttctagtgaggagatacatatcagagaacatttgtacaattccccatgaaaattgctccaaagttgataacaatatagtcggtgcttctagttatatgcaagtactcagtgataaatggattaaaaaatattcagaaatgtattggggggtggaggagaataagaggcagagcaagagctagagaattggtttccttgcttccctgtatgctcagaaaacattgatttgagcatagacgcagagactgaaaaaaaaatttactttgatctctgtttttgaattcttattatttatattttgcttactaccttttttgccttttgtccttttgtggagagggcgatgaattaagagtagtggggtgggtggcgagtaagtaaaatttcaaatagcattttagtgaatgcaattcagtagtcctgaagcctgacttaataaaacaaaattc

SEQ ID NO: 47036 - DNA, 604 bp, Homo sapiens
tgcatggcggcccttggtgaactctcagaggaccccaggcacaggctctggttaaataatgctcggctccacctgctgttgttaaaacatgccaatgcccactccagttatagtacgatggccccacaagtctgccctggaagaaagaaaagaacaaccctggcctgtcttgaatggatatcaaaaagcatgttcaacaggtggaggcagatgactagaatatttcacggccaattgtttattcattcggcaatggactagggtataggcagtgagcaccccagacacagactgtcctctcatggagctgatatgaagtagaggagatggacactcaacacggtgacaactaaataagaagtttccagccaaggaaacaagagcagatcgagggctagagagtratgagagtgggtggggcctatgtcatggggcacacagggaaagtggttccaagcaggtgacatgacagcagagacctgaatgtgatgaggaagagtggcctaggaggagggctcagagtccagtgtaaaggctcagagtccaccttattcagaagctaaggcactcactaatcagaattattcccacccactcaggatgc

SEQ ID NO: 47037 - DNA, 546 bp, Homo sapiens
tgtcactatacatacacgacacacacacacacacacacacacacacacacacacaactccttttctctctcccctgagttccaggaccagctgtctcttagacttctcaaagtggatgtcttctagggaccctgaccctaacacatcctaaaaggaactcgtggccctctcacacaaaaagatttcgttaactggtgtttgctttcatggtaaactgcaccatccctcccatctggaagtcattcttaaactcgccctccatcttctttaacatctgtattaaaatatcaatattactattggtttcaacgccaaattctaccatgaatattttcttcatttccttcatcaccattctgaacaccacaatcactttccaggattttatgcagtgttcttgcaaggacggaacctgcagatttcccctgcaatyttactctacactgctctcagggtccattagactaggtggggcatcccccatgtgagtttctatagtattgtttacttactccatcacagaactcactgaaagctaagatttta

SEQ ID NO: 47038 - DNA, 548 bp, Homo sapiens
acgataaaccatcacatcagtcactgaggaaattaattcaaagagaaggcagctccatccagtggtaaaacacactaaagcactccatcctatggtaaagctgtagtaataacaaaggttccaacaggtctgggaaaattatggagtctagaattagccttcctatttaagggagtggcatgtcataaaacagaactatgaaactwcagaagaaccccacaccaagctgggcatggtggctgacacctgtaatcccagcacttagggaggctgaggtgggaggatcacttcaggccaggagtttgagacctgcctgggcaacatagtgagactccatctctacaaaaaataagaaaattagctgggtgtggtgtcacacatctgcagtcccagctactcaggaggctgaaatgggaggattgactaagcttggatgtttgtagctgcagtgagccaattttttattcaaaaatataaacaaaaaaataggaatttcagatacctcagcacagaaagtggggaaaatgccatcagagaaaacagggata

SEQ ID NO: 47039 - DNA, 1181 bp, Homo sapiens
ctggattggtgtgtaatctgttttcatagaacagactctggggacagcttctaaaagagcttagccaaaatctacagctttactgaacccctctggtttcctattcaatttaaaatattttaagtaactcttggggtttcccatcctgccttttttcatacaatttttaacatctgaggtttccaccaacctatgaaccaattggtataaatttgggagtcctggtttataggttcctaaaactattccatattcttctgaaaattgctgtctatcttgtctggaccatggaaaatctttcacgtggctttgagctctgagcaagaacaggacttaaaatcagctctaagaagttttctctgttctgagggatgtttaactctaagaggtaactgagtgttggggtttggggtgactgaggaggcatggggagctggtcagagggagagatgaaggcaggggaaaacagaggagggaagactagggtcagagaaattgtatgataattgtacaataaaggctgttaggtctgaattttgaattaaggggatctaaaaaagagatagttttaggtttttttatattttcttatcttaaggscacagttttgaaatctgaatttctttcggatgcctccttataccaatgaaaaaatgcagaacactggatatttgatattgtgtttcctttttgttctaaggcacctttctaataaataatcttggtcataacaaaagttccccacagtagcccctgcaattctaaactactcttggggaaactgggaaattatgacatttagaaagagaagaacacaaatttggattatagcataaatacatggacgatgcagaagtctagcacaaagagggagtggacttaagttcaaattgagacaaacccataggaaaatgggaaaagttgttcccgttacaactttacaaaatgttacaaatgctcatgtcccagacccctgcaaaattacaaaatcgcaacaaggagtgtggaaaggaagtctctcttagaattagactctcatgaacaaaaagcaaggcaagacagaaaaaaacaaatagaatttgaggagtaactcaggacaagatgtatccaaggaatgccagtctgagaagaaaacttttgaatacctcagttcctggggtagcttggtgtgttcgttttgc

SEQ ID NO: 47040 - DNA, 1181 bp, Homo sapiens
ctggattggtgtgtaatctgttttcatagaacagactctggggacagcttctaaaagagcttagccaaaatctacagctttactgaacccctctggtttcctattcaatttaaaatattttaagtaactcttggggtttcccatcctgccttttttcatacaatttttaacatctgaggtttccaccaacctatgaaccaattggtataaatttgggagtcctggtttataggttcctaaaactattccatattcttctgaaaattgctgtctatcttgtctggaccatggaaaatctttcacgtggctttgagctctgagcaagaacaggacttaaaatcagctctaagaagttttctctgttctgagggatgtttaactctaagaggtaactgagtgttggggtttggggtgactgaggaggcatggggagctggtcagagggagagatgaaggcaggggaaaacagaggagggaagactagggtcagagaaattgtatgataattgtacaataaaggctgttaggtctgaattttgaattaaggggatctaaaaaagagatagttttaggtttttttatattttcttatcttaaggccacagttttgaaatctgaatttctttcggatgcctccttataccaatgaaaaaatgcagaacactggatatttgatattgtgtttcctttttgttctaaggcacctttctaataaataatcttggtcataacaaaagttccccacagtagcccctgcrattctaaactactcttggggaaactgggaaattatgacatttagaaagagaagaacacaaatttggattatagcataaatacatggacgatgcagaagtctagcacaaagagggagtggacttaagttcaaattgagacaaacccataggaaaatgggaaaagttgttcccgttacaactttacaaaatgttacaaatgctcatgtcccagacccctgcaaaattacaaaatcgcaacaaggagtgtggaaaggaagtctctcttagaattagactctcatgaacaaaaagcaaggcaagacagaaaaaaacaaatagaatttgaggagtaactcaggacaagatgtatccaaggaatgccagtctgagaagaaaacttttgaatacctcagttcctggggtagcttggtgtgttcgttttgc

SEQ ID NO: 47041 - DNA, 1181 bp, Homo sapiens
ctggattggtgtgtaatctgttttcatagaacagactctggggacagcttctaaaagagcttagccaaaatctacagctttactgaacccctctggtttcctattcaatttaaaatattttaagtaactcttggggtttcccatcctgccttttttcatacaatttttaacatctgaggtttccaccaacctatgaaccaattggtataaatttgggagtcctggtttataggttcctaaaactattccatattcttctgaaaattgctgtctatcttgtctggaccatggaaaatctttcacgtggctttgagctctgagcaagaacaggacttaaaatcagctctaagaagttttctctgttctgagggatgtttaactctaagaggtaactgagtgttggggtttggggtgactgaggaggcatggggagctggtcagagggagagatgaaggcaggggaaaacagaggagggaagactagggtcagagaaattgtatgataattgtacaataaaggctgttaggtctgaattttgaattaaggggatctaaaaaagagatagttttaggtttttttatattttcttatcttaaggccacagttttgaaatctgaatttctttcggatgcctccttataccaatgaaaaaatgcagaacactggatatttgatattgtgtttcctttttgttctaaggcacctttctaataaataatcttggtcataacaaaagttccccacagtagcccctgcaattctaaactactcttggggaaactgggaaattatgacatttagaaagagaagaacacaaatttggattatagcataaatacatggacgatgcagaagtctagcacaaagagggagtggacttaagttcaaattgagacaaacccataggaaaatgggaaaagttgttcccgttacaactttacaaaaygttacaaatgctcatgtcccagacccctgcaaaattacaaaatcgcaacaaggagtgtggaaaggaagtctctcttagaattagactctcatgaacaaaaagcaaggcaagacagaaaaaaacaaatagaatttgaggagtaactcaggacaagatgtatccaaggaatgccagtctgagaagaaaacttttgaatacctcagttcctggggtagcttggtgtgttcgttttgc

SEQ ID NO: 47042 - DNA, 605 bp, Homo sapiens
aaaaataaaaacttggattactgaactaactgcctatgtagaacacaaattttgctttcagaagactggtagagtaagttctgtttaaagcaggcaaaataaakttatatgtacttttacacatacatatgaaaaaactagttgtctctgaatgtggaataatttttccttgttatatttttctataagtgccaaatgttatataatgagcagatgttacttttgcaacattcccctaaaaaaaaagataaatgagggaaaaaagtagcttgagataaaaagaaattcagtaggtattattcaaaagtaattacatccatctacttttacaaacagcaatattggaaatagaatgatactgtactgtcagagagaaatatttagtattaaacatattcaaagtttttattgcttcatacctttattggtggcagacccatctttgatcttttgtttcagtgactgcagcacattttgtacttgttcaaaaatgaagtccacttttccatcatcttctagctccatccagaaagtttttgcatcgcctaaaataaaaataagtgactagcctaagagctaatagaaaaatactataatttatctaa

SEQ ID NO: 47043 - DNA, 591 bp, Homo sapiens
gaaacattctgtaaggaaaacaataaagaatagtgcatatttgtaaaggaccacatatatatatatatatatatatatatatgtatatataaggaaataagatattgttataacagcttgatcttttaaaacagcatgaaccattacaaaaaaacattatgttatctggaaaaaatatgtaaagtatcaaaattagaaatawtagagaaggcccacccaatcctatcacccatatttaatatatttgtatttatattactatctccattttataagtcttttataaaccttttaaaaaggggataatactaactatctcacaggttgttctgaggacaagacttaattacatataatgtgcctgacatacgaaagattcaaggaatactaccaattattgttattctttcagaatgtagttttaaaacaaaaatttggattgtagtatatttaattttttataatctttcattaaaaacatttcctgcattttcctccatcactaatatttttgtataatacaactggctgtataacatactttggtcaataacgcatacattatagtacattaaatattttaataattaa

SEQ ID NO: 47044 - DNA, 557 bp, Homo sapiens
tggaccaacaggaaatgctgctgaggtaagtgtgcacgagcacggtaaagaagtgaaaatcaaggaccccagtgacgagtgacagacaggagcttcaagctcaggtccgcctggtgccaaagcccacattctgagtagcctcaacagagctcagctctgatgcaaccccagggagaatggaaggctcgagggaggaagacccctggcaacctgtcctccccccaggtccagtgctagaaattctgatcaccacaacartagtctcttccgatatgggacaatttgctgattcttgggaaaagaaaacaatcacggatagggagagatttgctaaaggatacaaaattacagaagaaacaagttccagcgttctacagcactggacagggactacagtactggacagggactacagtttcaaatagctagagggaggatgcagaatgaccccaataccaagaaatgatgtttgatttgacagaagtgttaattaccttgatctcatcactacacgttatatggatccaaacatcactacgtactccataaacgtgcaa

SEQ ID NO: 47045 - DNA, 557 bp, Homo sapiens
tggaccaacaggaaatgctgctgaggtaagtgtgcacgagcacggtaaagaagtgaaaatcaaggaccccagtgacgagtgacagacaggagcttcaagctcaggtccgcctggtgccaaagcccacattctgagtagcctcaacagagctcagctctgatgcaaccccagggagaatggaaggctcgagggaggaagacccctggcaacctgtcctccccccaggtccagtgctagaaattctgatcaccacaacaatagtctcttccgatatgggacaatttgctgattcttgggaaaagaaaacaatcacggatagggagagatttgctaaaggatacaaaattacagaagaaacaagttccagcgttctacagcactggacrgggactacagtactggacagggactacagtttcaaatagctagagggaggatgcagaatgaccccaataccaagaaatgatgtttgatttgacagaagtgttaattaccttgatctcatcactacacgttatatggatccaaacatcactacgtactccataaacgtgcaa

SEQ ID NO: 47046 - DNA, 557 bp, Homo sapiens
tggaccaacaggaaatgctgctgaggtaagtgtgcacgagcacggtaaagaagtgaaaatcaaggaccccagtgacgagtgacagacaggagcttcaagctcaggtccgcctggtgccaaagcccacattctgagtagcctcaacagagctcagctctgatgcaaccccagggagaatggaaggctcgagggaggaagacccctggcaacctgtcctccccccaggtccagtgctagaaattctgatcaccacaacaatagtctcttccgatatgggacaatttgctgattcttgggaaaagaaaacaatcacggatagggagagatttgctaaaggatacaaaattacagaagaaacaagttccagcgttctacagcactggacagggactacagtactggacagggactacagtttcaratagctagagggaggatgcagaatgaccccaataccaagaaatgatgtttgatttgacagaagtgttaattaccttgatctcatcactacacgttatatggatccaaacatcactacgtactccataaacgtgcaa

SEQ ID NO: 47047 - DNA, 579 bp, Homo sapiens
cctctgcgaccaggtagacgaccctgacttgcggcgctgcacgtgagtgacccctcaccctgcctctgcccttgtcccctcccctcctgtcttcccactggacccactggaatccccaccccagactccagtcgtctggtttggaccatagccaggtgttcccgggctcccccatcctgcctggtggtagcaggcaggaccttacagcttcttctgcctgctttgaccaggtacagcctatttgcagccttatcgggtctgatgggtgagggcctggcgccccacttggaacagatcaccacgctcatgctgctgtcactgcgttccaccgagggcattgtggtgagcaaagggtgggygggctgggccaggcctgccctgcaatgggatttatctcctgggcccagctgagccaaagtccttgccgtgcctccgctccagcctcagtatgacgggagcagctccttccttctgtttgacgatgagagtgatggggaagaagaggaggagctcatggatgaggatgtggaagaagaggatgactcagagatctcagggtgcggaggggtgctcttctga

SEQ ID NO: 47048 - DNA, 554 bp, Homo sapiens
ttttaaatgaagcccaccaaacctcccaagtgcaactcagatttacatctggctaatcctgcaaatatgaccaaccaaattcatgctgtttattttatttatttttttgagacagagtctcgccctgttgcagaggctgaagtgcagtggcgtgatctcggctcactgcgacctctacctcttgggttcaagcrattctctgcctcagcctcccaagtagctgggattacaggtgcccaccaccacgcccagctaatttttgtatttttagtagagacagggatttaccatcttggccaggctggtctcgaactcctgacctcgggatccacccgcctcggcctcccaaagtgctgggatcacaggcatgagccaccgcgcccagcccatgctgtttatttctaatgagttctgtgatttttggataacacatgtgaaagatagcaaattaactactgctagtcagcagcatgcaagcaaaaactgtcttgggaagccagtgtgagcaaatcctgcaagtcaatttctaatcacacttgccagaaacttggggg

SEQ ID NO: 47049 - DNA, 1425 bp, Homo sapiens
tccaagttaaaaacaaaaatagagatttaatgtaagtccaactgagaaatctataaagtaggcaaaattttaaagttatcatacacataaaaattcaaatgtattcttatctactcgtagttttagtaactcctctgataaaaaagagatcatagtagaaataatcagatatgaaaaaaattaaagatttaaaaatttggtatgtattactctccactgaagacatgatcttattggtaattattggaacatcatgctatctacatacctattattttagatatttatctatccacatagtttccacgtcatgctgacacacacacatccaggtgtacacacacaatttgggcccttttacactatatcattttaaagtgatacgtgctgagatttcatctatgaaatagtcacccaattacagttcagagaatctccatctgaaaagaggtgaacacaattttcaccttgtgaatattcagaaattgaatccagggaagaaatttactgctagtgaacattgtttgtatatgaaaaatgagaacctaggaagtggctattttcataatgatataaatctggaaacacaactagaaatacacttcagctaagtaagaattgcaaagaaatttgtactcgttcaaatgaaattatttcctggcagggaatttcttttttcagtttctctttaatttcattcagctcaattctattttgtaattaccaccttcataaaaagtaatcataataaccagttcttctgaagatagagaaacaagaatatggccaactaattacaaacgtttgggaacacttatcaataaaatgtataaaaccaattcattttctgccaataacatgatcatgtatgtctcaaatcacaaaagacgatgaattatgcaattatttttctcttgagatccttaaagattggagtaagaataaggaagttatattatttttccatagggactaaaacgtaatycacatgctttaatataatgggctgcttgtttgcctttctgtgagacaaggcaagcatatccaccatacacatggcattgatcagtcaataaatcttgctatgccaaaaccacaaatttaattggttcagcattagggatcccatatattagtttttctcacgaccaatcccatttgggaagattctaatacatcttcaaatgcaacttctctattgtaaaactgataggtctagaaaatgtggagaaatacagtgggaggagaggaaaaggggagaaaagagagatgagagaggggagagggaagaatggggagagagacaatatatgtttttaaacatttggaaaccatttgcttccttttttcttttacataaggcaaataagacaatatgcatagaagtactttatgtttcaattttgagaggaataagttaagaaa

SEQ ID NO: 47050 - DNA, 1425 bp, Homo sapiens
tccaagttaaaaacaaaaatagagatttaatgtaagtccaactgagaaatctataaagtaggcaaaattttaaagttatcatacacataaaaattcaaatgtattcttatctactcgtagttttagtaactcctctgataaaaaagagatcatagtagaaataatcagatatgaaaaaaattaaagatttaaaaatttggtatgtattactctccactgaagacatgatcttattggtaattattggaacatcatgctatctacatacctattattttagatatttatctatccacatagtttccacgtcatgctgacacacacacatccaggtgtacacacacaatttgggcccttttacactatatcattttaaagtgatacgtgctgagatttcatctatgaaatagtcacccaattacagttcagagaatctccatctgaaaagaggtgaacacaattttcaccttgtgaatattcagaaattgaatccagggaagaaatttactgctagtgaacattgtttgtatatgaaaaatgagaacctaggaagtggctattttcataatgatataaatctggaaacacaactagaaatacacttcagctaagtaagaattgcaaagaaatttgtactcgttcaaatgaaattatttcctggcagggaatttcttttttcagtttctctttaatttcattcagctcaattctattttgtaattaccaccttcataaaaagtaatcataataaccagttcttctgaagatagagaaacaagaatatggccaactaattacaaacgtttgggaacacttatcaataaaatgtataaaaccaattcattttctgccaataacatgatcatgtatgtctcaaatcacaaaagacgatgaattatgcaattatttttctcttgagatccttaaagattggagtaagaataaggaagttatattatttttccatagggactaaaacgtaatccacatgctttaatataatgggctgcttgtttgcctttctgtgagacaaggcaagcatatccaccatacacatggcattgatcagtcaataaatcttgctatgccaaaaccacaaatttaattggktcagcattagggatcccatatattagtttttctcacgaccaatcccatttgggaagattctaatacatcttcaaatgcaacttctctattgtaaaactgataggtctagaaaatgtggagaaatacagtgggaggagaggaaaaggggagaaaagagagatgagagaggggagagggaagaatggggagagagacaatatatgtttttaaacatttggaaaccatttgcttccttttttcttttacataaggcaaataagacaatatgcatagaagtactttatgtttcaattttgagaggaataagttaagaaa

SEQ ID NO: 47051 - DNA, 1425 bp, Homo sapiens
tccaagttaaaaacaaaaatagagatttaatgtaagtccaactgagaaatctataaagtaggcaaaattttaaagttatcatacacataaaaattcaaatgtattcttatctactcgtagttttagtaactcctctgataaaaaagagatcatagtagaaataatcagatatgaaaaaaattaaagatttaaaaatttggtatgtattactctccactgaagacatgatcttattggtaattattggaacatcatgctatctacatacctattattttagatatttatctatccacatagtttccacgtcatgctgacacacacacatccaggtgtacacacacaatttgggcccttttacactatatcattttaaagtgatacgtgctgagatttcatctatgaaatagtcacccaattacagttcagagaatctccatctgaaaagaggtgaacacaattttcaccttgtgaatattcagaaattgaatccagggaagaaatttactgctagtgaacattgtttgtatatgaaaaatgagaacctaggaagtggctattttcataatgatataaatctggaaacacaactagaaatacacttcagctaagtaagaattgcaaagaaatttgtactcgttcaaatgaaattatttcctggcagggaatttcttttttcagtttctctttaatttcattcagctcaattctattttgtaattaccaccttcataaaaagtaatcataataaccagttcttctgaagatagagaaacaagaatatggccaactaattacaaacgtttgggaacacttatcaataaaatgtataaaaccaattcattttctgccaataacatgatcatgtatgtctcaaatcacaaaagacgatgaattatgcaattatttttctcttgagatccttaaagattggagtaagaataaggaagttatattatttttccatagggactaaaacgtaatccacatgctttaatataatgggctgcttgtttgcctttctgtgagacaaggcaagcatatccaccatacacatggcattgatcagtcaataaatcttgctatgccaaaaccacaaatttaattggttcagcattagggatcccatatattagtttttctcaygaccaatcccatttgggaagattctaatacatcttcaaatgcaacttctctattgtaaaactgataggtctagaaaatgtggagaaatacagtgggaggagaggaaaaggggagaaaagagagatgagagaggggagagggaagaatggggagagagacaatatatgtttttaaacatttggaaaccatttgcttccttttttcttttacataaggcaaataagacaatatgcatagaagtactttatgtttcaattttgagaggaataagttaagaaa

SEQ ID NO: 47052 - DNA, 626 bp, Homo sapiens
tatcactgtgttggcatgtgttatctcattcaagatgagattttttttctggtgcttgatatgctgagtaattttcaacgtatctagggtaatttggatattatgctatgaggctctgtattttaactcttggaaataaacctcctgtgacaccacacatggtgaaagtgggggtgccttgttattgctaggtggtgataaaaatttatccctgctcaaccacctttggagagtgggggatttttttcttgtttctgctcccactatggcctacactgaagggaaggcaaacatcaggaggccttggacctttttaccactagatgatggtgaaagttccaacttctcacttagtttactttgacacctaaggaatctggtggagaaggacggggcacattgtaactacctggcagagaagaaagttctagattcccacacggccttctctgatatcacccagacattgataggcggcagggcctgttagtttgtgtgtgtgtttaaattacacattaccaatagtatcactttgcataaacctatactaaactaaaagcayggaccccacagaagatatgtaattaaagttaccttgtagtatgcaggtctttttcacagatgca

SEQ ID NO: 47053 - DNA, 591 bp, Homo sapiens
caaaaaatcatgggttgtaattaaacataaaataacttcaatttatttaggcaaataaatactaaaggtgttcaaaatgaaaataaagaactatgagttaggtcctctggatatatggctttgtcattatttgggctagacacagtayactagaatttaaataatgcttccgtattaacattttagatactgtacaatgaataacattttaggaggaatatttctggtaaaagttgtcccattaatttaaataactacttaattttacttaaagttttaaattgtttttaataacactgaagtacttatatatttctatccaagtagtaacaaacaaagcttcccaattcaaactaccaaaaaaagaaaatcagacaaaatatatgaaaaaggttaaagacgaatagtgatccctgagagatgggaaacaaatgagataagccctaagattgctccagcttactgtcttaagggtttctaggacacagtgcagggagggggaaactcaggcggagccaagttgaagagacagaaataagagtacaaggaaaccaaagcagctagagttcacaaggcagttaaagctgttca

SEQ ID NO: 47054 - DNA, 2419 bp, Homo sapiens
atgtgttttattacggtgtagcaggatgtggctgaataccatcttctagccacacccagaagggcaatagaacaagtccacttttgaatactgttcaatgttacacttaacaatacaaatcaagtatttcactttaaaaattgatatagaacaagtatttttcatgtacagaaaatttcatgcaggggaaaacaacattttagataataaggttgacagacattattaacataaagggattctctgctttgctgaaggaacaaccttgaaatttctaaaatcagcggtgattttttcccattcagttattgatattgaaatggatatttaatcacaatgttttagcacacatttatgttataaaatgaaatatgtgtgcatagtgtattgaattataagatcaggacattctaggacagcattacaacctagatataaattcttcactagtatctactattcttaattttccctcagtcttgtcactttcctgaaggataatcttctctgtattaatgtaatattctgtccaatagtacttcaattagtaactctgagggcattttgatggtgagggtaaggataagcattgagataagggcatgccttgctaaaaggaattactatagaaaactaactgcaattaaaaaactttgcaaggccacatttgcaagccctggtatccaaataaaatcatattaccttaagtggaaaagtaacttagaaattatctgttcaaccaagaaacagagaataccctgagggggattcatctattactgtttattatatgggcagaattccatgaactgcaactggaacaggtaatgtttgtagagaagagaaaataaccagtagtcattaagctcttagggtttagaaattaaacattccacaccatgatgggaatggaaacactgagtgacatatattacaaatacctagccattttcgttccctagaatatgcttgctattatgtaatactgaaaagacaaaaatgacaactagggaaatggcatttttcaagtctgtttatcactgaaagcactccccgtgactacggtcattatcaactttttaaaataaatagtggcttgcagtgctaacttggcacaataggactgacagagaaaatccagtgttttggatgtctggagccatggacggcagcagagtccatcctgtgcaggctagaaagtgtgagaagccacccaccacgcccactgggatgcccttctatgctggaaaatcatgtaaacttagccttgccttttgtagacatgagggatccagataccttaatgtgaagattttcaactgagttccaggttataacccrtaaaacatgaattctctctaccataaaaatgaaagtaatttatttgctgatgcagaatggtaggtattggaactaaattcagattagattagaaagaacttctatagttcttttcattgcatttacacagatacacacacagacacacacatataagagcatgtgcacacacataccagtcttgcaaggaacagaacttttgaatattaaaaacaacattagaagttatgtatgaggtaatttaaattcagttcaatagggaaatattttgacttcagctaaaaaagaatgtgataaaggatctcgatgcctgatattgaaattcagtgtctacaccttatgaagtaactggttggctctttaaaaatattttgtttgaatagatcaacttaataatcattcttaatgtaaaattttatgcattgtctagaaaatttcagcacctcaacatcccaacttaatcttctttcaccaaattattatctacttgctttgtatatatatactttatttattacattacctaacactagttacataatagtagtattattaattgtaaatttattagttttaccatggaatttttagccacttgatgtcagactttttaatcttatttagatacacaagtagcatcaagacttggtttatagaattttcctcaacaaaatgttttgttgaatgtcccctacttcatcctagcaaaagttcaagtgtatacttttattgtctctcaaatatttatattaaaatctttttgagtagggctgggcgtggtggttcacgcctgtaatcccagcactttgggaggccaaggcaggtggatcacgaggtcaagagattgagaccatcctggccaacatggtgaaaccccgtctctacaaaaaatacaaaaattagctgggcacattggtgcacgcctgtagtcccagctactgaggatgctgaggcaggagaatggcttgaactcgggaggcggaggttgcagtgagccaagattgtgccactgtactccagcctggctacagagcgagactctgtcaaaaaaaaaaaaaaatccttttgagtatcaagt

SEQ ID NO: 47055 - DNA, 554 bp, Homo sapiens
tatcccccgatatttgagggctgtctctggaggtcctagaagctctgtacttccaggaagtccatccatacctgatgaatggtctgtgttgcctctgaagcatgagggaagccccataatagaaagagaaagactcacaggaaacaattgagatgagatacagtgggcacagaggaagtctacgcytataaggacctgcctgctgcacccgcacctgggattgcagtgaggctgagactgtgagctggggcaccaaggtcctctgatacagtcacactcccccacattcagctctttcaggccacattgaccatgtgaagccatgtgaagccttctgcctcattgacacccaagtgacaaaccagctccaccccacaaattaagtcttcaaggattttcttccttattgaaaatagcagatagaccaatgagatcctgagtttcttgttgaaataggtgctgttttccaatggaaaataggaggctagaagaatttagttaaaatattctcctattcaagatataaataacttgatgttcagtatcatgttgcc

SEQ ID NO: 47056 - DNA, 612 bp, Homo sapiens
ccctccagctcctctttacttctgaggacttgtggagaacrtgaatggaaactctggagtccagtctgaggccagcctttgctttgttccactccctatacaagcacagagctcaaggtggctttgcctctcctcctagcatgagcttgtcctccatggctgctgccaccaaggaggcaggagccagcagccttggtcaccttagaaggccacagaggctgtaggatccctgtagcagaagctgttgcgtcccaccgccacctcaggacttattattgcaccgagtgcagtccaacctccaactgcctctgccaactgtcaaatagctaatagacatgggcttctgccaaagccctggggagcggggggttacatcctgtatgacaagacagtaaagccagaaaattaagacccccaagagcagctctcaaccaatgactggagggggttaaggtacaaataaccccctcctccacaccccaggggttctacactgaatcccagaattacctagtaggatagagctccagacggtcacagcagttactcacttgagaatgtaccctttattcgctgcccttgattctctgtctcatgtccctaaaaccaaat

SEQ ID NO: 47057 - DNA, 536 bp, Homo sapiens
gacatttactaaaaagaagtttttagcaaaaaatatttgtttagcaaaccaacctaattacttcaaaactaatcatagtaacctgtaactttttacattaacacaatcgttatcaagataaaagcagtctagaataagtctttcctaaaatttaggatgaaaaaatataaataactatcatctactgagagctaactatctcccgtaaggttatcatcaccattttatagataaggctcagaggataataaagatgacacaactggtaagaaatgaaggtgtaatttgtacccaggcagcctgagtttaacttacctaacttactttttactagttttctgagctggccawgattaccttaaaaaatattgccagtcctatcatttaaatagtgtaggtttgatatcagcaaaggacactactgtcaacagtattatctttgtgtaatatacccatatggaaaatgttgtctttaagatttacatactaaaaatacaggaattccaacctaacagtaagccccaacaaatgaaaaa

SEQ ID NO: 47058 - DNA, 634 bp, Homo sapiens
gggattacatgtcctctcacttgcacttggggaaaacttgcataaaccatcttcattaattacagtcctaatggcttttacttttaccaccatcaacctaccaccaagatcaaaaaccttttactaagcaactttcagaatgtggaactaggcatgctgagtgctttacagtttggttaaatcacctgtttagcaaaagtacttaggacagaagtgcttaggacaactaaacaaatactgagagcaatgtgaatatgaatattaacactttgggaaggctgaagaacaaatattttttgcagggcaatctttgcagaagggatcatgaatggtatttaggaagaattgaaccagaagaatttaattcattattgtgtgtgtaattcacagtactaggcactggggtataagctcttgccctctagggwgtggtggtcagtggggaagacagtcacactgtcttcacagtgtcagtcacgttgcccaactttagtgtaaggtagttagttatagatagagatttgcccaggaaaggagatcagattctaggaacttatttgagaaggagaggcgatagtgcggtgagctccttgggagaaggaaggggctgtttctggccaagtattggacttgg

SEQ ID NO: 47059 - DNA, 562 bp, Homo sapiens
ccagagcctctttcttgaaatgtgccttatcataaccatctcaccatctcctgagggaggccttaatcagttatcattcaaagcctgctgcgcttgaagatgtcacccactgaaccattcagtgtcccctctatgaatggatgcacatgaacattttctttaggatctaacctgtttccccagaagggggtaattttgtttttagagatggggtctcattctgtcacccagagtagagtgcagtggtgcaatcatagctcactgtaacctcaaaccagggaagatgtatgacctatacaaagagatcatcacctcttccttactgctttggtgacaagaaaactcaaagctaaaaatayagtccagattttagcaattatttaggacctatgaccagtattctccattgcaactgggggtgggctggtggggtgcatatgagaatgagcacacttcatccaccactccctctgggaaagatttctgcaacactctggtgatactcatgcctaccagaaactgggaatgtccaacgtttgagacctagctactgatgtatcca

SEQ ID NO: 47060 - DNA, 539 bp, Homo sapiens
cacagagcctagcagaatggctgtacatagtacaacctcaataaataatgtagattgtttgacctataaaccttatggattggggggagatgcggaaagcataccgatacagaagtatgaatttagctgctttttcttamatttcaggctcgtggtgcagagagcattatgttaaacctggcaggacagctcatcatgatgcagagggacaggtcaggcccacagatccgggagaaggacagtaaccctaataaccaaaggaaacttgtgagtaaagtactagtcatttcttttcaaacattaagaaggtatgggatgaggatgaaggaatgaaacaatttaagagaagagtattttatgatttggaaaggagaaattaagtccataaaatcagtcttaagcctctgggtgtaagactgactgactggaggataaggtcccaaaatgatcatgaaatgttccatactccatatgttaactgcttaggcatcattcattgcaaattctaatggaaaaaatagggatagactggtgaagtt

SEQ ID NO: 47061 - DNA, 539 bp, Homo sapiens
cacagagcctagcagaatggctgtacatagtacaacctcaataaataatgtagattgtttgacctataaaccttatggattggggggagatgcggaaagcataccgatacagaagtatgaatttagctgctttttcttaaatttcaggctcgtggtgcagagagcattatgttaaacctggcaggacagctcatcatgatgcagagggacaggtcaggcccacagatccgggagaaggacagtaaccctaataaccaaaggaaacttgtgagtaaagtactagtcatttcttttcaaacattaagaaggtatgggatgaggatgaaggaatgaaacaatttaagagaagagtattttatgatttggaaaggagaaattaagtccataaaatcagtcttaagcctctgggtgtaagactgactgactggaggataaggtcccaaaatgatcatgaaatgttccatactccatatgttaactgcttaggcatcattcattgcraattctaatggaaaaaatagggatagactggtgaagtt

SEQ ID NO: 47062 - DNA, 626 bp, Homo sapiens
ggakgctcccagggacccctcattcactatcattcagagtagcaataaccatccattaagcatgatgctatgccagggcactttaccctcatgaactctttgaatctcacagcagccctgacaatattataattctcattttacagagaagaaaatggagaaacaaagaggttggttaaagtgccacagccacacggttggtggctgtgtttgaattcaaacctggacacctgttgccattctgagggtgttctgtaataacatgcctgaatcagagttgggaagatggagcatgggatgaggacaaaggagagaagtccagaggctggctagagatggtaagagtccagagacaagaccctggtgttgctgtcctcagcctcttttgagaagttcctgttatctttaggggaagacaggaggggatggagaagagaatttctgggagacctcttgaatgtttcagttccaagacagtacctgagaagtccactgtgaacagttgcccacgttgtggactccacagctctagatgacaccattcacactgttgtcaatgagaatagactgtttaggtaccctgtagggacatgcattttgcatcctgtgtcataagaggacttcta

SEQ ID NO: 47063 - DNA, 597 bp, Homo sapiens
atcattctggttttgtttcatggtattatgtttttacatttttcttaaattttacagtttctagtactttgcattaaaacaattcatcatctttaaaaacaaatgttaaaaaagaagaaaacaagcaaaatctattcttagatatagtactttttaaaagtccatttttttttwattttagtttatttttaattgacaaataataaggcaacacttttaatctgaacctggtattatggttctatgtgaaataatgagataacctaatacggaatgatttttttctaactacacctctaaacaagcaaaattatctttgaatatgtttctatgcagttctgtgaataaaatttaaagattttatgtatggctatgctaaattataatcttctgggcttcaataaccgtaagatatgttttcataactgcactcaggagacatcagaaggtgttggggttgaattgtatctccccaaaagaccttgaggtcctaatcaccaggatctcaaaatgtggccttttttgaaaatagagtatttacagtgatattcaaatgaaagtgaatccattagggtggaaactaattcaataggacca

SEQ ID NO: 47064 - DNA, 597 bp, Homo sapiens
atcattctggttttgtttcatggtattatgtttttacatttttcttaaattttacagtttctagtactttgcattaaaacaattcatcatctttaaaaacaaatgttaaaaaagaagaaaacaagcaaaatctattcttagatatagtactttttaaaagtccatttttttttaattttagtttatttttaattgacaaataataaggcaacacttttaatctgaacctggtattatggttctatgtgaaataatgagataacctaatacggaatgatttttttctaactacacctctaaacaagcaaaattatctttgaatatgtttctatgcagttctgtgaataaaatttaaagattttatgtatggctatgctaaattataatcttctgggcttcaataaccgtaagatatgttttcataactgcactcaggagacatcagaaggtgttggggttgaattgtatctccccaaaagaccttgaggtcctaatcaccaggatctcaaaatgtggccttttttgaaaatagagtmtttacagtgatattcaaatgaaagtgaatccattagggtggaaactaattcaataggacca

SEQ ID NO: 47065 - DNA, 528 bp, Homo sapiens
tgggaccccaaactcatttagccaaagggaaaagtcaagctgagaactgggtcacgcaaacctgcctcccctctttggttcctaaataagatggctacaagatgaaaaaatacctgccttccctatattttgcccacagggaaattcctggtgagctgttaaaacttcaccatggcaatgcaaattgatagtttatcttatacaggcgcagtcacccaggccctgccagactcaaaagcatatctgattgttcccctaccccattttgtctgtgctatcttatgtaaaatgcagattctccacattttttcctctgccccttttgtttatgtgaaaactgtgtgcttctcaatatcycaccttttctcctttaaatttggaatcctcaaaatcatctctggagaaaggcatacatctgtctcccaggcatgttcttaactttggcaaataaatctaaaatgattgagatttgtcttgtcattttcttccattgacagaggctagaagaccaagatccaggtgtttgca

SEQ ID NO: 47066 - DNA, 568 bp, Homo sapiens
agtaaaagatgggcgtggtgattcatgcctgtaatcccagcactttgggaggctaaggcaggaggattacttgaacccagaagttctagaccagcctgggcagcatagtgagaccttgtctctaaaaacaatttaaaaacttagctggtcatggtggtgcacacctgtagtcctggctgcttgggaggctgaagtgggaagatcccttgagcccaggagttytaaggtggcagtgagctatgatcacaacactgcactctagcctggggaacagaccaagacattgtctcttaaaaaaaaaaaaaagtaggtaaagattgaaacaggctggcacacggttagaactcagtactaaaatataaaggagataacatattgcccactaacattttggctatttttaatatattgttcttgtctttttaatgaccacagatactctttagtatctgtttgctgcagtttttgcaggtattcatgatgcctgttatgcctttcctattttacctccttttcagattatgatagttttagcaaagaagtattcagttctagagactcattatca

SEQ ID NO: 47067 - DNA, 508 bp, Homo sapiens
tttgtttggtgaatcaggataagcatttggtttatattttatataaatgttaatgcacttgcagtttaattatatttcttaactttcaacatttcagaagtcaaatttgaggactagtccatcagattgtcttgctttcataacattctgaaaaatgggagcacccctatgcagtgagtttaaaaagtaagaggtgcctggaaagttcatgatggtatgttttggaagctggcagcactgataatgaagtgggagaaatgccattccataggtgtgccctcctgcataatggtgagctctctgagacacagcatggaacttgagagtcctctatcaagagcaaggaagacaccttagggagtggctaatttatttcacttatgatagttgagttggagagcaactattgaataaartaatataatttttaaaatttaacaagagtttctataacattgcagtgattgagggtatcaggacagaacagagctctttctagtgtggtagc

SEQ ID NO: 47068 - DNA, 551 bp, Homo sapiens
tagtgagttctcacaagatccgatgggtctatgaagggcagttcccctgaacatgctttcctgtctgccaccatgtaaaatgtagctttgctcctcccttgccttctgccatgattctgagacctccccagccatgtgaaactgtgagtccattaaacctctttttctttacatattacccagtctcagatatttcttcatagcagtatgaaaatggactaatacaatttctatagttgtcatactgacttgcatcctgagcttggtagcccacactcaagcttgccttttgaaatggaaaacatcactttttgccctctctaccctttttcactttgctccatktctagaaaagctaatttcttcgcattgatttaacaaattatcttgctttctaactttcggttagatataggcaagaagtcacattgacagactgtactaaagacttactatcttcagtaacttaccaatttgtggtgtctgatgtcttttctctggggtttcaatgaacccagggttttgtatttcaggctaagtttagagtattg

SEQ ID NO: 47069 - DNA, 551 bp, Homo sapiens
tagtgagttctcacaagatccgatgggtctatgaagggcagttcccctgaacatgctttcctgtctgccaccatgtaaaatgtagctttgctcctcccttgccttctgccatgattctgagacctccccagccatgtgaaactgtgagtccattaaacctctttttctttacatattacccagtctcagatatttcttcatagcagtatgaaaatggactaatacaatttctatagttgtcatactgacttgcatcctgagcttggtagcccacactcaagcttgccttttgaaatggaaaacatcactttttgccctctctaccctttttcactttgctccatttctagaaaagctaatttcttcgcattgatttaacaaattatcttgctttctaactttcggttagatataggcaagaagycacattgacagactgtactaaagacttactatcttcagtaacttaccaatttgtggtgtctgatgtcttttctctggggtttcaatgaacccagggttttgtatttcaggctaagtttagagtattg

SEQ ID NO: 47070 - DNA, 541 bp, Homo sapiens
ctgctggggatggggctggtgctgggatcctctgcccagtgagggctgggatgagactattatggggttgggggtgctgaagttttgaaggcagggtaaaacagaggctgrgtccctctctggaccccaggctccagggaacacctctcctgggagttcccatgctccctgtggcctgggcaaaaaaaaaaaaaaaaagtacttgcagtccgaggccccccaaaggcaaaagcctggctccgataagcatcctccccaccctgtgtgcctttcgagcccctgaggtttgtggggagtctcagaggttttgtggggagcctcagaccagatcctggtcagcagggttgaggcaggcctgagaatgtatctttagcatccagagattgggagggtgtggacggaagcaaggttcaggcatcctcagctctaactaagtatcaaatactagtgtgaatccacttcctggagctggcctctggggagccttgggttggtgtacataaacagggtctgcctgattcatcaggtttctcatggggcc

SEQ ID NO: 47071 - DNA, 608 bp, Homo sapiens
cacaaagaaagaaatattttacaaaattccaagattatctctctcacatttccacaattcaggaaagtatactatagtgttaattatatatctatttttaaatatgcaaaatatatttaaatacattgttaaacattttgattttkctcataacatagtacttctattcatcaaaaatcttgagttgactgcttatttcagagtttactgcttttgtgaaaaaggcaatttctcctgttttaaataattctcctagaatttgagatgggagagcttttcaaaatcaccatatataaaccatttatttatttcaagatctgcagagtaagggtagaaatattatttgctcaaaattataactaagaccatttattgaaagatctgcagaataaggatagaaatattatttgctcaaaattataactaagtaaatctcttgacttctagtccagaatttccattataaatgtctacaaagaataaacagctttattgcattttaataactcaattttaagaattcaattaaattctaaatattgattgacagtgcagcttattctgagaattaagggcagcacagaatagtcagaacaacatttcattaa

SEQ ID NO: 47072 - DNA, 658 bp, Homo sapiens
gaggctttgaaggttgagtagaagttggcctggaagatctccacccacacagaatgctgtaaggacaaggtgtagacctctttctccttcactaccaagcagaatgctgtaaggacaagktgtagacctccttctccttcactaccacgcagaatgctgtaaggacaagttgtagacctctttctccttcgctaccacgcagaatgctgtaaggacaagttgtagacttccttctccttcactaccacgcaggcttcagaggggtccctggcttctcttaaagctctcggcatgacactaccagcacacactgtggacacagcacacgtctgaggcatagaacatacacctctcacacctttctcagccttctcacacctcccagtaaaagatccctgggtacatatattcaccgtcaaaacaccaagcccaatacgcagactgctggccctaccaagccaagtcagcagcctaaactgaaggcctatttccaatggtcagcaggctgagtttctgcccagggacccacggtccacaggtgcatttcttcctttctgatctgatgttcggggcagcacctcaatacacacttttacctggagaatttggggagcttcaatggaactgtgtgcgaagtgcaaataatgggataaacgtt

SEQ ID NO: 47073 - DNA, 658 bp, Homo sapiens
gaggctttgaaggttgagtagaagttggcctggaagatctccacccacacagaatgctgtaaggacaaggtgtagacctctttctccttcactaccaagcagaatgctgtaaggacaagttgtagacctcyttctccttcactaccacgcagaatgctgtaaggacaagttgtagacctctttctccttcgctaccacgcagaatgctgtaaggacaagttgtagacttccttctccttcactaccacgcaggcttcagaggggtccctggcttctcttaaagctctcggcatgacactaccagcacacactgtggacacagcacacgtctgaggcatagaacatacacctctcacacctttctcagccttctcacacctcccagtaaaagatccctgggtacatatattcaccgtcaaaacaccaagcccaatacgcagactgctggccctaccaagccaagtcagcagcctaaactgaaggcctatttccaatggtcagcaggctgagtttctgcccagggacccacggtccacaggtgcatttcttcctttctgatctgatgttcggggcagcacctcaatacacacttttacctggagaatttggggagcttcaatggaactgtgtgcgaagtgcaaataatgggataaacgtt

SEQ ID NO: 47074 - DNA, 560 bp, Homo sapiens
aggagaagactcttcatgaaacagtaaatttctctggcgttaagagacctttctgtagtgaaggcaagttgcatatacrgtgttgttcataacatttattgatatttaatgttttttgccaaaataatatatccagagtggctgcacaattttaatgtagctgaacaaaaaaaattgagtttacgtttctactgacttgtttcgttattttatatgtgtttgtagatctgggcttcaagatggttttatctctaaaaatttggtaacctcttatttcattaaagttttagaataaaataaaagcattttcatgccatgttatttctaaacctacatgttgtggtctgaaagttggttttccaagtggtttaaaattgttttccattagctccattttccctgcccagcttactacctaacctgcaaaggttttcaatatgtataccagaaagaaaatcacatatggcagtactaaaatgggaagatacttttaggtattcaatttggggtgccagggagacactgggttctgttttagtatgttcaagaattccctttcc

SEQ ID NO: 47075 - DNA, 560 bp, Homo sapiens
aggagaagactcttcatgaaacagtaaatttctctggcgttaagagacctttctgtagtgaaggcaagttgcatatacggtgttgttcataacatttattgatatttaatgttttttgccaaaataatatatccagagtggctgcacaattttaatgtagctgaacaaaaaaaattgagtttacgtttctactgacttgtttcgttattttatatgtgtttgtagatctgggcttcaagatggttttatctctaaamatttggtaacctcttatttcattaaagttttagaataaaataaaagcattttcatgccatgttatttctaaacctacatgttgtggtctgaaagttggttttccaagtggtttaaaattgttttccattagctccattttccctgcccagcttactacctaacctgcaaaggttttcaatatgtataccagaaagaaaatcacatatggcagtactaaaatgggaagatacttttaggtattcaatttggggtgccagggagacactgggttctgttttagtatgttcaagaattccctttcc

SEQ ID NO: 47076 - DNA, 609 bp, Homo sapiens
tttttttttttttttttgagacagagtctcactctgtcattcaggctggattgcagtggggtgatctcagctcactgcaacctccacctcccaggttcaaatgattttcgtgcctcagcctcctgagtagctaggattatatgctcgcaccaccacacctggctaatttttgtwtttttagtagagatgaggttttaccacgttggccaggctggtctcaaactcctgacctcagttgatctgcccacctcagcctcccaaagtgttgggattacaggcgtgagccactgtgcctggcctctattgtaatcttacgggaccattgtcatataagcggtccatgcttgacctaaacgttgtggtgtggcgtgtggtgctatatgggacgtagatgtggcttatttgacctagtgttggaaaaggggcaggtggtgtcttcaggtgtttgtggtacattctgaatgcctcctggtctcagctgatgacttgctggtctgagctattattcccttgccttgtggccacagaggaggtgggattagtcccacttctggctgtgcctggtgtctgctgctggtaaaattcacaggcttcacttccctaggttca

SEQ ID NO: 47077 - DNA, 614 bp, Homo sapiens
tagcagctggatatcattaaatccctctgtctaagctattcttcttcattacctttttcctgacagctcttgctctgcacagaaattgtaactttgtgatagagatttatgtaattcaggtgtcctctatcctgaatgagagcttggctgcaaaagaatgaagggtttgccagagtccatagagttttataagaagaagaggggaaaccatacgaaattcagtgaagaaacacatgttaatgtaaccagttcatcagccgcttctacccaatctcccttttatggactattttcgtaagaatatttttctgcaaactgatgtagttagtagatgtcattatactaatgaaaggacattagctattttatyataaagtatgcaccagcactttgcagattcagtgaaactctaaaaatgtctttatctagcaacataatagaaaatactatgatagacatccaaccataaacaaattagaacaggcaacacaaatgcctttttcagtttagtgaaatagcgtagcagttgcttagttgatggtgacgtggtaacatacatatgccgatctgtgagcatttcatttggcctctactagctttcatacctcaaattt

SEQ ID NO: 47078 - DNA, 599 bp, Homo sapiens
gctggtactgaggtgggtgcaaagatccaatagacagatcttacctcaaggagtttatggtcctggaggaactaatcacctatgtgaatgcgtgattaatagaaaatagcatgataatgtgtcataaaagaagtaaagtgctataaaaatcaaatatgttatgaagataaatcttctagagaggtctaggtataagtataggtaaaatgctattgaaatatgtaggaagaagagattacttctgattttggaccacaaaatgaagtgtcatttaaaacggagtctgaaagagagaagttatgtcctaaaaagatttaaatggaagttattatttttaaatatcttgttatttcttattactaaggaagtgtggtattatggaaagaatgtgggctatattcaattcacttctgacactaactagagctcgtgcagatctctcatggattaagagctcagtcacacmagactgtgccctacttcatataccaattgcaagcagtaggttcccaggtcaccacaacttctgaccagtttggccacaagtgggaggttaccacaacccccttctcaggttcagtaatgtgctagagcagctc

SEQ ID NO: 47079 - DNA, 614 bp, Homo sapiens
cacaaatagaattatcagaagctgtgagtggctgtggagcacatcaaatgttcctacatgatactttaagcaacacttgttaaatagtgagaagccagattgcccaaataacaagtcattttcaaagggcaaaatcttcgaggttctcactctaataattagagtgaaatggctataaagtttttactgctatgattctttaacttataaaatggatactgtagaaagcttagagaatgattacttggcagtttttcatacatgaaattaaagtatcatgtagatagaaataaaaataaaacagattattttgagtttataaataattatacatattggcaatgaactgaaacttaaatacaaaaggtgggcaggycatattttggaaaacaggtaaatcccccctcttttaagtgaccacaagacacttcagagttgcccttggcttgctttctctgggctcatactaagagcaacacacacagagtaggctttttaaagatcccaggctttggaagcagagaaacctgggaaagaatccccagcttgtccatttataaaggatattacttcaatcctcaattatcctaatctatagggacagtaatattaat

SEQ ID NO: 47080 - DNA, 825 bp, Homo sapiens
tcgcgaatattttgtatccactgaattatgtactttcaaaggatgaattttatggtattttaaatctatccagtaaaataatttaaaagtttaaaaagtcatggatacgtaatgaattaggaacaaaattcaggtcaggttttaaaatgacagtcacatcagagaaatctttttttttcttttttttgagacagagtttccctcttgtcacccaggctggagtgcagtggcaccatcttggctcactgcaacctctgcctcccaggttcaggtgattctcctgcttcaacctcccgagtagccaggactacaggcgcgcgccaccgcgcctggctaattttttgtattcttagtagagatggggtttcaccatgctggccaggtcggtctcaaactcctaacctcaaatgatccacccgccttgggctcccaaagtgctgggatttcaggtgtgagccacggcgcccggccactaaaaggtttttatggggtatataaagcatgattgttttattttacttttgggtgtgcaacactgtctagaatggtcagtctgtagacgttgaagagacattgccatctgaaccagaaaatggagctcttttgcgatcagagagataccaaggacctagaagacgcrcatgctcagagacccttgcagagtcccgcacagctgtcctccagcagagaagagctgctcagctacctggtggccctgctgcggcaggggagcagagggcgtcgccaagcaaagccaggctcaaggaggtacctcactcttaaaccctgtgcttgaaacccgtgtctttagcatggatgtggcaa

SEQ ID NO: 47081 - DNA, 596 bp, Homo sapiens
tatgaaaatatatataaatatataatatataaaatataatatatataatatatattatgtacattaagttaatacttgataaactgccctttatatatatatataattkagtatatgtattcaattagtttgccctttattcaattagtttgccctttatatatatatatagtatatatatataattgaatatataagtattcaattagttctgtccctctagagaaccctgagtaatacactcatctctactaaaaataaaaaaattacccaggcatggtggtgccgcctgtagtcccagctactcgggaggctgaggcaggagaatcccttgaatctgggaggcagaggctgcagttaactgagatcaccccattgcactccagcctgggtgacagagagagactatctccaaaaaaaaaaaagtattaactgttaagagacttgcagacatattctcaagccatcacttacagccacaataatagaacatatttcatacatttcctttaagattgaatgagttaaatgcagaccatgtaaatatgtgaggagctcctagcaaaattcttcgcacatggtaagcactgagtaaa

SEQ ID NO: 47082 - DNA, 596 bp, Homo sapiens
tatgaaaatatatataaatatataatatataaaatataatatatataatatatattatgtacattaagttaatacttgataaactgccctttatatatatatataattgagtatatgtattcaattagtttgccctttattcaattagtttgccctttatatatatatatagtatatatatataattgaatatataagtattcaattagttctgtccctctagagaaccctgagtaatacactcatctctactaaaaataaaaaaattacccaggcatggtggtgccgcctgtagtcccagctactcgggaggctgaggcaggagaatcccttgaayctgggaggcagaggctgcagttaactgagatcaccccattgcactccagcctgggtgacagagagagactatctccaaaaaaaaaaaagtattaactgttaagagacttgcagacatattctcaagccatcacttacagccacaataatagaacatatttcatacatttcctttaagattgaatgagttaaatgcagaccatgtaaatatgtgaggagctcctagcaaaattcttcgcacatggtaagcactgagtaaa

SEQ ID NO: 47083 - DNA, 591 bp, Homo sapiens
tgactgttgtatctatagtgagcagttctggggatgattttgcccccgctccccatgggacttttggcagtgactgaagagtgaagacacttttgcttgttgtaactgtggggagagtgctatgggcatctactgggtagaaaacagggatgctgctaaacattccacaatgcacaggacagccccccataacaatgaacgattcagccccaaataccaacttccaaagttgagaaactgctgtatgtgatcactgttgtgtggcagatgtgctatgactgtaaagacaaggctgaggatgacaaaaccaaagggcatgaaaaaaattagttcakggtgacaatgttgaggaaccattgaattaaacaacctctcaagtgcctatatctggatttttttttttagttgatttggcaggtgggttgttacacactccttagtggattccaacttccatggtcactgtcctgctcggactttttttaggtgaaaataaatctctttattgtttaaaaactctgttggcgttctaattgacatagaaaaagaagaaggagtacaacaaattttgtggggctacaagcacagagc

SEQ ID NO: 47084 - DNA, 539 bp, Homo sapiens
gaggggacacagagccccctccatgggaggagtgtcagcatcacattgtaagaagagaatacaaatgtggtcagttttggaaaatacaagccgccccacccactccagaatgagtttggattttattgtataygtgacagtaggatggcaacaagactgggtttacatttgagaagtggctgggtggacggtggattagaagggagctgagtggaatccttccagttaggaggcactagccctagtccagctaaggggtgatgtggatttgcgccctgggcagcagtggagatggggtgggcaccaggacctgcacactttgtggctcactagtacaatgcccagactcagacatgtcagcaaggccgtgcaggacgtgcttgggggtctagactttatcctggggcagtggggacctactgagggattctaagcaagaaagtaatctgctcaaactgtgtcttaaggaaaactctcaaagaaggctgaatctaggacaagactcgcaatctgacctttgtagtaatggcccagagaaa

SEQ ID NO: 47085 - DNA, 584 bp, Homo sapiens
cagcaggtactcacagacaagtacatacatgagattatacaaccagggaaatggagaacgacagatatggaaagactgcctaggttcttgaggactctacagttcttggttacagacttttctaaggcttggatacacttcctttgagaaaacagcacagtgacaaattgacataaccacgttattgtaatacaatcctccttttttctttttttgagacggatctcactctgtagcccaggctggagtgcagtagcgcgatcttggctcactgcaacctctgcctcccaggtcccggttcaagtaatgatcctgcctcagcctcccgagtagctgggattacaggaacrtgccaccatgcctggctaatttttgtattttcagtagagatggggtttcaccatgttggccaggctggtcttgaactcctgacctcgtgatccacccactctggcctcccgaagttctgggatgacaggagtgggccaccgcgcccggccaatcctccttcttttctttcttaagctaacttaagtgagtttctgttgtttgcgccacccacaatatacaaaaagccctattaa

SEQ ID NO: 47086 - DNA, 237 bp, Homo sapiens
agaaaaaaaagaaagaaaagattagaaaagaaaagaaatattgtattgaaggaaggaaggaaacaaaagatttatatgtgggtggtagtaggaatatggtaattttttccttttcctacttttcaaaatatygacaaatttttatacatttcaaaatatggattttttttcttttttgtcttccacttttcaaaattgtctatgttttaacacaatgaacatatgtaacatattacc

SEQ ID NO: 47087 - DNA, 587 bp, Homo sapiens
agtggcagtctctgccacctgtgaggcaggacacagctagcccaggcctggtgcacagatccagagaggagctccaccctcactgtgtcatgcagagaaggagtgtgctaggggtctgtgtgcatgtggagaccacaattcacagtccgccactcagagttaaatgtcagcttcatttgcttcactggcttatcttaaattacaattacaaatctttgaaatcccttttaaacttcctaccagctccaaacaggcacgttagcagccattgatccagcacatcggggattcttcgcttcaaggagtggatcccttttcgtcagtgaatgaaaacaagactcttttgcctcaaatattctgacagcctctttgcaaaggctgtgggtcatttactcccagcctccacaagaaaaccctagaagcacatccctttgtatggtttgagtttgtgtcgaaggcactctaagcatcccaagtgggtttttattagttatttcttactagcagcctatcaggtgtggagcrttttatagatgctccttttatagacgggagtatcaaggacatgggatgctcgctgtctcaca

SEQ ID NO: 47088 - DNA, 540 bp, Homo sapiens
agaaaattacttgaggatttactccagaaaaatgacagctaaacacaaagagtgaaattcaaaaaaaaataaaaaaaaaagaatgaaactcaaccaagtgtccaataaaaagaaattctaggatgatatctgtgtgtgaggctgagaaagcaattggtccaactggaacaggatgtcagcacattccatgtatggtatgtccaagaaaaaacttacagcttccaagcaatgtacaaatgtacagaatgacaatgatgcttgttattagtgacatggtaaaaagaaaaaaaagaaaaaaagaaaaaaaaaagagagagagaaagaagtgtcctatctcaataacgaattcacatttagaacctccaagaaaaacactatcttamaaaaatcatggcccaaatacgaaacaaactaaaatactaaaatactgcgtgattttgaatagtttataaattataagaaaataaaaagcatttatccttttgacctgtatagtgagcatagtgtctcttgagggtcaagagcttgtgatgctagaca

SEQ ID NO: 47089 - DNA, 574 bp, Homo sapiens
acacagttcagctgccaaatgcattactgcatcgtaattctaagtcccatgtttacatttctaagaaacaatgtttaattactctagaagcaaaatataagggagctactcaaattgttaacaaatcgtaaccacaagagctgccttgtacaggggtacaaacagagaggaaaggcagtaaagggacaagggcctacacgacatctggtggcttctcttccccaacactcaaagcataatgcttcctgggaaatctttccatcaaactattcataatgataactcatttttaagaccatccacacagamtatcatagctgggcacgtctgtacatgtcagaaatatggggagataatacaactgaaaaacatccaatcttggggacaaaaacattacgagaacacttgcgctgaaaaccctttttagtcttgggaaacaataagacaaaagcaggtcccaatgcagatccatcatgaatatcttgatgaaggaatggaagggagctcgaagctgggttttaaaaaagcaaaaattcctagagttgcatcttatgccacttaaccatgtgatgag

SEQ ID NO: 47090 - DNA, 566 bp, Homo sapiens
accagtgcacaaaattgtatatacattacagttacagccatgtaaaaggctttcctctggtaggaaagaatccctattggagaacataccaaaccgttaacaggaatcattgtgtttagatggtagaatcataggtaatttttttcccttctttccttttgtaagttttctaaagcttttcccatgcaaggactaactaggcctgaccgtgcttagctttttgagatcagatgagatcagacatattcaagggtagtatggctgtaggctaawttttcttttcctttctcttttcctttttttttttttttttgagatggagtcttgctcttgttgcccaggctgggagtgcagtggcatcatcttggcttactgcaacctccaccttcctgggttcaagcaattctcctggcccagcctcctgagtagctgagattacaggtgcccaccaccacaactggctaatttttttttgtatttttagtagagatgaggtttcaccatattgtacaggctggtctcaaactcctgacctcatgatctgcctgccttggcctcccaaagtg

SEQ ID NO: 47091 - DNA, 566 bp, Homo sapiens
accagtgcacaaaattgtatatacattacagttacagccatgtaaaaggctttcctctggtaggaaagaatccctattggagaacataccaaaccgttaacaggaatcattgtgtttagatggtagaatcataggtaatttttttcccttctttccttttgtaagttttctaaagcttttcccatgcaaggactaactaggcctgaccgtgcttagctttttgagatcagatgagatcagacatattcaagggtagtatggctgtaggctaaattttcttttcctttctcttttcytttttttttttttttttgagatggagtcttgctcttgttgcccaggctgggagtgcagtggcatcatcttggcttactgcaacctccaccttcctgggttcaagcaattctcctggcccagcctcctgagtagctgagattacaggtgcccaccaccacaactggctaatttttttttgtatttttagtagagatgaggtttcaccatattgtacaggctggtctcaaactcctgacctcatgatctgcctgccttggcctcccaaagtg

SEQ ID NO: 47092 - DNA, 525 bp, Homo sapiens
ccccgaatctaaagtgaaattaaaagagaaaagaaaagaaaaaaagaattccggatccttagagagaatttaagaagctaccccaggttcagggggagcagagagaggacatagctgaagatcacctggtccacatgagctccactctaaatgccaactkccgcctctcacgtcttccctgtgtcaccctttctctcattgcccctgttgctgattcttgtttcattctttctcatcccaggaacctgctcctaggccttgacctctttccttgatgagctctttcattcacagacactcctatgctcacagaatctctgataacgtccttcatgctcacaaagatttcatcttcctttacacacactctcccttaactatgtttctccctttattaaaataaaaaatggactggcccttcaatttcatgcttgtcccaaatgccctaaatggatgtaagagggctgctaacttttcaatgttctctgatctcactcttacaaggacgtgtatctttttcttatc

SEQ ID NO: 47093 - DNA, 573 bp, Homo sapiens
gacgtaagtattaaagatgcgatcctagtgtactgcagccttgtgaggctgacaagatggcttcttacagaaaggaatgacttgtgtaagagcagcctaagtatataaatttgacatataagaaatttaggccgggcatagtggctcttgcctgtaatcccactactttgggaggccgaggtgggtagatctcttgagcccaggagtttgagactaacctgggcaacatgacaaaaccctctctctactaaaaatatgaaaaaattatccaggtgtggtgatgtacacctgtggtcccagctacttgggaggctgaggtagaagggtcacctgagcccaggaggcggaggttgcagagagccaagatcacaccactgcaytccaccctgggtgacagggtgagaccctgtttcaaaaaatcaaacagaaataaattgaaaaataagtttacagatgtaaatacagaaccctgttggaaaacaggatttgaaatatagtatagttcaccaaaataatgggtaggagagaactgtcagtttaattctataaaaattttaattatacaatagttga

SEQ ID NO: 47094 - DNA, 492 bp, Homo sapiens
ttttaattctgtgagttcagtgccacctggtcttcaccttttcagaagcattcacagtattagggagcccagttatatgataggatctcctattgtcaacttcaacctacaaagaacacccatcaccaacttgcacgtatacttttgctatgttccttattttcttagtgacatgtacgttaggtccttccagggaacctagtcagatggtgggttcccttgtattacatamaatctcaatttaaacatgcctacctcctgagccccttgaactacatactaagaaaaagtgattccagcatccccgcctagtttactgcccactgctagtgtattcaagtttcaaggagacatcctatcaccgcagcatacccagctcccagtgtgctttcagggaatttaaactgagagccacatgagcaggtttccatgtgaagacatttttatctattcatccttatatttcacaattctctgttcaagatccactcc

SEQ ID NO: 47095 - DNA, 492 bp, Homo sapiens
ttttaattctgtgagttcagtgccacctggtcttcaccttttcagaagcattcacagtattagggagcccagttatatgataggatctcctattgtcaacttcaacctacaaagaacacccatcaccaacttgcacgtatacttttgctatgttccttattttcttagtgacatgtacgttaggtccttccagggaacctagtcagatggtgggttcccttgtattacatacaatctcaatttaaacatgcctacctcctgagccccttgaactacatactaagaaaaagtgattccagcatccccgcctagtttactgcccactgctagtgtattcaagtttcaaggagacatcctatcaccgcagcatacycagctcccagtgtgctttcagggaatttaaactgagagccacatgagcaggtttccatgtgaagacatttttatctattcatccttatatttcacaattctctgttcaagatccactcc

SEQ ID NO: 47096 - DNA, 492 bp, Homo sapiens
ttttaattctgtgagttcagtgccacctggtcttcaccttttcagaagcattcacagtattagggagcccagttatatgataggatctcctattgtcaacttcaacctacaaagaacacccatcaccaacttgcacgtatacttttgctatgttccttattttcttagtgacatgtacgttaggtccttccagggaacctagtcagatggtgggttcccttgtattacatacaatctcaatttaaacatgcctacctcctgagccccttgaactacatactaagaaaaagtgattccagcatccccgcctagtttactgcccactgctagtgtattcaagtttcaaggagacatcctatcaccgcagcatacccagctcccagtgtgctttcagggaatttaaactsagagccacatgagcaggtttccatgtgaagacatttttatctattcatccttatatttcacaattctctgttcaagatccactcc

SEQ ID NO: 47097 - DNA, 575 bp, Homo sapiens
attattgaggtctcttgggcccagatggtatcaccccccaagtcatgttggtccagaagctgacgtagcatttgtttgtcctccacccatgatgaattagcgacaaagtcaggaactgaactctggttcctaaatgcctcctatcacttcatttgcttgtaccttctgtctccaactctgaattttatttgagacatctttgtctttcaggaaagatrtctgggtagcattataacagatgaataaagttgactttcagtgtaataaaagtccaaccacactgttgaaagaactatggtaaaatacatataacatgatattgcgcatagttttttttgtaaagattgctaaggagctttaaggtaccagatgaaaatgcaacattttctccccaactggagaaagaaaatttggataaaaatgtttttataattaaagttatgttttaccacactttacttggaatgaggaagaccaaacttgttttgtggtcctttatacattttagctaatttagattcatttgcgaaataaacaacttgagattatttataagggaaaggattagattttga

SEQ ID NO: 47098 - DNA, 575 bp, Homo sapiens
attattgaggtctcttgggcccagatggtatcaccccccaagtcatgttggtccagaagctgacgtagcatttgtttgtcctccacccatgatgaattagcgacaaagtcaggaactgaactctggttcctaaatgcctcctatcacttcatttgcttgtaccttctgtctccaactctgaattttatttgagacatctttgtctttcaggaaagatatctgggtagcattataacagatgaataaagttgactttcagtgtaataaaagtccaaccacactgttgaaagaactatggtaaaatacatataacatgatattgcgcatarttttttttgtaaagattgctaaggagctttaaggtaccagatgaaaatgcaacattttctccccaactggagaaagaaaatttggataaaaatgtttttataattaaagttatgttttaccacactttacttggaatgaggaagaccaaacttgttttgtggtcctttatacattttagctaatttagattcatttgcgaaataaacaacttgagattatttataagggaaaggattagattttga

SEQ ID NO: 47099 - DNA, 590 bp, Homo sapiens
cagcttccagtgatcttcctgtcttggcttcccaaagtgctgggattacagacatgagccagttgcacccagtcacattttttctaaatatttgttgacagcttaccatgagtaaagctttggtctggaagcctagcatacaatgagacaggacatacagaagctacactcaagaggctgaaattacttagaaagcaataaacataagatttacaaaagatctaccccttgatgttgtctgttggattttgcagattagaactaattttctgaaatatttctattatatttttggctttagatgagagctgtacaaaaaaaaacacaacaacaaatgatacaaaaggttaaattcctggttccactgtcatttggagctaagtcactattgctcaagacctccatttttacaactgtaaaaytgaaatattaatacttgtgttaggatgattattagaagactaaatcaggctgcaggtaaaagggctacaatcaattttttgaggatattcacaagtactgtaaaattgactgctacacctgacaatcctagagaataaaagagattatgaagaggtatcttgtggtat

SEQ ID NO: 47100 - DNA, 614 bp, Homo sapiens
agccttggggagtggacccggcgggaaggagcccaggaggggaactgagctgggggcgcagttcggggagatctcccttgtccttccagaagccttccctcctctgaaacccgctgcagtccacagtccctcaggtttggcccccgccccgcttaggctccatccaccagctcaccgtctcgccyagcccgggaccagccgaacagcaggaacagaagcgggaggcacagaagcaaagctgggatggcggctgctgccattggggaccaggagggctggggacaagagatttaatcaaggtggatcctggaagatgaaatcacctctgtgctgaaaggctggcttatatactgttagttactggggaatgtaccggggaatgagtcacctcggttctgaaaagccagattttaatgctactgggcgtagtcactgggcgcgttccacctcttcgtttcattgtctggacgaaatccagtttccatgctagtgtcccttcccttcttcacccgctccggcagcttggtggcctcgtgcccgggccccactcctgccaggacacgattccttccacgacagactcatttaatcattatagcattttttattaatgg

SEQ ID NO: 47101 - DNA, 484 bp, Homo sapiens
ggggcagagagcaaagatgcaggaggctttagctgccaacttcaaaactaycatggtcctagaaaaaaatattttattcaagctcttatttcaaattgttggtttcagctatactgaagaaaattttaaggtaaagtacttccctttaaattgatgagcaatgagctatcaactgacacttagacttcactcggttaacatttattaaggaaagactcagcaggcaacattcctagttgcaatgtacaaaggcgatggtctctgtagcaggagagagaaaatcaacaggtaaaaaagaaaatatatatatatttttcagagtggcaagagctgataaaaacacgatggtatgattgaaagtgtttgcaaattaaattcaaaggtaggtaagggtgaatgtcaaggcagaatcaactacacagttactgggagcagctgtcatcttaagttacactcaagcacaaggtattcagaaaaaaatttg

SEQ ID NO: 47102 - DNA, 565 bp, Homo sapiens
atgcagggagtctctgccagctgcagaagttcagctcctaggaagaggggatgaatttctgtgttttatttcaatggtgtagcatgagtgtgcagagccaacagtatgataactggtggtcctcacgtatgtcttggctacatcatcctgtgacatggtcctgaggctgaccaggggatggagctgaccgtcagagccccaaatttagcatgaggcatagccratatatgggacaaaggtcaaaatttatgtcacaaaaggtaacctgggacttgcctgtcactgcagatcctgcactctacaacatagcagtgtttagtgcctgtttaggttgtaagggtcatcaggtcttctaaggagtcacagcatatatagctatattttctgaatataaatctatgtgttaaacgaaatgacacaggacaggtcatggagagcatagaagaactgtgtttggagactcataagtgctctggtctgggcatcagaaacttgatacagtttgcatcacatccaggaggaaggatcattcaggcatttggatttcgttgcattgctgacatct

SEQ ID NO: 47103 - DNA, 895 bp, Homo sapiens
caattaaatagtggctctggttgcacaacattgtgaatgaactaaaactacagaaatgtctactctcaaaaggtgaatttcatagtatgtgaattatctcgcaatcaaaaaatggtttagatgaccgactccactatttcaccccgaacgccttcagtttcaaggcacctttagcacaggagctatttcaatctccatcttaggtctgttcattccggccagggtgggccttgtggtagaaacagccttcagctcctacgccggtaaactctgtttttcctggaagaattccccagctaaagtctgacacacgccacatcatggatgcagcttgaggacagtaggctacatgaaacaggccagtcacgaaaagacaaatgctgcatgatttcactcattggaggtacctagggtagtcaaatttatgaagacagaaagtagaaccgtggttgccaggggttgggggaagggagaatggggagttatggtttaatggctgtgcaggttccgttgggcaagaggaaaaattctggagattgactgtacaacartgcaaatgtccttaacgctactgaactgtacacttaagatggtgaatttcatgttatgtgtattttaccacaattaaaaaatgtttaaatggcttttgccatcacatgtgcgcaaacatgtacacatgcatgtacacatacatacacacccttttccccctttgattgcatccatcatcagtgtgagggtccagatggctccaagtaaaacaaaaacaaacacaacccaaactcaggcccctgtgaaagactagacttacactgctttagatggcaaaagcaccagggttaaaagacctgagcttctacacaggttattttggtttaaaactctgcacctaaaa

SEQ ID NO: 47104 - DNA, 553 bp, Homo sapiens
tacctactgcatcccaggcactgttctaggcactggggagtcagcagtgaataaaacctgtcttaacagaacttatggcaaactctgttatagctataaacataccaatagtttaacatttagttcttcatcctgaaacattttgattttttwaaattaattttaactacagtcaacctcactaatttcatagatataaataatgtacatttccctcaatccctctgcccttagagaagcttcctcacccacacaacaaagtcagatctaaatcagactcccaaaatgccattagttagggtggggaggaggcttggtaactgggagctgagttgaggtccataagcctttcccagtcccaactcgctcttcaatgcggctacctattcagtccactattctctcagtggctttatctgttcccatccctttcctaccaacaccaagaagtatctttaaattctgtgaagttttctcatatatccaagttacatgggggtcaaaaggctacaggtgataaattatatacttacagataatagtgtaaatgtat

SEQ ID NO: 47105 - DNA, 303 bp, Homo sapiens
atacaaaaaattagccggcatggtggcgggcgcctgtagtcccagctactcgggaggctgaggcaggagaatggcgtggacccgggaggcrgagcttgcagtgagccgagattgcgccactgcactccagcctgggtgacagaacgagattccgtctcaaaaaaaaagaaaaaaaaaaaatcatccacagaccttaacagtcattctttcagttagtcaacaaactgatagctattgcagtaaacgcaggtggatagggctaatatgagaagataagaactgaggcttaaatattattttgaa

SEQ ID NO: 47106 - DNA, 303 bp, Homo sapiens
atacaaaaaattagccggcatggtggcgggcgcctgtagtcccagctactcgggaggctgaggcaggagaatggcgtggacccgggaggcggagcttgcagtgagccgagattgcgccactgcactccagcctgggtgacagaacgagattccgtctcaaaaaaaaagaaaaaaaaaaaatcatccacagaccttaacagtcattctttcagtyagtcaacaaactgatagctattgcagtaaacgcaggtggatagggctaatatgagaagataagaactgaggcttaaatattattttgaa

SEQ ID NO: 47107 - DNA, 538 bp, Homo sapiens
ttggtcaaaatacaactttggcctaattttagaatctctattgtattttcctctgaagctgaacacctcatggagttaaaaaatagccaggatttcagtcaaaatagtgtgtagtctgtattctctcctatttcaggactccatgagggcaaaatactattcataaggaatcaatgtattaatagtattaattttgcaagagagacttttgcacaaaatgttattgaagcttaaaatagggaatacttgactagctagaaaaatatatattaaagcagaaattaaaaaaaaacaaattacatcarcaatgaaattctgatgatatcaattagccaaacaaggtataaagaaagcaacataaatggacaaatgaagagaaagagatatatttaaacctattcactaaaactagaacatgcaagatttggcaagaaaacacaaacaaatgctataatatgtctctaataaaagattttgaggacattaaaaatgtttgctttcatgaaacttgcagactatttgaggagatataagacat

SEQ ID NO: 47108 - DNA, 573 bp, Homo sapiens
aatagctgtgtagaaacaagaagaagtaatataggtcaaatgacaaaaaagaaaaaattctagaaattcttctctcattgggagatctgtaaaaacagtgtctctcatgtttgtcattactgtatcttggggcacagtgtgtgacatgtggtcatgcaataaataactgttgaatgaaggaaaggcatgatgactatcacagaagatctttctgcagtcattttgacatcatcttaccttggtgcttttatttccatctgcacatttttattatagtacaaaatttttttaatgggtgaaaaaggatgagtataactgttttctccattaattgcacatggtattttggaacaacattgtgctaggggtcagatagcttctggtgggatggtcccattcctgtcgtgatgtgaccttgarctactcaatatctgcagtccagttgtcccattgacaaaaatgcagagaatcacatctggcaagattttattacagatggaattattttaatagcaaaatacaatcatgaaagatgcatgctgggattagtaagagaaatattaaactatgttg

SEQ ID NO: 47109 - DNA, 573 bp, Homo sapiens
aatagctgtgtagaaacaagaagaagtaatataggtcaaatgacaaaaaagaaaaaattctagaaattcttctctcattgggagatctgtaaaaacagtgtctctcatgtttgtcattactgtatcttggggcacagtgtgtgacatgtggtcatgcaataaataactgttgaatgaaggaaaggcatgatgactatcacagaagatctttctgcagtcattttgacatcatcttaccttggtgcttttatttccatctgcacatttttattatagtacaaaatttttttaatgggtgaaaaaggatgagtataactgttttctccattaattgcacatggtattttggaacaacattgtgctaggggtcagatagcttctggtgggatggtcccattcctgtcgtgatgtgaccttgaactactcaatatctgcagtycagttgtcccattgacaaaaatgcagagaatcacatctggcaagattttattacagatggaattattttaatagcaaaatacaatcatgaaagatgcatgctgggattagtaagagaaatattaaactatgttg

SEQ ID NO: 47110 - DNA, 573 bp, Homo sapiens
aatagctgtgtagaaacaagaagaagtaatataggtcaaatgacaaaaaagaaaaaattctagaaattcttctctcattgggagatctgtaaaaacagtgtctctcatgtttgtcattactgtatcttggggcacagtgtgtgacatgtggtcatgcaataaataactgttgaatgaaggaaaggcatgatgactatcacagaagatctttctgcagtcattttgacatcatcttaccttggtgcttttatttccatctgcacatttttattatagtacaaaatttttttaatgggtgaaaaaggatgagtataactgttttctccattaattgcacatggtattttggaacaacattgtgctaggggtcagatagcttctggtgggatggtcccattcctgtcgtgatgtgaccttgaactactcaatatctgcagtccagttgtcccattgacaaaaatgcagagaatcacatctggcaarattttattacagatggaattattttaatagcaaaatacaatcatgaaagatgcatgctgggattagtaagagaaatattaaactatgttg

SEQ ID NO: 47111 - DNA, 582 bp, Homo sapiens
actcccgtggcccccggaaaacatcagatggcctcaggatatttgtccatgggtgtccagaggcacgtccaactccccacgcccagacagactcttctccctcccaccccacatactgcttctctcccygttttccttgtttaggtgaaaagcaccagcactcatttcaatctcagaatcactcccgggggtgtgttcttcctgccacacggaatctttatgctagacatgaaacaactaggcttagggaagtggaggagcatgtctaagccacacagcccgccaggggtgtctgactgcaaggctagggcccttgaccactgccctacaccccagcatgtgccccagccggggaccccgggcgctgtcctcaatgcctccccctcaccactcaccgccgccccattgccaggacccgagactcacaggggtctcaggtcagctcccctgaggacctctacccctggctccgttcacccaccctcatcctcacctggatacatccatctcctaaccagtctcccgtcttcctctcttcaagccacacttttaagttgagaaaaggtgctgttcctacaacac

SEQ ID NO: 47112 - DNA, 582 bp, Homo sapiens
actcccgtggcccccggaaaacatcagatggcctcaggatatttgtccatgggtgtccagaggcacgtccaactccccacgcccagacagactcttctccctcccaccccacatactgcttctctccccgttttccttgtttaggtgaaaagcaccagcactcatttcaatctcagaatcactcccgggggtgtgttcttcctgccacacggaatctttatgctagacatgaaacaactaggcttagggaagtggaggagcatgtctaagccacacagcccgccaggggtgtctgactgcaaggctagggcccttgaccactgccctacaccccagyatgtgccccagccggggaccccgggcgctgtcctcaatgcctccccctcaccactcaccgccgccccattgccaggacccgagactcacaggggtctcaggtcagctcccctgaggacctctacccctggctccgttcacccaccctcatcctcacctggatacatccatctcctaaccagtctcccgtcttcctctcttcaagccacacttttaagttgagaaaaggtgctgttcctacaacac

SEQ ID NO: 47113 - DNA, 582 bp, Homo sapiens
actcccgtggcccccggaaaacatcagatggcctcaggatatttgtccatgggtgtccagaggcacgtccaactccccacgcccagacagactcttctccctcccaccccacatactgcttctctccccgttttccttgtttaggtgaaaagcaccagcactcatttcaatctcagaatcactcccgggggtgtgttcttcctgccacacggaatctttatgctagacatgaaacaactaggcttagggaagtggaggagcatgtctaagccacacagcccgccaggggtgtctgactgcaaggctagggcccttgaccactgccctacaccccagcatgtgccccagccggggaccccgggcgctgtcctcaatgcctccccctcaccactcaccgccgccccattgccaggacccgagactcacaggggtctcaggtcagctcccctgaggacctctacccctggctccrttcacccaccctcatcctcacctggatacatccatctcctaaccagtctcccgtcttcctctcttcaagccacacttttaagttgagaaaaggtgctgttcctacaacac

SEQ ID NO: 47114 - DNA, 582 bp, Homo sapiens
actcccgtggcccccggaaaacatcagatggcctcaggatatttgtccatgggtgtccagaggcacgtccaactccccacgcccagacagactcttctccctcccaccccacatactgcttctctccccgttttccttgtttaggtgaaaagcaccagcactcatttcaatctcagaatcactcccgggggtgtgttcttcctgccacacggaatctttatgctagacatgaaacaactaggcttagggaagtggaggagcatgtctaagccacacagcccgccaggggtgtctgactgcaaggctagggcccttgaccactgccctacaccccagcatgtgccccagccggggaccccgggcgctgtcctcaatgcctccccctcaccactcaccgccgccccattgccaggacccgagactcacaggggtctcaggtcagctcccctgaggacctctacccctggctccgttcacccaccctcatcctcrcctggatacatccatctcctaaccagtctcccgtcttcctctcttcaagccacacttttaagttgagaaaaggtgctgttcctacaacac

SEQ ID NO: 47115 - DNA, 582 bp, Homo sapiens
actcccgtggcccccggaaaacatcagatggcctcaggatatttgtccatgggtgtccagaggcacgtccaactccccacgcccagacagactcttctccctcccaccccacatactgcttctctccccgttttccttgtttaggtgaaaagcaccagcactcatttcaatctcagaatcactcccgggggtgtgttcttcctgccacacggaatctttatgctagacatgaaacaactaggcttagggaagtggaggagcatgtctaagccacacagcccgccaggggtgtctgactgcaaggctagggcccttgaccactgccctacaccccagcatgtgccccagccggggaccccgggcgctgtcctcaatgcctccccctcaccactcaccgccgccccattgccaggacccgagactcacaggggtctcaggtcagctcccctgaggacctctacccctggctccgttcacccaccctcatcctcacctggatacatccatctcctaaycagtctcccgtcttcctctcttcaagccacacttttaagttgagaaaaggtgctgttcctacaacac

SEQ ID NO: 47116 - DNA, 603 bp, Homo sapiens
ttattttttgagacagtctcactctrtcatccaagctggagtgtagtggcgtgatcacggctcactgcagcctcgacctcctggggctcaagtgaccctcccaatctcagcctccagagtagctagaaccacaagtgcatgtcactatacccagctaattttttttattttttgtagagatggggtctccctttgttacccaggctggtctggaacttctgggctcggctcaagcaatcctcccacctcagcctcccaaagtactgggattacagatgtgagccactgtgcccagccacttttaaagaaaagaaagtgagatagacgttttcaaactgatgacttctctgaaaaaagagaaacatacttcagataaaataaaacataaacacagtcaagaataagttatactgttagctagcactgacattctctgagtgattatactaagtaagtgctaagtatctaatttctacgttgtgttctttgcaaaatctaactctatttacagttccatatagataaatgtatttttcaagccttaacaaaaaaagtatatcagattgtattacatttcatcctaaccttgccagtttttagggc

SEQ ID NO: 47117 - DNA, 603 bp, Homo sapiens
ttattttttgagacagtctcactctatcatccaagctggagtgtagtggcgtgatcacggctcactgcagcctcgacctcctggggctcaagtgaccctcccaatctcagcctccagagtagctagaaccacaagtgcatgtcactatacccagctaattttttttattttttgtagagatggggtctccctttgttacccaggctggtctggaacttctgggctcggctcaagcaatcctcccacctcagcctcccaaagtactgggattacagatgtgagccactgtgccmagccacttttaaagaaaagaaagtgagatagacgttttcaaactgatgacttctctgaaaaaagagaaacatacttcagataaaataaaacataaacacagtcaagaataagttatactgttagctagcactgacattctctgagtgattatactaagtaagtgctaagtatctaatttctacgttgtgttctttgcaaaatctaactctatttacagttccatatagataaatgtatttttcaagccttaacaaaaaaagtatatcagattgtattacatttcatcctaaccttgccagtttttagggc

SEQ ID NO: 47118 - DNA, 1093 bp, Homo sapiens
aaaaaaacaaaaacaaaaaaacagggtgagattcttcacgtcctttacaaagggcaaagatgaaaagaaagaagtcattagtgacaacaaatgctcgtcacaagacttagggcttgacaaaccaggacttatgactacaccaacattcaagattaatgttctttttggttcacctggagaactctagacatgattaaaagtttgtctctcaaccacatcctctcttatatatgttcttcccacaaacaaatgttttcatcagcattggagaaggctatacccataatctcattcccacactcaggaaaattatatttaatattgtgaagaagactgatgttgtgtattttaccacctgcagagctagttaaaattacatatatatgtgtaattttaacaaaggaaactatatatgtgtatatatatatacatatacagcttatatatacaaaaagtttttaatttcttgactagttatgttttcttctaccagcataaaagtatttctcatgtaatatttggatctaaagttacaaaggaaataatattttgggcaacacctgagggaaaagagtttattcttttttattacaatgtacaaatgcagagatttattttctttacacttttatacttgtatggcattttaaatggtgcttttcatactatgaaaaaatatttatctcaaagtatttagggatagaagcaatactagacattgagaaatgcagaggtgggaagaaaaaataggaagagaaaaaatgtatatgattgctgggatagcaatgatttttaactagaaggtaataattagattcaaatttctaaacccctggtcttatactttatagtaacatgaatttataggaaatttaaataggcagaaatcatattaatttctatctaaatgaaaaaaccagatcaaatgttytgtcaaaaatggatctttgattcaatttgaaaattttaatctaaccaccagttgcattatacgaactgaaacacttttgttttgttgaacgaagaatataaaaaattaaaagacatagtttctgaatttatgatatggataattattattttatgtacttgg

SEQ ID NO: 47119 - DNA, 542 bp, Homo sapiens
cctccaaagacttaattaaagtcttatgttatcttttttttttctttttttttttgagacagagtctcactctgtcacccaggctggaatgcagtggtgcgatctcggctcactgcaagttccgcctcccaagttcacgccattctcctgcctcagcctcctgagtagctgggactacaggttcctgccaccatgcccggctaatttttttttttttttttttgkatttttagtagagacagagtttcatcatgttagccaggatggtctcgatctcctgacctcgttatcctcctgcctctgcctcccaaagtgctgggattacaggcgtgagccactgcgctcggccaatcttatgttatcttaaaacacttttggagtagaaattacatttctcttcatgcatcacagtgctaagactagagcttaaggctgaggctgacaggcctagataactttgggttgcatatacttaaattaagagtcagcacattttaggatgaagcttcaggtaatgatcatgaaaacaattcctagcatct

SEQ ID NO: 47120 - DNA, 1957 bp, Homo sapiens
tgcattaaaattcaggactatttttttaaagtgtagacaccaatgtttcattgaattcatgtctggtaattattagcttaaattatggctcacacatgacttgacaaagtggaccatgaattaaaacacacatacacacacacacttgcacacaccacacatacacacaccccccagaactcctcaatagatgcacccaactcatacattgctcgttattgagatgtcagtcagtaatcattaggcaaacactcttcatggagagaactgctaagaggcccaggcgtcccaggagaggatctaaaaatgtcaaaaatgttacagtataaatgaacgacaccaacaagagaacatgtgttagagatgcaggcaattagttaagatattacaagtttcaacctctgagcaaaacaggcaacaaaaatttcctcttgacaaaaggctacacataagatcaagtcgattcccagacaacataatctccctgaattggagcagcactccagcaggctgggaggaagggatgaacctggggggattcaggggtttgtaaggtgtgggcccccagggtaggtcctgccttgcctgaaaatgactgatttgactgccaggctcctgaaggggagaagtgaagtctgaagtgaaggaagtcgtcctgcgacccatggatccggctcatgaagctaacagactactcccggctggagcttcggaataaaatttagaaggtagaatgaaatcatattgctgttttcaaaggaaaggaggtagctgcaaaaggcagtggggagtgtgtatatatgagatggataaatacttgctcattgcttttcagagatttttaaaattagatattgtagattgtacagtttctctctgtatatatacacacacataatacatacatatacgtacatgcacatatacacacaaatatatatggagatgttttaagcaaaaaggcaaaaagacccacaacaccctccatatatacacatacaggaaatatattttaagcaaaatacatgatttgcactttggataaggatttgaacgggtctcttagaaatacgaggaaatactgagaatacaagaaagaagggatgaaaacctgagtgcaccaactctaaaagtaaaaaaaaaaaaaaaattgtagacagttaaaatgtctgtctctgtacacacgcacacctacacgttcacacttcctctgtttactaaataacatttcagcacagttttcatcttataaggaaagtgtttgaaacttggaataagtgcacttaattaaaggaaggctgtgaaaatgtgcactaatctgatatgactaatagcaaagtgcatgaaattgctaattagaatttcattaaaggtgctgctttatcagactgtgaatatcacaacctttaaaattctttcaggagagcttaattccttttcaaacagaaatattctttaaagacatttgatttgttctgaaggaattcatggcttaggttggaacttaaaatgttgccgatattccaggaggtgacatcagaacaggaatatagatcggggactttgtttcatttgctgatgaatccccctcccccacctctatggattattgttcaaaaaccaatcatgaaaaatgcagttgagtctttgttttgctccatacataatttgttttctgctgaagccaagcatttattctcacctagcagaataaaggaaaaattattwaaaaaaatttaaaagtactatgaataaaattaaacatttaaattttcacatacattaaaaaaaaaggacagcagacaacacaatattttttcctttaaaaaaccatttttttaaagccagtacccttttctctttcttaaaaaaataaaactcttaaaaaaggagtcacctttcaatcataaaattgtacttttcagaattgggtgagtccaatggtaacaacagtaaa

SEQ ID NO: 47121 - DNA, 527 bp, Homo sapiens
cagcaagagcataattaacctaattaatagccgcaacttacttctataaggctaagaaattatgctgctgctcgtggttggtaaaattaaaatccataaatagaatgaccccagttggaattttaggtgtaactaaagtagaattcaatctaagataggtaatgatccaaaagtacctataaggtgctccctcaatgtgaaccccaagsctactaattactggaagaaacatgtctaatagcttatagttattaaaagcataatgaaaatgattaaaagaagtttataagaggcaaatgtaatgcaaaagctggcaacaggtgaggcgatggtattactagtgtaggcaataatgttgcttactcattacacttgtgactctccagatagttggagggcagaggctaagtctgattcatctttataaattgctcttcccagcaccttccaacttgaccagactcattttacctgggaccagaacttttgcataagagctaatgcacaccatgtgaatactgtttcga

SEQ ID NO: 47122 - DNA, 599 bp, Homo sapiens
gcacaatcttggctcactgcaatctctgcctcctgggttcaagtgattcccctgcctcagcctcccaagtatctgggactacaggcatgcaccaccatgcctggctagtcttttttatttttagtagagatgggtttcaccatgttggccaggctggtctcaaactcctgacctcaagtgatccacctgcctcggcctcccaatgtgctgggattacaggtgtaagccactgtgcccagcccaccctccccattttctatcactattgcttccctaataamtttttggcacatctaattctgattggcatttgttcctcagaggacccagactaatgcaccttctcaaaacagtgttctagaggggatcggtagatgttccttgaggcatctttttacctagaaaccatcagtgccatctgggtgggtgcagcagtggaggggtgccaagccaggccatggggcatggtgtcacacacacacctggttcaaagcttggctcttccacctacagctgtgtgatctgtggcaaattacttcatctctgctatcctcagtttcctcacctgtaaaatgggatacttattttttccctcacag

SEQ ID NO: 47123 - DNA, 1717 bp, Homo sapiens
ctgctgcctcaaaatattggctcaggggctgagggcctcaggcaaatcccggtgaagattgccccaggtggatcctcactggaattagctcagtttccaaaaaatggacagcaggactgtctcagtttcctagggctaccataacaaagcgccacaaactgggtggtttcaaacaacagccattcgttgtcacatggtttgggaggctagaagtacaaaactcaggcactggaagggccatgctcacccaaggctctaggaaaggatctgttctacacctttctcttaactgccagtgctgccggcaatacttggcttgcagctgcataacttcaatctttgtctgcatcatcacttgtatcctctcctgtgtcttcaatcttatatggacacagtcatagtggattaagggcccattctgctccggtacgatctcatcttaacgaattacatctacaaccatcttctttgcaaatagaggccatgttttgaagtaccggtatcctaggacttcagcctatcttttcaatataattcaatccagaacaaggacctatcagactctaggtcatcctaactaccctccccagatctatcagttatttcttccactgcccttgactcaatgccccaggaggcaagggtaaactttggggttcagctgcaatgtagaggggcttgctggaccccttcttgccagatgacgtaacagagggtcttaccagtgaagtgagtgaaaccgtgagtttcctgacagcagcaattgaggctcacacataataatatcccccgtggtgcttggcatatagcagaatttgagaatcagaagggactgacttgatgtgaagcgtagcacagtcgtctgctacgatacgggatgaaaggtgtctatcagacttggcagggcggggaccaccggtgactccgggagagtggtttcatggagttgaggaggggtcagaagtcatattgtggtggattcaagaatccattgggttgaggaagtaaaggcagtaagtgtagacaattctttggaagagttttgctgtgactaagaggatatagacagtagctgtaagttaggaaggggagttatagaatcaagtgaggtattttttaaaatggggagacttgagtatgatctgccgatggcaagagctgagcatgagagatcagagatgcaggtgagataagggaggaagttaggagaggctggtggacttttctacctctgaacttctctaatccacatcatctggcctaacctagacatgtaatccccttctctcctcccagattcaactacagccccatatccttggcagggacacctagaggggggtggtgatggggtcactgcttgtaattttggtcccaggcaagggactgctggcttctctgttctgtaggatgacactcttccctttctgagtctgatactcatcatggagtttttgtggttttagttaccaaaactcctctgtgattttgtcgatttctaggccctcaatcaatgtttgctgaacactgaatgaatggatggatcccaaggacagggttatcgtggagctcccaagcatttatcttgaatctggaaaatgcaagaaagattggcccatctgtttctgtattatatcaggatagcaataagccacagaacttaactgtagccaactcaatcatgtgtgacaacccagcagcaatgcagaaygcattg

SEQ ID NO: 47124 - DNA, 585 bp, Homo sapiens
tggtaaacttttcatgtacgtatgcagactatatacctggataaacagtatagggaaggtctgaagttcacagcttctgggagaaaatatttcagaggccacaggataaggtcgataaatgaaagcatggaagacaaaacaactttctcytaagacagcaagcagattgccttgagttgtctctcttcagaggcaaatgttccacctttgctaccaacctgttggtcaatactgagagcctgtggctgggacaaattatgccgcactctcttttcctggcaaattaagaaattttcagcatctcgataaagtgtcagataaaggagagaaaaattcaatttagaaggccttcataactcttcacgaaggcattcccaggcatatgaatgggcaggtggaggggaggaggcctgccagcatcgatatctcattactgctagcttcaatgacctgagaggtcagcaaagaaatgagtgtctcaggggaaatttagcttgagagcagtgattctgcctttcattgtgttgatggactaactccattcattcctctgacaaaaaaaggtggggctacttatttagtcta

SEQ ID NO: 47125 - DNA, 571 bp, Homo sapiens
ggactgtcttgtctagggtgacacagtgagctggcttgggcagacctccaggctcgcagcctgagctcttccctgcaaggctaccccactcctcacacacccctcgccattgcaggtgcgcttggctggtgggcgtatccctgaggaggggctattggaggtgcaggtggaggtgaacggggtcccacgctgggggagcgtgtgcagtgaaaactgggggctcaccgaagccatggtggcctgccgacagctcggcctgggttttgccatccatgcctacaaggtaggtccctctgttgtttcttccgtatgacctctcaccctcctgttctgaggcccaaaacttcctgtgctaaagctgctgcctctttgcccatttggcaattcattactgagtgaaactatgagccgacatgatgctgagtgctgggaacagtgtggtaaacaagaagacatagtcctaatgaaatcgtcaatgagggacacatttgcatctgcaggaaagatgaatagaaattagtcagacaaggtggaggaggaatgaayagcttatgcaaaagccctgtggcca

SEQ ID NO: 47126 - DNA, 591 bp, Homo sapiens
ggtggacaacatggacaatcagcctggacaatatggtgaaatcccgtctctactaaaaatacaaaaaattagccaggcaaggtggcaggagcctgtaatcccagctatcggggagggagaggcacagaaattgcttgaaccccagaagccgaggttgcagtgagctgagatcacaccacttcactccagcctgggcgacagaccaagactctatctccaaamcaaaagaaaaaaaaattagaaaaagaataataaccttttttatttatttccaaataataaacttatttatttatttctaaataacaaacttatttattcggaaaaataagtttttccaaataaactgttggaaaagagaaggaagagtgacagttaagctgagattcaaaaaaagaggagtggccaggtgcagtggcttaggcctgtaatcccagcactttgggaggccgaggcgggtggatcatgaggtcaagagatagagaccatcctggccaacacgatgaaaccccgtctctactacaaaatacaaaaattagctgggcgtggtggtgtgtgcctgtagtcccagctactctggaggctgaggca

SEQ ID NO: 47127 - DNA, 588 bp, Homo sapiens
tgcatgcggcatttagatgctgattacggggtatgggagttggtaagagatgagggtggagggaatattcctagcaattggtgtatttggctgattggtaactgtttatagacttgtttctttctagcatgtaccccttgaaatcattttctttgtaaatgttaaaagccatatgaaaaaaacccaccaccttgattactcttctttgtacttcaatcagcagcatgtcagcctctgaataaactgtaattccttcactatgcctgtcragggaagcatttaggccacatttaaaaatatatcttggtaaaggtctcaagaacaattagcaattaaaatactctattttctaccttttactatataaacacggctgcttgattgatttcacagtcttaggtattgcgctgctggggagtcccgtcttccctaatttcacagctcttagactcattggaggcatctgaagtgttatgaagcagcttttgatggtcattagtacatctttttttatttgagacagggtcttactctgtgcccaggctggcatgcagtgatgtgatctctggtcactgcagccttgacctc

SEQ ID NO: 47128 - DNA, 597 bp, Homo sapiens
gcataaggtcttttgtagaaactgatgaacactgaatgctgtacactgctcctattacccaggagaaagtcatcattattatgtcgaaagctaaaactccactttttccccatccttgcttcatgttctgtattctcatatctaagaatgtttgtacgtgagtacgcacatggacacccacatatacgtgggtggggtgggggcagagagagagtagtgagtagtgatgactactcatatgtagacaggaaaatttttggatacagaatagttactgattttaaatatacttcagtaagtgacttagaacaaatattatgttaagccttargttttctacaaaggtcagcagaacctttaaatcttaatcaattacctttcaaagcaacaagtggcactccaaatgtctaaagtattcatttaatacattcatttcatgggaacatttagtgaactaatctgaggccacttaccaatgttctgtgttttaagatttagtgattgattggtaatgaatagtctctgactacttcaattgtgctgaaatgagatcttacaattgtagaaatgtcaatgttcataaattatgggaaatga

SEQ ID NO: 47129 - DNA, 2400 bp, Homo sapiens
  misc_feature (1)...(2400): n = A,T,C or G
accagggaggagacatcccttgcgagaggtggcacccccctggcgataccaaatgtaggagtcagagatcactcctaaccatccttttgcccttggtgggctcctcagctggatctagaaaccaaattgaccccaggcagatcaacaagagaaaagtacgtagattttgttaggtgtacatgtacatgggggtcttcatgagagagtgaagtctgatgaagtggccaaagcaagatgcttctgtactttttggacaaaaagtgataaattggagaagaaatgacagaataaagaaaatcaggctggggcagtaaatttctaggggcgtcattaggagatatatgtggggaaagtatacaacatataggggataagggttgcttcgttaagtatgtttattcaggtccttcgtagcttctaattccaactctctggtgataaaagctatttgttcaccctggtatggagagagtacctctcccaaaggaatctttatcactttgctccatgcaggaagagacaggtcagcccacttttctgaaattacaatttctcccacgtttttaaaagggagagttccctggcttccctcacaggacatgcgacagaggtgtggctcgtctgttcaggccccagctcaaacagttatggagggggagcaaacagatggccaaatgcagaacttaaggcaagtgctgtgggctctggcctaaagtaggatctaggagtgggtgcctgcaactacagaagccccagtgggtgtgttacagtgctcctttagctctgccatcagcagacagcttaagtattagccagctcattgccttcttggtacccaggttagtgcccagtgttcaggaagaatcagatcacacatagactttaaggatggtgaatgctggggttttattgagtcgtggaagtggccctcagcacaatgaattgggagctggaaaggggatggagtgggaaggtgaccatctcctggagtttggctgtccagcagcctatctcctctccgaccatcgtcaaccgatctcctttcaatgttcagacactccttctcttctcttcccctctgccatgctgttctgctgctctgccactcttctgtttgtctgttcttctgttcatggagccaggggttggggtttatatgggtgtaggatggagggacatggtgggccaaaaggcaacatttgggcacaaaaacaggaatggctrttcccatttaagcccatgggtttccaggcttgagagtaaggcctttaccagggaaccatcctcttctgcccagtatttccttgcctcctgtttgtatcattttcaactcagaataatatattaattagtcatatattgcggtagcacatccttcactcctttacaacttccccactagaataccagaacacctttcacaggcaaaccaatttatnnnnnnnnnnnnnnnnnnnnnnnnnnnnnnnnnnnnnnnnnnnnnnnnnnnnnnnnnnnnnnnnnnnnnnnnnnnnnnnnnnnnnnnnnnnnnnnnnnnntgtgggaaagaaaaacattgtgatttcttttcattttcacttctacttatatcatcttctgaaaaaatctttattagaaacatttgaagaatcgcaagaatcatcaaacaccaattttctgagatggtttgagtgctttatggaacctcctgcttggaccacagagctctctctattttctgaagtactgagctgaagctaactaagggacaaaggagtacaaggagctggaagatcataaagttcttcatctttgtagggtacacagtcacttggtttattcccccattctctttccaaataagtatccatacttgtatctgtcacatctaacattacttctacctgttcttgatataggtctttgttcttagaacagttaaggtctgctttgctggtactttcctgccttgcagaactggtgtcacacagtctgctgctggaaggcttcgctaggtgagaagaactggaggtggatgagccaggctgctttctggcactatcgccttgattctttgacaccacatcctcctcactgcctttgctccctttgccatctgcagaaagtgctgtctggcaaatggaattcatagcttctttctcttcacttgaattttttagctgtgcaacttgagattctagttcctctatatacttatcacttcgttccagggctttcttgaggcgattggtttcacgctcatactgttctactttggactgaagagcagcaactgcaaaccttccaaacctacaaagaatggaaagatagttaatcttataactcaagcttttttcttttcaaggtttgagagtgcaaactgtcccaggctattctaatttcacctaacagtgacatttc

SEQ ID NO: 47130 - DNA, 544 bp, Homo sapiens
gtaatccactgagagccgctccatgagcagagatgcgaacccagagccagtgccacccccaaaactgtggaagatgaggaagccctgcagtcccgtgcacagatccgcctgagggaaaccagacaacatgaatcaatgcccgtggaagccacaccaccaacctccaccaagccagggccacttctctgcctctgaagacttgatatggattccaatcatccataataaacacgcagtacactctgaagcaaagaaaagcagacaaagatctacagacaaatcaccatgcatacttcagactaagaccattgcagacgcaataggactcaagatrctgttctaagttgtttttttttttttttttttagatagaatctcactctgttgcccaggccggagggcagtggcatgaactccgctcagtgcaacctctgcctcccgggctcaagccattctcctgcctcagcttcctgagtagctgggactacaggcaggcaccaccacgcctgactaatgtgtgtatttttagtaaagacagggtttc

SEQ ID NO: 47131 - DNA, 550 bp, Homo sapiens
tgcctcacacaagcatgatcaaagaacttgataagactgaattccaaagggcatggctggtaaaaaggcttcatggctcacagattgaagactttggttacagagtctctgaggagtagcaggcagcagaagagacaggaaatttaagagatcctcagagaagaggtcacaattattaggtcagaagcaccttgaagcatttctttttcttttcttttcttttttttttttttttgagacggagtcacccaggctggagtataatggtgcgatcttggctcactgcaacctctgcctcctggtttggagcaattctcctgcctcagcctctcgagtagcygggattacaggtgtgcgccaccatggccagctaacttttgtatttttagtagagacggggtttcaccatgttggccaggctggtcttgaactcctgacctcaagtgatccacccacctgagcctctcagggtactgggattacaggcgtgagccaccgcgcccagctgaagcatttcttaatttaattgtgcttcagggtcacgagtatt

SEQ ID NO: 47132 - DNA, 610 bp, Homo sapiens
gaccatttgtagtacatgatcccactgattcaaggtttttctggggataaggaggcgagaagctgggtttatgaggtctccatttgcaatcaagctggaaaacaggaggcaaaccttctgaaacagttatgccttgaaaactacaacacaaattccaaaccaaaaggaaaccaccaagccaattttaacttgaagtataaagggtttcaacttacaagatagtgcacggctcctgaagcggttttctaaagcgagctgacacgttgatcctgctatggattactggttttacctttaaaagcaaaggaaaaaaaatataaaccactaagcttatattagctttttttttcctatgaggaaaatctacagtttctagggaactgcctgagacttcctgtgcctttgttaaaaccttgcttttctcagcatttctgtaaactctgagctcaccctttagcaatattataagcccttaacaaagctctcaagaaaagaaaggaaaatttcccttaagccctaggcacrctgctcatgatctgtggaaaaaaaaaaaaaaaacagaaatcattttctgttacgaaaatattaagataatttttaaacaatgcat

SEQ ID NO: 47133 - DNA, 610 bp, Homo sapiens
gaccatttgtagtacatgatcccactgattcaaggtttttctggggataaggaggcgagaagctgggtttatgaggtctccatttgcaatcaagctggaaaacaggaggcaaaccttctgaaacagttatgccttgaaaactacaacacaaattccaaaccaaaaggaaaccaccaagccaattttaacttgaagtataaagggtttcaacttacaagatagtgcacggctcctgaagcggttttctaaagcgagctgacacgttgatcctgctatggattactggttttacctttaaaagcaaaggaaaaaaaatataaaccactaagcttatattagctttttttttcctatgaggaaaatctacagtttctagggaactgcctgagacttcctgtgcctttgttaaaaccttgcttttctcagcatttctgtaaactctgagctcaccctttagcaatattataagcccttaacaaagctctcaagaaaagaaaggaaaatttcccttaagccctaggcacgctgctcatgatctgtggaaaaaaaaaamaaaaacagaaatcattttctgttacgaaaatattaagataatttttaaacaatgcat

SEQ ID NO: 47134 - DNA, 845 bp, Homo sapiens
tgcatggttattttggaatataactttaaaatagaaatgagatgaagaatatcaaagaatacaattatattgtcactagcatgagtgctaaagctacatacttttcaatatggatagtacaacatgagcacaggaaattattgttgaatggctacatatgrttaccataagtagttagcaaacaatattcatcttccaaaatatccaaggtaatatgtgagctccaagatgatgttttatagcatctacttattaattctgctaatggaaacaatggaatttagagtcagaattgggttcaaaaacataaatctacttattattcatggataatcctatataacttactcaaattccatgaaatttagttctatttttataaaaggggcataataaaagcatctgaacctcataagatggatgtaaaaattaaattaagtgacatataagagccctagtgtatggcctggcacatagtaggtacccaataaatattcatttctctctttctttttagggtagagtaaatgtatgagactgaacaaaaatttctaattgataagagtatcagaatattaccatgtttacttacactatttcctcctttttccccccttaatatttttactccaaaataaaatagaaaggcaccttctaagaatcttgacccttgtctactatcatccaaaagatttttacaaaccctgtgactcttgtccacaatagctaaaaatcttactcatcagaagttacatgacaatcagtggcaagttaattgatctaaatatttgctccatatcctctggaaccaatcaccatttagaccaaagtgttgttttgaatga

SEQ ID NO: 47135 - DNA, 845 bp, Homo sapiens
tgcatggttattttggaatataactttaaaatagaaatgagatgaagaatatcaaagaatacaattatattgtcactagcatgagtgctaaagctacatacttttcaatatggatagtacaacatgagcacaggaaattattgttgaatggctacatatgattaccataagtagttagcaaacaatattcatcttccaaaatatccaaggtaatatgtgagctccaagatgatgttttatagcatctacttattaattctgctaatggaaacaatggaatttagagtcagaattgggttcaaaaacrtaaatctacttattattcatggataatcctatataacttactcaaattccatgaaatttagttctatttttataaaaggggcataataaaagcatctgaacctcataagatggatgtaaaaattaaattaagtgacatataagagccctagtgtatggcctggcacatagtaggtacccaataaatattcatttctctctttctttttagggtagagtaaatgtatgagactgaacaaaaatttctaattgataagagtatcagaatattaccatgtttacttacactatttcctcctttttccccccttaatatttttactccaaaataaaatagaaaggcaccttctaagaatcttgacccttgtctactatcatccaaaagatttttacaaaccctgtgactcttgtccacaatagctaaaaatcttactcatcagaagttacatgacaatcagtggcaagttaattgatctaaatatttgctccatatcctctggaaccaatcaccatttagaccaaagtgttgttttgaatga

SEQ ID NO: 47136 - DNA, 560 bp, Homo sapiens
atccatctttctttcccttacactcttcctagtctgtcctctgttaattccccagtatccttcctgttgctcctccacttttaactaggtgttaggtccctcaggtgttcacaagcatggtctgtcccaactggtagacctcaggattaagctgatttgctgaccctctgatgctgaccttcagcaactttcccttcttagacaagttatatcttgsctctcttgtcattgtttcagtatgcacaatgaagaattggaccacttgatcctttccagctctcacattcacgtgaagaaaaaaaaattcaagtaatgaacacttacttggccaatcacatgcaaggtctcttgccaaccaacatacatgtatttggattattcattttgtaaatacccaccgtgatgtaatcctctgaagaaccacacttgtttataaattgatcaacatggagtccttatttttaaaaactagcactttaccaaagaaaatttagagcccaacacagaatgcttgacagtccctctggaccagtctccagggatctgttttcaaaagggga

SEQ ID NO: 47137 - DNA, 560 bp, Homo sapiens
atccatctttctttcccttacactcttcctagtctgtcctctgttaattccccagtatccttcctgttgctcctccacttttaactaggtgttaggtccctcaggtgttcacaagcatggtctgtcccaactggtagacctcaggattaagctgatttgctgaccctctgatgctgaccttcagcaactttcccttcttagacaagttatatcttggctctcttgtcattgtttcagtatgcacaatgaagaattggaccacttgatcctttccagctctcacattcacgtgaagaaaaaaaaattcaagtaatgaacacttacttggccaatcacatgcaaggtctcttgccaaccaacatacatgtatttggattattcattttgtaaatacccaccgtgatgtaatcctctgaagaaccacacttrtttataaattgatcaacatggagtccttatttttaaaaactagcactttaccaaagaaaatttagagcccaacacagaatgcttgacagtccctctggaccagtctccagggatctgttttcaaaagggga

SEQ ID NO: 47138 - DNA, 598 bp, Homo sapiens
gaaattattcacctgtgtgcctggacacataataaaatacagtctttacttcatgccttctatttttagacacattcaggttttcagtgtagttatttaacgtttttccagtataacctccatttctttgtaatatatcaaattcttaacatgaaattattcaaaatattctatatttgttgatttaacttttttctaaatttgattttttttcttgagttggtattcctgttacttaaattgttccctaagaaacaactatttaattaatatatattaattttaatttttttctgcatctgttttttattttgttcttttttattcacacatttattattttctggtcaagttatttttaatattttaaactctattttaaaatgacatattagtattttttctattttttgccaggtgtaccagctcatgcctgtagtcgcaactgctctggaggctgagctgggagaatactttgagcccagartttggaggcagaagtgagctgtgatcacaccactgcactccagcctgggtgacaaagtgagaccctgtctcttaaataaataaataaataaatagaatttttaaattaaaa

SEQ ID NO: 47139 - DNA, 598 bp, Homo sapiens
gaaattattcacctgtgtgcctggacacataataaaatacagtctttacttcatgccttctatttttagacacattcaggttttcagtgtagttatttaacgtttttccagtataacctccatttctttgtaatatatcaaattcttaacatgaaattattcaaaatattctatatttgttgatttaacttttttctaaatttgattttttttcttgagttggtattcctgttacttaaattgttccctaagaaacaactatttaattaatatatattaattttaatttttttctgcatctgttttttattttgttcttttttattcacacatttattattttctggtcaagttatttttaatattttaaactctattttaaaatgacatattagtattttttctattttttgccaggtgtaccagctcatgcctgtagtcgcaactgctctggaggctgagctgggagaatactttgagcccagaatttggaggcagaagtgagctgtgatcacaccactgcactccagcctgggtgacaaagtgagaccctgtctcttaaataaataaataaataaatagaattttwaaattaaaa

SEQ ID NO: 47140 - DNA, 530 bp, Homo sapiens
tttgttattctttaaggataataatcagaacttgttggttttggtggttttctgagtttggtgtacatcatacaccgtgtataccaaactcggaaaatcacctgtggattttaaaattttcagatatctggagatgacctctgatctattggatcatgagattcagggaacaggctgtctttctcaaacttcacatggtgctgacagtcaccaaaatttgagaatctccagtgtgctatattctctttggttagatttgagctcatatttaaatgtgttaataaagtcacatatttttattgactatttttatctcctaggcactactttctggtgagagagattgatgagaattaatcaaataaattaacaagaaaatataaaatagtaataagagctgtgataaaacagtgatggtgtgagtgactgaggtcctcctttagagagmgcagtcagggaaggcatctctgaggatttgggctggaggctgataagaaggagcatgtgccaggaagatctgaggtagagac

SEQ ID NO: 47141 - DNA, 611 bp, Homo sapiens
cccgtgctttgggagcctgaggtgggaggatcactagagggcaggagttcaagatcagcctgggcaacatagtgagacccctgtctctacaaaactaaaattttttttaaaaaaggaaacattgctatccatcccttcaccaaaagaagtctctttattcaccaggaaaacagattctttaagaattaaggagaagagtgaaaagaaaaaaaaattatgtgatattttatagaagcagccactacctcacaaggctctcatttctacctaagttcaacttaaatccaaaaaataataactaaaaagaagcagtggccgggtgcggtggctcacgtctgtaatcccagcactttgggaggccaaggcgggtggatcatgaggtcaggagattgagaccatcctggccaacatggtgaaactgcgtctctactaaaaatacaaaaattarctgggcttggtggcttgtgcctgtaatcccagctactcaggaggctgaggcaggagaatcccttgaaccagggagtcagaggttgcagtgagctgagattgtgccactgcactccagcctggtgacagagtaagactgtctcaaaaaaaaaaaaaaaaaaaaa

SEQ ID NO: 47142 - DNA, 594 bp, Homo sapiens
agaatggattatcactgggtgaccgaagctcattgccataggggcactctgagaaatggtacagaattacatgcagagttatccctcagaaggaggaagggagctggggtaattgtaccccagcttttgccagttatctgttgagaaactcagggaagtgtgttaatgtccccagggcccttgtgatatggtgttttgcagcttgtggggaagctttcaggcaaagacatacagatattggaagctaaaagtcccagggaactgataaggctcaggggatgtgagaccaacaacaactgccacattcctttatgtccataacacaaaataaagagcagaaatgtcacagagcctgcaaagggatggagatttgtttcgtcaagaagggaaagaagcactttcatactttttayttagctctcaaatggggtactttctaaagctgtgtgatttatgtatgtattatagccagttgtttccctgcacactgcttacattcatattatattctggcagaaaaaatctgattttaattgctctaaaaatacatgttcttatctgcaggatttgtattgaggcttactgagagcagct

SEQ ID NO: 47143 - DNA, 639 bp, Homo sapiens
gtaatgctgagcttctcactggtggacattgtgcataacacaaaataacattgcatgtgttgttgctttaataaagttctactttttgttgggcccggtggttgatgcctgtaatcctagtactttgagaggcagaagcgggtggattgcctgagctcaggagtttgagacctgtctgggcaacatggcaaaaccccttctctactaaaaatacaaaaaattggctgggtgtggtggtgtgtgcctgtaatcccagctactcgggaggccgaggcttgagaattgcttgactcgggaggcggcagaggttgccgtgagcagaaatcgcgccattgcacccagcctgggcaacagagtgagactctatgtccaaaaataaagttctacttttttactggggaaaataaaagcataaccgagtggaaatgtcgggctaagttttttctgttcrccctgcctgtagggagcttgactatttggatagcaaagctaaaatgaattcacttttgccccctggtggcagttgcttaaaattgcaggctaattaccaatgggaagtggtacgatggtccctcaaagaggcccacacactaaaacctgaacatgtaaatatgttaagtcacaaggcaaaagggagtt

SEQ ID NO: 47144 - DNA, 540 bp, Homo sapiens
gcaaccactggatttttccttcaccagatgtttgcccagagggcaaaaagaagagtgactagtgagcagagcagatattgcagcctgctgtctccaacccagcggccgtaactcaactttcaaagggacaactgtggactcctcatggaagtctgcatagagtaagatggcttcatatcttcctgggtttgaacctgcttgactttgagccagctatttaaactctctcagctttcacgttctcacctgaataaagggattgataacaatacctgcctcacagaggtgtcgtcaaagtactttgcatggtgtctgtgacatagtgaacagtcgtctaggatgactagtcaatgcatctagtcaatgctagcagctactatcattattattcgcactctacacagccagygtggggattaatggcatgatgtgctttgagagggaaatttctcactaagcctattttttgtttatttgtttgtttaagagacaagatctccctctggaacccgggctggaatacagtggcacactcatacc

SEQ ID NO: 47145 - DNA, 438 bp, Homo sapiens
atccctttttaaagctccaatcagaccatcttctcttaatacattttcccagatgggataaactcattagactccagctttcctagttacaatcatattctttccctgctttctttagataacaatgagacggactttttgggcttggatcttgcccaaactctcccatgyatttactggaaatctcttggcttccttctgctgattccatttgggtcagctggtctactttcacttttagatgagaacaattccttaggatgtctcacttaagagggtcagactatttacgaccattcttgaagtttgcaaaggcttttgcagtgcagtaacagcaaaggaattagcataggtgtgcaacaggactgttttggtgcctatggcatttctgatatccagcatagcgcctgaagcatagtaggcattcagtaagcctga

SEQ ID NO: 47146 - DNA, 438 bp, Homo sapiens
atccctttttaaagctccaatcagaccatcttctcttaatacattttcccagatgggataaactcattagactccagctttcctagttacaatcatattctttccctgctttctttagataacaatgagacggactttttgggcttggatcttgcccaaactctcccatgtatttactggaaatctcttggcttccttctgctgattccatttgggtcagctggtctactttcacttttagatgagaacaattccttaggatgtctcacttaagagggtcagactatttacgaccattcttgaagtttgcaaaggcttttgcwgtgcagtaacagcaaaggaattagcataggtgtgcaacaggactgttttggtgcctatggcatttctgatatccagcatagcgcctgaagcatagtaggcattcagtaagcctga

SEQ ID NO: 47147 - DNA, 1886 bp, Homo sapiens
  misc_feature (1)...(1886): n = A,T,C or G
attgtattatcactacaggagaaaggagaagtcactgcagtctcaacctcctgagcccaagtgatcacccaccttagcctcctgagtagctgagtctacaggtgtgcaccaccattttaaattattaaataaattaaattttaaatttcttttgtagagacacagtctcactatgttgcccaggctggtctcaaactcctggcctcaacaatcctttcatccactgcagatatttattgcagtttcagactttcttctacacccattaaaacaagtacccactaactgttgggtgccttttccttttacatttttttttttttccagctagtgtatattctgcatgatgggaagattttggagagcctctaaaacttatttctaaaatcttgccaatccttattttttaaattttattttttcgttgatacacaatgttttatgtatttacggagtacatgagtgtttgttacatgcatggaatgcgtaatgagcaggtcagggtatttggggtagccattgccttgactgtctattattgctatgtgttgggaacatttcaagtcttctagctactttgaaatatacaacacattgctgttaaccatcgtcgctctacattgccattgaatagtggggcttatttgttctatctaacttaattgataacctttcacggagaggctgaatgaagaatgagtgaacagcgtgggtcatatgaaggcctttatcttttttttttttaaccttactcatatcttgtattttatttcttatgaaaatggctacccaaagaagtcattgtakcagcctactatcctaaggcagcaactataatgtaaatgctaacaaactcactccataagaccaaaaacccttccccagggctgtaatgggcatttaagtttcccaaacccagtgacaactaatgatttttattacctatcaaatggaaacaaatggattttaatagttcccctacagctgaaaaactccacaaacaatacattgctctttatctttatgatccgnagactcatgccatttttggggggtaatacattaacaactgtgatgctcaaactgggctctggctactgctggtggttattaggtgttaagccaaagcatattggaaggcctttatcttttttaaggaaaaggaaaatttaaaaactaaatgaaaattttttcactgtcccacctcaactgtgttgcattcacttcctcagtccccgttgaatctcctaggaggaagcctttctgcctcaacaaagagggtgctcctccctcactcagcacctttctctccacctctcaactaaccagctggtgggtgtgtccttgggtgtgaccatgtgggcttatttaccatttccctttgccctgtcctctcttaccccaaactaatcaaagacttctttctaatttctatataagaggaccatccacttgttcagtcaccaaatatttattccaatttgttatggaccaggtatggtctctgcccacttcatgctgacttcctggttggggagacaggcaaataaaaaataagccctaaggtaaacattgcaacttgtggaaagggctctagtggaaacaaggtatggatatacagattattattattatttttttaagggacagagtcttgttctgtcgcccaggctggagtgcactggtgccatcatagctcactgcagccttaactcttgagcttaagtgatcctcttcctcagcctcccaagtagctgggattacaggtgtgcaccaccatgcctggctaattttcgtatttttagtagagacagggttttgctatgttggcctggcaggtctccaacttccgacctcaaatgatctgcccatctcggcctctgaaa

SEQ ID NO: 47148 - DNA, 506 bp, Homo sapiens
cagttttataaactgcattatgttaagggtatatatcctgtatatgtaaggatatatacccatactcagtggagtttcatgatatatcatgaattttacagcaaatkaaatttacatgatcacaagaagaataaatcgattctgaataagttactgaaatttctaacaccaattgtcattttctatgtagcttcaacccttggcataactggtcagtaaatacaaaattgggtccttttatgactatgcccaaagtacattggatttgggtttaactcttcccaccttcctgagaatttctcagggttcccaaatgggtcctcccttgcatccacaaatgagcctgtcagctgcagttaccacagagcatctgccacctcctccgccaatccctgctgcagttcctgcttttcctggttctccctgagaagcctcttctaggatccttagtgaagcctttgctgatggtgccttttgagggagtgcccatataagtgccaagggct

SEQ ID NO: 47149 - DNA, 506 bp, Homo sapiens
cagttttataaactgcattatgttaagggtatatatcctgtatatgtaaggatatatacccatactcagtggagtttcatgatatatcatgaattttacagcaaattaaatttacatgatcacaagaagaataaatcgattctgaataagttactgaaatttctaacaccaattgtcattttctatgtagcttcaacccttggcataactggtcagtaaatacaaaattgggtccttttatgactatgcccraagtacattggatttgggtttaactcttcccaccttcctgagaatttctcagggttcccaaatgggtcctcccttgcatccacaaatgagcctgtcagctgcagttaccacagagcatctgccacctcctccgccaatccctgctgcagttcctgcttttcctggttctccctgagaagcctcttctaggatccttagtgaagcctttgctgatggtgccttttgagggagtgcccatataagtgccaagggct

SEQ ID NO: 47150 - DNA, 572 bp, Homo sapiens
gaagaaaaaatggaaagccagcttgccctgtcaagacatrccataaaaggatattaacaatcaacctttatatagtgcttaacagtttacaatgtgaatacatatggtctacggtttacagagtttacagtaaataaacagtattcattttctttagagatttgggactgggccttaagtaaacattaaaatgcctttctcttacagtttcatcaacaacattttatatgatgcaggtcaaaaaatagcaagacaagatccccaataagatcctgaagttcggccgggaacagaggctcactcctgtaatcccagcagaaatggggccagtttggtggagtatgatcaatctgaaaaccctgacctcacgaaaccctgcttacacacccccctcccaacatgagactaactttacttgattaaagaccctgccatgatattacctgaaacctcacaaaaaagattctctctaagcagaactctagttagagtctctagatctctaactagaatcagatttcccaagggaacaagtaccaaacctaaataaataggagacagcttacattcca

SEQ ID NO: 47151 - DNA, 564 bp, Homo sapiens
ctccacagaataatccttctcggttctttttaccgttgagtctgcagacttttctattgcatcttccacccatttccaaaaatgcctgttcatagtattatgtcctcaagtcctgatcttctcaggggcctacagggcaaggtttgtttacccaccattggtatccacctcagcacctgcttcaagctactgcttcaaggttcagactctactgggcwtaatgccaaggagagattgacttatttaaatcttggaagacaccatgaaattttaaaactgtcatagacctgcagttagcatagtttacacctatgtaatctcagttgagcagatacttttctgttttgaattttgagtactttgaattttatgagattttggattaggtggagttggagctaaaatggatgtcttgatagctcttgaacttttcgtgtatgcatgtatgtcataacatgtccattttaggaactgtgtcacaggctcctatgtgatgttgtaatggtagaacagtgttgtatagtaactattctaaaggaacatagatctcaatctgctggtagg

SEQ ID NO: 47152 - DNA, 614 bp, Homo sapiens
tttggatttaggtggcgagtagaaaaagaagtaatttcaggaaaaggtaattctttaaaatttttactttttaataggataaacttattttgttaagttactgaattggagtcattaagatcattcctaacatatacaagaaattattagctacaaaagtaaaattagagaaggtgtattcatgatacattrttagcaaaggtctgaatataatgctttaatgattattacctttatacttttgcctttagaacattcagttgaatgttctgcatatttctaagtatgtagaaaatattttacaaattaaagatttcatagcaagacaactttcaacaaaaaagaaaggtttatttttttcctttctttattaatttttggaataatgaattggtgttactgtttttcagccaaatccacatttcaaaagtagaagttaaatatcactttaatcccaatagaattttggggcaggctagtactcatttttggaagtcccttatattgagcccaaatacttagtctaatagcaaaagaccagacatttggtaggcaatcagtaaatgctttttctatgcattattgtaaatctattcattaaatttttcctggaa

SEQ ID NO: 47153 - DNA, 614 bp, Homo sapiens
tttggatttaggtggcgagtagaaaaagaagtaatttcaggaaaaggtaattctttaaaatttttactttttaataggataaacttattttgttaagttactgaattggagtcattaagatcattcctaacatatacaagaaattattagctacaaaagtaaaattagagaaggtgtattcatgatacattattagcaaaggtctgaatataatgctttaatgattattacctttatacttttgcctttagaacattcagttgaatgttctgcatatttctaagtatgtagaaaatattttacaaattaaagatttcatagcaagacaactttcaacaaaaaagaaaggtttatttttttcctttctttattaatttttggaataatgaattggtrttactgtttttcagccaaatccacatttcaaaagtagaagttaaatatcactttaatcccaatagaattttggggcaggctagtactcatttttggaagtcccttatattgagcccaaatacttagtctaatagcaaaagaccagacatttggtaggcaatcagtaaatgctttttctatgcattattgtaaatctattcattaaatttttcctggaa

SEQ ID NO: 47154 - DNA, 568 bp, Homo sapiens
ttttaacaatagctcttgaagtcccatgtcctctaaaaagaagattggaactatcttaaaatattgccaacaacgtgaatgaaacaaaattcaaayatagatatatgttagtgatattaaggatctgtaaaactattgccaacaatgtgaatgaaacaaaattcaaacatggatatattttagtgatactaaggatctgtaaaaacaagtgattattttaaaagtagtcagataaaaagactagttacttcaatagaatattaactggaaagacagttgacttctcagtggtacaagaccactggatgatacaagaccacttgtattcatttgctgaagaataataattgccaatttaatgttctaaactcagtgaaattataatctaacattgaaggaaaataagttctttaaaaaaaggtttgtcacaaatcagtaaatatcaggaaaaaagaaatcattagaaattactgacattaaaaacataataacagaatattataaaaatctttatgaccatatatctgagaatttaaacaaaatggaaaatgttaggaaaatcataggt

SEQ ID NO: 47155 - DNA, 607 bp, Homo sapiens
ccagcctgggcgacagagcgagactccgtctcaaaaaaaaaaaaaaaaaaaaaaaaaaaaaatgcctacttttgtttgtggtatctgcagattgatttaaactttatgaagatttgcaaaggcctaagagtggccactttttatgaagaatatggtaagaaaacttgcttttctaaatctctttaaagctatcatcataaacaaaactttgtattgttccagggatagacaaaaagaaattaatgggaagctcagaaacagacctatataaatacttgacatatgacagagcagattagtgaggaaatgatggattttttcaataattgatgctgggacaattaartgcccataccgaaaaaaaaaaaaatggaaatgaaattgaatcctctgtcaaagatttaaaatatttcaaaataagctaaacattcaaaaaaaatatagaagatattcacaatctcaatctagagaaaggttttctaaaaagtcacaaaagcacaggaaaagtaaatgtaactcaatttaattacattaaaattaaataatcatatttaaaagatacctaagagtgaaagattcacataaaagtaggtaaatatatttgtaa

SEQ ID NO: 47156 - DNA, 1979 bp, Homo sapiens
cttctttctcctttgccccagacaattctggacttgtcattaaaacatggcaaaaactgaaatatgtcactcaaagacctgatgctaaatgcctgactagatttatgctttcatttgctccraagaataaatggacaatttcccacctgtatcatgaagaacttaaaaccacctgatctacaacttctggcctcttgtttccctccctacaagtcagtctattgtgcttgaaatgttagacattcatgacttttcttattcctgaaatacattctctgaaatctttccaaagaatgggaatctgaatagcatgatacatttgaaatgtcagaagtctttctacctcatctaaaagaaatcaaaaatgctgacagatgtgctcagtgataatgggaactgaagaaaatcctcagaagcccttataaactaccttggttactcaatctttcactttcaattgtttctcttaggattaaataataaaaaatatattagaaatttttttttatcagttaaaccgaagttctaatgtgttttatttaaggcctctacactcgatccttccgtcccagacttgtatggaatgaatagaaaacttcttaccccatttcacttttctatttaaggaatcattgcttaatgcgagagttttttggggaaactttaattcaatttattcaataaatatggtggggcgaggtggatcatgcctgcaatcccagcactgtggaggccgaggtgggtggatctcttgaggtcaggagtttgagacgagcctggccaacatggtgaaaccccatctcaactaaaaatataataattagctgggcgtggtggcgggcacttgtaatcccagctacttgggaggctgaggcagaagaattgcttgaacgagggaggcaaggttgcagtgagccaagatggtgccactgcagtccaacctgggcgacagagcaagactctgcctcaaaaataaataaataaataaataataaataaataaatatttactctgcccctacggaagagactgacattaaggtgggccctataatttttacctcccagtgttcatggtgttcatgaccttatgtgatcccttccccttgagggtagtaagaacctgtaacttgcttttattcaatagatatggcaaaggtgatgggatgtacatgattgtgtgatcatgtgtttatgtctcataagatggtaatgtccatcttgctgtaaccccccaccccgccctgtctctctctggctgtctctgaggaagcaagtggggaatcttacatggcaaggaactatgggcagcccctagaactgaaggagacttccagccaccagtcagccagaaaatgaagccctctttcttacagcttcaagaaactgtgtcctctgccaacaacatgagtgagctaggaagtacatccttccctaacgagcctcaaatgaagctgcagccctggcctataccttgattaaaagcttgtgaaaccctaagcagatgacccagctaaggcttatctggattccttacccacagaaactgtgagataatagtgtctgctgttttaagctattacatttgtgatattattgtattgcagtaatagatagctaatatgtcctataatgcagcaaacgtgattctaaatgtagggatacaatagttagaaaaaaaccacacatagagctcctgctttcataaagttacactccagaggtggggcaggtaatacacatacaaataaagcaattatcgcttatggtatgtgctatgtattggtgcatatgtgtaggggagtgatactttagaaaaggttgtctgggaaggcttttctgagaatgtgatatttaaactcagatacaaaagatggggacctgctgcacaaatagttgaggaaaaagagtttcaggcatagagaacaacaaacgcaaagattctatagctagaaaaatttaggaattagtacattggt

SEQ ID NO: 47157 - DNA, 1979 bp, Homo sapiens
cttctttctcctttgccccagacaattctggacttgtcattaaaacatggcaaaaactgaaatatgtcactcaaagacctgatgctaaatgcctgactagatttatgctttcatttgctccgaagaataaatggacaatttcccacctgtatcatgaagaacttaaaaccacctgatctacaacttctggcctcttgtttccctccctacaagtcagtctattgtgcttgaaatgttagacattcatgacttttcttattcctgaaatacattctctgaaatctttccaaagaatgggaatctgaatagcatgatacatttgaaatgtcagaagtctttctacctcatctaaaagaaatcaaaaatgctgacagatgtgctcagtgataatgggaactgaagaaaatcctcagaagcccttataaactaccttggttactcaatctttcactttcaattgtttctcttaggattaaataataaaaaatatattagaaatttttttttatcagttaaaccgaagttctaatgtgttttatttaaggcctctacactcgatccttccgtcccagacttgtatggaatgaatagaaaacttcttaccccatttcacttttctatttaaggaatcattgcttaatgcgagagttttttggggaaactttaattcaatttattcaataaatatggtggggcgaggtggatcatgcctgcaatcccagcactgtggaggccgaggtgggtggatctcttgaggtcaggagtttgagacgagcctggccaacatggtgaaaccccatctcaactaaaaatataataattagctgggcgtggtggcgggcacttgtaatcccagctacttgggaggctgaggcagaagaattgcttgaacgagggaggcaaggttgcagtgagccaagatggtgccactgcagtccaacctgggcgacagagcaagactctgcctcaaaaataaataaataaataaataataaataaataaatatttactctgcccctacggaagagactgacattaaggtgggccctataatttttacctcccagtgttcatggtgttcatgaccttatgtgatcccttccccttgagggtagtaagaacctgtaacttgcttttattcaatagatatggcaaaggtgatgggatgtacatgattgtgtgatcatgtgtttatgtctcataagatggtaatgtccatcttgctgtaaccccccaccccgccctgtctctctctggctgtctctgaggaagcaagtggggaatcttacatggcaaggaactatgggcagcccctagaactgaaggagacttccagccaccagtcagccagaaaatgaagccctctttcttacagcttcaagaaactgtgtcctctgccaacaacatgagtgagctaggaagtacatccttccctaacgagcctcaaatgaagctgcagccctggcctataccttgattaaaagcttgtgaaaccctaagcagatgacccagctaaggcttatctggattccttacccacagaaactgtgagataatagtgtctgctgttttaagctattacatttgtgatattattgtattgcagtaatagatarctaatatgtcctataatgcagcaaacgtgattctaaatgtagggatacaatagttagaaaaaaaccacacatagagctcctgctttcataaagttacactccagaggtggggcaggtaatacacatacaaataaagcaattatcgcttatggtatgtgctatgtattggtgcatatgtgtaggggagtgatactttagaaaaggttgtctgggaaggcttttctgagaatgtgatatttaaactcagatacaaaagatggggacctgctgcacaaatagttgaggaaaaagagtttcaggcatagagaacaacaaacgcaaagattctatagctagaaaaatttaggaattagtacattggt

SEQ ID NO: 47158 - DNA, 1979 bp, Homo sapiens
cttctttctcctttgccccagacaattctggacttgtcattaaaacatggcaaaaactgaaatatgtcactcaaagacctgatgctaaatgcctgactagatttatgctttcatttgctccgaagaataaatggacaatttcccacctgtatcatgaagaacttaaaaccacctgatctacaacttctggcctcttgtttccctccctacaagtcagtctattgtgcttgaaatgttagacattcatgacttttcttattcctgaaatacattctctgaaatctttccaaagaatgggaatctgaatagcatgatacatttgaaatgtcagaagtctttctacctcatctaaaagaaatcaaaaatgctgacagatgtgctcagtgataatgggaactgaagaaaatcctcagaagcccttataaactaccttggttactcaatctttcactttcaattgtttctcttaggattaaataataaaaaatatattagaaatttttttttatcagttaaaccgaagttctaatgtgttttatttaaggcctctacactcgatccttccgtcccagacttgtatggaatgaatagaaaacttcttaccccatttcacttttctatttaaggaatcattgcttaatgcgagagttttttggggaaactttaattcaatttattcaataaatatggtggggcgaggtggatcatgcctgcaatcccagcactgtggaggccgaggtgggtggatctcttgaggtcaggagtttgagacgagcctggccaacatggtgaaaccccatctcaactaaaaatataataattagctgggcgtggtggcgggcacttgtaatcccagctacttgggaggctgaggcagaagaattgcttgaacgagggaggcaaggttgcagtgagccaagatggtgccactgcagtccaacctgggcgacagagcaagactctgcctcaaaaataaataaataaataaataataaataaataaatatttactctgcccctacggaagagactgacattaaggtgggccctataatttttacctcccagtgttcatggtgttcatgaccttatgtgatcccttccccttgagggtagtaagaacctgtaacttgcttttattcaatagatatggcaaaggtgatgggatgtacatgattgtgtgatcatgtgtttatgtctcataagatggtaatgtccatcttgctgtaaccccccaccccgccctgtctctctctggctgtctctgaggaagcaagtggggaatcttacatggcaaggaactatgggcagcccctagaactgaaggagacttccagccaccagtcagccagaaaatgaagccctctttcttacagcttcaagaaactgtgtcctctgccaacaacatgagtgagctaggaagtacatccttccctaacgagcctcaaatgaagctgcagccctggcctataccttgattaaaagcttgtgaaaccctaagcagatgacccagctaaggcttatctggattccttacccacagaaactgtgagataatagtgtctgctgttttaagctattacatttgtgatattattgtattgcagtaatagatagctaatatgtcctataatgcagcaaacgtgattctaaatgtagggatacaatagttagaaaaaaaccacacatagagctcctgctttcataaagttacactccagaggtggggcaggtaatacacatacaaataaagcaattatcgcttatggtatgtgctatgtattggtgcatatgtgtaggggagtgatactttagaaaaggttgtctgggaaggcttttctgagaatgtgatatttaaactcagatacaaaagatggggacctgctgcacaaatagttgaggaaaaagagtttcaggcatagagaacaacaaacrcaaagattctatagctagaaaaatttaggaattagtacattggt

SEQ ID NO: 47159 - DNA, 608 bp, Homo sapiens
tttgccagtggtgtgatgaaaactccaccactcatgagagtggttcttcctaacctttggtccaagatcagtaagggttgatggtctcttaaaaacactgtacttcaaaatctgagattcaggccactaaaggaccagtgttttttgttcttgccttgccttgacatagaccaacttactccaataaccggtaatgatttcatgcagatgagtaacgttgaatggcaattacatatgcttttgtaataaacagcagtcactttaaagagtacttaataaatgccattgagttattgacacaatgagggaaattactaccctttttctattttattattaaaaaaatctatttggcaaacagcattggcakttaagtcagtgctgatgggactgaagtagtaaattcaacctcgtttgattttatcttcttgaccagttctttggtgtgacctagccatattatgtataagaaggtgccactggcaagtgaggcctagatcaaagagggggaataactttctgtaacattatccatatacacccacactcttgtggctttatattaccactgaagttaccagtgaagttatattacactgaagttacta

SEQ ID NO: 47160 - DNA, 563 bp, Homo sapiens
tgtagattcctttggattttctagggagaccatcatgtcatctgaaaataggaataatttcatttttccctttcttatgtgtaaatttctgattttttcttgccatattgtactgtccaagacttctggttgaataaacatgaagagagtggatatccttccttgttcacagtcttaggagtaaagagtttggcctttcatcattaagtataatgttgattaaaggtagatgctatttatcagtttaagaaagtcctcttcattttcctggtttcttcagagattttaccataaatacataatacattttattaagtactatttctgcatgaatagttataatcatctgatttacctttttaatccattatgatgacaacytttatgaatagttttttaaggcttatttgtttaagtagagacaaggtctcgctatgttccccaggctggtgtcgaactcctgggctcaagggaggctccagcctcagcctcccaaagtgctgggattgcaggcatgagccaccatgctcagcctgttttttaaatgctgaactatcttgcat

SEQ ID NO: 47161 - DNA, 2702 bp, Homo sapiens
  misc_feature (1)...(2702): n = A,T,C or G
tggtgctcactttgggcacctatgagtgatattatttagagcaggagtttttctaagtccttatccttcgtacctgccaaatcggcattatgtagccaactgatagttaacattgctccacataaaggaacaaattgctttggagctccttcaatcactttagcaacactgatagcaagggataycttgatttaaaaaatcctcctatgctcattatgcagccaaaggtctcagctcagcagaactctgagctcagatccagcttacaaataaagatgttgcattcctttaggtatcttctttaatccaggctgctctcatcctgcatgggtggaactgaatggaggtggcagggaggtctgtgtagctgtgtttagagacgagaccctgaagccagatgtagccacgtgtctcccagggatcttatgttcaacatgaaaagcccagactcaggataaaggactgtcaccacgagaacttctctggctctttcaatcaagctctggtggttttcttccagggcatggcccatgggaccaagcacatggtgtgtggagctgtgctctgcttcctcgtgttgatgtaacatgggctttggcagggccccaccacagatggggccccttgacatgcgtatgttttgattttgtggtgcctgcatggtaactagagctgtctgtcaaggaaattaataaaatggatgtgatgctgattcttcagtgctattagcagcagggaaaacctctgcccaaccttcctccagaccctgatgggcctcacctctaaagccaaggatgtccgctccagctcagctaatcccattgccaagttcctatttaggaagagcttgtgggaaaggctgggcctggccctggtgtaactgaaaacacattttcctctgggggttatgttaccacattatttctgtataaggccaattcccgcctgtttggaagtagctctctgaatatgaccttttgacactgagatggtctttgtgttggaattggctaaggtacatgacctggaaatcacaagccttcccctcatatatttttctcagctaaaatagagatgccttattcacatgctccccattctacattgctatctttgtgtacttacctccaaatcccagatcttcgtctcctttaggtcatggtgaacaccataatggcaccctccttggcatgttttatgtattatctcccattccagggatcacaaagccctcacttacttttgttgggggtggggggtaggtggaaaagtaaacctacaaatggattattgtttacagaaattgcttccttctccaatgacctccgtatcctatgacggagaattcatcaatatttccatggggacaagcaggcctattaggatggacaaagaaggggtgaggctttggcagcacttgatcctttgggaacaattaggatttctggaagccaaggtaaagtgttagctcaccctctcccttcccctaggccggtcgtgtctgttttttggtgcggcagaacccctgttaaaataagagaaacaagactgtaacagcaaagatgtggcacaggcagaagcacagtgactatccactgggctttttaattttattttaattttttgtagagaccagtctccctgtgttgtctaggttggtctcaaactcctgggttcaagcaatcctcctgcctcagcctcccaaagtgctgggattatataggtgtgagccacttccactgggcattttatcatgcatgagaccaaaatgccaagactgaaagtgggggtgatatgtttaataaaagaaagagggattactggccaggtgtgttggcccacacctgtaatataagcactttgggaggccaaggcaggtggatcacctgaggtcaggagttcgagaccagcctggccaacatggtgaaatcccttttctactaaaaatacaaaaattagctgggcctggtggcgcatgcctgtagtcccagctactcaagaagctgaagccggggaattgcttgaacccaggaggcggaggtcgcagtgagccaagatcatgccattgcactccagcctgggcaacagagaaagaagaccccgtctccaaaaaagaaagaaaaagaaagagggactactggcatacaggaattacaaaagaggcccagcctggaggtaccaagaaatatggagcaatgcttctttatctctccatcaatgccactctcaaagataccaaccttaggaccctaagtctttgtccctgaaaacctcactcctatgtggatatatctctgaattgatctaaactttttaggaatcttttttatattttatatacccccatatctttgggggtaatgaatttcttaactttgctaactactgctaaatattttttttctggctatttgtccttaatttactccatttaaacttcaaggcatgccctctacagcttctgcagtgctaggatttaacaaatcttatgctaattttatatctaatacctttaggaaagagactcaagctggcaatccagggatcctccagctcagcagctgctgttaaggacaggttaagcattttgtgcaataggannnnnnnnnnnnnnnnnnnnnnnnnnnnnnnnnnnnnnnnnnnnnnnnnnnnnnnnnnnnnnnnnnnnnnnnnnnnnnnnnnnnnnnnnnnnnnnnnnnngt

SEQ ID NO: 47162 - DNA, 559 bp, Homo sapiens
ataaatacttaacaacattttaccacgaactccatcaataatagcacaggtgcctctaaaattaratatttgggatcttttgattagttctggatgcatcaaataagcataactaaactattctttttttgtttgtttttgagacggagtcttgctcagtcgcccgggctgaagtgcctcagctttctgagtacctgtgactacatgtgtgcaccaccatgcccagctaatttttgtattttttagtagagataggatttcatcacgttggccaggctggtcttgaactcctggtctcaagtgatctgcctgccttggcctccataaaacagtttcctattagagaaaacctaatgccaggatatttgatgcactttagttaatagtaactgaaatggattcaactgatttaaaaattgattgagaaattatattatgaaagatgaaagtctaaatctttaattgttctgtatatgttttacttattaatggtatttaaagtttgcttctatctaagatttgtacaatagtaaaatataaagttaatgtataatttata

SEQ ID NO: 47163 - DNA, 491 bp, Homo sapiens
ggtttcaccatgttggccaggctggtcttgaactcctgacttcaagtgatccacccaccttggcctcccaaagtgctgggattacaggcatgagctgctatgcccggccaattttttgtctcctatttttactacctttttccctcttttgattacattgagttatgacctctacatatgctttaattcttgtcttcaagtcagagtagggggctattaaacttcattatttcctgggaaataatgaagccattggcacatatgagtttcaaaataagagctctttggctacttccctttccaggtaagatttttaaaaatcctatatgaaatgccaattttagcagtcagtatggctacagtttgaggaccgtctacctagcatagtgaggggcttgtgggtgtgtgtgtgtgtgcacatgtgggcaygtgtatgtttgtgtgtgtgtgcatatacacgcctgagttctggtttctttgctccttttgtt

SEQ ID NO: 47164 - DNA, 626 bp, Homo sapiens
cccctccccctatacccccaccccatcttctgctgagtccactttctcctgagctgccggaggtccctgggtagaggtgatggtggggagtcaagatgagctcaaggggctggcctctgctcttgggagtcctgagtattaggctcttcatgatattcctttaatgaaaggcccccctgccccctctcactcattaaacagcagtgcctgcaagattctcatctcctggacatgcagggctcagggtcagctgccccagaagtactcaagaactttagagacagctgaagctcaccagcctgagacccatcttgcctcttcagaacactgagggagtccagagatcagtgtctaaatccagctcacccaggccgacctgaaactttcccagatgcagggatgctgcacatcttggcattggtccccaacatgtctggactcctgtgccaagctctgctcagggggcagccaacgttggtggtgaggcaggagggagggagagagggagtcaggatctcartactctgaaccaaccgggggcagaactggaggtctgggccagctcccctcagacagaaaccccctctcatagggattgccccaggaatgcatatggaaggctcaat

SEQ ID NO: 47165 - DNA, 626 bp, Homo sapiens
cccctccccctatacccccaccccatcttctgctgagtccactttctcctgagctgccggaggtccctgggtagaggtgatggtggggagtcaagatgagctcaaggggctggcctctgctcttgggagtcctgagtattaggctcttcatgatattcctttaatgaaaggcccccctgccccctctcactcattaaacagcagtgcctgcaagattctcatctcctggacatgcagggctcagggtcagctgccccagaagtactcaagaactttagagacagctgaagctcaccagcctgagacccatcttgcctcttcagaacactgagggagtccagagatcagtgtctaaatccagctcacccaggccgacctgaaactttcccagatgcagggatgctgcacatcttggcattggtccccaacatgtctggactcctgtgccaagctctgctcagggggcagccaacgttggtggtgaggcaggagggagggagagagggagtcaggatctcaatactctgaaccaaccrggggcagaactggaggtctgggccagctcccctcagacagaaaccccctctcatagggattgccccaggaatgcatatggaaggctcaat

SEQ ID NO: 47166 - DNA, 1003 bp, Homo sapiens
ggagaagcattactggtcccgtggggttagccattccttggtaactcacattatggacgctggtgcagatcttagacattgccgtggagtgggaaaggaggacaaccagccaatcgcttcacaggcggccccaacgtgcaagtcctgtctttaaaacctgcttcgtcctggggaggccacggaaagtgccaaggaagcctcacctctggagtcctctggcatcccgttggggtggacacaggcggcacccccgaacgtcagtgctcatcaaacatacacgggccaacggacacacagggtggagacaaggtcctcagaccctagaagacgcctctgctgaggcccctgggtcctggcagggggcatggcgagggcctcacaagcactacacccaagcctgacgatctttgatggaaacagcacacgtcatctcaaattaactcccggaggctccagactcctttcctatggcacacacgtgwgcagcttcttggaagcgagagtgcgactcacccggctcccagggcaaggagggcagcaaaggccagagagcgctgcgtccccctctgggagtggctgagatcagggggctggcactatagccaccacccccaagtatgctggtggctactaggacctattagcacacaggcccacagggcaacagctgtgccctccaggctcgacaggctgggggtgtagcaggtgcagggtaaggatgagtaaaccaccttcccgctgccttctgtcggcacgcccccaccacgggcctcacacaggcttctccaggggctgggcctgagcttggcagagggaccccggccagacttggcgtgggaaatgtgtggtgaggccgggaggccagggtggcaggcaccaaggacccttcctcgggggcacgtgcccatgctcagcccccagtgaagccaggaacggcgttctgtaaagtgtgccatggtgccaatttcctagctttttaggaccagagtgggcaccgaacaca

SEQ ID NO: 47167 - DNA, 539 bp, Homo sapiens
acaggcaatcctagagctgaaggccagtcactagaaggctcacmagtcaagttgaggttttctgagaggaagaaggcaaagctgtgtagacttctgtgagctcatgatgtctgggctgaagaacacgtcaaggatgttagtgtccacatgggaaagaaggtggtccattgggagatggtcagtgccagcaaagaaagtctacctgggactgtgagtctgtgtttgttagtttcctggggctgctgtaacaaagtatcagaaactgagtggcttaaacaaaagatgtattgcctccaagtctgaagaccagaagtatgagaccaaggtggtgttagggttggttccttctgagggctctgagggaaagaacctgttccatgcctttcccctagcttttggtggtttgctgttaaccttcagtaatccttgccttctacaagcatcgccagtctccacaaggcattctccctctgcatgtgcaactcctgttatttatggctgatacggttttaccatgtcctcacccaaatctcatcttg

SEQ ID NO: 47168 - DNA, 1438 bp, Homo sapiens
ttgagattaaattacagcataattttgtatcctgtcttttcattatcattataccctaagcactttgcatattactataaactttaatattaaaatagctaatatattttaagtattgataatcagtatgtgctagacaccatgctaaacactatatgagatccactatcccatttaatctccacataaattagtaggtactattactgtttttatattacaaaggctaacactgaggcttagaaaagttagttcatttgttcacagccacacagctaaaagtggaacagttgggatgtaaatccaggcttgccaggctgctaaacatgtattactattttttcaaggatgatattatgtgatagtttaattgaaagtgttttttcttacttaatgatacatgaaatatggaggatcttacaattaatggcaccttagcataaatgaaacttagttgtattaatctaggattactttttatacctctacaaatctctatgcctttaccccatcagttttgaaaacatattttattttcttttttttctccatgcgtgacctgctattgtcaatggccatttggaattcccaaaggattggtagaggtatgcagttgggataaagcattaaggataccaaccaaatgactcaccagggaaaacctgagctctgctcttaaatctgtctgtattcctggccaagatgcctcatctcctccttagtgctctcagtcttcttctactttaatgttatttttaatgaccatataattttctttcaagtgggaaaaatgatgggcttgattgttctcctattcgtggcatttcttttatttcaatatattcactatataaataaggtaggagcaagcattaaaacatggtgggtgagaaactctagagatggagggaaaaagaacataggaattatttattttctctgggtactgtgctcttctacagggtgttcataaaggctagaaacatagaaaaatatatataacaaatgttttattgatattacagacaataggcgatgtgttcaaagtgctatctctcattatcaatgtgtggttcaatgtgctgatgaaaattgcaaaaaactaggtactcttaatgcatttccataaatctgtacagatgcatctaggatgcrttgtctcagacaatttatgcctagatttttccattgtgtaaactgtgccattaacatacccccagaggaagaattataatgagttcagtctttgcaaaagtagatgttggtcactctacattatgttgtaatacactctgtgttatggcttttttatcacagtttgcctggcttactacaaacatctgtatattggacatctctttaccagacaccataattccttatatatatgagatatatatatatatataaaatatatatatataaaatttatttgaca

SEQ ID NO: 47169 - DNA, 591 bp, Homo sapiens
tagcaactttattttttatttaacagatttttgagctattaataaaagagtctttctgcagtgatctactctaatgtatgttaaaatttttaaagaaacccattctaccctgcactgcttcttttttgccagtttctgccaacacaatagattttgagtagctttacttacatggcttatattgcaaaagcaatcactgtattttatgtgtgtgtgtgtgtgtgtgacaatgtttcacttttgttgctcagggtggagtgcagtggcatgatctcggctcactgcaacctctgcctcccggkttcaagcaattctcctgcctcagcctcccgagtagctgggattacaggcgtccgccaccacgcccggctaattttttatatttttagtagaagcagggtttcaccatattgaccaggctggtcttgaactcctgacctcaggtgatccacctgcctcggcctcccaaagtgctgggattacaggcatgagccaccatgcccggcctagcaatcactgtatttgaatgttgttttacaaactataatacttctttattctaataaagtttattggtttctctgggttttg

SEQ ID NO: 47170 - DNA, 550 bp, Homo sapiens
attgtctccattttacagatggaagaactgaggccagagaggctgagatttgttgaggtcacctggcagcaggctgtagggccagctgcaagcccggggagtctacactggtgactagatggcggagtcggctctcccaaccgcccagctgctgctctcacactctagagttggacttgatcctgcgagcattgcagagccatggagaggtgttaagtaacagggaaaaggatctcaaatttgtcaaggtaattccttatcytgagagacacatggagatttgaaccagggagactgctaggaagtcctctgcagtttttgtaggggattctcatggaactttcttttagaacctctttcttacaattgtgagtactgaaaaggcaattctggaacctatttttaaacccaggatagttaataacaaaactaatggcatttaatatttgaattaagtcatatgttgacaggatttagagtccccttggacttcctttttacttctgggtccagtgggaggctggtggttccaccaacagtgcctttggga

SEQ ID NO: 47171 - DNA, 595 bp, Homo sapiens
cagagaattgaagcttattgcccaaagccacataaccaagaaggctttgacgccagagcgtggattcaagagcccatgcttttcctacttggacagtagatgtcagaaggagggccttgaagataagacatatgtttcagttgtcaattgaagcataacaaaataaccaaactttggtttcaacatcaatgatttcttaagattctgtcgtcctggccgggtgattctgtggcaggccaggtctcactaacaactctttcagtactgactgagtggttaagttaaatattaaaagccagtgcccttatacgaaggctgggatgtaacaaaagcccagcaagagttttgcctaggccttttctgggccttaaggcgtgacaaaataacaaaggaattcttaacaggacccgtttgggattaaacaagttttattgtgggtctgaagaaactccccagatctccacaaacaagtttactggaggcctgaaggaactccycaaacctccatgatttagcaggagacaagataagggtaatcaccccagcacctggacccatttagattaagtaaatgtactgaggctccagaggaagg

SEQ ID NO: 47172 - DNA, 595 bp, Homo sapiens
cagagaattgaagcttattgcccaaagccacataaccaagaaggctttgacgccagagcgtggattcaagagcccatgcttttcctacttggacagtagatgtcagaaggagggccttgaagataagacatatgtttcagttgtcaattgaagcataacaaaataaccaaactttggtttcaacatcaatgatttcttaagattctgtcgtcctggccgggtgattctgtggcaggccaggtctcactaacaactctttcagtactgactgagtggttaagttaaatattaaaagccagtgcccttatacgaaggctgggatgtaacaaaagcccagcaagagttttgcctaggccttttctgggccttaaggcgtgacaaaataacaaaggaattcttaacaggacccgtttgggattaaacaagttttattgtgggtctgaagaaactccccagatctccacaaacaagtttactggaggcctgaaggaactccccwaacctccatgatttagcaggagacaagataagggtaatcaccccagcacctggacccatttagattaagtaaatgtactgaggctccagaggaagg

SEQ ID NO: 47173 - DNA, 607 bp, Homo sapiens
tgctctcacccaccactcgcttgctcaacagacatttgtggctgccaatgggccgggggctgtttgggggtatattcagctctgggcctgccctcagggcacttagattttagagaaagagggtgcggacagagactggacaaaccaaaacataaagtgcctggcatacattgaaaagggggccatgggatagagagcagctggggaggcgcggacaaggggcatgaggagggtccctggcaggcaaggaggaaggccctgggggagaccgaggggggagcaaagtycctgaagggacaagccctcgcgccccttcccagggccagcacagggaccttcaggttacaccctatgcagaagatggtgaaaaatacatcaactcttcccattcccattcccattcccattcccacgggcaacttgacagtacaagcttctgccgtgccacaatattggctcctttctggtagttggtatggaattaacccccttgtgttaattcagatagatcaaaaatgcacatttaacaaaatgaaggacaccaaaaaaaaaaaaaaagaatctgccttctttcttagagttctgtttgaaagaacgatcatcttac

SEQ ID NO: 47174 - DNA, 607 bp, Homo sapiens
tgctctcacccaccactcgcttgctcaacagacatttgtggctgccaatgggccgggggctgtttgggggtatattcagctctgggcctgccctcagggcacttagattttagagaaagagggtgcggacagagactggacaaaccaaaacataaagtgcctggcatacattgaaaagggggccatgggatagagagcagctggggaggcgcggacaaggggcatgaggagggtccctggcaggcaaggaggaaggccctgggggagaccgaggggggagcaaagttcctgaagggacaagccctcgcgccccttcccagggccagcacagggaccttcaggttacaccctatgcagaagatggtgaaaaatacatcaactcttcccattcccattcccattcccattcccacgggcaacttgacagtacaagcttctgccrtgccacaatattggctcctttctggtagttggtatggaattaacccccttgtgttaattcagatagatcaaaaatgcacatttaacaaaatgaaggacaccaaaaaaaaaaaaaaagaatctgccttctttcttagagttctgtttgaaagaacgatcatcttac

SEQ ID NO: 47175 - DNA, 607 bp, Homo sapiens
tgctctcacccaccactcgcttgctcaacagacatttgtggctgccaatgggccgggggctgtttgggggtatattcagctctgggcctgccctcagggcacttagattttagagaaagagggtgcggacagagactggacaaaccaaaacataaagtgcctggcatacattgaaaagggggccatgggatagagagcagctggggaggcgcggacaaggggcatgaggagggtccctggcaggcaaggaggaaggccctgggggagaccgaggggggagcaaagttcctgaagggacaagccctcgcgccccttcccagggccagcacagggaccttcaggttacaccctatgcagaagatggtgaaaaatacatcaactcttcccattcccattcccattcccattcccacgggcaacttgacagtacaagcttctgccgtgccacaatattggctcctttctggtagttggtayggaattaacccccttgtgttaattcagatagatcaaaaatgcacatttaacaaaatgaaggacaccaaaaaaaaaaaaaaagaatctgccttctttcttagagttctgtttgaaagaacgatcatcttac

SEQ ID NO: 47176 - DNA, 542 bp, Homo sapiens
gggagcatccaaggcagcattgaccacaaggggcagggaggagaggctggaaaggaggtctgtgcataacgcctccgattcctggtagaacctcacaacagctcgttgacggcgggtcggtgagcatttaaagagcagcagattctcattcagaggcagtgtggttccatggaaagcaaagcatttcagtgatgcgtgcttaattcaatcagcttactttacgcaaaaaggatccagtgccaggagtccccggcctgtmatgaagggtggggacaacggtgtccaagagccacaaataaaatgctaagggaatgctgtgacgggggccctggagggctttgtggaggaggttgaaagattctcagagccttcaacaatgctctgtggaagaatttgggaggttacattgaaatggtaggtgggcgaggctgggggaaaaagggaagatttccaacactttggatctacaaggacacaacaggttttgtttttttaaatggctgtggctaaaatcagcttcctggtagcatcataaatgggga

SEQ ID NO: 47177 - DNA, 542 bp, Homo sapiens
gggagcatccaaggcagcattgaccacaaggggcagggaggagaggctggaaaggaggtctgtgcataacgcctccgattcctggtagaacctcacaacagctcgttgacggcgggtcggtgagcatttaaagagcagcagattctcattcagaggcagtgtggttccatggaaagcaaagcatttcagtgatgcgtgcttaattcaatcagcttactttacgcaaaaaggatccagtgccaggagtccccggcctgtaatgaagggtggggacaacggtgtccaagagccacaaataaaatgcyaagggaatgctgtgacgggggccctggagggctttgtggaggaggttgaaagattctcagagccttcaacaatgctctgtggaagaatttgggaggttacattgaaatggtaggtgggcgaggctgggggaaaaagggaagatttccaacactttggatctacaaggacacaacaggttttgtttttttaaatggctgtggctaaaatcagcttcctggtagcatcataaatgggga

SEQ ID NO: 47178 - DNA, 1942 bp, Homo sapiens
cgccctccccgtctctctcagccgggcgcgcccccctctcccccccgccacccgacgcgtgaccacgcagggcccgcggggggagggggaaggggcgggcgcggcggcaaggggagggcggacgccgccgggtctgcgcttagggggacggagggcccccggcgggccctgcgagggaacccccagccgcgcaccccgaggagcccggaggcacccccgggggcgattgatcggcaagcgacgctcagacaggcgtagccccgggaggaacccggggccgcaagtgcgttcgaagtgtcgatgatcaatgtgtcctgcaattcacattaattctcgcagctagctgcgttcttcatcgacgcacgagccgagtgatccaccgctaagagtcgtacgaggtcgatttggcgagggcgctcccgacgacgcaccgggaggaggcccttcctggcgcggcacgtccccccscccccgcccaagaggagagggggttgcctcaggccggccagacgagacagcgaacgggaccggactccggagaggggtcggaaggtttcacaccacggggaggcgcgcgccgcccacgcgggggcgagcgcggacaccaccccacaggcgcccgggggttcccgcccccacggcgcggggcgcacgccacacgcgcggcaggcgcgcgacggccgccgggtaaagcccccacccgacggccgccgcggcgtcggcggcggcgcggccccggccggggagcggagtccgcggtggaggcgcgggaggggccgggcccctcccgacgggactcccccgcgggcccaccaccgcccccgacccacgggcggacgggcgatccccccaaggggtctttaaacctccgcgccggaacgcgctaggtacctggacggcgggggggcggacgaggaggcgggggaggggaccggcgtccggcccccgaccctcgagacgccctagcgggaaggccggggagagcgagcggggccgtgcccggcggcgcggagcggcgcggcggaggcgacgggaatccggccggccccgaagacggggagccggcgcggcggggccggacgacgggccccggcggggaggagggcaccgagaccccccagacccgccgcgacgccgccgagaaccgcccccgcgcccgccgacacccacgtcgtcggggccgcggccggggaccgctccccgccgcccgccggccccacgacacgcgcacaccaacgacacgcccttctttctctctctctctctctctctcccccccgtctccctcccgagttctccggctctcgcggccggcggggccgggcggcgaacgaacgagcgagcgaacgaacgggcacgcgggccccgcccgcgcacgcgccgcgtcgcggtgggggggcgggtgtgcggagggaagcgcgcggcggcggcggcgccgccgcgggcctcgccctccgggctccgttaatgatccttccgcaggttcacctacggaaaccttgttacgacttttacttcctctagatagtcaagttcgaccgtcttctcagcgctccgccagggccgtgggccgaccccggcggggccgatccgagggcctcactaaaccatccaatcggtagtagcgacgggcggtgtgtacaaagggcagggacttaatcaacgcaagcttatgacccgcacttactgggaattcctcgttcatggggaataattgcaatccccgatccccatcacgaatggggttcaacgggttacccgcgcctgccggcgtagggtaggcacacgctgagccagtcagtgtagcgcgcgtgcagccccggacatctaagggcatcacagacctgttattgctcaatctcgggtggctgaacgccacttgtccctctaagaagttgggggacgccgaccgctcgggggtcgcgtaactagttagcatgcc

SEQ ID NO: 47179 - DNA, 1942 bp, Homo sapiens
cgccctccccgtctctctcagccgggcgcgcccccctctcccccccgccacccgacgcgtgaccacgcagggcccgcggggggagggggaaggggcgggcgcggcggcaaggggagggcggacgccgccgggtctgcgcttagggggacggagggcccccggcgggccctgcgagggaacccccagccgcgcaccccgaggagcccggaggcacccccgggggcgattgatcggcaagcgacgctcagacaggcgtagccccgggaggaacccggggccgcaagtgcgttcgaagtgtcgatgatcaatgtgtcctgcaattcacattaattctcgcagctagctgcgttcttcatcgacgcacgagccgagtgatccaccgctaagagtcgtacgaggtcgatttggcgagggcgctcccgacgacgcaccgggaggaggcccttcctggcgcggcacgtccccccccccccgcccaagaggagagggggttgcctcaggccggccagacgagacagcraacgggaccggactccggagaggggtcggaaggtttcacaccacggggaggcgcgcgccgcccacgcgggggcgagcgcggacaccaccccacaggcgcccgggggttcccgcccccacggcgcggggcgcacgccacacgcgcggcaggcgcgcgacggccgccgggtaaagcccccacccgacggccgccgcggcgtcggcggcggcgcggccccggccggggagcggagtccgcggtggaggcgcgggaggggccgggcccctcccgacgggactcccccgcgggcccaccaccgcccccgacccacgggcggacgggcgatccccccaaggggtctttaaacctccgcgccggaacgcgctaggtacctggacggcgggggggcggacgaggaggcgggggaggggaccggcgtccggcccccgaccctcgagacgccctagcgggaaggccggggagagcgagcggggccgtgcccggcggcgcggagcggcgcggcggaggcgacgggaatccggccggccccgaagacggggagccggcgcggcggggccggacgacgggccccggcggggaggagggcaccgagaccccccagacccgccgcgacgccgccgagaaccgcccccgcgcccgccgacacccacgtcgtcggggccgcggccggggaccgctccccgccgcccgccggccccacgacacgcgcacaccaacgacacgcccttctttctctctctctctctctctctcccccccgtctccctcccgagttctccggctctcgcggccggcggggccgggcggcgaacgaacgagcgagcgaacgaacgggcacgcgggccccgcccgcgcacgcgccgcgtcgcggtgggggggcgggtgtgcggagggaagcgcgcggcggcggcggcgccgccgcgggcctcgccctccgggctccgttaatgatccttccgcaggttcacctacggaaaccttgttacgacttttacttcctctagatagtcaagttcgaccgtcttctcagcgctccgccagggccgtgggccgaccccggcggggccgatccgagggcctcactaaaccatccaatcggtagtagcgacgggcggtgtgtacaaagggcagggacttaatcaacgcaagcttatgacccgcacttactgggaattcctcgttcatggggaataattgcaatccccgatccccatcacgaatggggttcaacgggttacccgcgcctgccggcgtagggtaggcacacgctgagccagtcagtgtagcgcgcgtgcagccccggacatctaagggcatcacagacctgttattgctcaatctcgggtggctgaacgccacttgtccctctaagaagttgggggacgccgaccgctcgggggtcgcgtaactagttagcatgcc

SEQ ID NO: 47180 - DNA, 294 bp, Homo sapiens
ctttttaacaaccgccataatctgttggctgcygcctggagatcttgggattgtgagaaggtgagaaattggtccttttctgtacgactatccgcagttccccaagtgtgatcttaggcaagacttaggagtcttcggagcctcccagatggttcctatttggacgtggtgaaatgatgcaccatggcaatttattctggctgctggcgctcatcagtaagtcatttatggcatctcttacaagtgtctccctaaaacagggtgcaaattctgatgcacttgatttcattttac

SEQ ID NO: 47181 - DNA, 542 bp, Homo sapiens
ctgctgggtgtgggatcaaaattgatcaagatagggacaacacataaaaaggagatccaggccgggcatggtggctcacacctgtaatcccaggattttgggaggccgaggcgggtggatcacctgaggtggggagttcgagaccagcctgataaacatggagaaaccccgtctctactaaaaatacaaaattagccaggcatggtggcgcatgcctgtaatcccagctactcgggaggctgaggcagaagaatcacttgaacccaggaggcccggaggttgcagtgagccgagatcgcgccagtgcactccagcctgggcaasaagagtgagactccatctcaaaaaaaaaaggagatccagataaaaagtaaataaggagagcagagccaggaaatctcaaaactgcagacagttatatatttaaaactttacacaaaagcgaagaagtacctcagtgatgttagcaaaatctatctgaacctagccaccattagaagttcagaaaaactaattttacttaagaacgaacaatagaaaaa

SEQ ID NO: 47182 - DNA, 600 bp, Homo sapiens
ctgcctgcattgaattctgggagaggagagctgggtttgtgcctgcttcctcttcttgcccatctgaagttcctttgttctcctccaacgttggctgcaccaaaatatctgcaaagtcctataaatagcattagagcaattgaacttttaaaaatcagaatctacttctaatcagactaaaaggaagaaagaaaaaagcataagaatgactgaaaaaatgaaataggactaatatatgtattaaaatatattttaaaagactacaggctgggcacagtggctcacacctgtaatccctgtgctttgggaggccgaggagggaggatcacttgaggtcaggagtttgagacagcctgggtgacatagtgagaccctgtctctgtaaaaaatataaaaacggcagggtgtggtagcatgcacatgcagtcacagctacttgggaggattgtttgagcccaggagtttgaggctgcagtgagctatgattgcgccactgcactccagcctgggtgatagagcaagacccagtctctaaaatacatacatayagagagagagataaagaggaagagagaaagccatcagagggaatgtatatgg

SEQ ID NO: 47183 - DNA, 189 bp, Homo sapiens
  misc_feature (1)...(189): n = A,T,C or G
cagcggggagaaaygcagaggccacaaccgctgaggacacgggccagcggtactcgcgggtcccgatccgtcctgcagagcatctctgccggtttctctccagccacagtctcgctcttctcgtcccctccctccccctcccctccccctcccacaccccagctggtatgtgattcacganaacacaaa

SEQ ID NO: 47184 - DNA, 627 bp, Homo sapiens
atgcatacagaagagcacgcaaatgcaaacatcttgatttcacccaagcaatctctgaaacatgtaagtttcatttggcctgaattggagcagwctcctagagggtcaaacatggcctttttgttattccaggatattccagagaaaaaagaaaaaaattaaaaaatagatggtaaccagattttgagaatagaaacctattttccctgttgcaagttattgtctcaagggagaaagggaataagtgtaaagcaagcctatttcaggaaaagattaaacaaagacaggccctgcctcagagttgtgagagtaaaagcatttgcagtggtgcagcttgaaagcatgccttattttattagcatccacttctcttctgaaaggctaattgtaaaatttatagagctaattatctctccagattaatatttatgaacatacaatagtaaatgtgagttgcaagtgttgtattaagcattggcttttcttttctctcttcacacatacaagcaaacaacagatatctcaaggtgatgttaatattctctctacaatgtatgtaaacagtcatgctaaatttttcttcccagttgctgcaaattggtatttacccagcaactgaaaactatt

SEQ ID NO: 47185 - DNA, 627 bp, Homo sapiens
atgcatacagaagagcacgcaaatgcaaacatcttgatttcacccaagcaatctctgaaacatgtaagtttcatttggcctgaattggagcagtctcctagagggtcaaacatggcctttttgttattccaggatattccagagaaaaaagaaaaaaattaaaaaatagatggtaaccagattttgagaatagaaacctattttccctgttgcaagttattgtctcaagggagaaagggaataagtgtaaagcaagcctatttcaggaaaagattaaacaaagacaggccctgcctcagagttgtgagagtaaaagcatttgcagtggtgcagcttgaaagcatgccttattttattagcatccacttctcttctgaaaggctaattgtaaaatttatagagctaattatctctccagattaatatttatgaayatacaatagtaaatgtgagttgcaagtgttgtattaagcattggcttttcttttctctcttcacacatacaagcaaacaacagatatctcaaggtgatgttaatattctctctacaatgtatgtaaacagtcatgctaaatttttcttcccagttgctgcaaattggtatttacccagcaactgaaaactatt

SEQ ID NO: 47186 - DNA, 627 bp, Homo sapiens
atgcatacagaagagcacgcaaatgcaaacatcttgatttcacccaagcaatctctgaaacatgtaagtttcatttggcctgaattggagcagtctcctagagggtcaaacatggcctttttgttattccaggatattccagagaaaaaagaaaaaaattaaaaaatagatggtaaccagattttgagaatagaaacctattttccctgttgcaagttattgtctcaagggagaaagggaataagtgtaaagcaagcctatttcaggaaaagattaaacaaagacaggccctgcctcagagttgtgagagtaaaagcatttgcagtggtgcagcttgaaagcatgccttattttattagcatccacttctcttctgaaaggctaattgtaaaatttatagagctaattatctctccagattaatatttatgaacatacaatagtaaatgtgagttgcaagtgttgtattaagcattggcttttcttttctctcttcacacatacaagcaaacaacagatatctcaaggtgaygttaatattctctctacaatgtatgtaaacagtcatgctaaatttttcttcccagttgctgcaaattggtatttacccagcaactgaaaactatt

SEQ ID NO: 47187 - DNA, 1736 bp, Homo sapiens
ccctgaggctgggccaggacactcagagttctctctctcagaaaaaaacttctgaggcaggccatggacttctctaaagagtttaaagtgtttaaagtaagacggtttttttttktttttttttttttaaagaattcttaagtacatttttaaaaaggaaagggttaccactaaactctatgctcagccaaattttcattcaaataataaaatgagaaaaaattattcttagtaatgcaaaggctcagaaaggatatctcccagagttcttcctgaaaatgtgaaactgttcaaaagatcaataaaaagagaacccagaaatggttaacctgtggtataaaaagatgcacagaaggcactgaagccaaaagggttttgaaagaatattgttattaataacttaaaaatatgtatttattcaaaaatcccatatcataagaaaaaaactctgaaacaaaagaagggatgaataaaattagggtactcagtagatcaagagagtagcaacagcttctgatttattcatgacattgattattagccaaatatatgttcaaatatgtctttttttaattttaagataaactctactattttcaataagtgggagctaacggttgggttctcatggacataaagatggcaacaatagacactggggactactagatgggggaaggcgggggtaaagtgcactgaaaaactacctgttgggtactatcctcactacttgggtgacagaacaattcatatgccaaacctcagcatcacacaatatacccaggtaacaaacctgcacgtatcccccaaatcgagaataaaagttgaaattatgaaaaataaaaataccaccaataaatagtgtctgggcgtggtggctcacacctgtaatcctagtgttttgggaggcttaggtgggtgggtcatttgagctcaggagttggagaccagcctgggcaacatggtgaaaccctgtctctaaaacacaaaacaaaacaaaaaattagccagatgtggtggtgtgcacctgtagtcccagttactcaggaggctgaggacagaggatcacttgagcccagaaggtcaaggctgcggtatgctgagattattccactgtactccagcctgggcaacagaatgagactctgtctcaaaaataaatataaacaaataaatatcataaaatactgttttcagggactttttcttccaaatcattgggacaaaaaaaatcaaaataacatttcatatgacaacaggagaaaacaaagaaaataaaaaagaagcaaaatatacaacaataaaagacagatatctccaaacaaaatgacagaataaactgaaaatcacagtcatgataatgaacacccccactaaaatataactcttacacttggctagaaaataaaatctagcaataataggcctccctaacacaaaaggacaaagcaaaactaaaagtaaatatttgggcaaagatacctcagttaaacccaaggagaaagagacagataaagcatattactaacagaaaagtaaaaggtaacaaaaattaaaatgtgcataatttttatatatctctctctatatgctaaatatatagatagatacaatctgtaattatgattctggagtcctaagcaattatactatataatgtagtataaaatacattaggcaaaaataaaatgagaaataaatagaaacacaaagtagggagatattttaatacaaaa

SEQ ID NO: 47188 - DNA, 570 bp, Homo sapiens
tgatcctcttgtctcggcctcccaaagtgctgggattttaggcacgagccacaacgccgagcctgaaacttcttaacaaaaagtagctccacagggattggttagaaccctgttggccataaatccagaatgctaactgggctccttccggccgacacttttctttcttaaaacctcagaatcttaatgtgatggtaagagaaaatgtggtcattgggggcgttcccaggctctccagtactcagcaatccctctctccaccccatgtccctcttcctcgggcgtcctgttgccacccctctttctacatgcagagccctcattctctgccgccccaggccttcagctgttctcccggctctttgttattacacattatcattaatggatcagcyccccctcacgaggtttccaaatagaggcctggcccaccagatcgtaaaggttaggcccgtgtattccagggggctgtgtcagatgaggaattctattagaaagctttgcatctggagttttctaatggtgccttcaggcaaaaaaaattaaaattaaaccaccaaccaacaaccc

SEQ ID NO: 47189 - DNA, 592 bp, Homo sapiens
aaaaggcagctgcaaccacactgctcaaacagtattaacgtcagggctctaggccaaaacttctttcagcttctgcagtgttatctccctgaatcagactctcacttctatctaactcaatctttctaatcttctgaataccttagctttctaaccttggtttgtctaatggaatgcctcacattcataattcacctctgtctcgacaatcactcaatggcactaatccatttcttcactcttggatctcacgttagtacttatattaattcccttaattcctgattctacccagctttgctctgactcgtccctcagctaaacttgatcatatcctcttccagccttcaactcgagttcttatctaccatgagttaaaatgacaaatgctagcaacctcatctattcaagtgcttcagaagtgacaaactctaaagtctcccttgggaagctgtatcagtgttttttcacttcaataaatatgacattcttatttcrgtccaaccaaactcttgcttatccttcagtcctacttcctgtttagtttgtacagaaacacagataaacagtcatcatcttctttacaaaaatc

SEQ ID NO: 47190 - DNA, 1105 bp, Homo sapiens
ggaattgaaacttctcaggggtattacatcaaaagatgatcgctgaaatttcttcttgcttctctttctgtcatagtagactgttctgaaaagtaaactatgaattttgtgtgcagaaatgctatgttgtggtgaatgcagaagaaaatcaaaatcccagatgtattagaaatttatgtgaaaacctttctctcggactctccctccctgcctctctttctttcacctcagatcctcaaattgcaagggaattcaattaattaaacaggatgtcattcagtcatgccctgttctgaaacagggcagggcttgtccataggtctctaggcattttagggtaccaattagtgcctgagtgccaacgcctatctctatctaaaggggagctggcgcaaggcacaacrtccctcagcttccttttagggctgaacttgcccctgggctctgcttatcagctccattatctttctccgaggccttggttgctaaataactaaatttttagatctgtggcaccaaatatgacttttgttaactatttagattttctgaaaaagtgcttttggaccattatacctttatagccataattctcaaactttaagacatcgtttaaaatgtcaacttcctaaattgaagatttcaagaattgtgatttagtgactcagtatacagccgagaaatctacattttaaataaacatttcaggtgtatgtcagcagtgaaggctgtctgcagaccacatgtacaataaaaaatgaaactgctttatggtaccggctatagcttacttctctctagtctcaaattcttacctatttgtgctgaaaatatctgatttttccggcctgtgttgtcttccagagcctcaccctcgattacctgctttctgccagccttcctaactctgttggacttttgtttctggtcatacctgaggaacaaagttgtcttatacttcagaacaaataaatattggtactttccttcatgctgtatagacaagttagcaaataggaaaaggggaaaattaatctagtattttgtcctcttcctttcttacatcccaattaatagaggcaaaactatctgaaaatatctacca

SEQ ID NO: 47191 - DNA, 603 bp, Homo sapiens
agtgcatgtcagcatgactgagcacatctgtacctttattatggtgaaagagttaatttgttattttaggcacatataccaacttttaaattggtcatattaccccttgggaaatgtcctgaatccctcaactgagttttactttccaagttaggtgtttagttcattcttcwcatgcgatagtgaaagtaaaagctttcctgacccttaagactgacattttctcgttagggaaagagactcgatagcagggtagactaacagtagttcccaaataaaggcacacaggagaaaatgaatcaatagaatctaattaaaattactactccagggaataagaagtattgaggatttattttattttgaattggttttaagtatggaataattgtctttacagttataaaaagtaattagtggtgtttacaaaatgttgggaatttctgctttgacagataggtaagtcccatgggaatttctgctttgacaaatagttaagtcccatggccttcagagaggcaggaagcagaaactttcaaaaaagtaacatttctctggatttaatgtggaaatagagaaaaatttaaagaataattaaaaaac

SEQ ID NO: 47192 - DNA, 558 bp, Homo sapiens
cctttgctaaacaccagctcttcttataacttaactaatagcatcttagatttagtttcacaaagtaagattaagttgcttcacctactgaattttttaataattgtttttgtsaaaagaacaaaacaaacaaaaaatacaaagatattgaaacttctcctaggctgcaattttctgttcaatgcacatctttggctttgaagggaagaattttcttgcaaagttaaaaaaaaaattagggtgcatcagatggagtatatgtgcttagccaaggaaccttcaccacaaagggtaagctacaacttccctcccacctcccctgggaaggcccatttttccactgcagccttaacatgcaaaccacattttcaacctctgtaatgaatttcctctgcctttcattgaaatgcaagtagcagccagttccctctgaggcttcttggttcaacttttaacttcataatttcacttagaaacatttataagtcctccttactgttaagactcacagtttagcagagaagcctatgttttcttatggagatatggaggtcaact

SEQ ID NO: 47193 - DNA, 558 bp, Homo sapiens
cctttgctaaacaccagctcttcttataacttaactaatagcatcttagatttagtttcacaaagtaagattaagttgcttcacctactgaattttttaataattgtttttgtcaaaagaacaaaacaaacaaaaaatacaaagatattgaaacttctcctaggctgcaattttctgttcaatgcacatctttggctttgaagggaagaattttcttgcaaagttaaaaaaaaaattagggtgcatcagatggagtatatgtgcttagccaaggaaccttcaccacaaagggtaagctacaacttccctcccacctcccctgggaaggcccatttttccactgcagccttaacaygcaaaccacattttcaacctctgtaatgaatttcctctgcctttcattgaaatgcaagtagcagccagttccctctgaggcttcttggttcaacttttaacttcataatttcacttagaaacatttataagtcctccttactgttaagactcacagtttagcagagaagcctatgttttcttatggagatatggaggtcaact

SEQ ID NO: 47194 - DNA, 594 bp, Homo sapiens
cttgtcagctgaaccacagaacacagaaagttgagttactattttctcaaatctgtcaaggatggtacataatgaatttcattctaggtgtctkgaaaaagttcagcttatacacagagtggatgccctaagaattgggaattcattctcaaagactgagtggtttaagagttctacatccttgccaacattttatgttgcctttttagttttagccaattgtagtgggatgttctagatatatctttcatgaacgccacatagctggattttgctttgttaagttagcaacttgctaacttctttttaattaattagagtgtatcgctatgttggctgggctggtcgtgaactcctgggctcaagtgatcttcccacctcacccgcacaaagtgctgggattgtaggagtgagccatcagctaacctctttaactagagcatggagaccattcatatctgttgtaattacagatattttggatatatgtctgccattatatttagtcttctagttggctggcctgtgtgtttgttttctgtcccttttttttttttttttttttttttgagacagagtctcattctgtcaccc

SEQ ID NO: 47195 - DNA, 594 bp, Homo sapiens
cttgtcagctgaaccacagaacacagaaagttgagttactattttctcaaatctgtcaaggatggtacataatgaatttcattctaggtgtctggaaaaagttcagcttatacacasagtggatgccctaagaattgggaattcattctcaaagactgagtggtttaagagttctacatccttgccaacattttatgttgcctttttagttttagccaattgtagtgggatgttctagatatatctttcatgaacgccacatagctggattttgctttgttaagttagcaacttgctaacttctttttaattaattagagtgtatcgctatgttggctgggctggtcgtgaactcctgggctcaagtgatcttcccacctcacccgcacaaagtgctgggattgtaggagtgagccatcagctaacctctttaactagagcatggagaccattcatatctgttgtaattacagatattttggatatatgtctgccattatatttagtcttctagttggctggcctgtgtgtttgttttctgtcccttttttttttttttttttttttttgagacagagtctcattctgtcaccc

SEQ ID NO: 47196 - DNA, 1757 bp, Homo sapiens
tgcatacaagtttttaatttttatgaagttccatttttttcttttgttgtctgtgcttatggtgtcctatccaagaaagcatttccaaatccaatgtcataaagcttccccccatgtcttcttctaagagtttcttagttttaactcttacatgtaggtttccaatagattttgagtgagtagaaggtaggggaaaggtccaacttcattcttttgcatgtggatatccagtatttccaaccccatttgttgaaaagactattcttttcctgtaattcttgcctttcatgaagataagcttcctctgaatctcgggttcacatgatatacaagagagctcctaaaggtatatattatccatttagtctgttggatagagactaccattctttcttattccagttccaaatgttgctttcctaatacatcacttattgacttagtatccagagggttgaggccacttgactgcggaagacttcttgctaaaatcattgattcagyaaataattatgaagcacttccaggtaccttgcagtgttttaagtatagagatacagcagtaaacaaagcaatgtccttgtccccagggagctttcattctaatagttatgggaatacagaagaagaagaagaaagggtagcttcagaaagagggttggaaaggcaatccaagagatgtccactacaataagtaaatgactaatatagcaaatattaataataaatatgaatatataaataataaaactaatagtatattgtttaataaaatatgccacttctatatatgccaagaaactgtcatattatcattttgaatttctttttttttgtttttaaaaatagagatggggatctccttatgttttccaggctggcctcatattcttagattcaattgatcctcccacttcagcctcccaagtcactgggactacaggcgtgcaccacactgtgtctggcttgtgaatttcttttaaaaagagcatttatttgacaaataaattaatccagattatttttaattataagttacataaacaccatttccaaatgagaagaacaacttttataaggcaggataaaagaaattttaagaaaggtaaggcaaaataattggttattacaaaacagttaactttgagaaaaattaattttagctcgacttaagtcatgaagctgaatgcgtttcagtcgtctttgcatgagtagtggggctgcagagggcaggaaagagtaggagtgcatgcctgcctgagaatacttgagcagaaagaggtctggagacttgaaaacaggtcgtgtttggggtgcttgtgtgtagtgtgcacacattcttctgagatgtccttgaaggagcttcaggatagcttagtaggtaatcccagagagctctgctttttttgcagaagtggtggtgctctcatgagcatgaggtattttgcaggaatggtaacatcttagatggtgtagtaaaatagatccagcatgagggctgaaatgatgagtttcacattaagacctgtgtggaaatttgcttccaccactgtatataacattaggaaaggtatttaattttttggagtcttagttttctcatctgtgaaatgaatgttagaatcagtctcttaaatttccagggaggtgttttcttcctttaacaatgccatttattttgctccaaaatatagaattgggcagagctttgccatctctatttcatgcaatgtcacctgggaggaatgactggcatg

SEQ ID NO: 47197 - DNA, 1757 bp, Homo sapiens
tgcatacaagtttttaatttttatgaagttccatttttttcttttgttgtctgtgcttatggtgtcctatccaagaaagcatttccaaatccaatgtcataaagcttccccccatgtcttcttctaagagtttcttagttttaactcttacatgtaggtttccaatagattttgagtgagtagaaggtaggggaaaggtccaacttcattcttttgcatgtggatatccagtatttccaaccccatttgttgaaaagactattcttttcctgtaattcttgcctttcatgaagataagcttcctctgaatctcgggttcacatgatatacaagagagctcctaaaggtatatattatccatttagtctgttggatagagactaccattctttcttattccagttccaaatgttgctttcctaatacatcacttattgacttagtatccagagggttgaggccacttgactgcggaagacttcttgctaaaatcattgattcagtaaatawttatgaagcacttccaggtaccttgcagtgttttaagtatagagatacagcagtaaacaaagcaatgtccttgtccccagggagctttcattctaatagttatgggaatacagaagaagaagaagaaagggtagcttcagaaagagggttggaaaggcaatccaagagatgtccactacaataagtaaatgactaatatagcaaatattaataataaatatgaatatataaataataaaactaatagtatattgtttaataaaatatgccacttctatatatgccaagaaactgtcatattatcattttgaatttctttttttttgtttttaaaaatagagatggggatctccttatgttttccaggctggcctcatattcttagattcaattgatcctcccacttcagcctcccaagtcactgggactacaggcgtgcaccacactgtgtctggcttgtgaatttcttttaaaaagagcatttatttgacaaataaattaatccagattatttttaattataagttacataaacaccatttccaaatgagaagaacaacttttataaggcaggataaaagaaattttaagaaaggtaaggcaaaataattggttattacaaaacagttaactttgagaaaaattaattttagctcgacttaagtcatgaagctgaatgcgtttcagtcgtctttgcatgagtagtggggctgcagagggcaggaaagagtaggagtgcatgcctgcctgagaatacttgagcagaaagaggtctggagacttgaaaacaggtcgtgtttggggtgcttgtgtgtagtgtgcacacattcttctgagatgtccttgaaggagcttcaggatagcttagtaggtaatcccagagagctctgctttttttgcagaagtggtggtgctctcatgagcatgaggtattttgcaggaatggtaacatcttagatggtgtagtaaaatagatccagcatgagggctgaaatgatgagtttcacattaagacctgtgtggaaatttgcttccaccactgtatataacattaggaaaggtatttaattttttggagtcttagttttctcatctgtgaaatgaatgttagaatcagtctcttaaatttccagggaggtgttttcttcctttaacaatgccatttattttgctccaaaatatagaattgggcagagctttgccatctctatttcatgcaatgtcacctgggaggaatgactggcatg

SEQ ID NO: 47198 - DNA, 1757 bp, Homo sapiens
tgcatacaagtttttaatttttatgaagttccatttttttcttttgttgtctgtgcttatggtgtcctatccaagaaagcatttccaaatccaatgtcataaagcttccccccatgtcttcttctaagagtttcttagttttaactcttacatgtaggtttccaatagattttgagtgagtagaaggtaggggaaaggtccaacttcattcttttgcatgtggatatccagtatttccaaccccatttgttgaaaagactattcttttcctgtaattcttgcctttcatgaagataagcttcctctgaatctcgggttcacatgatatacaagagagctcctaaaggtatatattatccatttagtctgttggatagagactaccattctttcttattccagttccaaatgttgctttcctaatacatcacttattgacttagtatccagagggttgaggccacttgactgcggaagacttcttgctaaaatcattgattcagtaaataattatgaagcacttccaggtaccttgcagtgttttaagtatagagatacagcagtaaacaaagcaatgtccttgtccccagggagctttcattctaatagttatgggaatacagaagaagaagaagaaagggtagcttcagaaagagggttggaaaggcaatccaagagatgtccactacaataagtaaatgactaatatagcaaatattaataataaatatgaatatataaataataaaactaatagtatattgtttaataaaatatgccacttctatatatgccaagaaactgtcatattatcattttgaatttctttttttttgtttttaaaaatagagatggggatctccttatgttttccaggctggcctcatattcttagattcaattgatcctcccacttcagcctcccaagtcactgggactacaggcgtgcaccacactgtgtctggcttgtgaatttcttttaaaaagagcatttatttgacaaataaattaatccagattatttttaattataagttacataaacaccatttccaaatgagaagaacaacttttataaggcaggataaaagaaattttaagaaaggtaaggcaaaataattggttattacaaaacagttaactttgagaaaaattaattttagctcgacttaagtcatgaagctgaatgcgtttcagtcgtctttgcatgagtagtggggctgcagagggcaggaaagagtaggagtgcatgcctgcctgagaatacttgagcagaaagaggtctggagacttgaaaacaggtcgtgtttggggtgcttgtgtgtagtgtgcacacattcttctgagatgtccttgaaggagcttcaggatagcttagtaggtaatcccagagagctctgctttttttgcagaagtrgtggtgctctcatgagcatgaggtattttgcaggaatggtaacatcttagatggtgtagtaaaatagatccagcatgagggctgaaatgatgagtttcacattaagacctgtgtggaaatttgcttccaccactgtatataacattaggaaaggtatttaattttttggagtcttagttttctcatctgtgaaatgaatgttagaatcagtctcttaaatttccagggaggtgttttcttcctttaacaatgccatttattttgctccaaaatatagaattgggcagagctttgccatctctatttcatgcaatgtcacctgggaggaatgactggcatg

SEQ ID NO: 47199 - DNA, 588 bp, Homo sapiens
gccttggtaaacagtgttgatattatttagagagtatctgcaaagctgtgccacgagatgaatgaacatataagagtgagaaataattaggatgtatagacaaataccaattcattcaaactgtagctgagaatttctggtatctgcacactttaaatctacttttatgaaataagtgaaggtttcaaatgtaaatattaatgtaaataaaaaaacataaacataaaaaaggaaatagtgtatcaaataaatatgtttggagccattcctacatatttccaaattgtctaaaaaagtcaatgctttatataagatatgtgcayctgagttgattaaattatgagggaatcttttagtaacatatatgaaatgtttgtagaagacagtgttcaaaatggtagaaaatttaaaaacacaaactatttattatgctatgtttttagataaaatgtacatgttcatgtaatcacagatatatatttgcttcaaacattgatatattatttaaaaaaaggctcacatgtaacaagtgattgatacagtctttaaaatagaaaaaaaagtctcatataggttaatagattattt

SEQ ID NO: 47200 - DNA, 588 bp, Homo sapiens
gccttggtaaacagtgttgatattatttagagagtatctgcaaagctgtgccacgagatgaatgaacatataagagtgagaaataattaggatgtatagacaaataccaattcattcaaactgtagctgagaatttctggtatctgcacactttaaatctacttttatgaaataagtgaaggtttcaaatgtaaatattaatgtaaataaaaaaacataaacataaaaaaggaaatagtgtatcaaataaatatgtttggagccattcctacatatttccaaattgtctaaaaaagtcaatgctttatataagatatgtgcacctgagttgattaaattatgagggaatcttttagtaacatatatgaaatgtttgtagaagacagtgttcaaaatggtagaaaatttaaaaacacaaactatttawtatgctatgtttttagataaaatgtacatgttcatgtaatcacagatatatatttgcttcaaacattgatatattatttaaaaaaaggctcacatgtaacaagtgattgatacagtctttaaaatagaaaaaaaagtctcatataggttaatagattattt

SEQ ID NO: 47201 - DNA, 549 bp, Homo sapiens
ccaaagcctgggaaagggatgggttggtgggataaaagaggttgatacatggtacaaaaatacagttggaggaaatgagacctaagtcagtagagtgaatccagtaaccaataatcttctgtatatttcaaagtagctggtagtgaataattcaaatgttcccagcatagaaaaagacaaatgtttaaggtgatggatatttcaattaagggtaatcaatcaggggatttgattattatacmttatatgaatgtatcaaaatatcacatatgtcctgaaaatatgtatgtctattatgtgtcaataaaaaataatctttaaaaatgtgtggcactgatggtgtattgttatttaaagaaaggagaggttggtgcagaccagagtggtcaggggaggctccttgttggaaatgacatttaagcttgctgttaaaaggggagctcaggggccgggtgacggctcatgcctataatgccagcactttgggaggccaagacagggttagtgcttaaggccaggaatttgagaccagcctagacaacatagcaa

SEQ ID NO: 47202 - DNA, 549 bp, Homo sapiens
ccaaagcctgggaaagggatgggttggtgggataaaagaggttgatacatggtacaaaaatacagttggaggaaatgagacctaagtcagtagagtgaatccagtaaccaataatcttctgtatatttcaaagtagctggtagtgaataattcaaatgttcccagcatagaaaaagacaaatgtttaaggtgatggatatttcaattaagggtaatcaatcaggggatttgattattataccttatatgaatgtatcaaaatatcacatatgtcctgaaaatatgtatgtctattatgtgtcaataaaaaataatctttaaaaatgtgtggcactgatggtgtattgttatttaaagaaaggagaggttggtgcagaccagagtggtcaggggaggctccttgttggaaatgacatttaagcttgctgttaaaaggggagctcaggggccgggtgayggctcatgcctataatgccagcactttgggaggccaagacagggttagtgcttaaggccaggaatttgagaccagcctagacaacatagcaa

SEQ ID NO: 47203 - DNA, 549 bp, Homo sapiens
ccaaagcctgggaaagggatgggttggtgggataaaagaggttgatacatggtacaaaaatacagttggaggaaatgagacctaagtcagtagagtgaatccagtaaccaataatcttctgtatatttcaaagtagctggtagtgaataattcaaatgttcccagcatagaaaaagacaaatgtttaaggtgatggatatttcaattaagggtaatcaatcaggggatttgattattataccttatatgaatgtatcaaaatatcacatatgtcctgaaaatatgtatgtctattatgtgtcaataaaaaataatctttaaaaatgtgtggcactgatggtgtattgttatttaaagaaaggagaggttggtgcagaccagagtggtcaggggaggctccttgttggaaatgacatttaagcttgctgttaaaaggggagctcaggggccgggtgacggctcatgcctataatgccagcactttgggaggccaagacagggttaktgcttaaggccaggaatttgagaccagcctagacaacatagcaa

SEQ ID NO: 47204 - DNA, 579 bp, Homo sapiens
ccctaaattcatcaaacagaggcacactatcggggtggtcatgacctagaagtaggtgatgtgkttatcaactagcagcagacttcaaattccccactgcctcagtttcccttgttacacactagaagtttgtctctagtgctcgggcagtgggcatgatgttttatttgattgggcatacttttgcaaagattgctaagttgaacaattgctatctttgtttacattggattgatgttgaataacgggttatttaaagattttcatgagacttgaggcttcatttcagtacttccttgctcgataagtgtttgttaaatacctcctgtgtagcagacagtgtcttggcactttagtcaaaatatagataaatgacacttacttcctgaccctgaggagcttgcaatttaacaaaggacaggaaaaaaatatatatatacatacacacatatgcatttatatgtgtacatggccacatataaacatacataatatatataagtatatacaaatacatgcacacccatacatacatgcctgtgtgtatatatatatgtgtgtgttgacagatacaaaacc

SEQ ID NO: 47205 - DNA, 584 bp, Homo sapiens
gaatcwtatctaaatcatatctaggtaaaaagaattgcactttaagagagatattataaacattgaacacataatccattagtattatttcagttgtaataatagacatacaatcctttgctgatagaactcgtttgcctaaaagttaaaaaaagtactgtacataggctgggcgcggtggctcaagcctgtaatcccagcactttgggaggccgaggtgggcggatcacaaggtcaggagatcgagaccattctggctaacacggtgaaaccccgtctctactaaaaatacaaaaaattagccgggcgtggtggtgggcgcctgtagtcccagctactcgggaggctgaggcaggagaatggcatgaacccgggaggcggagcttgcagtgaaccgagattgcgccactgcactccagcctgggcgacagagcgagactccgtctcaaaaaacaaacaaacaaacaagtactgtacatgtcaaagctttactgtttatcatagaaattttaggtattttgatgttgtgaacttctgtgcatgatactccctttaagataaaatgattgattgcctcattttta

SEQ ID NO: 47206 - DNA, 533 bp, Homo sapiens
tttgtcaggaagttggcattcattttaaagaatttattgattacatgcataagctgtgcaaagggtatttcatcaatgtatgtataaarcatatatatatacatatatattctacttttcttcttgagcactcaaagaaggtcattggggaaatctgtctgatttctgcagtgcattggctgagaaataatttaggtggacttcttgtctgtactctgagtatgtgtatgcataaacatggatatgcatatgctacttatagcatatatagatttcatacaattatgatagaaaatataacctaaagagagagctcatgattgccgtgatgaataggacaattaaaatggttgccataaaaattatttgaacagaaaagactaaacttgtagagaagcccaaagaactgacttgaagtattcatggatgttaactggtattacatcctgtgtgttaagagagaaagtagatcccttggtgatagatttaaaaagcacccagtatttccaaatgcctccttcaaatgtctcctg

SEQ ID NO: 47207 - DNA, 630 bp, Homo sapiens
taattatcactatcgttatttagtttaattaaatattgtataaattcttsgccccaggtgagtgtgaaaagacaagagtttttgttcctatgaaaactaagttaaatactttaaacagattcatacatttaaactgctaagaaagaaaaaaaataactgttgctttgaattaagtggaaacaaggcagctgtaaaatattaagattttattaactcaatattaatcattttataagtagtgacttcatattgttttaaaattcctactcctactaataaatagcaaatacttatggagcactgtggtaggcagaacaatgcctcctgagaagtgccgacctcctaattcccaggacctgtgaatatgttaaggtgcatggtaaaaggagaattaaggagctaatagctaactataaaaaagggagattatcctggcttatctgggtgggcccaatgtaattagaagggtccttaaaagtggaagagggagacagaaaaagagagagttaaaaaatgtgatgacaggtgcaagttcagaagtgtactacctaaggactgaagctgcactgatggcttcgaaggggcaagaaggggccacaagccaaggagtgcagacaacccctagtggct

SEQ ID NO: 47208 - DNA, 406 bp, Homo sapiens
gacattcaacgtcattttcctgtccctgacctttgaaagaaccctacccatcyggggcctgtgatgtagactcagactgagatgttccatcttggggatataatcagtgggaaagagagagattcctgagaggtcatcattcattcattcattcattcaagaaatatttatggagtgcttgggcaaggaattctaaattgcagagtcaactagagccagcttaagcagaaaaggaattttttttttttttttctaagatggagtcttgttgcccaggctggactgcagtggcacaatctcggctcactgcaacctccgtctccagggctcaagtgattctcctgcctcagcctcccaagtagctgggattacaggtatgcaccaccacgcctggctaattttttgt

SEQ ID NO: 47209 - DNA, 576 bp, Homo sapiens
tcaattttgggttttgggattagggatactcaaccagtggtaggtttgggatgatatcagcatgctaaggtcaaagagacctagctgggaagggtgggaggaacatggaattttcattctctgggcaccccttgaacagtcttactattagggccccaaatttgttctaagtgtgtgtgtgtgtgtgtgtgtgtgtgtgtgtgwgagagagagagagagagagagagaattttctttcttcctttatattctaagttcctcaggacaaaattttgggtttctttgtattctccctgcagctcctcatgtagttctaagcaaataaaggaattcattaggtccttgatttcagaagcctcccagttctctatgtaggaggaatcttagggtggcaagataagttgagggacttttcttcaagcacatttcacaagtaagagaaaatgttgactgtgtatatctaagaatgggtggggctcaatgatgcccccctaagttactctttactattattgattgattgattgattgattgaagaagcaatgttttgattgattgaagaagtaatgtttcca

SEQ ID NO: 47210 - DNA, 788 bp, Homo sapiens
ggttaggttaaaaatatgttgttgtttactttaaactgtaaatctgcgtaagtggtaggtgttggatttgttgccttttttgggatagctacattgtaactggtgatctcctagtggccaaattccacggactctacgtttattactccttccttccacggtctcggtttcccacctctcagctcgatctgccttagtgacctatgctggccgctgtctcatcctgctttctgaacagtgctcctgtctgggtgccttgccctacccctgctcatcaccacctggacaccacggctacagccgcactgaaaccgtcctcattcccccagcagtaatgttcagaaagcaggttcctgtctgtgctgtgccttgccaggataaattaatatacattgttttaggtattcctaaagaaaggaagagaaggagactgaattgggatgataacaaaaagttctaragatctaggtattgtggcatatatatatatatatatttttaattcttgacatcttggtagcacttgactgtagactgactttggaaatgtggcaacatttcaaatgattttaagaagcctgcagagctaacagtagctcagaagatttcgtttctggagtgacgttgagcatggtgtccccaagcaacccagtgacctgtgaggggaagttgatggtattttctgggctttgataacatggactttctgtttttgtttttttttgagacagagttttgctgttgttgcccaagctggagtacaatggcgtgatctgggctccctgcaa

SEQ ID NO: 47211 - DNA, 788 bp, Homo sapiens
ggttaggttaaaaatatgttgttgtttactttaaactgtaaatctgcgtaagtggtaggtgttggatttgttgccttttttgggatagctacattgtaactggtgatctcctagtggccaaattccacggactctacgtttattactccttccttccacggtctcggtttcccacctctcagctcgatctgccttagtgacctatgctggccgctgtctcatcctgctttctgaacagtgctcctgtctgggtgccttgccctacccctgctcatcaccacctggacaccacggctacagccgcactgaaaccgtcctcattcccccagcagtaatgttcagaaagcaggttcctgtctgtgctgtgccttgccaggataaattaatatacattgttttaggtattcctaaagaaaggaagagaaggagactgaattgggatgataacaaaaagttctaaagatctaggtattgtggcatatatatatatatatatttttaattcttgacatcttggtagcacttgactgtagactgactttggaaatgtggcaacatttcaaatgattttaagaagcctgcagagctaacagtagctcagaagatttcgtttctggagtgacgttgagcatggtgtccccaagcaacccagtgacctgtgaggggaagttgatggtattttctgggcttygataacatggactttctgtttttgtttttttttgagacagagttttgctgttgttgcccaagctggagtacaatggcgtgatctgggctccctgcaa

SEQ ID NO: 47212 - DNA, 1558 bp, Homo sapiens
gaggcactatctcttcagagattttcttctaaggaaaatcaactctccctgccctgcacactccctcaacccccagtcrtaacagaaaaaacaaggagagccaaattatttcatgacgatagaataatcaaatgtaatagtttagtgactccttttttctctttcatgcttagccactgggagtaatattttcttaaaccaaataaatgttcaacactatttaaatcacaaaagaagaaacataaaaggctaaactcactaaatataaaaagccaattgatatcactatgtaatataattttggactctgaaattggcaaaatttaaaaatttgtaaactgataatttctacctttgccaaaaccttggtagggatataaatttatgcaatagtgaaagtaatttggtactatctatcaaaactaaagttaccataatatttgtctagcaaacttacttttaacaatttttttctatgtaaatagaacacaaatttattgaaagtttatcaataaaaaattcggagaaattattcaatactaagagaatgctttaggctgggcagtgactcatacctgtaatcccagcactttgagaggctgaggcggtagatcacctgaggtcaggagttcgaaatcaccatggccaacctggggaaacccaatctctactaaaaataaaaaattagctgggagtggtggtggacacctgtaatcccagctactctggaggctgaggcaggagaatcacttgaacctgggaggcagagcttgcagtgagctgagattgcgccattgcactccagcctgggcaacagagggagactttgtctcaaaaaaaaaaaaaaaaaaaagagagaatcctttaaataaaatggttcaataatctgttaccttataaatctcagaaaaaaataccaaagttacaatgtggtttatgcaattgaacgtttgataactgaaagctgtagagttttgcataaggcttatttttaatcattaagagatgtaattctgagcagactaggagtgactactgatctctctgtaggtattagtgaagctcagaacacaatgccccaaaacatggcacctaggcactgagtattttaaactgaaggaaattgagaaaaccacagaagcaaaaaggtcactctctgaccatctatcaccatttccccctgaggccacaaaaagaattatctgttctacttcccctgaaagtaggtcataaaaccctcattctagaagggtcttaccctatacccagaggaaagggataagacactcaaactcagaaaatttagaacagcctttgctgaggtccctgcatttttcccattagatcgtaccctcttgactgccaatcacacttccgcatgactatccttaaaaacacagttttccttgggcctttgggtctttatttctgaagactcccatgtcattaaatactttggttagatatatttgctatgcttttctcttgttaatcttccttttttatagggatgccagccatgaaccttgtgatgggtgagaaagagatattgcatttt

SEQ ID NO: 47213 - DNA, 605 bp, Homo sapiens
aaaatcaaccaacacagcgtgactttatctttttaaataatcagttgtttgagacagttttcaacataaattttgatggcgagtcaaggagtttaaactgccgttttactcatgccagatgccacttttacattgttttaaaagcttctggagtgtatttatagatggcttgtttgctctcaagcatgtttctgagtgtgtgtttgctgctgtttggcagtattttcaaatgtaccgtagcaagaagccaccccacaactcagccttatattcctgaaaacgaaagtgcttttgtatttaaaaagaaagaaagaaagraagaaaaacaagcttttaaatgaagaagaatgcgtatgggtagaggaaaaggcagcaagagagaactggctgtagttccaaaatgtcagtgactctgattctctagggtcatctcaatgctgcgtgaacagcagggctagtcattctaggtccctttggggtgatcatgtataggaaccatggtgaattagagtgccaaaaagaactgcttattctggattattaaaacagctaattctgtgataaagggtgatttatatcacttattacaagtttgtgtttttatc

SEQ ID NO: 47214 - DNA, 605 bp, Homo sapiens
aaaatcaaccaacacagcgtgactttatctttttaaataatcagttgtttgagacagttttcaacataaattttgatggcgagtcaaggagtttaaactgccgttttactcatgccagatgccacttttacattgttttaaaagcttctggagtgtatttatagatggcttgtttgctctcaagcatgtttctgagtgtgtgtttgctgctgtttggcagtattttcaaatgtaccgtagcaagaagccaccccacaactcagccttatattcctgaaaacgaaagtgcttttgtatttaaaaagaaagaaagaaaggaagaaaaacaagcttttaaatgaagaagaatgcgtatgggtagaggaaaaggcagcaagagagaactggctgtagttccaaaatgtcagtgactctgattctctagggtcatctcaatgctgcgtgaacagcagggctagtcattctaggtccctttrgggtgatcatgtataggaaccatggtgaattagagtgccaaaaagaactgcttattctggattattaaaacagctaattctgtgataaagggtgatttatatcacttattacaagtttgtgtttttatc

SEQ ID NO: 47215 - DNA, 530 bp, Homo sapiens
taacccaaatcatcaatctctgtgggtttcagtttcctgatctgcaagactgtcttaaaacactaagtgtatacacacacacgtatgtacatatagtgctctttttcaatcctaaagtttattaagtctccactgcttaaacaatgttggtggggtggggtggggtgacagagtcggatagaaaaggttgaaatcctagctccgccatctaacttgttatgttatcttgagaaaattccctaaactttccaaggctcagttttcttatttttgaaacaaggcagataatacttgtcttctagaattgtctttcatcgttttatacttaccttggctagtgcctggtagatggcagattctcaaaagatatttgttcatggaaaaatgaatgaaagtagaggaatatatagtatacagtataaattatagctattgatattaacctctactattgcatacagtgatgtctatatctactcatatatactttggaatattgggataaatagtacacacrtagtagtgcaaag

SEQ ID NO: 47216 - DNA, 538 bp, Homo sapiens
aaaaaaaaaaaaaagaagaagaaccagcattagaaagggctccggggtgggtttatccaccctaccaaattacaacaaaggcacctgaggctcaggagattaagcaatttgcccacggtcacccagccagaagcaaggcttccgcagccccctgtgagctccagcaggacagtcaggaggagagctgtcttctgaaggaaycctcaggatgatggggtgtcctgttagtgcagcagctgcctctgtggcagaggggtccctgtaaacatgaaggctcattttcacccaagtcacacagccaagagaatattatcagaatcaataaaaatataaatgcatggggaatagtcagatgggctttagtcctaactttgccccaactcagtatatgactatgtgcaaatgttaactctttcaaggtctctaaagaaaagctctgtgtcttagtctcctcctctgtaggatgagaacagttaacagtaccttctgcctatgtgtaagagattaacatgcaagccacagagtgtaaagatataca

SEQ ID NO: 47217 - DNA, 593 bp, Homo sapiens
gaaagggatatgatgctcactgtttggagcagatggcatattgttccctgagggtggggaaatcagaacagctccttttttcttctgtctatgacttccttttcaaagacaatgatcttcatattggaaacatctagycataaaggaggcaatggaaacgcgactgtgtggagtcgttattttttttgtttttttgtttttgtttgcttgttttgagacagagtcttgccctgttgcccaggctggagtgcagtggcacaaacatgattcactgcagactcatcctccccctcaagccatcctcccacctcagccttccaagtagctgggaccacaggcacacactgccatgcccagctaatttaaaaattttttgtacagacaaagtctcaccatgttgcccaggctggtctcgaactcctgagctcaagcaatcttcctgccttggcctcccaaagtgctgggattacaggtgtgagccactgcccccagctcttccagtcattttaagcaaatttcattctccacatggagaaaaattacagcctggtactaaaggttctttatatgtgtaattcgatacttactactgg

SEQ ID NO: 47218 - DNA, 551 bp, Homo sapiens
cacactggtttcagagactaaagcagcaggggcattataggcctttaagagttttatatcttttaactytgaggattagggttttaggtttttgacaggcttttatttctaatttaatttgctttattttgcaaagaagctcaaaatgcttattgtaagaaagacataagggttgtctagcttccctttgtgcagatgaagaaacggaggcctgcagatgtcggagacttgctctctggtatcatccaggacattggggcagagctaggacctgcagccaagctgaatgtttatttcccaggtatccccgccttcctgattcagggaaacaaggctttcttggcagaggggtgccagcaccacagatggagtacagcccaagttgatgccatagcagctgcgtttccccaccaacgctacagagtcactgctataaagaagaaaaattctggctgggcacagtgactcatgcctgtaatcccagcactttgggaggccaaggcgggcctgaggcctgaggggaaaaaacaaaaatttttttgaggtggagt

SEQ ID NO: 47219 - DNA, 689 bp, Homo sapiens
attgtaagatggcattccttgtatgtgcgccattaagggacttccaggaccaaaaccaggaaagtctcaggcaaactgggacaagttggtcaccctgagtagaaggcagagtgtgaggagaggacttctgtgaggagcagagaaaaacggtttgaaatggcgattttggaacttcccatgttttccataatttcaagagaaagctgacatttctgagtccttcctggcagtaacctaggatattttttctctttcagagttacagaagatgtaccattttccatgtttttccttctttaccttcatgtccaggctagagaagcactggwtatgtataacaatgggagagaattccaggtcagaaagccagcaagctcttgactaatggaagctatgtgtccctggcaggagaggtacttccaggggctccattagatgatcactgcctgtccacagccgccagccccttcatgacagcataccatcaagagttttctaaataggagctttccaaaaacaacaccacaaagtgcatccctcttctcttagtgattgtccgtggagtggccaagggtagacttgggtagcaagagtataataactttttatttttggaaacaaaaagcaagtctacttattggcagctaaaatgctggcataggccagagagaaaagttcagattacatgg

SEQ ID NO: 47220 - DNA, 529 bp, Homo sapiens
cttaaactttataaattagtggagattaggagatccttgcccttactattctttaggatttacctgacagccatatttcctatcttcaacttttcttcattttattagtgtgctattcaaacatgaggtggctcatttccctgaatgttgtttgtccctttttaattcstccttgtttaaggaaaattttgaagaataatgagggtagtagggggacacaggatgaggcttcatatataaatttgcgttgatgcagcaaatgtggttctgagaagttacatgggaaacggtgttgcagatacatgtaattgatcactttgcctaatgtatctttgcctgacttaatgctatggatgtgaattatagatattaaacaaggagacaagaagaagtcacccaagctaggagctctgaagtcatcctttttctcatacttactccttctggtcaggcaaaaggtcattaactattgtttgtttactttataggtatttttcaaatacattcccttttcttctttaccacttct

SEQ ID NO: 47221 - DNA, 591 bp, Homo sapiens
  misc_feature (1)...(591): n = A,T,C or G
actgtttatgtgtctttttaaagtcagggaaacttttccagaagtcctcctgtgccatatatgtcctattttgtgtaaattcacctttgctgaggactaggtacctgaataaagtcatgattctcttaatatgaaaagcagtgggaatgattttgggtaggcaactgtcaacacctcntaattcattcataggttatttgcccattagccgggtgtgcctgtagtcccaactaccccagaggctgaggctgnaggattgcttgagccanggagttcaagaccaccctgggcaacatagagacatacagcgaccctatctctttaaaaagtatatataaatatatatatacacacacatatatacacacatacatgtgtgtatatatatacacatatatgtagtgtgtgtattaaatatataatgtgtgtgtgtgtgtgtrtgtatatatatatatatgattttcccaatatttaaggacaatctagaattctagaattatggatatttccctgaaaatgtcattacttttggatgtcccttgcttattacaacttactcacttgcttatcaataaacatttattgaaaacc

SEQ ID NO: 47222 - DNA, 591 bp, Homo sapiens
  misc_feature (1)...(591): n = A,T,C or G
actgtttatgtgtctttttaaagtcagggaaacttttccagaagtcctcctgtgccatatatgtcctattttgtgtaaattcacctttgctgaggactaggtacctgaataaagtcatgattctcttaatatgaaaagcagtgggaatgattttgggtaggcaactgtcaacacctcntaattcattcataggttatttgcccattagccgggtgtgcctgtagtcccaactaccccagaggctgaggctgnaggattgcttgagccanggagttcaagaccaccctgggcaacatagagacatacagcgaccctatctctttaaaaagtatatataaatatatatatacacacacatatatacacacatacatgtgtgtatatatatacacatatatgtagtgtgtgtattaaatatataatgtgtgtgtgtgtgtgtgtrtatatatatatatatgattttcccaatatttaaggacaatctagaattctagaattatggatatttccctgaaaatgtcattacttttggatgtcccttgcttattacaacttactcacttgcttatcaataaacatttattgaaaacc

SEQ ID NO: 47223 - DNA, 584 bp, Homo sapiens
atgcttcaatgcatcctgcttttgttatatatttaatcacttagtgatacatttttatgtggcctaagaccttttactttcaatgccattgagccatttgtattgtataataactaacaataataacagacatttgcaaaatattttaatagctgacattatatactaacagattaatactagatatccacataataaagttatatataagatctgaaaaatgtttagactattaaaaacaatatcatattgtatatggttaaacaataaaaatagaaatgagtctaattccatatttctaaatcaaagggttgctttatttttataataggccttcaaaatataccctaaatrttttcttctctcaagtatacttacaggttccatgttatagctatcaactctacaatcttctacaacttctgccttatcttgtttcaaaacctttaatttctacttttccatgaaataaccattttttttttgaccattttctgaggtacagggatagctatctctcaaacaaatgttgctgctatcaacccatcgaggcaagaacagtcagtgtaatttagtttgtcact

SEQ ID NO: 47224 - DNA, 592 bp, Homo sapiens
cagtcggtgcttaataaatgtttcttaaaagaaccaataaatgaatagtgacctctccggggagaggagccctgagctcacctcctgcccccagcccagggctcttaggtgcttgttggtgtcaggcccaggcccccctctcatcaagcagccaataaaactgccctggttggcgttctcatttcacagatggagagactgagcccagagagggagagtcacctgtctgatgtcacacagaggtcagcatctgggctgggattccagcccaggaccatgtggggtggggggcagtggatcaatcttttcctggagggagtcaatggtgatggtgggaatgggtcaggggtgctggcaaggaggktccaaggcccccaggagggagggaggcatgggagatgagtttgtccctcttgagttctgtctctctctgtgtctctctgtttctgcctctttctgtctccttgtatttctcagtccctgtcttcgtctatacctctttctctcttccttgtgtatctgacccactgcccaggaggggatgcaggcagagacccctggcttgggtcctggagttggggcccacgagggg

SEQ ID NO: 47225 - DNA, 531 bp, Homo sapiens
ttttttcacttaggtgggtttattgggacacagtagccccatggtaagccaagaagcatctgtaccaaatttgaatgtctttargtgggctgtgcctctccagtcctctgcagtctggtccactttctaatgccttaccattttacacaatttatctgcccaaccccttaaggaatttgagtgtcacccctaatctgcagatcttcagctttccaaatgtggagatcttccccacaacgtctctaatacacggctcccctgcctatgctttcagaggcagggagcttaggaggaagtatgttccactggtggaaagctgacgaaaataattctttctggatgaaaatcataacttagagtcatctactgaaattaacctgctacatactaactgcattaaatccttttggtaacttactttttactgctaaatgctttccccattcttaagtattccatcacaggatgatataagcctttttagatatactttctcatctgttatttaggcagaggacatgtcacttagaa

SEQ ID NO: 47226 - DNA, 596 bp, Homo sapiens
cagaggagtggctaatggtggcctttgggtgccaatggccaattagtggtgggaaaaggaatcttccagcatccccggggggccggtctccctctctccctattcctgcatcatctgatttgttctgggtaaggtctgaatagcagcagggatttggggcccttctgcctgggttcaaatcccagcaatgccactcagcagccgcgtgacctgggccagctccttaacctccctgggcctcattttcctcccctataaaataggtagtaataggcactccttccccggggccttgggaagcagcagtcagcacctggataatgtgtgcagygggccagccctgccagaagagccgcccagggattctgtaattaaattagactcactctaattccactggattcactcatctgcacgaagggctgagaacggtgctgggcccttgcgagtgccgtccaggtggcggctgttgtcatgattacctcccacctgcccttttgtgtatgacactctcctggcccctcacatcagccctgcgccagccgagctggggcccagagagggagagcggctgccctgagactcagcagcaggag

SEQ ID NO: 47227 - DNA, 598 bp, Homo sapiens
catagtcatggaactactactgcaatcaggacgtataatagttcataatcccctaaatttccatgtgtgtattagagttaatgctccccacctcccttcatctggcaaccactgtcagttttctgttcttgcagtgtctccttttcaagacagacacagaaatagaatcatggcatatataccttttaagtttggctrgcatcacacatttgtaattcatccacattgctgtctacgttaatagttcatctcttttttattgctgagttttctgttgtatgaatatgctacagtctgttcactcaccaactgaatgacatttggatttttccaatgccttcctggtatctatttccctccattagtctatgggaagctttctagagaatcattgtgattctaaccaggtatatttggtattttttttgagggcaaaggtttttgggcagcgtcccccaagtcatcctgtataattgtgtactgagtggtcctttatggtgatgagatggtagtggtggtgtcgccgtgcccaagtctgattgacagctaaccattcagccatccttggttattctctcctctctctggtgaacaacat

SEQ ID NO: 47228 - DNA, 598 bp, Homo sapiens
catagtcatggaactactactgcaatcaggacgtataatagttcataatcccctaaatttccatgtgtgtattagagttaatgctccccacctcccttcatctggcaaccactgtcagttttctgttcttgcagtgtctccttttcaagacagacacagaaatagaatcatggcatatataccttttaagtttggctagcatcacacatttgtaattcatccacattgctgtctacgttaatagttcatctcttttttattgctgagttttctgttgtatgaatatgctacagtctgttcactcaccaactgaatgacatttggatttttccaatgccttcctggtatctatttccctccaytagtctatgggaagctttctagagaatcattgtgattctaaccaggtatatttggtattttttttgagggcaaaggtttttgggcagcgtcccccaagtcatcctgtataattgtgtactgagtggtcctttatggtgatgagatggtagtggtggtgtcgccgtgcccaagtctgattgacagctaaccattcagccatccttggttattctctcctctctctggtgaacaacat

SEQ ID NO: 47229 - DNA, 528 bp, Homo sapiens
tgtatctgtctgtctttattgtttttcaactgaattgaggtatgtttttgtgtttcttwaataaataccttgggtcatctgtcaggtggaagtttaatgttttaagaaacttgcagatttcttggttttccaacgtggtactatttgacatgcatatcagcagtttataagagttcaaattgttccatatggttatcaataccaactattgttagctttttaattttaaccattcttaaccattctcatgggagtgtagtagtatattgctgtggttttactttggattttcctaatgagacacatgcatttcatgcacttataacttacaacttcttttgaaaaatatctgctgagatctacctatttttttgaagcatttatcttcttatgattaagttgtaagagttctttatacattctagagggatataagcactttgtcagctctatgtgttattcataatatctcccaggttatgacttgtctcttcctaacagggtctttgaagatcatttaaaaatttt

SEQ ID NO: 47230 - DNA, 1196 bp, Homo sapiens
tataatggacattggagactcagaagggatgaacaagggaggggagtgaggggtaaaaaagaaaaaatcacctattgggtgcaatgaacactatctgggtgataggtacactacaagtccagacttcaccattatacaatttacccatgtaaccaaaagccatttgtacccctaaaactattgaaataaaaaaatctttaaaaccttctgagcatgtaaacagattacttatttttcttctcctccccactcaattatttatttttcgagactcaaaatgtcatatctagcctcatactattaacatacatcagccattttgaacactggttctacagtatataaatacacatcagccattttaacatttgtatatactcttcattaatagatgtcataatgtatggttacaaataagaaaatagtcatattatatgagaactgagttctagggaaattatctctggaattttttgttgtttgttgtctcctgtcagattattgttatcttattacacttatggacttatgtgccaaaatgtctcaaatataagtggaaatgatcatgtcagtcttgatttaaattattgaaactattaggattttgagagcaaaggaggcacaatgaatattgaaagttaaacagacaaaacaagtacagtagcctacctggtcttcttgcttttttttaattttattattattatactttaagttttagggtacatgtgcacaacgtgcaggtttgttacatatgtatacatgtgccatrttggtgtgctgcacccattaactcatcatttatcattaggtatatctcctaatgctatcccattcccttcccccgaccccacaacagtccccggtgtgtgatgttccccttcctgtatccatctgttcccattgttcaattcccacctatgagtgagaacatgtggtgtttggttttttgtccttgcgatagtttgctgagaatgatggtttccagcttcatccatgtccctacaaaggacacaaactcatccttttttatggctgcatagtattccatggtgtttatgtgccacattttcttaatccagtctatgcatcatttcctgtcagctattctccatctatcagggtttttaaaaatgtgaatcaagtcatactacttccttgctcaatcctccagcagattctcatgggcaatcaca

SEQ ID NO: 47231 - DNA, 1196 bp, Homo sapiens
tataatggacattggagactcagaagggatgaacaagggaggggagtgaggggtaaaaaagaaaaaatcacctattgggtgcaatgaacactatctgggtgataggtacactacaagtccagacttcaccattatacaatttacccatgtaaccaaaagccatttgtacccctaaaactattgaaataaaaaaatctttaaaaccttctgagcatgtaaacagattacttatttttcttctcctccccactcaattatttatttttcgagactcaaaatgtcatatctagcctcatactattaacatacatcagccattttgaacactggttctacagtatataaatacacatcagccattttaacatttgtatatactcttcattaatagatgtcataatgtatggttacaaataagaaaatagtcatattatatgagaactgagttctagggaaattatctctggaattttttgttgtttgttgtctcctgtcagattattgttatcttattacacttatggacttatgtgccaaaatgtctcaaatataagtggaaatgatcatgtcagtcttgatttaaattattgaaactattaggattttgagagcaaaggaggcacaatgaatattgaaagttaaacagacaaaacaagtacagtagcctacctggtcttcttgcttttttttaattttattattattatactttaagttttagggtacatgtgcacaacgtgcaggtttgttacatatgtatacatgtgccatgttggtgtgctgcacccattaactcatcatttatcattaggtatatctcctaatgctatcccattcccttcccccgaccccacaacagtccccggtgtgtgatgttccccttcctgtatccatctgttcccattgttcaattcccayctatgagtgagaacatgtggtgtttggttttttgtccttgcgatagtttgctgagaatgatggtttccagcttcatccatgtccctacaaaggacacaaactcatccttttttatggctgcatagtattccatggtgtttatgtgccacattttcttaatccagtctatgcatcatttcctgtcagctattctccatctatcagggtttttaaaaatgtgaatcaagtcatactacttccttgctcaatcctccagcagattctcatgggcaatcaca

SEQ ID NO: 47232 - DNA, 210 bp, Homo sapiens; identical to SEQ ID NO: 44409

SEQ ID NO: 47233 - DNA, 496 bp, Homo sapiens
ctgagctcaagtgatccgctgcctcagcctcccaaagtgctgggattacaggtgtgagtccccgcacccagccgcattttagacgtgagatgcagagaagtagaaggatctactttattgtcgttatcgagttttgcgcattctattttctggggcagatggtttcagggaatgtattatattattaatgatgagtttttgaaatgtacccaacaaaatccaaatgggaaccagttgggaatgctgagatatcattgagaggactgacaggaattaaacatcatcttgaagttcccttttggaaatcctgtaggtaaacaggcctgtctgaggactttctgtaaatatgccgacatgtcaggagaaacattatcagaagttctcttcttctcacctcagatttgacttgtctagaagaattagtaggttggagaatgacactcttttacctttggwttgagttaaatgacccatttcctgtgtatagctttttgtt

SEQ ID NO: 47234 - DNA, 1890 bp, Homo sapiens
gcataaattttgatgaacaaattcccaaatagtcttttttgagacagagtctcactctgtcccccagactagaaggctggagtgcaatggcacagtctgggctcactgcawcttctacctcctgggttaaagctattctcctgccacagcctcccaagtagttggaactacaggcacgtgccaccacgcctggctaatttttgtatttttagtagagatggggtttcactatgttggctaggctggtctcgaactcctgacctcgtgatccgcccacctcagcctcccaaagtgctaggattacaggcatgagccactgcgcccagcccaaatagtcttttctaaattgaaaccatcaacacacaaagtcaatatatctcttttgtctaaaaattcagtgtcatcacaagaaatatgaaactttggccaggtgcagcggctcatgcctgcaatcccagcactttgggaggccaaggcaggcagatcatatgaggccaggagtttgagaccagcctggtcaacatggtgaaaccctgtctctactaaaaatacaaaaattagccaggggttgtggcgcacacctgtaatcccagctactcagaaggctgaggcatgaggatcatctgaacccaggaggtggaggctgcagtgagccaagattgcaccactgcactccagcctgggaaacagagtgagactctgtctcaaaaataaataaataaataaataaataaataaataaataaataaatacaaccttttttgttcatgttattggaccatgtgcaaattccttgttctgtgccagaacttctgtcatttctgtgcttataccttgtgatagttcacaatgatgataacctgaagcaaaattatttctatcttgctcaatgcttgcttattctaatataaataaaatgttcaatgatgacctataaagtttgtttgtgaatttagtaatccaatgaaattcaccttttctcccttggtagctttgaatttttttttttttttttcttaccagacctcaccatcagttcaagttgtctgcagtttacaaaaagaggaacaaatacactcttaaaaaaggacagcacctcaataaataaataaataaataaataaataaatctccatttgatactgccttcctgagaccctcaagtcacatatatttctttactggttctgtgatttttgtacaattatttttttaaaaattatgcaaatgttatgaaagaaatctttcttcccaaaagaaaattaaacaaagctgtttcaatacttactttaaaaagacagatataaatatattctcctaataagtgttagagataggcaagcttaaagcaatattattatctggcctaacacgtctttacttttaacagattgcattcaattccagaagtttctaaacaaattagggttgactcaattgaacacaaaattaaaatagttcttatctgttaaagtaccaacatcaatcaatgtttaatatgctatcctgaataaatttgtattttattattttatttttatttacttatttattttgagacagagttttgttcttggtgcccaggctggagtgcaatggcgcagtctcagctcactgcaacccctgcctcctgggttcaagcgattctcctgcatcagcctcctgagtagctgggattagagaggcccgccaccacacctggctaatttttgtatttttagtagggacagggtttatgttagccaggctggtcttgaactcctgacctcaggtgatctgcctgtctcggcttcccaaagtgctgagattacaggtgtgagccattgcacccggccctgaataaatttttagaaacaactgatttatttacatgtttatgcattaatgag

SEQ ID NO: 47235 - DNA, 1890 bp, Homo sapiens
gcataaattttgatgaacaaattcccaaatagtcttttttgagacagagtctcactctgtcccccagactagaaggctggagtgcaatggcacagtctgggctcactgcatcttctacctcctgggttaaagctattctcctgccacagcctcccaagtagttggaactacaggcacgtgccaccacgcctggctaatttttgtatttttagtagagatggggtttcactatgttggctaggctggtctcgaactcctgacctcgtgatccgcccacctcagcctcccaaagtgctaggattacaggcatgagccactgcgcccagcccaaatagtcttttctaaattgaaaccatcaacacacaaagtcaatatatctcttttstctaaaaattcagtgtcatcacaagaaatatgaaactttggccaggtgcagcggctcatgcctgcaatcccagcactttgggaggccaaggcaggcagatcatatgaggccaggagtttgagaccagcctggtcaacatggtgaaaccctgtctctactaaaaatacaaaaattagccaggggttgtggcgcacacctgtaatcccagctactcagaaggctgaggcatgaggatcatctgaacccaggaggtggaggctgcagtgagccaagattgcaccactgcactccagcctgggaaacagagtgagactctgtctcaaaaataaataaataaataaataaataaataaataaataaataaatacaaccttttttgttcatgttattggaccatgtgcaaattccttgttctgtgccagaacttctgtcatttctgtgcttataccttgtgatagttcacaatgatgataacctgaagcaaaattatttctatcttgctcaatgcttgcttattctaatataaataaaatgttcaatgatgacctataaagtttgtttgtgaatttagtaatccaatgaaattcaccttttctcccttggtagctttgaatttttttttttttttttcttaccagacctcaccatcagttcaagttgtctgcagtttacaaaaagaggaacaaatacactcttaaaaaaggacagcacctcaataaataaataaataaataaataaataaatctccatttgatactgccttcctgagaccctcaagtcacatatatttctttactggttctgtgatttttgtacaattatttttttaaaaattatgcaaatgttatgaaagaaatctttcttcccaaaagaaaattaaacaaagctgtttcaatacttactttaaaaagacagatataaatatattctcctaataagtgttagagataggcaagcttaaagcaatattattatctggcctaacacgtctttacttttaacagattgcattcaattccagaagtttctaaacaaattagggttgactcaattgaacacaaaattaaaatagttcttatctgttaaagtaccaacatcaatcaatgtttaatatgctatcctgaataaatttgtattttattattttatttttatttacttatttattttgagacagagttttgttcttggtgcccaggctggagtgcaatggcgcagtctcagctcactgcaacccctgcctcctgggttcaagcgattctcctgcatcagcctcctgagtagctgggattagagaggcccgccaccacacctggctaatttttgtatttttagtagggacagggtttatgttagccaggctggtcttgaactcctgacctcaggtgatctgcctgtctcggcttcccaaagtgctgagattacaggtgtgagccattgcacccggccctgaataaatttttagaaacaactgatttatttacatgtttatgcattaatgag

SEQ ID NO: 47236 - DNA, 518 bp, Homo sapiens
agttattctgtacttgtccatgtaaaactggaggtgcctgtgggacttccaattgggctttccaattggaaaagcctataggtttatagctcatgagaattgtaacttgggggtcatcaacatattttattttttgagacggagtctcattctgtcacctaggctggagtgtagtggcacgatctcggctcactgcaacctccgactcccaggctcaaatgatcctcccacctcagcctcctgagtagctgggactataggtgtgcaccaccacggctggcacatttgttgtatttttttttgtagagatggggttttgccatgttgcccaggctggtcttgaacacctgagcttgagygatccacccaccttggcctcccaaagtgctgggattacaggtgtgaggcaccacgcccagttggaatcatcaacatataattgataactaaagcaacaagtaggaaatagggtcaggaaaggactagagatggggcactaacaaaactggcattttagg

SEQ ID NO: 47237 - DNA, 654 bp, Homo sapiens
gcattggtttacttctcctgcaaatttttgcctactaccagaaagactaaagaaagttttctttaacaatacaaacttcaaaaacaggtgagcattaaaaagtgggcaaaggagaagaacagacacttttccaaagacgacatagatgtggccaacaagcatttgaaaaaaaaagctcagtaacactgatcattaagagaaatgcaaatcaaaagcacaatgagataccatcttacagcagtcagaatggctattattaaaaagtcaaaaaaaaaaaacaaaccagatgctggcaaggctgtggagaaaagggaacacttatacactgttaatgggagtgtaaattagttcaaccattgtggaaagcggtatggtgattyctcagagctaaaagcagaactaccattggacccagcaatcctattactgggtatataccccaaggggtataaatcattctaccataaagacacatgcacacaaatgttcactgcagtactgttcacaataacaaggacatggaatcaacttaaatgcccatcaatgacagattaaagaaaatgtggtatatatacaccatggaatattatgcagccacaaaaaagaatgagatcatgtcttttgtgggaacatggatggagtcggaggctaact

SEQ ID NO: 47238 - DNA, 626 bp, Homo sapiens
ctagctgttacttgtaaccaaaaggaaaaaaaagatattagtaaccaataattagcaaacaatgcccatatatttcctttttttttttttttttttgagacaggggcttactcaggctggatgtgatcatggcttacaggagcagccttgacctcctggrctcaggtgatcctcccaccttagcttcatgaatagctgcaaccagaggcatgagccaccatgcccagctaattttcttattttctatagagacgggattttgccatattgcccaggctggtctcgaactcctggactcaggggatctacccgctttggcctcccaaagtgctgggattacaggtatgagccacacacctggccatattttccatattttatttatttttattctgaaacaaaatgtttatttaagaaaggccatccagcctggccaacatggtgaaaccccgtctctactaaaaatacaaaaattagccaggcatagtggtacacgcctatagttccagctacttgggaggctgaggtgggagaatttcttgagcccagaagacacaggttgcagtgagctgagatcgcaccactgcactccagcctggtagacagagaaagactctgttaaaaaa

SEQ ID NO: 47239 - DNA, 626 bp, Homo sapiens
ctagctgttacttgtaaccaaaaggaaaaaaaagatattagtaaccaataattagcaaacaatgcccatatatttcctttttttttttttttttttgagacaggggcttactcaggctggatgtgatcatggcttacaggagcagccttgacctcctgggctcaggtgatcctcccaccttagcytcatgaatagctgcaaccagaggcatgagccaccatgcccagctaattttcttattttctatagagacgggattttgccatattgcccaggctggtctcgaactcctggactcaggggatctacccgctttggcctcccaaagtgctgggattacaggtatgagccacacacctggccatattttccatattttatttatttttattctgaaacaaaatgtttatttaagaaaggccatccagcctggccaacatggtgaaaccccgtctctactaaaaatacaaaaattagccaggcatagtggtacacgcctatagttccagctacttgggaggctgaggtgggagaatttcttgagcccagaagacacaggttgcagtgagctgagatcgcaccactgcactccagcctggtagacagagaaagactctgttaaaaaa

SEQ ID NO: 47240 - DNA, 424 bp, Homo sapiens
gattctcctgcctcagcctcctgactagctgggattacaggcatgcaccaccacgcccagctaattttgtattttttagtagagacggggtttctccatgttgttcaggctggtcttgaactcctgacctcaggtgatccacctgccttggcctcccaaagtgctaggattacaggcatgagccaccgygcctggcctggattctgtttttattttgctatattttttcttgcttgcagagtgtggggcctgagatcagggaaggatcagcgagaaaggtgtggggaactgtgtttgaaggtggctattgctctgtggcaggcagtttgcatacaacttgctatttggccccattttccagaaaaggaaactgaggttcagagaagttaagttgtccaatgtttcgtttttttttttttttttt

SEQ ID NO: 47241 - DNA, 821 bp, Homo sapiens
gggagagtgacaggcaaaaaaaaaaaaaaaaaaaaaaacttgctttggctggggacagctcagttacaaatactcacttccctatatgccctttcactcagagtggccattaggaacagttctggccaatgagatgtcagcagaagttgctgagtgagacttctatgaaggctgttgaaagtggaaaaactcatctgggatgtgccttcttctctttgtccttctttatcgctagaatgagatgaaggggctagagtggagccttccatcttgagatcatgcatgtatctggtaacccttgccgtaataacgctgccaaacaaactaccccccaaacgcagcttcccatgaatctcctggttgcctgtgattcggctgctctaggccaggctgggttgttcagctttgcttcaggctgtggcagctggggaggtgctgctccaggcatctctcatcctccttctggggcatgttcttctcatgggcaatggaggaagcccaagagaacaagtggaaatgcagagtctcttaaggcctaagcytagaactggtacacagtcattttctgcctcatcttgttggtcaaagcatggcgaaacccaaagccaggaggtggagacatttatttgtctcctttagtgggaagaactgcaaagtcaaatgataacagatgggcagcagggaggggtcaagcactggggttggtaatgcaagggactacaagaagcacgaaagccaccctcaaaacacagcagaccaggaagccagcggagtttgatgacttccttaagctgctgtcgtctgtctatatcttgttaggg

SEQ ID NO: 47242 - DNA, 585 bp, Homo sapiens
tcaaattcctatttctagttcaggctgctccgtaagatttagactcatacaacaaccctccagcctttttcatttgctgactccaagtcaacagattcaagaccggggtcaccatattcctctgcaaacccaattctcctcctggtcacctctctcagtgagtgacctgccaccactcacccaatccagaatcctgtggattgtcccagagtcttccttctccctcatcctatcattaaatcttactagtctcatatcacagatctgtttcaatccaccccctctcctccttcatatccaattcaggcctccaccgtctcccgtccatccctgtgcctcatcctcctagctgcacactctgcctccagtgtctcccsatgaaatccattatctaacacctcagggaaccacaccagtgttggctgaatctgaaatcacagtctgcacaagaagccaatcatgaaatacctgctttgtctctcagatgcatgaatatgaaaatggatttctgaagctggcagggtgggggagctggcccaggggataagaatcaggctgccccaagagaagaggtggaggttcccc

SEQ ID NO: 47243 - DNA, 523 bp, Homo sapiens
taaaagtgatcattaagcctgcaagggtagcagcaccgtctaacagcccaatgcatctctagtgcctatgctactgcttttgttgagtgaacgaaagaatatttttaattatgggaattagacatcattttggtttgactttaaataaaatgggattcaaatgtgtttgctatttcctaaaagtaaatgatcctgacaactataatgagtagtatttaaaaaggtcatcatttttataccctacctctctactcaccccagcaatcaaatagtaccctaatatctacttcctgtcacgtgttaagtttatctagaataaagggccatggatttagtgagaatctaagaaacagcaggagcacgcrggtcctgcttcactaaagaaaattcatctccaggtaggcgcagtggctcacacctgtaatcccagcactttgggaggccaaagcaggcagatcacttgaggtcaggagtttgacaccagcttggccaacatgatgaaaccctgcctctactgaaaata

SEQ ID NO: 47244 - DNA, 545 bp, Homo sapiens
tgctgtaccactcctatgttcatgcattttattttcatagataaagayggccttaaagagtatagataacaatttaaaatgtggagaattaaaatttacccaatagctttttgctgtatataaatctttaatattttaaaaattattctaaataaacttgtagagaacatctgtatacttatgttaatgtacagtggtcaaaattggaatctataataacgtgccattttctataattcttttaagtgttttaattagtttatacataatacattctatgtacacaattctccttttaagtttgttaatgtttataatacctgattttaaatgtgacatttaaagcctttgagtatttgtgttctctcctaaattggcaacatcttccggaattgttttgtttatgagagcacagcatatgtttaattttctcccagtatgttatgtaaaccagaagcaaacgtctatgagtaccgctatttaattattgtaatatttatactaactttttgcttttgaatgcactggatgacttaaaatatttt

SEQ ID NO: 47245 - DNA, 564 bp, Homo sapiens
gcaagaattacccagtcctggaccatggcactgactacaaatgtcacaccattgtcattgtgttgacaggttttttccccaaaggcatatttacccttcactttcgcaggcctctgtcaaggccctgggaggcacccagcaatgtgttgacrtatttttatgaaatttctgaattgtaaaatataaaatatttttaatgcaatgaagaaagactgctgtcatctttccactgcaactctgcaatgtcatagtgccctcttgatagattatgttggagtggccacaggcattttgagggatatgtccaaggtagtggttctcaatggggggatatttccccccaggagacatgtggcaatgtctggagacctttttctttgtcaccaccaagggcatgttattgacatctagggattagagaccagggatattgttaaacaccttacagtgcagaaaacaggctcccactacaaagaattacccagttcaaaatgtcaatagtgtcacacttgagaccctgcactcaggggaggttgaacaggggaggatatatttagtttggat

SEQ ID NO: 47246 - DNA, 598 bp, Homo sapiens
tgactgcatggctcgctcccttawtcagggtttctgctcaaatgctattgctgcagaaaggcttttcctactctctgtgtcgaaagggcttctccatcactgcctccctaccctgctgattattcttcataacctttacaccatctgactttaaaaataaaaaatcaatttatccacttgtttacttcaccccactggaatgtaaactctaagcaggcagaaactttttcactttcgtttactgctatattctcagtgcttagaatagtgcttgacttcgagtcgttcctaagtaaatactattgatttagtaagtaaatggatggttagcttgggctactttgcccatgctgatttgcgtgattgattagcttcatattttcttcaagaaatcaaagaatagcatggctgcttctttcttatttatattctaggaggtatttaactgaaaggaatatctgcttcactgttgcaaccaaaccagatgccttcttccacttcaccagaccaaggagatgacctggagaactgcattttaagattttctgacctggatttaaaagatatgagtcttattaatcccagcagcagtcttaaa

SEQ ID NO: 47247 - DNA, 598 bp, Homo sapiens
tgactgcatggctcgctcccttaatcagggtttctgctcaaatgctattgctgcagaaaggcttttcctactctctgtgtcgraagggcttctccatcactgcctccctaccctgctgattattcttcataacctttacaccatctgactttaaaaataaaaaatcaatttatccacttgtttacttcaccccactggaatgtaaactctaagcaggcagaaactttttcactttcgtttactgctatattctcagtgcttagaatagtgcttgacttcgagtcgttcctaagtaaatactattgatttagtaagtaaatggatggttagcttgggctactttgcccatgctgatttgcgtgattgattagcttcatattttcttcaagaaatcaaagaatagcatggctgcttctttcttatttatattctaggaggtatttaactgaaaggaatatctgcttcactgttgcaaccaaaccagatgccttcttccacttcaccagaccaaggagatgacctggagaactgcattttaagattttctgacctggatttaaaagatatgagtcttattaatcccagcagcagtcttaaa

SEQ ID NO: 47248 - DNA, 598 bp, Homo sapiens
tgactgcatggctcgctcccttaatcagggtttctgctcaaatgctattgctgcagaaaggcttttcctactctctgtgtcgaaagggcttctccatcactgcctccctaccctgctgattattcttcataacctttwcaccatctgactttaaaaataaaaaatcaatttatccacttgtttacttcaccccactggaatgtaaactctaagcaggcagaaactttttcactttcgtttactgctatattctcagtgcttagaatagtgcttgacttcgagtcgttcctaagtaaatactattgatttagtaagtaaatggatggttagcttgggctactttgcccatgctgatttgcgtgattgattagcttcatattttcttcaagaaatcaaagaatagcatggctgcttctttcttatttatattctaggaggtatttaactgaaaggaatatctgcttcactgttgcaaccaaaccagatgccttcttccacttcaccagaccaaggagatgacctggagaactgcattttaagattttctgacctggatttaaaagatatgagtcttattaatcccagcagcagtcttaaa

SEQ ID NO: 47249 - DNA, 592 bp, Homo sapiens
gtagcacccagctccaaggctgtctgatgtcagagtcttggcagtttcctttccactagagataacagaaggcagcttttgactggggcttgaaaaatttcaacaggtggaaaaaaggaatgtaaagtggacaacaagagaaggcttgtcactccaaggaaaggatggtgtgtcacgagataacccaacactgcctcatccgtatcatccatgttgccattaaacagatcacacactacaagacaggccctgtacttgtccttaagagatatgggtgcataggacaaaaacccctaaccttgcacatatgagtcgaaatatatctgaggaatcatgcagaatatggagtayattcaatgcctaatgtggcattgatgtgttatgaatcatggttattttatctaaaagagaatgactgagaatatgaagaggtatgagaaggcactggcctggaatttggaggatctcaggctggccttgattactacatcctgactttgtgactctgggcaagtcacatccattctctggcctgagtttcttcatggggggagtgaaggtttaatttacatgattttgaacatcttccttc

SEQ ID NO: 47250 - DNA, 324 bp, Homo sapiens
acaactggtgaatctgggtgaaggtacatggaagctcattattctattcttgcaacttttctgagaacttgacgtttttctaagaaatgattttaaacatttttaaatgttttaaaatttattgtgtaatgtgttttggtaaaatccaaatactaacacttttttttttctagaaacaggttcttcctctgtcaccaaggctggaatgcagtggcatgatcatagctcactgtcacctcaaactcctgggctcaagtgatcctcctgcctcaccctcccargtagctaggactataggtgtttgccaccacgcctggctaattt

SEQ ID NO: 47251 - DNA, 595 bp, Homo sapiens
gtacatacatgccaattttgccaataaattatgtacagtrtagttatacatatgaaaaacaaatctgctcttcctcccagtttcttcttgattgcacttgcattccttgtcttcctctcttcacctgactatgctgttaccttaggccttttctatcctttccctctctgttttatggctctgctcacttcgttgtggcttagtggaactgaaggaggccttggggctggtggagctgggtatgccagccctgagggctgtgtcttcagccagatcatttaatctctgctcctcagtttactcatccataggaaaagctaacatttttcaggtgcttactcaggccaggcatgttacatatattagttcatttaatcctcacagtaacactacgaggttggtaacgttagccccacatgcacacactgaggtacagaaaaattaaatcacctccccaggatacacaatgacagtagctcctctactttttccagtcttgtggcttcagagtctgtccttttagcactatgctatgctgtttctttggggaagacaaaaaagcctcaaactgaattccacatacctgtgtaacagt

SEQ ID NO: 47252 - DNA, 553 bp, Homo sapiens
agtccaattcagcacaaccatggttagtggaaagcaccctgcccacagatctgcacccaaagagctggtaggaatgcaaaaactcatctgtgcttctattcaaaagtttccaaattctaattccacttgaagagactgcagaagacccagggctctcatttgtttaaaaatctaaagctcacaacattaacttgaagaaggtactcaagagctggaacaattccagtgggagcactaagtcaactgttcagatcattgcaattaggagagaagattaaaktggttgctaagagcacagagtttcctcatggagatgtggccaacatcagtgtcttcagcataggttaccctgataccacagcagactgagagtattgaaaggggcaagggttattccagtgtcagctgtaaaattctgtttcctccctaggactcagtaagttatcacagtgcaggaaaaattattcatagggccaatgaaatccaagacatctcatgaattctggtcacaatggagacttcgtttaaaaacaaaacaaaatgaaacaacacc

SEQ ID NO: 47253 - DNA, 612 bp, Homo sapiens
gagctgacaacactcatcatcacatactccccaagtggtgtgactatagcacctacgcccctcccttaccatgaacccgtaagaaagctgggtgcagggatggtgaaggatttgccagaagagacagctagtaaggaggagaagtgggattcagtcctgggtccatctgaccctgaatttattccctgctgtgaagcttcctctgataaacgagcagaggccacacgcaacagtgacgggaggagggtgaatgaagttggccttggttccatatgatcccttgaagccyggcgttcacaacgtttgtgcaaagcagtgccgttaatataagtccttccacattttactgcctgttgtagagtctgcttgtcattctgacaaaggcaaaactttctggcaagcagaagccccaaggtgctacaccagggctgtcctgtggggatggggcttagaacaaaggcaggactggagaacacaggcagacggaagaattaggaagccccgaacagttcagacaaagactcaatgcacggtgggctgggcagaaatgcgagatgctcacagatgctgaggaagggggtctcgggccagagaaaccagccaatgttgggg

SEQ ID NO: 47254 - DNA, 558 bp, Homo sapiens
gttaaaggagagattgctcgtaaagatgaaaagctgctgtcgtttctaaaagatgtgtatgttgattccaaagatcctgtgtcttccttgcaggtaaatgtgtgtttaattaagtgaatacacaatttacttattttggggcttcaggaaaatgattaagtgtggcaagtagtaaaaagagtgctctgcaagtgtgtgttgtgatcaatctacacgccttggcaaagtttaagcacactggtgtaagacagcaagacacttatgccttggttcactggatatttaccagaattctaaaataacttgtggaagtattgatacaagcaactgtgtgaattatttcatagtatttcagaatttgtaggatttggtaaggcattacttccagtggttgtcatttgagtgacaaaagcagagctttaatattattttctcattcttctgtggattgaggtatgttctaatctcagagactcctttagtaagtrgtgttgttggattttgtggggtgttcctgtttgtttttttaaggatgtattcagataggatatttaaaat

SEQ ID NO: 47255 - DNA, 574 bp, Homo sapiens
gaagaaattgatggttatttcactagtgtttatttttgatacaaaggaccaagtaaatctgtgaagattaaggtctattttcttataaagaaaagaatatcaactattcagactgatgcaaagttactttcttagcataaattctaggkttatagttaataccttgcctggaatacttgggccaaagtccagccatctttgtcgggcttcttattctgtaaaactagttttctgctccatgtcattccaccatattttgctggtcattgtgagaatgaaattaaagtaagcatgaaaagcattttacacagcacgtaatacttactaaatgttcaataaataattagaatttaaatttttgtgcagctcacttttataaataaaatcctaacattttttactagtaattaagcaaacgtcttcacatatcaggcctctgttaatatctcagcttttactctcatggcgtgaagtaacttaagtacttacattgttataccatcattttgctatttttggaatcacctttctgaactgtatattgataattgcaataaaaaactagacaacacag

SEQ ID NO: 47256 - DNA, 574 bp, Homo sapiens
gaagaaattgatggttatttcactagtgtttatttttgatacaaaggaccaagtaaatctgtgaagattaaggtctattttcttataaagaaaagaatatcaactattcagactgatgcaaagttactttcttagcataaattctaggtttatagttaataccttgcctggaatacttgggccaaagtccagccatctttgtcgggcttcttattctgtaaarctagttttctgctccatgtcattccaccatattttgctggtcattgtgagaatgaaattaaagtaagcatgaaaagcattttacacagcacgtaatacttactaaatgttcaataaataattagaatttaaatttttgtgcagctcacttttataaataaaatcctaacattttttactagtaattaagcaaacgtcttcacatatcaggcctctgttaatatctcagcttttactctcatggcgtgaagtaacttaagtacttacattgttataccatcattttgctatttttggaatcacctttctgaactgtatattgataattgcaataaaaaactagacaacacag

SEQ ID NO: 47257 - DNA, 574 bp, Homo sapiens
gaagaaattgatggttatttcactagtgtttatttttgatacaaaggaccaagtaaatctgtgaagattaaggtctattttcttataaagaaaagaatatcaactattcagactgatgcaaagttactttcttagcataaattctaggtttatagttaataccttgcctggaatacttgggccaaagtccagccatctttgtcgggcttcttattctgtaaaactagttttctgctccatgtcattccaccatattttgctggtcattgtgagaatgaaattaaagtaagcatgaaaagcattttacacarcacgtaatacttactaaatgttcaataaataattagaatttaaatttttgtgcagctcacttttataaataaaatcctaacattttttactagtaattaagcaaacgtcttcacatatcaggcctctgttaatatctcagcttttactctcatggcgtgaagtaacttaagtacttacattgttataccatcattttgctatttttggaatcacctttctgaactgtatattgataattgcaataaaaaactagacaacacag

SEQ ID NO: 47258 - DNA, 574 bp, Homo sapiens
gaagaaattgatggttatttcactagtgtttatttttgatacaaaggaccaagtaaatctgtgaagattaaggtctattttcttataaagaaaagaatatcaactattcagactgatgcaaagttactttcttagcataaattctaggtttatagttaataccttgcctggaatacttgggccaaagtccagccatctttgtcgggcttcttattctgtaaaactagttttctgctccatgtcattccaccatattttgctggtcattgtgagaatgaaattaaagtaagcatgaaaagcattttacacagcacgtaatacttactaaatgttcaataaataattagaatttaaatttttgtgcagctcacttttataaataaaatcctaacattttttactagtaattaagcaaacgtcttcacatatcaggcctctgttaatatctcagcttttactctcatggcrtgaagtaacttaagtacttacattgttataccatcattttgctatttttggaatcacctttctgaactgtatattgataattgcaataaaaaactagacaacacag

SEQ ID NO: 47259 - DNA, 574 bp, Homo sapiens
gaagaaattgatggttatttcactagtgtttatttttgatacaaaggaccaagtaaatctgtgaagattaaggtctattttcttataaagaaaagaatatcaactattcagactgatgcaaagttactttcttagcataaattctaggtttatagttaataccttgcctggaatacttgggccaaagtccagccatctttgtcgggcttcttattctgtaaaactagttttctgctccatgtcattccaccatattttgctggtcattgtgagaatgaaattaaagtaagcatgaaaagcattttacacagcacgtaatacttactaaatgttcaataaataattagaatttaaatttttgtgcagctcacttttataaataaaatcctaacattttttactagtaattaagcaaacgtcttcacatatcaggcctctgttaatatctcagcttttactctcatggcgtgaagtaacttaagtacttacattgttataccatcattttgctatttttggaatcacctttctgaactgtatatkgataattgcaataaaaaactagacaacacag

SEQ ID NO: 47260 - DNA, 571 bp, Homo sapiens
tgcctgtaatcccagcactttgggaggccaaggcaagtggatcacgaggtcaggagtttgatactagcctggccagcatggtgaaacccgtttctactaaaaatacaaagaattagctgggcatggtggcatgcacctgtaatcctagctactcaggaggctgaggcaggagaattgcttgaaccagggagacggaggttgcagtgagctgagattgcaccactacactccagctgggtgatggagtgagactccatctcaaaaaaataaataaataaaaataaataaataaatataaaggaatgaaatactgttttctgtccacaaagtttgtgagggtgaagaacagtggtacttatatacttgctgaaagtttaagttgctgcgacttttcaaatagacactttgatggtaagaaccayatttttaaaatgtgtatgccttttacccatctattccattatactgaaatatctatatgaaacagacacagctgtttttcttagtattgcttaaaatagccatgtattgagaagaactcatataaagatgttataaacaaatttcagtg

SEQ ID NO: 47261 - DNA, 571 bp, Homo sapiens
tgcctgtaatcccagcactttgggaggccaaggcaagtggatcacgaggtcaggagtttgatactagcctggccagcatggtgaaacccgtttctactaaaaatacaaagaattagctgggcatggtggcatgcacctgtaatcctagctactcaggaggctgaggcaggagaattgcttgaaccagggagacggaggttgcagtgagctgagattgcaccactacactccagctgggtgatggagtgagactccatctcaaaaaaataaataaataaaaataaataaataaatataaaggaatgaaatactgttttctgtccacaaagtttgtgagggtgaagaacagtggtacttatatacttgctgaaagtttaagttgctgcgacttttcaaatagacactttgatggtaagaaccatatttttaaaatgtgtatgccttttacccatctattccattatactgaaatatctatatgaaacagacacagctgtttttcttagtattgcttaaaatagccatgtattgagaagaactcatataaagatkttataaacaaatttcagtg

SEQ ID NO: 47262 - DNA, 571 bp, Homo sapiens
tgcctgtaatcccagcactttgggaggccaaggcaagtggatcacgaggtcaggagtttgatactagcctggccagcatggtgaaacccgtttctactaaaaatacaaagaattagctgggcatggtggcatgcacctgtaatcctagctactcaggaggctgaggcaggagaattgcttgaaccagggagacggaggttgcagtgagctgagattgcaccactacactccagctgggtgatggagtgagactccatctcaaaaaaataaataaataaaaataaataaataaatataaaggaatgaaatactgttttctgtccacaaagtttgtgagggtgaagaacagtggtacttatatacttgctgaaagtttaagttgctgcgacttttcaaatagacactttgatggtaagaaccatatttttaaaatgtgtatgccttttacccatctattccattatactgaaatatctatatgaaacagacacagctgtttttcttagtattgcttaaaatagccatgtattgagaagaactcatataaagatgttatraacaaatttcagtg

SEQ ID NO: 47263 - DNA, 1641 bp, Homo sapiens
tgttgtagtccagtatagcacactgacaaaatgatgggactatatttgatggtactttaaaaccttttgatcttaaatttattcatattgtaaaatttcatttttcttaaaataaaatattaacatactttaaaagaggtattcacaagatacaaaagcatatcaaacaaaataagtgaaatcattaaaaggtacttgggaaaccttcaactctgatatggtgacattaaatagagagcaaaactttatcagatttggactgtggatttttaaaattctaattatgaacaacccagttttgaaagttctcagatgttggccaggcgcagtggctgatgcctgtaatcccagcactttgggaggccaaggtgggtagatcatgaggtcaggagttcaagcctggccaagatggtgaaaccccatttctactaaaaatacaaaaaattagccaggtgcggtggcaggcgcctgtaatcccagctactcgggaggctgaggcaggagaattacytgaacctgggaggcggaggttgcagtgagctgatatcacgccattgtactccagcctgggagacaagagtgtgacttcatctcaaaaaaaaaaaaaatggtttagcacttattacttagtcattgcttccatatttgtgtacattgctattggtcccataaattgatacatttcttgcagtctttttggaacgctatttggcaggagctatacaaacatttcattttttttgtacaaataattcaatttctatgactttaaaaatgttatgaatataactcaaaaggaaaaagctgcacacataggtacttatcgctcttgattacaataggagaatattagaagaactttactaggaggagaatgggttaatattcaataatgagaatggtattttaacttggtgagctgataaacattcattaaaacctatatagggccgggcgcagtggttctcgcctgtaatcccagcactttgagaggctgaggtgggtggatcataagatcagaagttcaacatcagcctggccaagatggtgaaacctgtctctactaaaaatacaaaaaaaaaaaattagctgggtgtggtggtggacccctgtaatcccagctacttgggaggctgaggcagagaattgcttaaacctgggaggcggaggatgcagtgacccgagatcacatcaatgcactccagcctgggccacagaacgaagccacgtctcaaagaaaaaaaaaccaaaaaaaaacctatatagatctgcggggcatggtggctcatgcctgtaatcccagcactttgggaggccgaggcgggctaatcacgaggtcaggagatcaagactatcctggctaacatggtgaaaccccgtctctactaaaaatacaaaaaagtagctgggcgcggtggcgggctcctgtagtcccagctactcgggaggctgaggcaggagaatggcatgaacccgggaggcggaagttgcagtgagccgagatcgcgccactgcactctatcctgggtgacagagcgagagtctgtctcaaaaaacaatagcaacaacaacaacaacaaaaacctatatagatcacatagcaatatggaaaaacatgatacgtcaagtgagtatactgtg

SEQ ID NO: 47264 - DNA, 324 bp, Homo sapiens
tacacaggcatacgagttaaactaccygggttcacccctctaatagtatgacgggctaggttcttaaattctctgcacctgtttcctcatctgtagaatggagataattgtacctacctcataaagaaattgtgaaaactaaatgtgatgatgtctataaaacttaagaacaatgcttgcctttgagtaaaactccacaaatgctagatagtattttatcacttataataactaatgatttcaaactgctaacatttgaaactttgatgatcaaggatcaagaatttgtgaatactaatgatagtatttattttagcaatttaa

SEQ ID NO: 47265 - DNA, 572 bp, Homo sapiens
aataaggtcttttaacctagagcagatacatgattcccatcatgcaacttggtaactgcaccccttgcagctgacagggattgtttttgtggtactataacacatctactcccattctctggctggcctgagccaaatttactttagtcccatatgagccaatgtttactcctgtgagttacatcatagttgttaccaccgtgtgtggtctcactcattctcttctgcgaaactccaagacacaaataatttgaagatcggttctaattcaccttcctctattatcraagagtatttgtaactattgtccaccttaatttttcccatttattcatgtattcaatcacatataatgcacttaccatgttctaggcactgtacagttccctggagatacagcagttagttaaccagtcaaaaataattgctccgaaggaaattacatcatataagggaagacggaaggtaactttattagtaggcgaaatggtagtttgtgctgtggtgaagtataattagaaagggcgaatgaggagtttcaggtttggggagatgtaattgtaaattgggtg

SEQ ID NO: 47266 - DNA, 572 bp, Homo sapiens
aataaggtcttttaacctagagcagatacatgattcccatcatgcaacttggtaactgcaccccttgcagctgacagggattgtttttgtggtactataacacatctactcccattctctggctggcctgagccaaatttactttagtcccatatgagccaatgtttactcctgtgagttacatcatagttgttaccaccgtgtgtggtctcactcattctcttctgcgaaactccaagacacaaataatttgaagatcggttctaattcaccttcctctattatcgaagagtatttgtaactattgtccaccttaatttttcccatttattcatgtattcaatcacatayaatgcacttaccatgttctaggcactgtacagttccctggagatacagcagttagttaaccagtcaaaaataattgctccgaaggaaattacatcatataagggaagacggaaggtaactttattagtaggcgaaatggtagtttgtgctgtggtgaagtataattagaaagggcgaatgaggagtttcaggtttggggagatgtaattgtaaattgggtg

SEQ ID NO: 47267 - DNA, 572 bp, Homo sapiens
aataaggtcttttaacctagagcagatacatgattcccatcatgcaacttggtaactgcaccccttgcagctgacagggattgtttttgtggtactataacacatctactcccattctctggctggcctgagccaaatttactttagtcccatatgagccaatgtttactcctgtgagttacatcatagttgttaccaccgtgtgtggtctcactcattctcttctgcgaaactccaagacacaaataatttgaagatcggttctaattcaccttcctctattatcgaagagtatttgtaactattgtccaccttaatttttcccatttattcatgtattcaatcacatataatgcacttaccatgttctaggcactgtacagttccctggagatacagcagttagttaaccagtcaaaaataattgctccraaggaaattacatcatataagggaagacggaaggtaactttattagtaggcgaaatggtagtttgtgctgtggtgaagtataattagaaagggcgaatgaggagtttcaggtttggggagatgtaattgtaaattgggtg

SEQ ID NO: 47268 - DNA, 538 bp, Homo sapiens
aaatcttttgcccatttttgaggcaattggcctgtttttttctttttgattattttctgtgtatcatggatatgtgtcttttaaaagttttgtgactattttctcacatggagctgtttgctgttgctgccttattttgagctcttttgataaaacctattcatgtaaattaattaactacatttaaaacatttcatttttatttttatttttatttttttgagacggagtctcgctctgtcgcccaggctsgagtgcagtggcgggatctcggctcactgcaagctccgcctcccgggttcacgccattctcctgcctcagcctcccgtgtagctgggactacaggcgcccgccactacgcccggctaattttttgtatttttagtagagacggggtttcaccgttttagccgggatggtctcgatctcctgacctcgtgatccgcccgcctcggcctcccaaagtgctgggattacaggcgtgagccaccgcgttcatttttatttaaaaatagcatattttataatagaagtcat

SEQ ID NO: 47269 - DNA, 597 bp, Homo sapiens
aaaattgaaggtctggtagctgtctcatatgaatccaagtagttctgttcagtgctggaaatagcttacgatgtcatggttccaggttctctcttgttactctgtcatgttcagcaaaccatccttgcagctgtttttgctttcatcatcccattctcattgcaggcaaatggaagaagaaagaggagagtggtggtgtgtgctttccctttaatggcagaacccaacagtcgtacacaccacttctaccctcttaagatgggtcagaatccaggcccaattccatgtatacatggaagagaggcttattaaagtagccttcagttgctggacagagttccatccaaaactacagttaataggtaagtcgagaacttacattaagtgataaatggcagtctctgccaaggaaaatattcttatccatgctcatggataagaagaatcaatatcatgaaaatggccatactgccaaaagtaatttatagattcaatgctattyccatcaagctaccattgactttcttcacagaattagaaaaaactactttaaatttcatatggaaccaaaaaagagcctgcatagccaagacaatc

SEQ ID NO: 47270 - DNA, 589 bp, Homo sapiens
tgaaggaggaagcaatctcaatattttcctcttgttctcagaatagtgcacactttcccacctctgttttgaagagaagatggaagatgtggatattaaatccaacattgcacacaaatactatggcaaggcagttagtcaataaggattgaaaaaaatacataggagtgtaaattttatcatttcctttgaccattatttaaattattcaaaaattagctgacagtatttttattagatgtaaattttttcttttaagagttggaaaatttcagaccacaggagaagcacatacaggcagattgaaataattaacacatagtttagacaacctttgcatgcttgcrtagcccagaatatgttagaatgatgctttccgttgagaatagtggataagagatgattgccatctgggaggagatgaagacggggagatggagagacagatagatgaacaattaatttgacaactatagatatgtcaggttgtatgggaaggcagagcaattaatttaatcccgactgaatagctgggaaggaaaaagaggaaacattgtggagaaaagcacaaaagtctgaatgcttgtgc

SEQ ID NO: 47271 - DNA, 629 bp, Homo sapiens
tctgagactgatacgttagagaactactgtaatgatcagtcccgaacaacagaacaatccaagatttttcctggattagctaagaaataaacaaaagcacattcctctgactcagagataatattacttataaaaatagctaacacaaaataaaattgaaataaaactgaaaggagctaaaatgacacctgattaacatattaatatatattaatctatatttaaagtgactttgaggcctaggttctggtccttgtctcactggtatcttctccatttggcattaatgtcttgtattctggccccagtacctggaatagttcgtgctstctgctttaccacttctgcctcagggtctttgcctctgctgttcttcctacctaaaatgctcttctattcccttatggctgaattaattctacctcagtatgcagacactttcattagaaagtctttgatgactcccaagacattccctgtttgtcattctcatagcttctgtgtttctccttcatagcacttaccacagttgtaatgacagaattatttgtcatctttctccaccagcaggtaggtggtgaatcaccagcacttatactgtaattggacaatgcacggagtaaggagtc

SEQ ID NO: 47272 - DNA, 1209 bp, Homo sapiens
ctgattgtcatcccttcgtgtcatcttgccctctggtcttcctcctgccaactcaggaaggtctaaactcaggggacagaggactgctccctctgagctgctccccccgagctgcttcctctgagctgctccctccgagctgctccctctggccccctctctgacggactttttctattytaggaactgtaccgcactcattcgtagggaagcttttttttttttttttttttttccttttggagaagttaagcttctttagagattaaagttggtttcctctagcttccttacaaactcacagtgttaaaactgggtcatagagacatagttgttccattttctaaccagacaatagcttcaggcagtgccagagttcccctcctctctgccccctttctggagccccaggaagccgctgagcaagtccctcctgctgggagtggacagacctcctttgcacctgccctcctccctgggccaagggcacttgcccttgtcaccagcttaagctgtcgccttttcctttgtctctaatttatgctactggcctccaggggggtcccctctgctcccgcttccctctccttccctcctccccctaggatgcattctaaacaagggcaaggacattttttggggtcatggggctaggggtggaatttttgtctgtcctcaagggcttaatgcgttgagactgtcatagatggtatcatcattcaaaaatattttccggcccttcctgaaggagaggatagttccctaccccctgccccccactgacatcagatttgacattgtgacttgctcttgccaagaaatgcaagcagaagtgatgtgacacatgtcacttccaggaaaaagctttaagagctagtgtgtggtttgctgtgtgtcttttctctcttccacaagatggacaatggtccagaaaggggctgcttcatcagcctggatcccaaagaagataacatgaagcagggatatagttgacccatgacagatgggcagcttgagcaagaaataaacctctctgactgtaagtcattgcaggttgggcatgttgttattgtagcataatctaatctgtcctgactattttagaacatacatagaaatgatctcacactctttttctatgaagctatggtgagttgggcttgggttggacatgcaaggagactgctgcatcatgagaatatagtgtgg

SEQ ID NO: 47273 - DNA, 527 bp, Homo sapiens; identical to SEQ ID NO: 21618

SEQ ID NO: 47274 - DNA, 618 bp, Homo sapiens
acgttggcatgagatgtggggaatcataagctccaaaacaatcgtgagacagaaggaaagatggccttttgttgagcagccattctcctccacggagagtcctgtctagtctgcctgttgaaggggcactgatgttagggaatagatctgtgtcaaatgcttcccacctcccagaatcctgtgaggcaggagtattatccccatttaaagagaggacactcaggctcagggaagtgactggcccaatgtcccayagctcataggtgccagaggtgggtcatccacaccaaagtcattctccttccataccctgaatgtcaccttcacgctggacccaggatcctgtgtggtgaactgtctcgatcacttccctaaaggttaaatcataaactcttactgccaaggcatatccacgaccttaaactctccctgttgggcaaaaacaatctctgatgttaaaaggcaggatagtggatacttttcagggaagggtaaatgacaagggcatgaggggaactctgggtgccggtcatattctgttttacaggtttgttcaatttgagacacttcatagagctgtagccttgtgcacaggcacttttttgcatgcatcgtctg

SEQ ID NO: 47275 - DNA, 739 bp, Homo sapiens
accccacaaggagccctcgctgctgttccccattcaacgccccttttcagcaggaagcagccagaaagagtcatcagccaaaacctcctaacagcagttagggtgacatctccacaggggggaatgttataggagttattaagaaattattttaggcagatagagaggaaaaggggtccttgggaagtttttgtttctttcttttaaagcagctgcataaatgtttcttgtctagcaggaaagcacaggctcttagagccaggccggcaacctttgatatgcaattgcaggccattagaaactgggtccacccaaacatggcgattcctgccctcttcttcttagtgcctcaatcactcattttggtcgttaccagaaaggaactcatatttagctggaatctatgccaggtaatgttacagagggtartagtcagacatgaacagggcaggagaaggcccccacaccccaccaggaatgtcaggtgatggtccagcagttgtcccactgcctctctaaaataataactggtctgagccagcaccagggaaagacagtttcccaacagattaaaaaaacacctgaaactggtgattggcagcttcccgataagatctcaggaattgggtgagtgggctcaatcatgtgcattaagaggcaaaatagcagagtttaactggcatatgaccttccaggtacattccaccagaaaagggaagaacacctacctcaggtgagc

SEQ ID NO: 47276 - DNA, 1840 bp, Homo sapiens
tatcgcttcctcatccatcagtgaagtcagtaagtcctaagtggaaccatcagagggcagggaccatctatctgtatttgacttgcttatttgttcaaggttctgagtcaataggacaagcaactactaagccactagagggcgcaacttgcctactctttctagagtaaggcagcaggtgtttcgggaccggtggggccacctggacctcagtggagggtggtgtgggtgcagcccttcccagggctgatgacgcatctggctgacgaggctgactgtcagcctctggcctctctcccagaggtgtgccctcagatcaaagaggacacctcctccccttaagaggatttatttcctcgaaggcacagcttctatgatctgtgtttttctttcttcctttcccattcacatttaattccttgtagccgccaagtttctgagaacaaagctgtttagaaagcaatgaagaacacaacatcactgatgtagtattcctggccaaaatattgatgtgactctcmtcatgagaacagaccaattcactttgagagaaatactacaaaataatggtctacagtcttcaaaaaagtcattgccaactaccttacattaaaatatatgaaagagatgtgacaattaaatgcaatccatgggccaggtgcggtgactcacgcctgtaatcccagcactttgggagaccaaggcgggcggatcatgaggtcaggagattgagactatcctcgctaacacggtgaaaccccgtctctactaaaaatacaagaaattagccaggcatggtggcaggcgcctgtagtcccagctacttgggagactgaggcaggagaatggcatgaacccgggaggtggagcttgcagtgagccgagatcacgccactgcactccagcctaggtgacagagcgagactccatctcaaaaaaaaaaaaaaaaacgcaatccatgatcctactttggaccctggattaaagcaaacaaaaactgtaaaagaacattactgggacaatttggacacatttgaatatgggctgtattttagataatagtgttgtataatgataaatgcctggcatgtggtcataactgtagtaatgtaggggaatgcccttgctaccatatataatactaaagtgtttaagatgaaggtttatgatatcagcaacttggagagaaaaagggacagagagggaaaaagcaaacacagcaaaatgttaacaattagtgaacttaggtgatgggcatagggtatttatcgaactattcttgtaacttctctgtaacaggaaagaaatacatacatacacttcatctttgaaagtgagagagagaaggaaggaaagaaatactgaatagtactaggtacctggggggatgagtgaggtgctagtttccaaggacagagtgagggtatctcttgtgggattggggtccacaagaatgtgcagctcccttgcaatgggaacttgtggggaatgccattcagaaaatgaaataaaatctacagatccggccaggtgcggtggctcatgcgtgcaaccccagcactttgggaggccgaggaaggcagagcacctgaggtcaggagtttgagaccagcctggccaacatggtgaaaccccatctctcctaaaaatacaaaaattagctgggcatggtggcgcacacctgtaatcccagctacttgggaggctgaggcaggagaatcacttaaacccgagatagaggttgcagtgagctgagatcgcgccactgcactccagcctggacaacagagcaagactcatctcaaagaaaaaaaaaaagaccctattggacacagagaat

SEQ ID NO: 47277 - DNA, 633 bp, Homo sapiens
ttcccccagtggtagagaagaccccggtgctcccttgctagaggttgtttggctgagtcatgctgcctccccagcatacacaaaatggatcttacagaygagaaaataaggcttagaccaactgggtgacttatgtgagattagtgacaaaaccaagcagggacaacaaattgtgtttcctccaaaccagaagaaagagacacgaaccaagtgacacccaactggcagagataccacagcttgaaatgtcacctctccgcccaccaactccaccccagcccctggccacccacagactctcttgcaaagcaaacacagcatactatgtcttcagcgattccagaaacttcgcctcttggaacctgccggaacatttccaaatcatggccaaattataatttctctcacccacacagtcaccaaatgacccatgtgatgaggaatttgctatccatggcagacaagatccaacaccaataaaatgtcctggccccgggctgttcaaaggaaagcctctgtttttaaacctcgtattaaaaataaatacataaagttgacagctgtcagcaagacgtacgtgaactagaaactcaggtcattgtcttttgcctttttcttaaaacaagatggggt

SEQ ID NO: 47278 - DNA, 572 bp, Homo sapiens
cggagtgtgcagtggacttgagtgtcagtctccatgtactgcctctcagcaatgcccacatccttctgaacatgctctgtgataagccacggaattgttctcagtatttctctccttcaaagtgcgaggcgaagctttcccagtagagggcgctggagggacacgcaggagaasaaggccgtctgttacttccagccggacataggtgtgaggaccacagtggctctgatatctcagcctggtgacatcctggcctcagccctctcgacagggaaaccaagcacctgcgcagccccctgtgctctgcagggccacaagccccccaacaccgcagggcctgtgctcatgaaggtgccccggtggctccagacccgccttgtcgtggccaagccggggcacctcctgcctcccctggctgaccacaccctctccagaaggtctggagacattcccagcccctccttccttgggcatctccctgagccctaggacagtggtccccagcctttttggcaccaaggaccaattttgtggaaggcaatttttccacagacccagggttggggagatgg

SEQ ID NO: 47279 - DNA, 559 bp, Homo sapiens
tgggatcaatagctgaggaagtgaaaggagggcgagtgagttttctagcagcaggagttcttccagcccctcagacccgggtgaatccatcatgcctaactgataccacacactcccattagaaaacgtaacccttaacacacactcasagaatctggcacggagaatagaagcaacaaatctataaaacattgagaaatgtttatctctggacatctaagttgtgcagtataacagtatggttaagccatggagtcaggcaggctgcatttgaactcaggccaattcatcacatagtgaccaggtgacccaggtgagacattgaaatcattctggctccaagtttcaaatcagaaaacagggagtgaaaagagtacctaccggttgggcggtggtggctcacacctgtaatcccagcactttgagaggccgaggcgggtggatcaccagaggtcaggagttcaagaccagcctgaccaacatggagaaaccccgtctctactaaaaatacaaaattagctgggcgtggtggtgcatgcctataattccagctacttgg

SEQ ID NO: 47280 - DNA, 610 bp, Homo sapiens
tgatctcaactcactgcaacctctgcctcccaggttcaagcaattctcctacctcaacctcccgagcagctgggattacaggcatgcgccatcacacgcagctaaatttttgtatttttagtacagatggggtttctccacgttggtcaggctggtcttgaactcccgacctcaggtgatccgccctcctcggcctcccaaagtgctgggattataggcatgggtcaccacgcccagcctcagtgtgaacttttaaagaaaaaattatgacaaaattagtaaatatattccaaacaatttattattttgtgaccaaggttaagaaatcctttgacattatttttagctttaaaatttttttatatttgtaaagtaactgtaattttttcccttatttccttttatttctctatgatttttcatttagaattaaggataaacaaaaaccagttttatggattaacaatacaaagayttttgctttattaatcttttattatggaaaatggtgagaaatgtacatttaagtatataattaattagggaatgaaagacaaattttatttacaccatttctgtatcaccctctagccttttttaatgcttacag

SEQ ID NO: 47281 - DNA, 557 bp, Homo sapiens
cttggaagtaattcagggtcctcacagtttggtgaggcctcagcttttcaaacagaaagcctgcttgagtttcagagagattctctcgtccccatgctctctacccctctaccttcatcccaagcctcctcttctggaggtgaaatgagcgagatttcagggatctctgaataaaattcctgggctcatggtwcatgtgtatattcctattctcacttctcctgggtcactcacgctgtatttcaaaaataaaaggctcttcattctgagttatcaaataagtgtttattatatacacatacatttgcacatacacataagcgaactgtgtgtgtgtgtgcatgtatgtatgtatgtctgtgtgtgtgtgtgtgtgtgtgtgtgtgtgcatgcaggctgctcctggcttttgtggagccccgtttagtgcacgggatttgtgtgacagatacttatgcagtgacttaattttattcttttccacatagggttccagaaaaatacttttcaaggtcactcactaagaatcaagtcaagttctaaagcagatgaccgca

SEQ ID NO: 47282 - DNA, 557 bp, Homo sapiens
cttggaagtaattcagggtcctcacagtttggtgaggcctcagcttttcaaacagaaagcctgcttgagtttcagagagattctctcgtccccatgctctctacccctctaccttcatcccaagcctcctcttctggaggtgaaatgagcgagatttcagggatctctgaataaaattcctgggctcatggttcatgtgtatattcctattctcacttctcctgggtcactcacgctgtatttcaaaaataaaaggctcttcattctgagttatcaaataagtgtttattatatacacatacatttgcacatacacataagcgaactgtgtgtgtgtgtgcatgtatgtatgtatgtctgtgtgtgtgtgtgtgtgtgtgtgtgtgtgcatgcaggctgctcctggcttttgtggagccccgtttagtgcacgggatttgtgtgacagatayttatgcagtgacttaattttattcttttccacatagggttccagaaaaatacttttcaaggtcactcactaagaatcaagtcaagttctaaagcagatgaccgca

SEQ ID NO: 47283 - DNA, 566 bp, Homo sapiens
aaaagtatatttgcataaatatataaatcaacaatactactttcattcattagctttaagatatttataagactttctgctttttgttcaaccagatatagtgagcaaaactgtaagaaattacaattttggtaggttaaaaatgagtgaatatcatgaattttgtgtgttttccttagagataagttaacatggttagaaatttcagatataagaagagtctgactttggacctttttgtaagaattgtgaaaactagctcaaggtaaagcagaaaaccttaaaatatattaagttaataaattaaaataaggtaaacaaattcccaacatatgartgaaaaatagcaatgtagtcatagaaggcaaatatattcctgaataagaaaaacagttttgcaaattttgtctagtattgccaccagagatccaggataacagcttaaatgggaatgacataaaaaacagattatgtaactatcatttaatgagaggggaaaaaaggtagttgtgtctttcttatgtgaagatgaggcatttttattctaaatgaagctcccatgagca

SEQ ID NO: 47284 - DNA, 566 bp, Homo sapiens
aaaagtatatttgcataaatatataaatcaacaatactactttcattcattagctttaagatatttataagactttctgctttttgttcaaccagatatagtgagcaaaactgtaagaaattacaattttggtaggttaaaaatgagtgaatatcatgaattttgtgtgttttccttagagataagttaacatggttagaaatttcagatataagaagagtctgactttggacctttttgtaagaattgtgaaaactagctcaaggtaaagcagaaaaccttaaaatatattaagttaataaattaaaataaggtaaacaaattcccaacatatgaatgaaaaatagcaatgtagtcatakaaggcaaatatattcctgaataagaaaaacagttttgcaaattttgtctagtattgccaccagagatccaggataacagcttaaatgggaatgacataaaaaacagattatgtaactatcatttaatgagaggggaaaaaaggtagttgtgtctttcttatgtgaagatgaggcatttttattctaaatgaagctcccatgagca

SEQ ID NO: 47285 - DNA, 615 bp, Homo sapiens
tttgtttagtttttactacctttttcatccagaaaaataagtaaaagccaatatagcttttgaaatggaaaaattgtttcaaatcattggcaaagcttaatgacttctgactgctgagatatgttaatttaagccagaccaaatgttcctcagctgcaaatatttggtgttgttcactgggaactggcaagatttatgagggcccagtggcaaagactctgtgctcatatccctctcattgtaattgtttcccatgttcaatgatgaaggaccgatasggaagaaaataccaacttttcaggggtggtcacttagactcaaataagatgctatttcacatttgatttactatggcatcctcatgccatcttagttatcaaagccctttcaacttttctactccaattttgggaaaatacaatctgttactatccaagttgctccgaagttgcaacgcaaagaaggaaatgacttacatttggcaatttgtaactataagatatgcaatggtaatttaaaagttatatgagtaatgtgtagtacaaatataagtataatatgcttatattatttttaacagcattttaacctctttttataaattagttgtgatgc

SEQ ID NO: 47286 - DNA, 560 bp, Homo sapiens
tctcctgttgccaaatctgataataatataggtggctgaagatgcacattgtgtatatgcagtgcaaacttttacaatggaacatcctaaaggatgtagtcataaaaatacttgtatagaactcttgagctgttagaacatggtgggacaagaatgagtcctggaaaaacttttaagagtttgagattgatcaggccgaggtccaagaagtcatcactaattcttctctttcttgcacygccaatatataatccatatggaagtctttgttaatatatccaaagcgccaggcgcggtggctcacgcctgtaatcccagcactttgggaggccggggcgggcggatcacaaggtcaggagattgagaccttcgtggctaagatggtgaaaccccatctctactaaaaatacaaaaaattagccgggcgtggtggcgggcgcctgtagtctcagctactcaggaggctgagggaggagaatggtgggaaccctggaggcggagcttgcagtgagcagagatcgcgccactgcaccccagcctgggcgatggagcgagactcc

SEQ ID NO: 47287 - DNA, 1709 bp, Homo sapiens
tgcataaaaccaaatagatgtggttggtatagatttatgttgagaatgcaaataggcagtatgttggtgatgatatttagaaggggggaaattattgtttattttagcagcagctggcccaaatatcctgtttcatttttttttgtttcaagaggaaggcagattgcaaagctttctaagataacttcaaatgtgctaatattataattctataaagagatttctttcatgcgctatagaaataggccattaaatttgcatgtctaaaggaacttttcactaattactttgcttaaactcaattagtatatcagcccatgtaactggcaagaaaaaggaggacaaagtaaattatccaactttctttcagtgtgtgtattagagaggaataaatcagtctcttttaacagttatacctatattttaatctgactttataatgtgaaacagtaaattgcattgacctatttttaaagggcttatctgcttggtctgcagtcttaaataaagactgatttaagactctcccttagagggaaattgaagatagtagagttaatatttcaatatttttgtttctatgtgtcttttctagagaaagaaggtttcttcttttctgtctctcacctttctatccccatgaagtaacttaaatgcagtaaaacatttcttctgttaatcatgtttttggggcctattgcttcaacaaatacatgactgtatgaatcctattgccataattttacaaagtagaggctcttcttcctacctggtttatcagagtaggtttgcagtggctattccaaaagcaggaattctaggaacatctggcagagaggaattcagttttaagagacataaattgtacttaaatatttcactgaatagctgcttgagtttgtacaaggaacttaacctattacttcctactctcaccatccatgaatatgattaaatattctatccttcccacagttttaaataaggatcaaatgagatactagactggaaaatatttatttatttatccaatctttaaatactgtttacttttatacaccatgtaattctgtttaaaatagtattatttataaagcaaatagcgtcctacgcaaacctttaaatagtgtttactttgtgggagcactattcataatgtttataaatatcaatccattttattttcagaacagccaggtgagttgcagctattactatccacattttctaaatgaaaaaacaaaggcacagagaggttaagtaacttgcacaacctttcccagctagtaagtagctgaactgagattttaatacagtccatctggatctgaaatacatcctcttaatccctctgctgtgctgtttctcactttgaaaactccaatatgttgtgccaattttaggcactattatattactttttactttaattgctttactctcaaatgcggatagtcatacgctgaaggtttacaatgttgtgtcaagggtgtacttccagatgcagcctaagccacagaaaatttattagaagatttgaggaagaaataaataattaaactgttaaattatttaaagtgttccctttattttaaaataatcacaaatakttttaaagaataaagcaaaaatcacaaaattttcatagcaagacatgaaaattcaaataattttaatgtgcagaacagagagctatatccccattagat

SEQ ID NO: 47288 - DNA, 613 bp, Homo sapiens
taaaattgcctatatagtttgcataaatttattcacatcttcaatcttgctgacactttttttcctgttggcctcatattccttttctgcaaattttctcacagcaaaatctggaaatatagcccttaaagttaggtggtgccactttatcacacaaatgtacrttaaatagttcaaaactatgttcctttaatctaatatacaaattgtatactgattgtaagagattctgagttaatttaaacattgcgattaatagtgtataaccactgatgagtaagactctttgttgaagtaaacaagtttgatttcagagattattgaattttacgaacatttgttcatgaatcaatatttggccattatgtaagttgtatttttttagaagattaattgagctgattaagccatcttgtttaaactgaatttggaggttaattctgaatctcttgtgtttcaaaatcacaacaatgttatccattattttgttataatccagactatattttaacacatctttcaacttaattgctaatttaatttgaattttaaatattaactttcccatcaaaaaaactttatctgcctttccaagatttaatcactagatgca

SEQ ID NO: 47289 - DNA, 535 bp, Homo sapiens
atttctaggcagagaggaccgtggcagttgcatcttggataagtaactgaccttgggatagtcgggactccaratgaaatactggaaatgtgaagttttctcgaggccatcagacatctcaaaatgtaggcaccgttaattacgataattgaactaggaccttctcacttttaagacagaatcatgtggttcaggaacccagtgaatcccctgcattccacagcttcaaattccattttgcttgtcattgaagacttctgttccaacacttacaggtttgctacatttctcgtgcgtagcattttgacagcctgatccaagaccttttggtggcatatttgagaaatgtaaaatattttaactggaaaacttaggcctcaggtttcaatttcaacacaatgcagaactacttcttcacctgacattcactttgcataatgagaaatctctagaaccctaatgggcacacagaaggatcagttcatctggaaataacaaaccccctgttctaggagtttcacttgttgactggcca

SEQ ID NO: 47290 - DNA, 535 bp, Homo sapiens
atttctaggcagagaggaccgtggcagttgcatcttggataagtaactgaccttgggatagtcgggactccaaatgaaatactggaaatgtgaagttttctcgaggccatcagacatctcaaaatgtaggcaccgttaattacgataattgaactaggaccttctcacttttaagacagaatcatgtggttcaggaacccagtgaatcccctgcattccacagcttcaaattccattttgcttgtcattgaagacttctgttccaacacttacaggtttgctacatttctcgtgcgtagcattttgacagcctgatccaagaccttttggtggcatatttgagaaatgtaaaatattttaactggaaaacttaggcctcaggtttcaatttcaacacaatgcagaactayttcttcacctgacattcactttgcataatgagaaatctctagaaccctaatgggcacacagaaggatcagttcatctggaaataacaaaccccctgttctaggagtttcacttgttgactggcca

SEQ ID NO: 47291 - DNA, 1683 bp, Homo sapiens
tccatcccgtctcttggaatttcttggcacgccctacctgagatcccctacgggagatttcctcttggctcctgcggttctgaggacgttctgaaaagttcccaagccccacctttggtagctgcccagaccccagcttccaattcttccctcttctttgcacaggtagccgtcagccccatagcaccaccagcgtccaaaatagaccacttttagcaaatccggcagggctggggcagtctaagagtttggaaacaaactgagaatagaggggtcctatttcatgccaggttctcgctggtttacattccaactcccctctgtccgttgtgcgaaaacgtctccaggccgaccttcattcatttattgtcaacaaacgtcctgggagagcggctacagccggccgctgaacccagaagggactttctctaggctttcttggcaccctcccaattatcttccttctcttgcccgagggcagaccaacacagctacgaacatgggtgactgagggtcagaccccttcccggaaccgcctccaagctcctaatttttgcctaatgttaaaccatatccaaagatgaatatttaaacaatcaattcagtggcggagtaaattaaacgttattctccgatcaaacaggagcttcgggtccacctgtttggaagcacccaggcagcttggagaggtccggccttcgggtgcgacccgcaggggttgccctgcccggttcgcggaacggacgtttacctgtcgcagctacgaacccaccaacgacaccaagcacttgccgggcagaccaggcgtcgtggaggcgccccagcccccccaactcccccgcaacgacgcgtcccaggggtgcgtagtgcttggcgcggtgaccagacctggccgccttcctgactgcacagagcaagaggccacactctggatcccaggccgggtccctgtggttctgggagggaggtcccggatgcctcccagatctcgggcttctgtaaccctgaggctgggttttaaaatcacggctcttccaagttacacgaagagtccatggtcaagggtcaagggtggtcttcgaccctcgggatcgtcttcttgagaaatggctgagagctaagcctagagctgcccagggaaggaagccaaagagctggagccgagcgcgaagggctgggaggcgcggggaggccccttacccccgcccsccccccccacactgtcctggccgctaataacgctgataatagtaacagtatcggccaactgtttcccccctgctcctggtctgccaggcaccggatcctcctttagcactcccagcactcactgaagaagacactatggaattctccgttttccagactagaaataagtaactcggagaaattaagaaactcgcccgacgaccctcaggcagtagcacctggccaggtttgctttctgaaccactaactccactcgcgcacgccacctttcctgcctgggcctcttgcgggtcgcaggggtggaagcctgacctgggccagggcccggatttcttcctcctggcctctgtcccaccgcccccggtgccaggaagcgcttttctctccccgagacccagacgcgccgaaagactcgcgcggtcagttccctaccccacgccctgggctgtgcgttttcttgcaagcctctgccga

SEQ ID NO: 47292 - DNA, 1683 bp, Homo sapiens
tccatcccgtctcttggaatttcttggcacgccctacctgagatcccctacgggagatttcctcttggctcctgcggttctgaggacgttctgaaaagttcccaagccccacctttggtagctgcccagaccccagcttccaattcttccctcttctttgcacaggtagccgtcagccccatagcaccaccagcgtccaaaatagaccacttttagcaaatccggcagggctggggcagtctaagagtttggaaacaaactgagaatagaggggtcctatttcatgccaggttctcgctggtttacattccaactcccctctgtccgttgtgcgaaaacgtctccaggccgaccttcattcatttattgtcaacaaacgtcctgggagagcggctacagccggccgctgaacccagaagggactttctctaggctttcttggcaccctcccaattatcttccttctcttgcccgagggcagaccaacacagctacgaacatgggtgactgagggtcagaccccttcccggaaccgcctccaagctcctaatttttgcctaatgttaaaccatatccaaagatgaatatttaaacaatcaattcagtggcggagtaaattaaacgttattctccgatcaaacaggagcttcgggtccacctgtttggaagcacccaggcagcttggagaggtccggccttcgggtgcgacccgcaggggttgccctgcccggttcgcggaacggacgtttacctgtcgcagctacgaacccaccaacgacaccaagcacttgccgggcagaccaggcgtcgtggaggcgccccagcccccccaactcccccgcaacgacgcgtcccaggggtgcgtagtgcttggcgcggtgaccagacctggccgccttcctgactgcacagagcaagaggccacactctggatcccaggccgggtccctgtggttctgggagggaggtcccggatgcctcccagatctcgggcttctgtaaccctgaggctgggttttaaaatcacggctcttccaagttacacgaagagtccatggtcaagggtcaagggtggtcttcgaccctcgggatcgtcttcttgagaaatggctgagagctaagcctagagctgcccagggaaggaagccaaagagctggagccgagcgcgaagggctgggaggcgcggggaggccccttacccccgccccccccccccacactgtcctggccgctaataacgctgataatagtaacagtatcggccaactgtttcccccctgctcctggtctgccaggcaccggatcctcctttagcactcccagcactcactgaagaagacactatggaattctccgttttccagactagaaataagtaactcggagaaattaagaaactcgcccgacgaccctcaggcagtagcacctggccaggtttgctttctgaaccactaactccactcgcgcacgccacctttcctgcctgggcctcttgcgggtcgcaggggtggaagcctgacctgggccagggcccggatttcttcctcctggcctctgtcccaccgcccccggtgccaggaagcgcttttctctccccgagacccagasgcgccgaaagactcgcgcggtcagttccctaccccacgccctgggctgtgcgttttcttgcaagcctctgccga

SEQ ID NO: 47293 - DNA, 624 bp, Homo sapiens
ggctggagtgcagtggcgccatctcagctcactgcaagctctgcctcccaggttcatgccattctcctgcctcagcctcccaagtagctgrgactacaggtgcccaccaccatgcctggctaattttttatatttttagtagagatggggtttcaccatgttagccaggatggtctcgatctcctgacctcgtgatatgcccgcctcggcctcccaaagtgctgggattacaagcgtgagccactatgcccggcccagattttctttattttaaatatatctggctaattgcacatagcagttgtttactttatgattatctttcttgatgttaatgtcttcctattgtgtttccatctcaactatggtaggaggtcctttcttctctctctctctgtctctctcatcctctctgtgtgtattcttgattaccttcatttagctttctaggcttctaaaggagacaacaatttttgaaagaaagttagggctcctactacccgaaaatattgtaaaaatacttctctagtcaccaagccactaagctgcttgtctaactttcagaacaataagctatgtcttgatctctactcattaggaccacaaagctgtaaattatagccc

SEQ ID NO: 47294 - DNA, 546 bp, Homo sapiens
tggatcattcagtgagtaatattggccaattatgtgcctgtttcctcctgtcatcactaaaaacacaaaagtcaggaagtttatatgctgtaacattaaacaatccctacgtatcggtgaaaaaaacaagatctacgtttcatgctgcatgtccactgtgggttagagagaggggcactggtctgcatcatattcagttactcaggctgagaaaagtttcttctccacttttccaaatttgccaaagcagaaaaaaaaagtggttcttaaagcttctaaacataatcctacatatgctcgaaagaggaaagctgtaaagctttggtgaacagyatatcaccatactcctcacccttctttccacaaccactttcatctacattccaagatagactatccaatagtacttcctagttatgtcatctgctgaaagtccaggagctcttggttatgccctgtagtcactacagaagttctagatgtggtacctatggtgtttagtttagtttacttcatagatcacctcaataagtgaaaaaattgttt

SEQ ID NO: 47295 - DNA, 594 bp, Homo sapiens
aatgaggttatgtcctttgcagggacatagatgaagctagaagccagcatcctcagcaaactaacacaggaacagaaaaccaaacattacatgttctcactcataagtgggagtgaaacagtgagaacacatggactcagggaggggaacaacatacactagggcctgctggggggtggtgggggaacttagaggatgggtcaataggtgcagcataccactatggcacacatatacctatgtaacaracctgcacattcttcacatgtatcccattttttaaagaagaaataaaaaaaattaaaaattccatctccatcatgtattaatttattaactgtcagcttgagtaagtcacttttcctttcttgaccctcattaccaaagcatcatttttttggttttctcaacataaactctccaacttaccacctacatctcttgacacttattctctacatactaaccatttccttgcaaacttgaaatagaggaaatccacttaatgagtatagatattctttttaaatcaaatcaataaccttcccttaattaaccaaattcataaacatgtgctcagttgtcatatacaca

SEQ ID NO: 47296 - DNA, 602 bp, Homo sapiens
ttccttttcttaaaaatacgtatttaataatctcaaccttccaacagttactcaatagcttgacactgtccaatagaaatataatgcaagtcgcaaatatgaaccgtgtatataatttaaattttctagtagtcatattataaaatgtaacaataaatatgtgaagttagtgttaatatattggtatatttacccaatatagctaaaacattctcattttaatagataataatgactaatatgaatgagatatttcatattatttttcatactgaatcttcacaattgtacatctcrattcttactagccacagttgaagtgctctgtagccatatgtgactagtggctaccatattggacaacgcagctctacaaaatactctatgccccccattttcattccttgcttatgcttctacttttttttatctgttctccttcgatcgtaattaaatactaataatatgtaaggctctctcacttaaattctaactcgcctgggcaaacttccccagtcatcacaagactatgatttcatctcatgagacgcattagctgtaccactcagctggcatttcccatgtgctactttctgtaatta

SEQ ID NO: 47297 - DNA, 529 bp, Homo sapiens
ataagctttttgatatgctgctggattcggtttgccagtattttattgaggatttttgcatagatcttcatcggagatattggtctaaaattctctttttttgttgtgtctctgccaggctttggtatcaggatgatgctgtcctcataaaatgagttagggaggttccctctttttctattgattggaatagtttcagaaggaatggtaccagctcctccttgtacctctggtagattttggctgtgaatccatctggtcctggactttttctggttggaaagctaattattaattattgcctcaatttcagagcctgttattggtctattcagagattcaaattcttcctggtttagtcttgggtgggtgtatgtgtcraggaatttatccatttcttctagattttctagtttatttgcatagaggtgtttatagtattctctgatggtagtttgtatttctgtgggatcggtggtgatatccccttgggtttaataaacagataacatcaaacattcaactaatc

SEQ ID NO: 47298 - DNA, 1777 bp, Homo sapiens
tcttcatagtaactccgtaaactggaacactgtcaaaaagcagcagctagtgaattgtttccatgtatttttctattatccaataagtgaactatgctattcctttccagtctcccaagcacttcttgtccccatcaccacttcggtgctcgaagaaaaagtaacaaatcaaggaacacaactaaagaaacacacacacaaaccaaagacaactacagcgtctgcaaaagtttgctagaagactgaaactgttgagtataaggatctggtattctacgatcatgagttcacttcagagtttgttcaagacatacgtttcgtaaggaaacatcttagttagaagttattcagcagtaggtaccatccctaagtatttttcaccaaattcgtgacaataaagagctatctaaccagaaaaattagcgagtaccggcaccatccatagggctttgtctttacgcttcattagcacttaccatgccttacaatgtctaggattgaccctgatagcatttcgaaaacaagctaatgctttgtccagttcttcagtgaagacaagctcacgccctaatgcgctataggcataagcatcatttggatccacttcgagagttctctggaagaattgaatcgcaatatcgtgttcccgttgcagaccgaaacagttccctgcagcacaccaggcctctggctggcgaatttttatccatgtctgtgaagtctttggacagaactgaaagagcaacctctttcggaggatgccaaagtgttgtagagtagatctccatgccttcgactctgtaattctcaatcctcctaacctctgagaattgtctttcagcttgcgtggactctgaaagtttacaataggcccttccgatttggcacagtacccaaccggtattgcagtggtgagaagctagatggctcaagatgctgatagcttctttgccgtggtaagaacacaaagctaaataacctttccccctttcacgaagaaggctcatcaagccttccgctgctgctttttgtagattaaaagcctgaatctgaggcgcgattgcggctattttcccttctgaaatgacggaagagtccaattttgtcacttccaggctatcacttatgttcggtggagttattgctcctttattagttttacttttggttcttctgtttgggattttaggtggaaacttcatttttaattttctcctattctcctcggttgtggagctgtcactagtcaagagtcgtgaatttcttcgaggcggtgcatttgggggagatgccatagtggggctcaatacctgaggtgttgcccttgtcggcggaccagaactttgtgtttttgcaaggactggagttacctttcggctctttcccctctgcgagaagacagacggtgttccggtttggccgattctggcaacaggcttttttgaaggggctccggtggatggcacgtcaatgacagacggtgtctcataccagtgcagttttgtcaatagggtccgtctccgggacttggggtttctaatggcaaaatgccaacacttggggttaatggactaacagctgctggtcctcctaataaacttcgaccagtttttggtttatgttgaacctgtttagatcatatggaagttcctgttcccagtgggacagtatcaggtgaaaggacagctgaatcgatagaagacactggggagtctgtattcaaggagtactttgaattggaagattctaaattccatccgtttcattsgacggtgtc

SEQ ID NO: 47299 - DNA, 539 bp, Homo sapiens
tctcataaactcgattagattgataattatcttttcacttcccagctcaaaataccctaatgcaaaattttacaaaggttcagagatcaggtgaaggcctcctgtcatccatgtgctactaagcaatgaaattggcatgataattaaatgcccagtattctaaagtataagtgcaaaaaaaatggatgctggttgtaaataaaaataggccaatggctggaaagaaaagtccaggtgggctcacatcacagttttaattattttaattcattggtatatgttgaataaatcactaaattaaaataaacctaccctgagtaggtttacttaatctccacatggacatatataagaccattggaatggcaatataaaaagggaaacctactggcaaatatgtcgtggactctttggagaactggactcatgggatttcttaagtatgtaaaaggaatgagaggcaatgtckcatacataagactcaagagccaagtttcaatccagctccaccattagcaacctcagtttctcatctgcaa

SEQ ID NO: 47300 - DNA, 1181 bp, Homo sapiens
  misc_feature (1)...(1181): n = A,T,C or G
gtagctccttgaccatcatacgctctttgccagctcaggnacctcacacatgctnctncgtctgtgtggatctctctgctcaccagcttcttcgatagctntccatctcagttncaatgtcctgtctatctttggagtgcctttttctgaccactcagcacacactcactgtngagacttnctactcagnnctgcattgttctttctacacataccataactgcaatattnnnnnnnnnnnnnnnnnnnnnnnnnnnnnnnnnnnnnnnnnnnnnnnnnnnnnnnnnnnnnnnnnnnnnnnnnnnnnnnnnnnnnnnnnnnnnnnnnnnnttaggtggtacagctgctaatataggtagttatacattgagatactgtatgtcttgtgcttgggaacatgagtgcaggagtcagactgcctgggttcgagtcctggctctgccacttaccatcttatgtgagccaattaatttctctgtgcttcatgcttcccatctgtgaaatacagattatagttacctaccttatagagttatcataaaaaaattaaatgcgacactgatactgtgatgaaaacagtgtcttgaatattgctggatgttaggggaagcaaagacagtaacacgtacagagaaaactaagtcatttttttaaatgagtaaactatcagctctaggaaaaaggataattgaacaagaaaggaattgtaatgatagtatgctccttggctcagcagaaaatatttccattgttggaataatgcaaatcctgaaaattgtgatgtaataaactggaaggataaagggaggaaaacgggacttaagggagaaatcgttatytaccataatagaagtgcgtagaggtagtattctatttagaatatggaattagatattaaaataaatggctaaacacatctgaattaatcctcaaggaacaggacttggttaactatggcatttggttagcataaataaagaaagaaggaggcaaggaaggaaggagtacaggagaaccggcgctgctgcagtgattctgaagcacgaagttctaagagaagcctcaagattgtaggtcatggtggaagtgcccaccgtggagtctgcactgctaggaagcattcccaggaagggaagaaccttctattccacgaacccataacatgggtctccattaccctg

SEQ ID NO: 47301 - DNA, 520 bp, Homo sapiens
tttactctcatttaaaaaccgcacatgagcacttcccatgcagtaaacattaggttagatgctgcaagggatacaaatatgttaaaacacaagaagacayagtctagaggagttgaaaaacacattaagagctcccttctctcctgagcactgctatagatggataatggggcactagaggggtttcttgcaagtggtccagcccacctgctctcacacatgttcctgcttaagagatatgaaggcccggtgtgtatgaatacgatcacttcactactcaaacaactagctattattacttactgagcattcattgtgtacttagcacttgatgtatattctctccattaatcctcaccataatcccatgagggataatcttcattttacatatgagaaaactgaggttgtttataaaggttaaatcatttgcttaaattctacaattaatatgatacagatggatttttcacagatttgtctcattctaaaatctaggcttctaatttctatctaaact

SEQ ID NO: 47302 - DNA, 520 bp, Homo sapiens
tttactctcatttaaaaaccgcacatgagcacttcccatgcagtaaacattaggttagatgctgcaagggatacaaatatgttaaaacacaagaagacatagtctagaggagttgaaaaacmcattaagagctcccttctctcctgagcactgctatagatggataatggggcactagaggggtttcttgcaagtggtccagcccacctgctctcacacatgttcctgcttaagagatatgaaggcccggtgtgtatgaatacgatcacttcactactcaaacaactagctattattacttactgagcattcattgtgtacttagcacttgatgtatattctctccattaatcctcaccataatcccatgagggataatcttcattttacatatgagaaaactgaggttgtttataaaggttaaatcatttgcttaaattctacaattaatatgatacagatggatttttcacagatttgtctcattctaaaatctaggcttctaatttctatctaaact

SEQ ID NO: 47303 - DNA, 563 bp, Homo sapiens
ctcagtttctagacatcaatattcatgagttcagggaagaaagtcaatttttgcccaagacacccagatttcctatagctgagtgactgtcagtacacagtacattacatttaacatcacaaagtacttacaaaaagtagtctgacaaacagataaagacggacaaaggcatggagttaactttgaaccacaaagagctctccaggacagagcttatcagcatggaaaataatattttaataatttccttttgatattaaaaatattaaaagttatttaacttttaattaaataacagggagaggttggggcaatgccataaagtctttcatatggtaaattttgaaggaagtatagtcagcaygaagccataaaatgtttttcagatgagaaggcattttataaaaattgctgaggtagcacctgcaagagactgaaagcaggtgtgtttcatgtgtgtttgatggggccctattgacaaggctggcaaatgttgctcagtttaactaatttgaaatcatgatttttttctctctcactaggaaagtagagtggtgtggttc

SEQ ID NO: 47304 - DNA, 627 bp, Homo sapiens
taattcagtcactgagtaacaaacaagagaaattattgaaaacaattaatcaagacaattaaatggcaaagactatgaatcatatttatcttggttcagaaggaaaatatgtcttgagaaaaacatgcagatttagatatctctgtgtttraagtctttaactttcttatatggtaaactgaaattctggaaaagaagctaacttaaaaaaacagtggaaaaagagaagtaaaacaattttatataaaaggcacaagacaaactctatatttcttagctttgagttaggctggaaaattttaccacattttgaaactagttatcttaccgtaacagtgaaattattaaaagtcctaagaatgattgagcagacatatatagtgtatgcaaaactgcattatgtttcaatatgtgtgtatattatgacattagtatttgctttaaatctcttctctaagatactgaattatgaaagacagaatttactttattcttatttatttattttggagacagagtttcactcgtttcccaggatggagtgcgatggcgcaatctcagctcacagcaacctcagcctcccaggttcaagtgattctcctgccttagcctcctgagtagctggga

SEQ ID NO: 47305 - DNA, 627 bp, Homo sapiens
taattcagtcactgagtaacaaacaagagaaattattgaaaacaattaatcaagacaattaaatggcaaagactatgaatcatatttatcttggttcagaaggaaaatatgtcttgagaaaaacatgcagatttagatatctctgtgtttaaagtctttaactttcttatatggtaaactgaaattctggaaaagaagctaacttaaaaaaacagtggaaaaagagaagtaaaacaattttatataaaaggcacaagacaaactctatatttcttagctttgagttaggctggaaaattttaccacattttgaaactagttatcttaccgtaacagtgaaattattaaaagtcctaagaatgattgagcagacatatayagtgtatgcaaaactgcattatgtttcaatatgtgtgtatattatgacattagtatttgctttaaatctcttctctaagatactgaattatgaaagacagaatttactttattcttatttatttattttggagacagagtttcactcgtttcccaggatggagtgcgatggcgcaatctcagctcacagcaacctcagcctcccaggttcaagtgattctcctgccttagcctcctgagtagctggga

SEQ ID NO: 47306 - DNA, 606 bp, Homo sapiens
caaaccactcttgaatcatcattcatagttatgccaacatctcccacactacagatgttcactgtccacttgattattcatgcctgacttttgctgctggctgccgaagttcatagaccacaatccagtcactctgtgaacccatttccctccctagcctgaggacacagtcacggtgctcttaaattcttgagatttagccacgttaattcaaggttagggcagcgcaagggccatgtacaaagaacagagaaaactagcagaataaaattgggccttaggcaagaggcttctgaatcatggtagccaaaataatgcactccgcgctgaaaaatgaagtcgctatttcttagtattgagagattcttgagaatataatgggggataaaaaaaggaaacaagaagaataaacatcagaaaggaagagatgaaaatatcctttctgtttctggcatggtcrtaaatctaagagaactcacaaagttaactaaaaagctgcaaatgatttgcaagtatgggtaagttaatcagaaccaaggtaaattctcctaaataatagcattgctattagtctctgaaaaccagttaaattaatataatgtgggg

SEQ ID NO: 47307 - DNA, 532 bp, Homo sapiens
aaaaaaccaaacactgcatgttctcactcataggtaggaattgaacagtgagaacacatggacacaggaaggagaacatcacacgctggggcctgttgtgtggtggggggaggggggagggatagcattaggagatatacctaatgctaaatgacgagttaatgggtgcagtacaccaacatggcacatgtatacatatgtaacaaacctgcacattgtgcacatgtaccctaaaacttaaagtataataataatgaaattaaaaaaaaaagaaactcttccacaaggtgttgggtgcaagaccattcatagtataatatttcataagaacaaaacctgggaaaataacttcatagctattaacagaatactatcttaaaatttgaatgtcctaacattgggatattacagatctttgtaaatgagtaaaccactgctgcaaatatcaatatacatgctttaaaaaatcttgcataaaaaagcaagttgcagaaaayttacaatccaaaataattaatatattggctcatct

SEQ ID NO: 47308 - DNA, 769 bp, Homo sapiens
aataagtgagtaactgagtatgtgtgtgagcttgggtgcataccccagatatacaagtgcatttaagaagagctggaatagacaagataatcctgatatttatttagtcaaaaatgaaaatttctaaatactgaattctaattcttctcagtcctttgaaaatgcaaacttcctccccacatcatgtggtctgaaaaataagtggaggtggaaagagaagtaggaggagatttgaaagcagtagaaggaaagataatgaggcggctgctaaaatttttgcacaaggacatgaaracttcccttaatgtttaaaaacgtgatcttgcagccttttccattttgacttcattttcctcatctactgaattaacgagaatctggatgatctgtaggtcaagcatttgctggaaataagaaggccagagctaatagccattggctttgcctaggaccataatccatctgcccagcacagacatcagctttcctgtcattatcacaggaagcccctcagaaccctaaagcgactggcactttttttctcatcggaattaaagttagcagcttctcatcttcaatgtggaaatgtacataatcctatgacagtatactattgtctctaaagagagctacaaatttaattttgagtttgtgttatataaatcatgcaattccattagtatgtcttcgtgctgtgatctaaattcacaaaatctgatcccatcctaagatgctgatattctgctattctctgctaatgatacaatca

SEQ ID NO: 47309 - DNA, 608 bp, Homo sapiens
ggtgtacagttgtctccatatgggctttactggtaaccttgtgctgtacatagagcaggtgttactagtattatttccattttgcagctggggaargagtttgagggaaattaatgacttcaccatagtcacacagctaccaaatcagagacctggatttctgactttaaaacgtgctcttcccagcctaccacactgcataaggtcttctttaatctgtactgtttagtgttggtaagattcttgtggaagaataacatgggaaattggtaagattcttgcggaagaatgacatgggaaaagtatcattctcccccagcaacaaagtatgcataacataaacacttaggctgagatgaattcttcagtatcttatagacagactaagcagaacattctgagtcattcgtacataaatattcgtatgctatatgtggatgatttctaggtattatccctcatgattgattgattgattacatgttttgcccctactattcaatggtagatttagcattgtaggctggcagtttccttagcactttttaaattcctaatctaaaaaccactgcatacccattgatttgcatttttaataattcaactaa

SEQ ID NO: 47310 - DNA, 608 bp, Homo sapiens
ggtgtacagttgtctccatatgggctttactggtaaccttgtgctgtacatagagcaggtgttactagtattatttccattttgcagctggggaaasagtttgagggaaattaatgacttcaccatagtcacacagctaccaaatcagagacctggatttctgactttaaaacgtgctcttcccagcctaccacactgcataaggtcttctttaatctgtactgtttagtgttggtaagattcttgtggaagaataacatgggaaattggtaagattcttgcggaagaatgacatgggaaaagtatcattctcccccagcaacaaagtatgcataacataaacacttaggctgagatgaattcttcagtatcttatagacagactaagcagaacattctgagtcattcgtacataaatattcgtatgctatatgtggatgatttctaggtattatccctcatgattgattgattgattacatgttttgcccctactattcaatggtagatttagcattgtaggctggcagtttccttagcactttttaaattcctaatctaaaaaccactgcatacccattgatttgcatttttaataattcaactaa

SEQ ID NO: 47311 - DNA, 608 bp, Homo sapiens
ggtgtacagttgtctccatatgggctttactggtaaccttgtgctgtacatagagcaggtgttactagtattatttccattttgcagctggggaaagagtttgagggaaattaatgacttcaccatagtcacacagctaccaaatcagagacctggatttctgactttaaaacgtgctcttcccagcctaccacactgcataaggtcttctttaatctgtactgtttagtgttggtaagattcttgtggaagaataacatgggaaattggtaagattcttgcggaagaatgacatgggaaaagtatcattctyccccagcaacaaagtatgcataacataaacacttaggctgagatgaattcttcagtatcttatagacagactaagcagaacattctgagtcattcgtacataaatattcgtatgctatatgtggatgatttctaggtattatccctcatgattgattgattgattacatgttttgcccctactattcaatggtagatttagcattgtaggctggcagtttccttagcactttttaaattcctaatctaaaaaccactgcatacccattgatttgcatttttaataattcaactaa

SEQ ID NO: 47312 - DNA, 593 bp, Homo sapiens
gactctgcattttttctctgtaatgtttgacatttcttcctagctaagtctctagttataaggtctgtgttgtggcatgtggacagtgagtggaagaacctaagaactcaatttggggcagaagaatgtaatcaattatttcagaagtgatacaaacaatatgacatgtagagcattctggcctttcctgggtcttttttctccattcctggatttcttctcttcatgtgagcaagtctgaggttactatataatgtctctcacaggccacagccccattctaaatattcccaatagaaattcatttattaaccagagagtggtgggtggggttgtttttgttttttaaacaaaagtggatcttatgggcattctggaaagctcccrcaggaagctaagaataaaattttgaattgagaagtccctttcttcaaaccacattcagacccaattctgctattctatttatttttcaaggggattagccttattttaacaccaataatcttatcacaaaaacctcccagaggaagaccctgtagattttgtaatgaccttaatcaagtattagccctacacttcaattaatcccc

SEQ ID NO: 47313 - DNA, 535 bp, Homo sapiens
acctgtgttggaaataatgtagccacatgcttacatctgctcccagaaagaccaggaaatgttgtctcttgctagatagccacctgtccagctttctttttattatgataaagtgaaaaaactttattggaaaaataagggtttactcaatattctccacaaattaaaatccattttgaggacagcgaataatacagtggcatactgatagtcctgmgattgtaaggactggagtaacccactagggaatggcttacttatttttgtctcatttcctgaggtgtaaagggaaagaaggtgggaatttaatcatgacaacctcggttttaaacacccattcatgcaaccacagtaacctgatctatgatttaaggtaaaatgacttctgttaataataaagtctaagactatttaagataaaaggacaacaaaaaaagaactcgttcaacatacctttaaattggccacgggtacataaataaaaagtccttttaaattcaacaatagaaaatcagtagatctggatggaaggcag

SEQ ID NO: 47314 - DNA, 401 bp, Homo sapiens
tgaagcagataaaagtagaaagaaaataaaaaactaattagttacaaattaagcttaaccacaattcgtttaaacgatactatttactcttcacatgattggtttttcttttgctttatagtatgacatagtttatatctttaaaggggaattaaaatatttctgggaatttttaaaagtaagttcacacagccacataaaaactacagaaacagayaaaacctatcttctcatttattccctaatccattcaaattaaatataaaaatccaagcatccacagtgatattcaaaaaagcaaaagtgagacaaaacaaaattcatttgtcacctgtggaggtagttacctcacctaatcttcactccaaacaccagtaatttttaaaagacagaaataaaca

SEQ ID NO: 47315 - DNA, 590 bp, Homo sapiens
ttattgtaatgtatcatagccatgtgagagtacacacacacacacacacacacacaaatgccccacaattcatatattgaccctttcatacttttcattttttttcccttaatctccatgcttccacctgggatcatgtttcttttgcctagggaactrcatttactctttcatttatcaagaaacttctaactggcatttaaattgtatgccagggaaaaaattgctagtggcgaattctctccatttttattcttctgaaaattatcttttttattcttcctctgtgaaggatattactgttaagtatagattccagattggcagtttaatttcagcattctatagtttttgtttaaaagtcagctgtcaatcttattggtgctcatttaaaagtaatatgtcctttttcttttggctatattttggggagttcccctaatgatgtgccctaaaatgtggttttgtctttatcctgctttggtttgtagaacttcctcaatctatgcttaataatttttaaatctattttggaaaattctcagccattatctcttcaaatagtgcttttctcatattctgtcccacct

SEQ ID NO: 47316 - DNA, 590 bp, Homo sapiens
ttattgtaatgtatcatagccatgtgagagtacacacacacacacacacacacacaaatgccccacaattcatatattgaccctttcatacttttcattttttttcccttaatctccatgcttccacctgggatcatgtttcttttgcctagggaactgcatttactctttcatttatcaagaaacttctaactggcatttaaattgtatgccagggaaaaaattgctagtggcgaattctctccatttttattcttctgaaaattatcttttttattcttcctctgtgaaggatattactgttaagtatagattccagattggcagtttaatttcagcattctatagtttttgtttaaaagtcagctgtcaatcttattggtgctcatttaaaagtaatatgtcctttttcttttggctatattttggggagttyccctaatgatgtgccctaaaatgtggttttgtctttatcctgctttggtttgtagaacttcctcaatctatgcttaataatttttaaatctattttggaaaattctcagccattatctcttcaaatagtgcttttctcatattctgtcccacct

SEQ ID NO: 47317 - DNA, 541 bp, Homo sapiens
tattgtaaagatgacttctgtgtattgcatagtgcttctgttacataagttctttcagttcagtgatggcctttcttggcatatataatttaactcatctttaaaatttaagtcatcttgatcagtttactttcctgccaaacatttggtctttagaaacattatcccttcgcagggaccagcatcgtgttattgccatactactaataaaaacaactaacatttattacatgccatgtttccaggggtgagctggtaaatgtttaacaactggcacaaaatccacacacatacataagtgtataataaatgtagctaatataaataaaatagataatactccttattgctaattccacataaccaatttattcacaaagtatctttttatttttcccaaattcttctatctctagccatcctgtgattgcaattggttcacaagtgtaatctggcatgaatgttggttgatatttttatttacattaacaaataagacaaaagacaatcaacacatgtcagaacttyactgatttgtcca

SEQ ID NO: 47318 - DNA, 541 bp, Homo sapiens
tattgtaaagatgacttctgtgtattgcatagtgcttctgttacataagttctttcagttcagtgatggcctttcttggcatatataatttaactcatctttaaaatttaagtcatcttgatcagtttactttcctgccaaacatttggtctttagaaacattatcccttcgcagggaccagcatcgtgttattgccatactactaataaaaacaactaacatttattacatgccatgtttccaggggtgagctggtaaatgtttaacaactggcacaaaatccacacacatacataagtgtataataaatgtagctaatataaataaaatagataatactccttattgctaattccacataaccaatttattcacaaagtatctttttatttttcccaaattcttctatctctagccatcctgtgattgcaattggttcacaagtgtaatctggcatgaatgttggttgatatttttatttacattaacaaataagacaaaagacaatcaacacatgtcagaacttcactsatttgtcca

SEQ ID NO: 47319 - DNA, 575 bp, Homo sapiens
ccaaatacttggaccttcaatgtatgagttttaactcaatcttatttgaaagtatatggaattaagatttgtaaaaatttgttcctacctttctggactatacatatggatgagaatggtcttctgtatgggtaggcagactcactctgctaacagccagacagtaaatattttaggcttggcaagccatatggtctctgttgcaamcactcatttctactgttgtagcaagaaaacagccatatacaataagtcaacaaatagcaggggctctattccaataaaacttttttcccacccctacaccttgaccaataaaactttatttacaaaaaaataggcaataggccaaatgtttgcccatgggccatggttagccaatccctgatcttgtggatcaagtcttagaatcagcagaatggacttaaaagatagtagccagactgactttttttttttttttaattaaaaaaattttgtttaaagagacaaagtctcactatgtttcccagttagattcaaactcctgggctcaagagatcctcccacctcagcctcctaagtacctgggactg

SEQ ID NO: 47320 - DNA, 595 bp, Homo sapiens
ggaaaccttccagcactttcaggaagcagctaggatgtcactgtggccggcgaggaatgagttaaggagagttctatacagatcagagagaaaacgtctgtgtgatcctgagaaagatggaaaaccagtggggagttcagagaagtccagggagaagatctgacttcctaacaaaaaggattactctggcttctgagcaggacaaaggaagaaataggagactaagtaggaggaggctgctaatgtcatccaatgtcctataacagggacctaccataccagtccatggcttaggaactgagccacacagcaagaggtgagtggcaggtgagcaaacaaagctttatcagtatttacagccactccccatcgctcgcattaccatctgagctctacctcctgtcagatctgcagtggcattagattctcataggagaggaaaccctattatgaaatgggcatgtgagggatctaggttgcatgctstttatgagaatctaatgcctgatgatctgccactgtctcccatcactcccagatgggacaatctagttgcaggaaaacacactcagggctcccactaattctacatcat

SEQ ID NO: 47321 - DNA, 581 bp, Homo sapiens
gtacaatgagcttgaccttaattatattaaataagtagaaaagagttcttaaaatgtaccaaatggcagaatgcatcatactggaaaatgtatttatttagtacatacctaggagaagcttttcagagaatttgcttaaaaggcagactcttaatacattttgaacatatttcacaaaacaagtttatccgaagaaaawcttatagtaaaatacaaaacaggacattgttaacaacactgaacacactgagataacattctgttactgctgccgtggagtagaccagaaaaatctgcttatgccattgcccatgatatttatgataattatttaagagaagcattaactgggggaatggacagcatcttatctactttgtaatagcagcgtttaacgggatgtccctgggtaatacagaggagacactctaacaacaattattgaatcgataggataaaaaacatagagaaacagacatcaagagctcagaacaaatggaagagcaaggggccaggatgtaaggagattaataagctttggggattggggtgggaagtaaaaataaatttcatctgcttcc

SEQ ID NO: 47322 - DNA, 581 bp, Homo sapiens
gtacaatgagcttgaccttaattatattaaataagtagaaaagagttcttaaaatgtaccaaatggcagaatgcatcatactggaaaatgtatttatttagtacatacctaggagaagcttttcagagaatttgcttaaaaggcagactcttaatacattttgaacatatttcacaaaacaagtttatccgaagaaaatcttatagtaaaatacaaaacaggacattgttaacaacactgaacacactgagataacattctrttactgctgccgtggagtagaccagaaaaatctgcttatgccattgcccatgatatttatgataattatttaagagaagcattaactgggggaatggacagcatcttatctactttgtaatagcagcgtttaacgggatgtccctgggtaatacagaggagacactctaacaacaattattgaatcgataggataaaaaacatagagaaacagacatcaagagctcagaacaaatggaagagcaaggggccaggatgtaaggagattaataagctttggggattggggtgggaagtaaaaataaatttcatctgcttcc

SEQ ID NO: 47323 - DNA, 581 bp, Homo sapiens
gtacaatgagcttgaccttaattatattaaataagtagaaaagagttcttaaaatgtaccaaatggcagaatgcatcatactggaaaatgtatttatttagtacatacctaggagaagcttttcagagaatttgcttaaaaggcagactcttaatacattttgaacatatttcacaaaacaagtttatccgaagaaaatcttatagtaaaatacaaaacaggacattgttaacaacactgaacacactgagataacattctgttactgctgccgtggagtagaccagaaaaatctgcttatgccattgcccatgatatttatgataattatttaagagaagcattaactgggggaatggacagcatcttatctactttgtaatagcagcgtttaacgggatgtcccygggtaatacagaggagacactctaacaacaattattgaatcgataggataaaaaacatagagaaacagacatcaagagctcagaacaaatggaagagcaaggggccaggatgtaaggagattaataagctttggggattggggtgggaagtaaaaataaatttcatctgcttcc

SEQ ID NO: 47324 - DNA, 307 bp, Homo sapiens
cacacccrtcccaaagttgagagaaacctggacgtttcataaacaaaacccgccctccagcagcgtgtttatgtggaggcggcctcgcgtgtctgaggctggggtgtgtgtgctcgtgtgtgtgtgtacgtgcgccggggacacgcgatcatctctcaggtgtttgtggagaattttttttctctccagattttgtttggtttgtttttaataagggtcagaggtctgggcttctgtggggaaggggcaaaggtcatctcggatggccaggctgggaggtcctagggggaggggtcgcggggcctgg

SEQ ID NO: 47325 - DNA, 542 bp, Homo sapiens
gggctaatttttgtatttttgtagagatgaggtttcgccacgttgtccaggctggtctcaaactcctgggctcaagtgagcctccagcctcagcctaccaaactgctgggattacaggcgtgagccactacaccctgcctgctttttctttagggattcaggctctaagccaacaaatgatggtttgaatcgtgactctatcatttcctagctgtgtgtccttgagaaagtgaatcaacctctctgagcctcagttacctcatctggaaaagaaagttaataataaaatctccctccmcgagtaacagtgattaacagtgcatgtaaaacatctagcaccggcccagggcagagagtagccagcaagctctaatgttactccgttttgtcttattcagtctcattcagacttgtccaaagtcacctgtccaattttgggcagtgctgggacgctccccctgtctcttccccctccaatgctacttccctgtagtgggagagggtcccaggccatcatctctgttttgcagaggagaaccagg

SEQ ID NO: 47326 - DNA, 1723 bp, Homo sapiens
atccatgatgcttcagctgataagtgtcaggaacagcattttaacccagaaagcccagctctcaagtcagtgtgcctaaatactaggctacaaaaaaagcaaaaaaagaaaaaaagcatggaaaatataagcatgtggccatagaaacaacctcayagagtttgtttctgaaatagtctttgatcagaagtaatctttggttattctttgatcaggtaatgcttacctgtcttggtttccccaccaagtttcctaacttaacttcctcctcccacaattgctcatctggcctcatgatccagcacctaactgtgtaaggtaatttgtaattcctaaacaggtgctggcccagtcacataatgaacgacttccctgaggaaagagaggggatggagaaaacccagcatcccagtcctggtgtgttgctatatccccttacccattctgacatcttgacttgagccactgttttaggaaaggatgatgtgctggtatccactctgactacatacagagtttttccttcttacctagactgaaatggacataggcctcaatgtgcttttctccaaggcatataacaaatttatcctcacccttcatgggtgagataatttatttattttatggtggctcattctgatttgtgctaaatggtacaattttattatcagctttggaaggacggggttaggagagcaagtggaatccatttaactgccagcaacttcagcctgggacttacctgtgactctcataggtgcaaagtatttgcatgcttcatgatatcctcctacctaacatcagttcagattcccatagataacatttctcacccactatggaatttatctcttggctttagctactgaaacacagctacaagtaaatagcagttttgtgtttattgttgttattttcctttttctcatcaattctgtctttactaactcataaacaaaggctgtgtttccaagacccacttttccaactcctcctgaatttcagaatctcaatataaacactctgttctgaggtaagagctagtgcctagatccctgctactaaaacgtggctggccctcagatcatcagcattggcatcacctaagagcacaatggaaggcctcgaattagattgtacctactgaatcagagtatcgatttaaacaagatctccaggagattcttatgcagactggagttctggaagtacatggaaataataggaagttttaagtccctcataagagactgggcagggcagtgctttaggttaaacaacaacatcagtcctgttacagagctgagtactggattggaaataaccagatttgcaaacgttgcaggatgcacaaaaatagcagaccacttccctaaatgttatcacctccactcaggagggcttctgcaaaagaagcacaaaaaaagatagttttatattgttcatcctctcttctaaaagataccaactcatactttccaatgttatttttttaaactcagaaatgataatttaaaggagcaagatgaccctttgattctctcccatgtgtcgctgcagtgtgtagcctgtgagcatctccaaagcttttctccattctagaaagaagaatggcaacacacaccacctctacaatcaactgttcctaaggtttttaagagtgtctaggagacctgccagttcaccaagagaaaattctatctcttttgacagagccaca

SEQ ID NO: 47327 - DNA, 1723 bp, Homo sapiens
atccatgatgcttcagctgataagtgtcaggaacagcattttaacccagaaagcccagctctcaagtcagtgtgcctaaatactaggctacaaaaaaagcaaaaaaagaaaaaaagcatggaaaatataagcatgtggccatagaaacaacctcatagagtttgtttctgaaatagtctttgatcagaagtaatctttggttattctttgatcaggtaatgcttacctgtcttggtttccccaccaagtttcctaacttaacttcctcctcccacaattgctcatctggcctcatgatccagcacctaactgtgtaaggtaatttgtaattcctaaacaggtgctggcccagtcacataatgaacgacttccctgaggaaagagaggggatggagaaaayccagcatcccagtcctggtgtgttgctatatccccttacccattctgacatcttgacttgagccactgttttaggaaaggatgatgtgctggtatccactctgactacatacagagtttttccttcttacctagactgaaatggacataggcctcaatgtgcttttctccaaggcatataacaaatttatcctcacccttcatgggtgagataatttatttattttatggtggctcattctgatttgtgctaaatggtacaattttattatcagctttggaaggacggggttaggagagcaagtggaatccatttaactgccagcaacttcagcctgggacttacctgtgactctcataggtgcaaagtatttgcatgcttcatgatatcctcctacctaacatcagttcagattcccatagataacatttctcacccactatggaatttatctcttggctttagctactgaaacacagctacaagtaaatagcagttttgtgtttattgttgttattttcctttttctcatcaattctgtctttactaactcataaacaaaggctgtgtttccaagacccacttttccaactcctcctgaatttcagaatctcaatataaacactctgttctgaggtaagagctagtgcctagatccctgctactaaaacgtggctggccctcagatcatcagcattggcatcacctaagagcacaatggaaggcctcgaattagattgtacctactgaatcagagtatcgatttaaacaagatctccaggagattcttatgcagactggagttctggaagtacatggaaataataggaagttttaagtccctcataagagactgggcagggcagtgctttaggttaaacaacaacatcagtcctgttacagagctgagtactggattggaaataaccagatttgcaaacgttgcaggatgcacaaaaatagcagaccacttccctaaatgttatcacctccactcaggagggcttctgcaaaagaagcacaaaaaaagatagttttatattgttcatcctctcttctaaaagataccaactcatactttccaatgttatttttttaaactcagaaatgataatttaaaggagcaagatgaccctttgattctctcccatgtgtcgctgcagtgtgtagcctgtgagcatctccaaagcttttctccattctagaaagaagaatggcaacacacaccacctctacaatcaactgttcctaaggtttttaagagtgtctaggagacctgccagttcaccaagagaaaattctatctcttttgacagagccaca

SEQ ID NO: 47328 - DNA, 1723 bp, Homo sapiens
atccatgatgcttcagctgataagtgtcaggaacagcattttaacccagaaagcccagctctcaagtcagtgtgcctaaatactaggctacaaaaaaagcaaaaaaagaaaaaaagcatggaaaatataagcatgtggccatagaaacaacctcatagagtttgtttctgaaatagtctttgatcagaagtaatctttggttattctttgatcaggtaatgcttacctgtcttggtttccccaccaagtttcctaacttaacttcctcctcccacaattgctcatctggcctcatgatccagcacctaactgtgtaaggtaatttgtaattcctaaacaggtgctggcccagtcacataatgaacgacttccctgaggaaagagaggggatggagaaaacccagcatcccagtcctggtgtgttgctatatccccttacccattctgacatcttgacttgagccactgttttaggaaaggatgatgtgctggtatccactctgactacatacagagtttttccttcttacctagactgaaatggacataggcctcaatgtgcttttctccaaggcatataacaaatttatcctcacccttcatgggtgagataatttatttattttatggtggctcattctgatttgtgctaaatggtacaattttattatcagctttggaaggacggggttaggagagcaagtggaatccatttaactgccagcaacttcagcctgggacttacctgtgactctcataggtgcaaagtatttgcatgcttcatgatatcctcctacctaacatcagttcagattcccatagataacatttctcacccactatggaatttatctcttggctttagctactgaaacacagctacaagtaaatagcagttttgtgtttattgttgttattttcctttttctcatcaattctgtctttactaactcataaacaaaggctgtgtttccaagacccacttttccaactcctcctgaatttcagaatctcaatataaacactctgttctgaggtaagagctagtgcctagatccctgctactaaaacgtggctggccctcagatcatcagcattggcatcacctaagagcacaatggaaggcctcgaattagattgtacctactgaatcagagtatcgatttaaacaagatctccaggagattcttatgcagactggagttctggaagtacatggaaataataggaagttttaagtccctcataagagactgggcagggcagtgctttaggttaaacaacaacatcagtcctgttacagagctgagtactggattggaaataaccagatttgcaaacgttgcaggatgcacaaaaatagcagaccacttccctaaatgttatcacctccactcaggagggcttctgcaaaagaagcacaaaaaaagatagttttatattgttcatcctctcttctaaaagataccaactcatactttccaatgttatttttttaaactcagaaatgataatttaamggagcaagatgaccctttgattctctcccatgtgtcgctgcagtgtgtagcctgtgagcatctccaaagcttttctccattctagaaagaagaatggcaacacacaccacctctacaatcaactgttcctaaggtttttaagagtgtctaggagacctgccagttcaccaagagaaaattctatctcttttgacagagccaca

SEQ ID NO: 47329 - DNA, 970 bp, Homo sapiens
ttctaccttcatagtcttctgcatatctttggatgactttttctcctttggtgcaatatggtgcctctgtccagggcttctgccttcccttcccctctcctctcagttttcccccagtattttttgcccttgcaataagcactcagctttcgggttaattgtacaactgtgcaaaaaatatctgagaagaaaaaaaattcttctatcggccctccctccctcttccttctttcattcaattctgtacacattatgtggtcaaaaagggaaaattaatttatacatcaaaggaaaatgagatgccaggtatcctagaacttgaactgcatagttagagcaggagaacctaaaataagcaacaggcatgggtcccacaggttaaaacatgacatgcgtgaaagaagagctaagaaggctggtaccaggattgtgaaatttgcaagtgatgaagtgggtagggaagtagcaatttccttccttcccattgttgctttttccacccagacagggccagccctgcactgagaaatggggactaggaaggactttgttatcagacagcattaggaatgacaacttatagtcccacaaggaagtggattcgtgttagttcatctctgctcttaggttcttaggaatttgttcatgtctaaaagacacatccagatcagggactgctacatcagtctgaccttgttcaatttcaaatcaactcaatgttcaaaggaggatctgatactagcacggtagtgtgatgaacaagtatttttctttgaggacttataagtcatttttatttttaattgataaataatattttacatgagctcctagtgcttgggtagtagctcaaatgttcccaccacagttatgagaggggaaaaaatgtggaagtctgaggtgtataggytacaccctgagagggcaagcaagcctcccatacacccatgaaggttttctatatgtcata

SEQ ID NO: 47330 - DNA, 531 bp, Homo sapiens
cacaaccccaaagttatcaaagattatcagccactgcccctggtgctaaatctccactgtcctttggattctgttctctaaataaatgaataaatattattcgaagaaatatcacaaggttgtttatggaacaaagacatagtgtggtgttaggttaccaatttgcctttctgtgccygcaactctacatttaacaaacctctatctcacgaggctcttggatgactaattagatattgtctttgaatgtccgcaactttaagtctgaaagtttcctttttctttgaggtggagtctcactctgtcacccaggctggagtgcactgccgggatctcgcctcactgcaacctccgcctcccgggttcaagggatcctcctgcctcagcctctgaagtagctgagactatgggcacgtgccaccaagcttggctaatttttgtaattttagtatacgaggctttaccatgttggccaggctggtcatgaactcctgacctcaagtgatctgcctgccttggcctcccaaagtg

SEQ ID NO: 47331 - DNA, 531 bp, Homo sapiens
cacaaccccaaagttatcaaagattatcagccactgcccctggtgctaaatctccactgtcctttggattctgttctctaaataaatgaataaatattattcgaagaaatatcacaaggttgtttatggaacaaagacatagtgtggtgttaggttaccaatttgcctttctgtgcccgcaactctacatttaacaaacctctatctcacgaggctcttggatgactaattagatattgtctttgaatgtccgcaactttaagtctgaaagtttcctttttctttgaggtggagtctcactctgtcacccaggctggagtgcactgccgggatctcgcctcactgcaacctccgcctcccgggttcaagrgatcctcctgcctcagcctctgaagtagctgagactatgggcacgtgccaccaagcttggctaatttttgtaattttagtatacgaggctttaccatgttggccaggctggtcatgaactcctgacctcaagtgatctgcctgccttggcctcccaaagtg

SEQ ID NO: 47332 - DNA, 679 bp, Homo sapiens
ttctcagcaactggctataaatcaagtttccaccactcccagttttagttgcattcatttgctggaagagctcacagcacgcagggaaacactgacatttcccattttctgtattttagcagatattgcaaaaacttcagaaaaaacttttgggcccggcatgtggggaggggckcactgccttccaggaagtgttatccagaagctctctaaacccagtccttttgggtttttatggagacctcattctataggcatgatgggttaaaccataggctattggtgatcaactcaacctgaggctctcaaccctccctggaaattggggttgaggctttgccattctcagtctgagtaaaagaatttacacaaacggaattttaaaacagattagcatatctggaaacttaactagatgacggaattatctggagccacaccttgatattcctaacccgagcaccctcatccaacgaatgctccacccaactggctcccaagtctctacggggttccagagcaaaagaatgtttatacaacgcatatctccaccttttcttcaaagtcttttcgcttacacggaaagacttcttcaactgccatgcatcagggtcagggggaggtcttgttacaacacagatctgcggatctccggggtttgattgtggcaaggatgctg

SEQ ID NO: 47333 - DNA, 679 bp, Homo sapiens
ttctcagcaactggctataaatcaagtttccaccactcccagttttagttgcattcatttgctggaagagctcacagcacgcagggaaacactgacatttcccattttctgtattttagcagatattgcaaaaacttcagaaaaaacttttgggcccggcatgtggggaggggcgcactgccttccaggaagtgttatccagaagctctctaaacccagtccttttgggtttttatggagacctcattctataggcatgatgggttaaaccataggctattggtgatcaactcaacctgrggctctcaaccctccctggaaattggggttgaggctttgccattctcagtctgagtaaaagaatttacacaaacggaattttaaaacagattagcatatctggaaacttaactagatgacggaattatctggagccacaccttgatattcctaacccgagcaccctcatccaacgaatgctccacccaactggctcccaagtctctacggggttccagagcaaaagaatgtttatacaacgcatatctccaccttttcttcaaagtcttttcgcttacacggaaagacttcttcaactgccatgcatcagggtcagggggaggtcttgttacaacacagatctgcggatctccggggtttgattgtggcaaggatgctg

SEQ ID NO: 47334 - DNA, 679 bp, Homo sapiens
ttctcagcaactggctataaatcaagtttccaccactcccagttttagttgcattcatttgctggaagagctcacagcacgcagggaaacactgacatttcccattttctgtattttagcagatattgcaaaaacttcagaaaaaacttttgggcccggcatgtggggaggggcgcactgccttccaggaagtgttatccagaagctctctaaacccagtccttttgggtttttatggagacctcattctataggcatgatgggttaaaccataggctattggtgatcaactcaacctgaggctctcaaccctccctggaaattggggttgaggctttgccattctcagtctgagtaaaagaatttacrcaaacggaattttaaaacagattagcatatctggaaacttaactagatgacggaattatctggagccacaccttgatattcctaacccgagcaccctcatccaacgaatgctccacccaactggctcccaagtctctacggggttccagagcaaaagaatgtttatacaacgcatatctccaccttttcttcaaagtcttttcgcttacacggaaagacttcttcaactgccatgcatcagggtcagggggaggtcttgttacaacacagatctgcggatctccggggtttgattgtggcaaggatgctg

SEQ ID NO: 47335 - DNA, 679 bp, Homo sapiens
ttctcagcaactggctataaatcaagtttccaccactcccagttttagttgcattcatttgctggaagagctcacagcacgcagggaaacactgacatttcccattttctgtattttagcagatattgcaaaaacttcagaaaaaacttttgggcccggcatgtggggaggggcgcactgccttccaggaagtgttatccagaagctctctaaacccagtccttttgggtttttatggagacctcattctataggcatgatgggttaaaccataggctattggtgatcaactcaacctgaggctctcaaccctccctggaaattggggttgaggctttgccattctcagtctgagtaaaagaatttacacaaacggaattttaaaacagattagcatatctggaaacttaactagatgacggaattatctggagccacaccttgatattcctaacccgagcaccctcatccaamgaatgctccacccaactggctcccaagtctctacggggttccagagcaaaagaatgtttatacaacgcatatctccaccttttcttcaaagtcttttcgcttacacggaaagacttcttcaactgccatgcatcagggtcagggggaggtcttgttacaacacagatctgcggatctccggggtttgattgtggcaaggatgctg

SEQ ID NO: 47336 - DNA, 679 bp, Homo sapiens
ttctcagcaactggctataaatcaagtttccaccactcccagttttagttgcattcatttgctggaagagctcacagcacgcagggaaacactgacatttcccattttctgtattttagcagatattgcaaaaacttcagaaaaaacttttgggcccggcatgtggggaggggcgcactgccttccaggaagtgttatccagaagctctctaaacccagtccttttgggtttttatggagacctcattctataggcatgatgggttaaaccataggctattggtgatcaactcaacctgaggctctcaaccctccctggaaattggggttgaggctttgccattctcagtctgagtaaaagaatttacacaaacggaattttaaaacagattagcatatctggaaacttaactagatgacggaattatctggagccacaccttgatattcctaacccgagcaccctcatccaacgaatgctccacccaactggctcccaagtctctacggggttccagagcaaaagaatgtttatacarcgcatatctccaccttttcttcaaagtcttttcgcttacacggaaagacttcttcaactgccatgcatcagggtcagggggaggtcttgttacaacacagatctgcggatctccggggtttgattgtggcaaggatgctg

SEQ ID NO: 47337 - DNA, 585 bp, Homo sapiens
acacagatctgcggatctccggggtttgattgtggcaaggatgctgctggtgtcaaaaccacaacgtgggaaccacagaaccactagttggttttcagtgtttcagtgcatacaattcctaatatatctggccaagaaaacttgtaagttcttagattgtcccaaaggtggcgcatgaaatcaaatcaggagaacagtttcctacgaggtgtagcctgggaaggttgggggtgactgatggaaaggaggagtgaagctccgcccttcccgctgcgaggctgcgcccgaggctatttaaacccaccctggctggcctgtactcagatcttcgcagagcggagcagcggccggagcgtttggmggactctgcgtggacttggagctcacagcgtcttgcgacttggaagcggattcagaggacaggacagaacacttgggcaagtgaatctctgtctgtctgtctgtctcattggtcggtttatttccattttcttaaggagcacatacctcacaccacacacacacaaacacacacacacgcacgcaccgcatgcacacacacaaacacacacacacactaattca

SEQ ID NO: 47338 - DNA, 585 bp, Homo sapiens
acacagatctgcggatctccggggtttgattgtggcaaggatgctgctggtgtcaaaaccacaacgtgggaaccacagaaccactagttggttttcagtgtttcagtgcatacaattcctaatatatctggccaagaaaacttgtaagttcttagattgtcccaaaggtggcgcatgaaatcaaatcaggagaacagtttcctacgaggtgtagcctgggaaggttgggggtgactgatggaaaggaggagtgaagctccgcccttcccgctgcgaggctgcgcccgaggctatttaaacccaccctggctggcctgtactcagatcttcgcagagcggagcagcggccggagcgtttggaggactctgcgtggacttggagctcacagcgtcttgcgacttggaagcggattcagaggacaggacagaacacttgggcaagtgaatctctgtctgtctgtctgtctcattggtcggtttatttccattttcttaaggagcacatacctcacaccacacacacacaaacacacacacacrcacgcaccgcatgcacacacacaaacacacacacacactaattca

SEQ ID NO: 47339 - DNA, 585 bp, Homo sapiens
acacagatctgcggatctccggggtttgattgtggcaaggatgctgctggtgtcaaaaccacaacgtgggaaccacagaaccactagttggttttcagtgtttcagtgcatacaattcctaatatatctggccaagaaaacttgtaagttcttagattgtcccaaaggtggcgcatgaaatcaaatcaggagaacagtttcctacgaggtgtagcctgggaaggttgggggtgactgatggaaaggaggagtgaagctccgcccttcccgctgcgaggctgcgcccgaggctatttaaacccaccctggctggcctgtactcagatcttcgcagagcggagcagcggccggagcgtttggaggactctgcgtggacttggagctcacagcgtcttgcgacttggaagcggattcagaggacaggacagaacacttgggcaagtgaatctctgtctgtctgtctgtctcattggtcggtttatttccattttcttaaggagcacatacctcacaccacacacacacaaacacacacacacgcacgcaccgcaygcacacacacaaacacacacacacactaattca

SEQ ID NO: 47340 - DNA, 585 bp, Homo sapiens
acacagatctgcggatctccggggtttgattgtggcaaggatgctgctggtgtcaaaaccacaacgtgggaaccacagaaccactagttggttttcagtgtttcagtgcatacaattcctaatatatctggccaagaaaacttgtaagttcttagattgtcccaaaggtggcgcatgaaatcaaatcaggagaacagtttcctacgaggtgtagcctgggaaggttgggggtgactgatggaaaggaggagtgaagctccgcccttcccgctgcgaggctgcgcccgaggctatttaaacccaccctggctggcctgtactcagatcttcgcagagcggagcagcggccggagcgtttggaggactctgcgtggacttggagctcacagcgtcttgcgacttggaagcggattcagaggacaggacagaacacttgggcaagtgaatctctgtctgtctgtctgtctcattggtcggtttatttccattttcttaaggagcacatacctcacaccacacacacacaaacacacacacacgcacgcaccgcatgcacacacacamacacacacacacactaattca

SEQ ID NO: 47341 - DNA, 585 bp, Homo sapiens
acacagatctgcggatctccggggtttgattgtggcaaggatgctgctggtgtcaaaaccacaacgtgggaaccacagaaccactagttggttttcagtgtttcagtgcatacaattcctaatatatctggccaagaaaacttgtaagttcttagattgtcccaaaggtggcgcatgaaatcaaatcaggagaacagtttcctacgaggtgtagcctgggaaggttgggggtgactgatggaaaggaggagtgaagctccgcccttcccgctgcgaggctgcgcccgaggctatttaaacccaccctggctggcctgtactcagatcttcgcagagcggagcagcggccggagcgtttggaggactctgcgtggacttggagctcacagcgtcttgcgacttggaagcggattcagaggacaggacagaacacttgggcaagtgaatctctgtctgtctgtctgtctcattggtcggtttatttccattttcttaaggagcacatacctcacaccacacacacacaaacacacacacacgcacgcaccgcatgcacacacacaarcacacacacacactaattca

SEQ ID NO: 47342 - DNA, 206 bp, Homo sapiens
taaatggtgctggccaattgtagatggccatttctacatatggctaaccatatgtagaaagctgaaactggatcccttcctracaccttgtacaaaaattaatttaagatggattaaagacttaaatgttagccccctgccggccagccgcccgatccgggagggaggtggggggcagcacccgcctggccagccttcccggccgg

SEQ ID NO: 47343 - DNA, 532 bp, Homo sapiens
ctgcacaaagctaaaattaatttatttttgccatacaaggcaagtgtatcttgttgacrtctatagagaaaataaatcaccctctaaagaactgtttataaataaataattgatatctgaaaattcagaaaaagtaccactatcattttacttcccatattgcattgaaattatatgtttatgcttctcttgcttctacctctctgtgagttcaaggttagaaaaggagaaatttttatcttagcattcccaggaccaatcacaatatctaatacttagagcgtgcaatgttggttgaactgaaataaatctgatataaaaacaaataatgctttagggaagtgatttttcatttgagattattttctcagaaaaattaatatgaccaggttgtcatcctatgcaaacatcagtatgccttactgatttttcactaagttatatagcttatattataagacttttttatgggtgtctctacctacagattccaggcactaacaaacctgtagaaattcataaatttaatgca

SEQ ID NO: 47344 - DNA, 532 bp, Homo sapiens
ctgcacaaagctaaaattaatttatttttgccatacaaggcaagtgtatcttgttgacatctatagagaaaataaatcaccctctaaagaactgtttataaataaataattgatatctgaaaattcagaaaaagtaccactatcattttacttcccatattgcattgaaattatatgtttatgcttctcttgcttctacctctctgtgarttcaaggttagaaaaggagaaatttttatcttagcattcccaggaccaatcacaatatctaatacttagagcgtgcaatgttggttgaactgaaataaatctgatataaaaacaaataatgctttagggaagtgatttttcatttgagattattttctcagaaaaattaatatgaccaggttgtcatcctatgcaaacatcagtatgccttactgatttttcactaagttatatagcttatattataagacttttttatgggtgtctctacctacagattccaggcactaacaaacctgtagaaattcataaatttaatgca

SEQ ID NO: 47345 - DNA, 532 bp, Homo sapiens
ctgcacaaagctaaaattaatttatttttgccatacaaggcaagtgtatcttgttgacatctatagagaaaataaatcaccctctaaagaactgtttataaataaataattgatatctgaaaattcagaaaaagtaccactatcattttacttcccatattgcattgaaattatatgtttatgcttctcttgcttctacctctctgtgagttcaaggttagaaaaggagaaatttttatcttagcattcccaggaccaatcacaatatctaatacttagagcgtgcaatgttggttgaactgaaataaatctgatataaaaacaaataatgctttagggaagtgatttttcatttgagattattttctcagaaaaattaatatgaccaggttgtcatcctatgcaaacatcagtatgccttaytgatttttcactaagttatatagcttatattataagacttttttatgggtgtctctacctacagattccaggcactaacaaacctgtagaaattcataaatttaatgca

SEQ ID NO: 47346 - DNA, 611 bp, Homo sapiens
cttgatttttttataattctctttgaaaataaaatcaattcgtaaaataattgcatccccagaaaatcttaagtataggctttgagcaagaaaacacagttttttcyatcatatacctaccaggtgggagattatttatggcaaaagacaaagtcttcgcccttaagtatcctttctgaattaagaaaagcaattttttagtatagcttacataaaaaaacctcaatgtatatagttctctgagttgcctctcttgtcctccttgtaagcattttattggattttctttttctttttttaaacagactaaaaaagaagcacctgagtggtctaagaaacaaaagatgaagacctagtgttttggatgggaagcacctgtagaccattatatactcctgaagttctttttctgatggaaaacaaaattcagcttaatcgtgtactcagcattttttaaataacaatgtttatttgaactaatattaaattaacaaattcagtgtaatcaaaatgtgtaaagaacaatcaatatactttatttttttttctattttataaaataaatatatatgctatgctttaaattttggagctttcataaatgttcaatg

SEQ ID NO: 47347 - DNA, 502 bp, Homo sapiens
caagtgattctcctgcctcagcctcctgagtagctgggattacaggcgcccaccagcacgcccagctaatttttagtagagacagggtttcaccatgttggccaggctgctctcgaactcctgacctcaggtgatccaccccacccgcctcagcctcccraagtgctgggattataggcataagtcaccatgtccggcacttcctttatatttaaggagggcatctatagttgagaaaaagtttcccagatttttttttgtcacaaatagaatgaaatgcaatgaatagaacagaataaaaatgactgtcttcttaacccagaagcaatacaaaatatccatgcacttttcttctaataatggaaatgcatacatatcccttgataagaaaagaaaaaaagtcttaagctctaaacatttaaattattcagttccacagcttataatacagcagttacgttccttgttgatagcttcataaaaactactaagtagtttcaaa

SEQ ID NO: 47348 - DNA, 1818 bp, Homo sapiens
atatcaatttttgtgagatgatttatgagtttattaaaacatgctggaaacttaccttatattagatattttgctaagcacttcacgtttctccatgcaattcatacaaaatctatgattcccatactatgcttccttttcatttagcaggtaaggatctagaaagtgaggcttcaagacattaggtgttttgcctagtcctgaagccagtctgcagatgcctgtaccgggtcacctcacctgattgttaagacaagctggtaagcaaagcacatgctacctaatgccacatgccacacagtgtctgttccgtgaaacctacatatttacctttcagaaatggctatttctaatgtattagattggtacaaaagtcattgcagtttttgtcattaaaagtaatggccggctgggtgtggtggctcacgcctgtcatcccagcactttgggaggctgaggcgggaggatcacgaggtcaggagatcgagaccatcctggctaacacagtgaaaccccatctctattaaaaatacaaaaaaaaaaaataaaaaaattagccaggcgtggtggcaggtgcctgtagtcccagctacttgggaggctgaggcaggagaatggtgtgaaccaaggaggcagagcttgcagtgagctgagatcgtgccactgcactccagcctgggtgacagagtgagactctgtgtcaaaaaaggaaaaaaaaaaaaaaaaagccaaaaccgcaatgacttttgcaccaatctatttctgcagaccattagtggctagtgaactagattaaggtgtttaccaataaacaaaataaatagtattaccttcaaaccagtgtgtaaaagttttgtatgctttctccatcttcatccacgtttttcttatttggtaccttctaaaaatgctgcagggagctaacagatgatggaataaacaaaacactaataaacttgaagtaacacaatcttaggaacagagtaagacatttcagtgaatgcttgaacctgtggctataatttgatattatgtgaacattatttcctcgtattcttcagtattaaattgttgttagttcatgaggtgacatgaaccctgtggaaccctcagtattgggcaaaatggcaggagtgccagtgaatttgagtgacagctttctgacgagaccactgagtcactgatgtctgcctttctgatgagataagttgggtcaaagctgtccttactcagaacacactggtggttttcctgtttcttagttttaaaacttcaatttgtgctactgaagaatatgtcagaatatttattctgcaaaaaggacattaaaattgaattcacgttgggttttggttaatacaatttcatcaaaactccgcttttagactgtggtgaagttggtcttggaactggatgggcagagactacagatgccataaagcagggtcctcgtggaacctgcaaatagctgcctcaaccacgccctagctgtcggtcggtcagcaacgaccccagaccttctgctccgacaggggctcctcgggtgctagaattcggtgaaagaattgagcatggtacggattacagagggcttgccagaggtcagcaagttccaaacctgtctttttaaggcagtyctgaggctttaatgcgatgctgtatagaaaacaacttatgagtcagatctccacttcttcaaaagatagtctttaaatagaattcccaaataattatcttagcgacttgttttctgtcgttttgttgctattcaaagaaaataatacagaaacacattttcatactgaaatgaaagtttat

SEQ ID NO: 47349 - DNA, 1818 bp, Homo sapiens
atatcaatttttgtgagatgatttatgagtttattaaaacatgctggaaacttaccttatattagatattttgctaagcacttcacgtttctccatgcaattcatacaaaatctatgattcccatactatgcttccttttcatttagcaggtaaggatctagaaagtgaggcttcaagacattaggtgttttgcctagtcctgaagccagtctgcagatgcctgtaccgggtcacctcacctgattgttaagacaagctggtaagcaaagcacatgctacctaatgccacatgccacacagtgtctgttccgtgaaacctacatatttacctttcagaaatggctatttctaatgtattagattggtacaaaagtcattgcagtttttgtcattaaaagtaatggccggctgggtgtggtggctcacgcctgtcatcccagcactttgggaggctgaggcgggaggatcacgaggtcaggagatcgagaccatcctggctaacacagtgaaaccccatctctattaaaaatacaaaaaaaaaaaataaaaaaattagccaggcgtggtggcaggtgcctgtagtcccagctacttgggaggctgaggcaggagaatggtgtgaaccaaggaggcagagcttgcagtgagctgagatcgtgccactgcactccagcctgggtgacagagtgagactctgtgtcaaaaaaggaaaaaaaaaaaaaaaaagccaaaaccgcaatgacttttgcaccaatctatttctgcagaccattagtggctagtgaactagattaaggtgtttaccaataaacaaaataaatagtattaccttcaaaccagtgtgtaaaagttttgtatgctttctccatcttcatccacgtttttcttatttggtaccttctaaaaatgctgcagggagctaacagatgatggaataaacaaaacactaataaacttgaagtaacacaatcttaggaacagagtaagacatttcagtgaatgcttgaacctgtggctataatttgatattatgtgaacattatttcctcgtattcttcagtattaaattgttgttagttcatgaggtgacatgaaccctgtggaaccctcagtattgggcaaaatggcaggagtgccagtgaatttgagtgacagctttctgacgagaccactgagtcactgatgtctgcctttctgatgagataagttgggtcaaagctgtccttactcagaacacactggtggttttcctgtttcttagttttaaaacttcaatttgtgctactgaagaatatgtcagaatatttattctgcaaaaaggacattaaaattgaattcacgttgggttttggttaatacaatttcatcaaaactccgcttttagactgtggtgaagttggtcttggaactggatgggcagagactacagatgccataaagcagggtcctcgtggaacctgcaaatagctgcctcaaccacgccctagctgtcggtcggtcagcaacgaccccagaccttctgctccgacaggggctcctcgggtgctagaattcggtgaaagaattgagcatggtacggattacagagggcttgccagaggtcagcaagttccaaacctgtctttttaaggcagtcctgaggctttaatgcgatgctgtatagaaaacaacttatgagtcagatctccacttcttcaaaagatagtctttaaatagaattcccaaayaattatcttagcgacttgttttctgtcgttttgttgctattcaaagaaaataatacagaaacacattttcatactgaaatgaaagtttat

SEQ ID NO: 47350 - DNA, 1818 bp, Homo sapiens
atatcaatttttgtgagatgatttatgagtttattaaaacatgctggaaacttaccttatattagatattttgctaagcacttcacgtttctccatgcaattcatacaaaatctatgattcccatactatgcttccttttcatttagcaggtaaggatctagaaagtgaggcttcaagacattaggtgttttgcctagtcctgaagccagtctgcagatgcctgtaccgggtcacctcacctgattgttaagacaagctggtaagcaaagcacatgctacctaatgccacatgccacacagtgtctgttccgtgaaacctacatatttacctttcagaaatggctatttctaatgtattagattggtacaaaagtcattgcagtttttgtcattaaaagtaatggccggctgggtgtggtggctcacgcctgtcatcccagcactttgggaggctgaggcgggaggatcacgaggtcaggagatcgagaccatcctggctaacacagtgaaaccccatctctattaaaaatacaaaaaaaaaaaataaaaaaattagccaggcgtggtggcaggtgcctgtagtcccagctacttgggaggctgaggcaggagaatggtgtgaaccaaggaggcagagcttgcagtgagctgagatcgtgccactgcactccagcctgggtgacagagtgagactctgtgtcaaaaaaggaaaaaaaaaaaaaaaaagccaaaaccgcaatgacttttgcaccaatctatttctgcagaccattagtggctagtgaactagattaaggtgtttaccaataaacaaaataaatagtattaccttcaaaccagtgtgtaaaagttttgtatgctttctccatcttcatccacgtttttcttatttggtaccttctaaaaatgctgcagggagctaacagatgatggaataaacaaaacactaataaacttgaagtaacacaatcttaggaacagagtaagacatttcagtgaatgcttgaacctgtggctataatttgatattatgtgaacattatttcctcgtattcttcagtattaaattgttgttagttcatgaggtgacatgaaccctgtggaaccctcagtattgggcaaaatggcaggagtgccagtgaatttgagtgacagctttctgacgagaccactgagtcactgatgtctgcctttctgatgagataagttgggtcaaagctgtccttactcagaacacactggtggttttcctgtttcttagttttaaaacttcaatttgtgctactgaagaatatgtcagaatatttattctgcaaaaaggacattaaaattgaattcacgttgggttttggttaatacaatttcatcaaaactccgcttttagactgtggtgaagttggtcttggaactggatgggcagagactacagatgccataaagcagggtcctcgtggaacctgcaaatagctgcctcaaccacgccctagctgtcggtcggtcagcaacgaccccagaccttctgctccgacaggggctcctcgggtgctagaattcggtgaaagaattgagcatggtacggattacagagggcttgccagaggtcagcaagttccaaacctgtctttttaaggcagtcctgaggctttaatgcgatgctgtatagaaaacaacttatgagtcagatctccacttcttcaaaagatagtctttaaatagaattcccaaataattatcttagcgacttgttttcygtcgttttgttgctattcaaagaaaataatacagaaacacattttcatactgaaatgaaagtttat

SEQ ID NO: 47351 - DNA, 548 bp, Homo sapiens
tgaacgtataatagacaattatggcttataacatgtcttccgtgttacatataaaattttaacttacaaatttcccttttattcaaacttatttttatttatataactcaaatgtataggatacatttatattcaatgtacaaacattagccacaattagctttccttaacttcttgtctctcttatgtgataatgccagtatatctcttattgtatcaaaatatattcagtttttcaaaaaatgggtatatattgtaaagaagttctgcataattctaagagtaattctaatagagtccaggccaacctcagactcaygaaattattttactgtagaatttgcaacaaatgaataagaaaaagttgaaataaatgaagtatgataagtctttttggtaaggaatgcaatatttcagaagagtctgtacatattaatgtgatcaatacagaaagagaagagatattctaaacttgagtccagggcaattcaatatttagaacaaattttggatttattccaactgatagaagtttattggttcatcta

SEQ ID NO: 47352 - DNA, 559 bp, Homo sapiens
gatgcttttagttaaagattcaaactttgaacagatataagargttttagggtttctgtttcttattattttgattttagtaaatttcatttgtaaggatattttcctattttgtttaaacttgcaaatgtattgacataaaattgttcactatatttgtattatatttgtaatattttagggatctgtaattttttcttcttttattttttatttatagtattgtaatttgttttttcttttttctcaaataatcttgctatgcttgtataaattttattattatttaaagaaccatacttttgccttttaatattttttgattgaatatttttctatttcattgatttctaatcttatttttattgagtagtttatacacctagtaataccatacttcagatacatgggcaaagtttaaaagggccaatgaaccaatatggttttgatagcccaatgattattatgctagatgtaatgaagtaaataaattcaaagttaggctgtttggttcagagttttattacataaatggtggaattgtggggatgacaaggtc

SEQ ID NO: 47353 - DNA, 559 bp, Homo sapiens
gatgcttttagttaaagattcaaactttgaacagatataagaggttttagggtttctgtttcttattattttgattttagtaaatttcatttgtaaggatattttcctattttgtttaaacttgcaaatgtattgacataaaattgttcactatatttgtattatatttgtaatattttagggatctgtaattttttcttctttyattttttatttatagtattgtaatttgttttttcttttttctcaaataatcttgctatgcttgtataaattttattattatttaaagaaccatacttttgccttttaatattttttgattgaatatttttctatttcattgatttctaatcttatttttattgagtagtttatacacctagtaataccatacttcagatacatgggcaaagtttaaaagggccaatgaaccaatatggttttgatagcccaatgattattatgctagatgtaatgaagtaaataaattcaaagttaggctgtttggttcagagttttattacataaatggtggaattgtggggatgacaaggtc

SEQ ID NO: 47354 - DNA, 559 bp, Homo sapiens
gatgcttttagttaaagattcaaactttgaacagatataagaggttttagggtttctgtttcttattattttgattttagtaaatttcatttgtaaggatattttcctattttgtttaaacttgcaaatgtattgacataaaattgttcactatatttgtattatatttgtaatattttagggatctgtaattttttcttcttttattttttatttatagtattgtaatttgttttttcttttttctcaaataatcttgctatgsttgtataaattttattattatttaaagaaccatacttttgccttttaatattttttgattgaatatttttctatttcattgatttctaatcttatttttattgagtagtttatacacctagtaataccatacttcagatacatgggcaaagtttaaaagggccaatgaaccaatatggttttgatagcccaatgattattatgctagatgtaatgaagtaaataaattcaaagttaggctgtttggttcagagttttattacataaatggtggaattgtggggatgacaaggtc

SEQ ID NO: 47355 - DNA, 559 bp, Homo sapiens
gatgcttttagttaaagattcaaactttgaacagatataagaggttttagggtttctgtttcttattattttgattttagtaaatttcatttgtaaggatattttcctattttgtttaaacttgcaaatgtattgacataaaattgttcactatatttgtattatatttgtaatattttagggatctgtaattttttcttcttttattttttatttatagtattgtaatttgttttttcttttttctcaaataatcttgctatgcttgtataaattttattattatttaaagaaccatacttttgccttttaatattttttgmttgaatatttttctatttcattgatttctaatcttatttttattgagtagtttatacacctagtaataccatacttcagatacatgggcaaagtttaaaagggccaatgaaccaatatggttttgatagcccaatgattattatgctagatgtaatgaagtaaataaattcaaagttaggctgtttggttcagagttttattacataaatggtggaattgtggggatgacaaggtc

SEQ ID NO: 47356 - DNA, 610 bp, Homo sapiens
aattcccactttgaacaaacatacttcctgagtcttcctgacccctgcagacacttgagtttgtgagccctgacctggctgctaagcggtgtccgttggttttcctgttgcgcccggggtagaagtttgaagctgagcttcaagtgtttgtctttcccttgggagaaggagattttctagctcacctcacatagtgtgtagacatctgggttatcctcgcttctctagagaactatagctgagaaaatgagaagccatctctgaggagtaataacacacagtgctctgagaggttgaaacagaaactgaggaaaaaaaaccaagtttttcaaaggtggatttaaacatgatcagttttgccatatctgtgttttctctctcctactgcagggcttcccaaactttagttatacactgaagctttttttctcattcctcatgccatataaacgaaaacatattttctttaaattgactcacgatttcatttgaagtatctaaaatagacactgactatgactaccataagtggaaaattagtattatgtcccccaaataaaatgtaacattaaaaaataaacctgwaacaactgtaaagaaaggtcttacg

SEQ ID NO: 47357 - DNA, 556 bp, Homo sapiens
aataagggaaacgggagcaatgtttcagcctcagtttctatttataatactgacacaaaaagaatattgctggatacatagcatggatctagatagagcagctccaggagttctcacggtgacagcccccctcactcacagacaccatgtgataytaatagggcttagacacaaagcactgaattcccaaagcattgaagagaaagacagctctcagtctgagtaaaaccgtattgagagaagaaaagaggttgaaagaatcttaaagacaaattcagattacatgtaacattggtcaaattgaccagaaaatattcttccaaagaagttcttctctaaacaccaaaagtgcacagctactctcagcatgagaaatacaagtattatgagaaagagggcttattctgagcagaatttccatctctgctgctctcccatctgccggccgttggattgggaatctatactggaacacacctgacaacctccaccagcactttttgatgaagaattggaattcactctattcacatagtagaattatatcagagattgc

SEQ ID NO: 47358 - DNA, 617 bp, Homo sapiens
aaagaatagaaacraataaaacagaaagcaataatcaaacatataattgaagaaatgttctgaattggagaagagaaagggttttgaaaggtgttaatatacaccaggcaaaaaataataataataacagcataccaactttagatgtgcagtggcaacatttaaaaattttaatattaaaaaattttttaaatccagttgaaagattatcagcaaatcacaaaaattaagctgatttaaaaattctccatgacaacatcagaattaaatgaaatgatttgtatggcatttgtatctgaataacctaatacacattcactaaatggaagccatagaaaatattctcagatccataagaaaaaagaaaacaagtgactcataaatattctggaaatattttgttcagttttggttttcgtttttcaagactattgagatataattcacaaataaaaagtatatctatttagaggtatagaatgtgatgttttgatacaatagtccccccttatctgtagggcatacattccaagattctgagtggatacctcagaatatcattccaagatacctaaagccgtggatagtaccaaaccctaaatatattgtcttttcat

SEQ ID NO: 47359 - DNA, 617 bp, Homo sapiens
aaagaatagaaacaaataaaacagaaagcaataatcaaacatataattgaagaaatgttctgaattggagaagagaaagggttttgaaaggtgttaatatacaccaggcaaaaaataatartaataacagcataccaactttagatgtgcagtggcaacatttaaaaattttaatattaaaaaattttttaaatccagttgaaagattatcagcaaatcacaaaaattaagctgatttaaaaattctccatgacaacatcagaattaaatgaaatgatttgtatggcatttgtatctgaataacctaatacacattcactaaatggaagccatagaaaatattctcagatccataagaaaaaagaaaacaagtgactcataaatattctggaaatattttgttcagttttggttttcgtttttcaagactattgagatataattcacaaataaaaagtatatctatttagaggtatagaatgtgatgttttgatacaatagtccccccttatctgtagggcatacattccaagattctgagtggatacctcagaatatcattccaagatacctaaagccgtggatagtaccaaaccctaaatatattgtcttttcat

SEQ ID NO: 47360 - DNA, 617 bp, Homo sapiens
aaagaatagaaacaaataaaacagaaagcaataatcaaacatataattgaagaaatgttctgaattggagaagagaaagggttttgaaaggtgttaatatacaccaggcaaaaaataataataataacagcataccaactttagatgtgcagtggcaacatttaaaaattttaatattaaaaaattttttaaatccagttgaaagattatcagcaaatcacaaaaattaagctgatttaaaaattctccatgacaacatcagaattaaatgaaatgatttgtatggcatttgtatctgaataacctaatacacattcactaaatggaagccatagaaaatattctcagatccataagaaaaaagaaaacaagtgactcataaatattctggaaatattttgttcagttttggttttygtttttcaagactattgagatataattcacaaataaaaagtatatctatttagaggtatagaatgtgatgttttgatacaatagtccccccttatctgtagggcatacattccaagattctgagtggatacctcagaatatcattccaagatacctaaagccgtggatagtaccaaaccctaaatatattgtcttttcat

SEQ ID NO: 47361 - DNA, 617 bp, Homo sapiens
aaagaatagaaacaaataaaacagaaagcaataatcaaacatataattgaagaaatgttctgaattggagaagagaaagggttttgaaaggtgttaatatacaccaggcaaaaaataataataataacagcataccaactttagatgtgcagtggcaacatttaaaaattttaatattaaaaaattttttaaatccagttgaaagattatcagcaaatcacaaaaattaagctgatttaaaaattctccatgacaacatcagaattaaatgaaatgatttgtatggcatttgtatctgaataacctaatacacattcactaaatggaagccatagaaaatattctcagatccataagaaaaaagaaaacaagtgactcataaatattctggaaatattttgttcagttttggttttcgtttttcaagactattgagatataattcacaaataaaaagtatatctatttagaggtatagaatgtgatgttttgatacaatagtccccccttatctgtagggcatacattycaagattctgagtggatacctcagaatatcattccaagatacctaaagccgtggatagtaccaaaccctaaatatattgtcttttcat

SEQ ID NO: 47362 - DNA, 564 bp, Homo sapiens
ccgtctcaaaaaaagaaaaaaaaaagaagcctcgcatgtggagactgaaactcttcagcagtcatgttgaaattcttaataactttatctttgattttgtgttttgtaagtggcctctgatgggacaatggcacatgctccaggagtaccccatgacaggttctcagccacctcctgcctcacctgcccagcaactgtaactgtcctctgcaccctgaaggggcaccagtgccaggtgggacaggttcagtgtatttcccaagagcctgggaaggtctgtatttgccccagaagtatcttgtgccccaggaagcatggcaatgaatagctaatttaaaacaccatgatagtgtggccggggctggttcctgcgggtgggttcgtggtcttgtgktctcgttgacttcaagaatggagccggggatcttcgcagtgagtgttacagctgttaaagatggcacggacccgagagcgagcagtagccaggttcatggtgaagagcaaaaggacaaagcttccacagcctggaaggggaccccacaagttgccactgctggctgggtg

SEQ ID NO: 47363 - DNA, 566 bp, Homo sapiens
gccagcatcatttttcttttgagatttgttgaaaatttggagaggcatgatgaaactgaattgtgatgagccctgaatgtcagcagaaggatttgaactttatcccaaaggcattagaaagtgattcgaagcttttgagctggtgaatgcttagtaagagtaatctgataaaccagaagctaggagactggcttggcaggtattgtgatatttgaggcattggatgataaattttaggaaagggtgcagttytgggaatgggaaagataaattgatcttaaaatatttctgggggatgtaccaagggcatttgatagttgatgggacaatagaggagaaaaaaagggacagtttttgtttaacctcagttatctagaatgccactaatccaatgcactcacatttactgaacacccactgtgttcaaggccctacacatttcatagagcagatccctcagatatacaactggacctcatcaagaactgaatcaatacaaacgtcctcattgggatattagctaactataaggttttctggatattgatcacatttattgacatgtt

SEQ ID NO: 47364 - DNA, 563 bp, Homo sapiens
acaggaaaccagggttagggagacgaggtcacctgcccagggtcatcggatcaacaagcagcaggggcagatgtgggcccaggcctcctggttccagcctccgtggacacctggccccagcatcccgcatttcccaaatgtacagggcatgtttgttctgcctgggaacgtttccactggagtctgaccaacgtcacaaggtcagagtcacccagggtctttattagacactactggggaagyggagcccagaagggtcacccggccatcaccattgcagtgatgcaggcatcgctatcctgagcactctctgtgtgcctggaagctcggggagaggaagtgcctttcccaggcctcccgtcctctgctgcagagcctggccgtgtagccaggtggactttggagctccgtcacatgagaattcagtcccgtgcatgctgcacggtcccacctgccagtcagccggggctcacaggcctgtgctgccctttggacttagaaggggaaacacctcatggaccatgcagctggggcagagaagatggttctggtcggtgcccaca

SEQ ID NO: 47365 - DNA, 882 bp, Homo sapiens
ccctgaacgatggctcttgttatatttgctcagtgctccagctgtgaaagcacagtcaggaccccagtcttgtgagtcacagagtcctccagggagctcacttctgaygcatgggaaaggcaatcctaacttccagtggcctggacctcctccctcctgggaatgctccctgtggctgagacatggaagtggttttgaaagcactgagtcagactgtggggacacccaggagcctgtttttaatgaaaacagcaagcagcagcagagtcactaaatacagcagagcttcagccgtctccttgcctggtcaggctactttgtaaacgtatctctaatagaagaaatcagggagatggaaattaggcagtggctggagattacagaccttgggcagcagggctgtgcatgcagcagagctgtggatgcagcagaatagaactagactctgttagcactggaaggacccaaagtcctgtacatctctttctgtacagaggtgtacggaaaactgccctttgtgtacaaactgagcaaaccaaggcccagataggggaagacactgactgaagggtgtatgggccggactggggtaacagcatgagtctcctgatgcccatccatggggtcatggcctgagtggtattgcaaaagtccatcccaaggatggcggccaactcttggccagttgggatgaatgaagtcaagggtccaagttgcctgcctacctggtgattggggagggcaactgctttgggtggtgtggctatcctgtgtgcccatcagcccttggccatcccacaggcatgtcccaacctggggcagtaggacacagagtggccttcacatctgatgctgccctgtgcaccagttcacaattcacag

SEQ ID NO: 47366 - DNA, 882 bp, Homo sapiens
ccctgaacgatggctcttgttatatttgctcagtgctccagctgtgaaagcacagtcaggaccccagtcttgtgagtcacagagtcctccagggagctcacttctgacgcatgggaaaggcaatcctaacttccagtggcctggacctcctccctcctgggaatgctccctgtggctgagacatggaagtggttttgaaagcactgagtcagactgtggggacacccaggagcctgtttttaatgaaaacagcaagcagcagcagagtcactaaatacagcagagcttcagccgtctccttgcctggtcrggctactttgtaaacgtatctctaatagaagaaatcagggagatggaaattaggcagtggctggagattacagaccttgggcagcagggctgtgcatgcagcagagctgtggatgcagcagaatagaactagactctgttagcactggaaggacccaaagtcctgtacatctctttctgtacagaggtgtacggaaaactgccctttgtgtacaaactgagcaaaccaaggcccagataggggaagacactgactgaagggtgtatgggccggactggggtaacagcatgagtctcctgatgcccatccatggggtcatggcctgagtggtattgcaaaagtccatcccaaggatggcggccaactcttggccagttgggatgaatgaagtcaagggtccaagttgcctgcctacctggtgattggggagggcaactgctttgggtggtgtggctatcctgtgtgcccatcagcccttggccatcccacaggcatgtcccaacctggggcagtaggacacagagtggccttcacatctgatgctgccctgtgcaccagttcacaattcacag

SEQ ID NO: 47367 - DNA, 584 bp, Homo sapiens
tcccagcgactcaggaagctgaggtgggaggatcatttgatcccaggatttcacagctgcacttagctatgattgcacccctgcactcaagcctgggtgacagagtgagattttttttgttttagatctatagatacccaggattgtgggtgacttttgtcccctgctgcaggagtaggctggggcacattgtttcaaggatcagttggggagcygtccccatcctatgcttttgggcattgtgaggccaggcgagcagcaagtcaagggggaagcaaggctgggcattgcggtggagcacactgggaggatcacactgatgaagcgtgtccctcctttccttagtggtgtctatcgaagatccctttgaccaggatgactggggagcttggcagaagttcacagccagtgcaggaatccaggtagtgggggatgatctcacagtgaccaacccaaagaggatcgccaaggccgtgaacgagaagtcctgcaactgcctcctgctcaaagtcaaccagattggctccgtgaccgagtctcttcaggcgtaagtgtcttcccaggcgagcagctttcccgcagct

SEQ ID NO: 47368 - DNA, 555 bp, Homo sapiens
agaccagcctggccaatatggcaaaaccccgcctgtactaaaaatacaaaaatgaggccgggtgcggtggctcatgcctctaatcccagcactttgggaggctgaggctggtggattacaaggtcaggagtttgagaccagcctggccaatatgttgaaaccccatctctactaaaaatacaaaaattagccaggcgtggtggcaggcacctgtagtcccagctactcaggaggctgaggcaggagaatcacttgaacccrggaggcggaggttgcagtgagccaagattgcgccactgcactccagcctgggtgacagcgcaagactccatctcgaaaaaaaataaaaaattagctgggcttggtggcatgcgcctgtaaccccagctgctcaggaggctgaggcatgagaatcgtttgaacccaggacgtggaggttgcagtgagccaagatcacaccactgcacttcaccctgggcaagagtgagactccgtctcaaaaaaaataaagagatgagaaactgtggttgccatctgcaccttaagaggtcccat

SEQ ID NO: 47369 - DNA, 495 bp, Homo sapiens
aacacataaattttaagtgttttctacctacatcagcaacatcattttagcaaaatacggagaggacattcaagtgccaagatgggaaataaaataaataggaaaacagarttcaaaatagggggcatgcttggataaccaaactaattattgagagatgccattgtgacttactaagctgcttgttagttacctaagggaagacaagttggaaagtgaagaaatatgtgccaagtccaaaactgaggatcggaccagaaaagcactatttcgagcaaatgctatgtctttcatcattcaactattgagcagttacaataatgtaagccaaacactatgaatcattagagataaaaacaagatgaatatgacttagttgacctcctcaaggaacttataacttggtagtggtttttgtgactggtagccttaacacaacttttacaaactgccagattcaattgaagatgtggatgagggaataggaaacaacca

SEQ ID NO: 47370 - DNA, 495 bp, Homo sapiens
aacacataaattttaagtgttttctacctacatcagcaacatcattttagcaaaatacggagaggacattcaagtgccaagatgggaaataaaataaataggaaaacagagttcaaaatagggggcatgcttggataaccaaactaattattgagagatgccattgtgacttactaagctgcttgttagttacctaagggaagacaagttggaaagtraagaaatatgtgccaagtccaaaactgaggatcggaccagaaaagcactatttcgagcaaatgctatgtctttcatcattcaactattgagcagttacaataatgtaagccaaacactatgaatcattagagataaaaacaagatgaatatgacttagttgacctcctcaaggaacttataacttggtagtggtttttgtgactggtagccttaacacaacttttacaaactgccagattcaattgaagatgtggatgagggaataggaaacaacca

SEQ ID NO: 47371 - DNA, 495 bp, Homo sapiens
aacacataaattttaagtgttttctacctacatcagcaacatcattttagcaaaatacggagaggacattcaagtgccaagatgggaaataaaataaataggaaaacagagttcaaaatagggggcatgcttggataaccaaactaattattgagagatgccattgtgacttactaagctgcttgttagttacctaagggaagacaagttggaaagtgaagaaatatgtgccaagtccaaaactgaggatcrgaccagaaaagcactatttcgagcaaatgctatgtctttcatcattcaactattgagcagttacaataatgtaagccaaacactatgaatcattagagataaaaacaagatgaatatgacttagttgacctcctcaaggaacttataacttggtagtggtttttgtgactggtagccttaacacaacttttacaaactgccagattcaattgaagatgtggatgagggaataggaaacaacca

SEQ ID NO: 47372 - DNA, 602 bp, Homo sapiens
ccatccatccatccacccatctattcatccatccatccatttatcatcagctccatgaggacaggaattgtgatgttcctttcaccactctaactccaaagtctagcacacttgtaaatatttacaggattataggacaaaccctgatctgtgttctgccataattctccccaggagaatcctcttggagtcaccaggggtgaaggagagggggccttsgctgtctttaccctctcgtgctggtcaaagtggcctccagctgagcatcttagcagccctagagccagcacatcctctccatgtgctgcgttggggaaccccttgcagcaagagttgacaagaatggggtgagggtagagagatgagcagagaaaaggaacttagtgttgcagctctgtgcacgtaagggctggtgcagttggcaaaatataaacaagacagaggacaggcttaggaaacgcatggccaagggcatcatacagggaaactgggtgaggctccatgcttccaggcccacagccccgggccttatatcagcagaagccccacccttgttaaacctgaggggccttggaagagcccacagccagtctgtctgggca

SEQ ID NO: 47373 - DNA, 1829 bp, Homo sapiens
  misc_feature (1)...(1829): n = A,T,C or G
tgcatgtttcccagaacatttattgttcttaatgtgcaaaaatcaaaacaaacatctgatttgctattgaaaagataaattattctaaatcacaaactatttattttcacacttttaaaagatttgttttgtcatacacacacaaacacacacacacatacctctccatatatagagatagatagatatatcatatatctatctctccatatatggagtctatatagacagatagatatagatagatatatccatatctacctatatgtgtacctatatatatcttcttcagtaggtggaaataatttgcttgtattatcctagggtgctttgattgtactgggaataaaaacagattttccttaaagagcaatattatttcatgatatctggtggccttctcagaaataaaaacaataattcgaaatagtttaattctcagatcaaaaatatctcagaataataatgatcatatcacgtaactagatggactgcgacagaacttacccaggcaattgtttagctccctactgctgaagttgttacagtttaatgaactgacaaaaagcaaaagaggaaaaccacattctagatctgtcccttaaaagcatctaaaaagataccagattgaatgaaacaaggcaacatatttagtgttcctgagaacttttgatttagtgattgtaattggctgagatctatttcagttaaatctggtatcttaccatttttaaagctattgtttatcatacttcatattttctaaggaaacagacctcatcctttgcaaattgctcatgaaaagatcaacaaactggtcacaaacaataacaaatgtaagacactaagtgctttctaaaatggaaagcagtaacaacaaaaaaaggcaaaatgtcctattacaaaaaactgtaatgctaatagataattttgcaatttacaaattgtctctatctctagaaacaaagaatttcaggaaacatctgagcactatggacttataatttacatcttttgaaagttccggtttgttctcagcatatattaaatttcacaagattgccaaacttctttaatataatttcaaaaaataaacacaaaaactctacaactaaacatgcaaagtatattataataaatgtgcatatattagaaagaagataannnnnnnnnnnnnnnnnnnnnnnnnnnnnnnnnnnnnnnnnnnnnnnnnnnnnnnnnnnnnnnnnnnnnnnnnnnnnnnnnnnnnnnnnnnnnnnnnnnncttgtggctgtggttactgtcagtattgccttattttcccatcactagtgattgtgacatgaataaaattaacttatgtcaccatgtagatcattatatcctgaattaaggttagatttcgagaagcattatgaatttaaggaattcatctagccttagttctaaaccactttataataaaaatctttattttcccaccatagggactctataccactcttttagggctaattcacagttgcasttggacgatagcaaactgttcaatgcaaaatgctgattttatcttaaaatccatggtcatctacattgatttcaactggacagacttcaatttcatttcttctcaggaaaacctacttgcatggctttaagaatattaacttctatgtcttggataataaacgttggctgtttccccgtcaggttttggtagcatcgtggtgcctgtataaagagttcaaagctgtatagccatctgtaacagctctatttctttacaagttcagtgctcagataaaaattctaaacgttgcagccctagacacttgatgactctattacc

SEQ ID NO: 47374 - DNA, 627 bp, Homo sapiens
tggmttcctgtggtaggatttttagccaatttgttcaatttgtccttggagtctttccaaggacagtcagaatgaaatcaggggttgcagcattttaatatctctttgaagttaagcattgctgaagcactcagaaatctgcaaatttgccaactctcctgagggcttttgtagagtgttagtagttaattaattactccctagtaatcaactttgcagtgtaatggcaactgtttattttattaactttatcaaatgctgaatgaaagattaacatgcactatgtgctgtgttcagttgtaaacttttactaaatttagcagaaacatgtagacacaaataataaaaaagttacctgaatatagatctgagaaaaagggagcttaaacaatagaatagtcacagtacatttaaacttttgtttttggtaatgttaaatttgatatactcaacatattacctcgggagtagtagtagagtacataactcaatttccgattctgctattaagggccatgtccgtattacatcataaaatacatattttgtgaaggaacaaacaaacatgtttctagcctcagaaggaatatattcattgataaaactatgtttgctctttttgatctg

SEQ ID NO: 47375 - DNA, 547 bp, Homo sapiens
caatatacatggatcatttcattcaaatctcacaagttccacaagcttaaaaggcgggtgcatcattatctccattttgcaagggctttgcaaaatcttgtgacttgcctcagctttcacagcaagtagccatactctgaaacctgtgaatacattatctccactaaaaaaaaaaatgaaaaagctaattctgcttatcgcttattacagtgatagtctctgtttccwtttattaccctttttctaacacatttttaaaagctaaaaacactgttgaattcaaagactaggcggctgtttggaataaaatcaaataaaatatatttgattaattacttgatcaattattgtgctagacaaacttctagcagtatttctgccctattatatcagtcaacaaacataaaacaaaatgctataatacaacaagttggtgaaacaaatgttgcaagctgagagttggccataggttggctagtgagcatcaatggcaacctggggttctctatatggttccatgggcctgcaagtagtaaagggtaaaagg

SEQ ID NO: 47376 - DNA, 568 bp, Homo sapiens
ctgacatcagctaagggtcctcctccttaaaggtttaaatttcactaaatataaatttaaataatgcaaatcagcctaactagatgtacaaaagtattcccaggttttaagaatcttcagaatcttagcgttaaaaggggtggctaagagttcttttggtaaagttttgacaccccactatatggaccaggaaaccaagggtgaattctctgagattttcctgctgtgtataaagaaacctctgctcttttcggaggagaaaatactgaatgcttatatatcctagccagccaaacgtgttaaaaaggcttgaaaaactatcctagaaaaacaagtgttgtgtttccattcctcggggcatctgtttatcttttaaaaatcctggcattttgcacattgtcattctgattgatttcataatagtaacaattaggaacatctgggccccagtcttcctgtctaccttaactttcagaacacttttcatatattctaaacattttcttttgtataaaaattgaaaagttctaaaagaacatttaaaattagggtacaytgtgaatattaa

SEQ ID NO: 47377 - DNA, 560 bp, Homo sapiens
ccacgaaagtgagaagcgcgtgcttcggtgcttagagaggccgagaggaatctagacaggcgggccttgctgggcttccccactcggtgtatgatttcgggaggtcgaggccgggtccccgcttggatgcgaggggcattttcagacttttctctcggtcacgtgtggcgtccgtacttctcctatttccccgataagctcctcgacttcaacataaacggcgtcctaagggtcgatttagtgtcatgcctctttcaccgccaccaccgaagatgaaagcaaagatcggctaaataccgcgtgttctcatctagaagtgggaacttacagatgacagttcttgcatgggcagaacgagggggaccggggacgcggaagcctgcttgagggaggaggggtggaaggagagacagcttcaggaagaaaacaaaacacgaatactgtcggacacagcactgactacccgggtgatgaaatcakctgcacactgaacacccccgtcacaagtttacctatgtcacagtcttgctcatgtatgcttgaacgacaaataaaagttc

SEQ ID NO: 47378 - DNA, 592 bp, Homo sapiens
ataactaacacataggaatagattgaaatagatatttctccaaaacagtgccagatgaatgcttcaagcggctcatgcaacctgtctgagacttaatgaccattgcttttgtccatgttcaattgaattcaaatttaatatttaactttcccccacaaccttatatgttttttgtgagaaatgaatggcatacaatatgaaaagtggtttcctaatgctcggctttgtggaaagcctgctggggcatgctctgattgttcgtatttattacttttttctcttctttcaccccagaaggtctttcatgtcacagtgactcatgtccctctataattrgacaatcatatagaaaacaaacatgttcttacatttgtaaagggcacttgagcttcctgttagctggactttgtccttgaaacagagagatcctgtaggaaagagtccccaggcacactcagacatagctaaaaaggttgtagttagggcttatttattcatcacatatatataacgcagttttccagacacttggcctaattcagtgaagacaacagatgacagttcctgcgccacaatttacttcagggagtca

SEQ ID NO: 47379 - DNA, 632 bp, Homo sapiens
aataggctggacctttacaaagatctgaaagatgcaaataacatgaagaaggggcatataagattctctgttggacctacttcgatagccttgggttgggctgagcatggtggcacatgcctgtaatcccagcactttggaaggccaaggtggaagggctgcttgagcccaggagttcaagaccagcctggacaacatggcgagaccctgtctctacaaaaaattttaaaaattagctgaacatggtggtgcacacctgtagtcccagctacttgggaggctgaggagggaggattgcttgagctcaggaagttgaagctgcaataagccatgtttgcaccactgtcctccagcmtgggtgacaaactgagaccctgtctgaaaaaaataaccttaggttttattaaggatcctgtcatttctcttataaatgacccatgaaatggtatttgagtctaaaacataaaaataaaaataaaccttaccataatccctgactgtcattttggagtgaatggatgagattttctgattggatgggctgatctcaactggcttgagaaattagcaggttgacttttctcctgagtagacctgcttattttagtgtgtcttaggccacctcatctgta

SEQ ID NO: 47380 - DNA, 564 bp, Homo sapiens
cacagggcagagagccagaggggagagtggatctggaggggaacaagaaacagtaggcctttatcttttgcctgcctggcaattgttcacagatgctctctaatttaaacatcacaaaaatcctaaagtaaagattattttctgtatttgcatatgagaaaactgatgatcaaatctattactgtaacayatccattaatgtaagtcatcacaataatagattgaagaaaaaatctaagtacgtgcaggaaaaaagcactagagaaaatttaatttccaatgatgatgaaatgttttagcaatctttttatagatagaaggggactttcttaaattagtaaagaatatatatttttgtggttttttttttttttgagacagaatctcactctgtcacccaagctggagtgcagtggcatgatctcacactcactgcaacctccacctcccggattgaagggattctcatgcctcagcctcctgagtagctggaactacaggctcatgccaccatgcccagctaattttttgtatttttagtagagacaggatttcactgtgttg

SEQ ID NO: 47381 - DNA, 564 bp, Homo sapiens
cacagggcagagagccagaggggagagtggatctggaggggaacaagaaacagtaggcctttatcttttgcctgcctggcaattgttcacagatgctctctaatttaaacatcacaaaaatcctaaagtaaagattattttctgtatttgcatatgagaaaactgatgatcaaatctattactgtaacacatccattaatgtaagtcatcacaataatagattgaagaaaaaatctaagtaygtgcaggaaaaaagcactagagaaaatttaatttccaatgatgatgaaatgttttagcaatctttttatagatagaaggggactttcttaaattagtaaagaatatatatttttgtggttttttttttttttgagacagaatctcactctgtcacccaagctggagtgcagtggcatgatctcacactcactgcaacctccacctcccggattgaagggattctcatgcctcagcctcctgagtagctggaactacaggctcatgccaccatgcccagctaattttttgtatttttagtagagacaggatttcactgtgttg

SEQ ID NO: 47382 - DNA, 145 bp, Homo sapiens
aaaagaagaccaaagggcttagaatgtatctatgtaggagcatagctatgatcattgtgataaagttgagttggagaagartttttaggggagatgtttgaaccctcaggaggattcaaactgtaactatttccattttcctaag

SEQ ID NO: 47383 - DNA, 546 bp, Homo sapiens
aagatttgatcgtttaaattycttacagatttcattatcttctgctctggattcttttatgttattggactttgtttcatgtccacagaactctttgttggtttaatggattttcatttttgctttttagttccatctctaattactttttaatattttacttaactttttaaagtctgtttgggaacttctgccaccacactttttggcaatctgccttttcagaattatttaaacatctactgtttcattgatgatggctcaaaaaaatagggaacctgtaggccaataagcctttgtacccaaacaagctagagttgttctgccctatttgtctcccacacacgaggaaacctctgctcctccaggttgtacagtggcctgagtgcagtgtcactagctggagaggggagtgaggactccctggatgtctgatgtgtggcaaacctcctgggttagtttcagccccggacaaaagagttctgatgtggtcttaagtgtccacctggctggacggcagtagccagttaatcaaagcaactgtaa

SEQ ID NO: 47384 - DNA, 578 bp, Homo sapiens
agtaaaaaaattcaaccctttcttctctttaaaatagactcactggagagtttccaaatgcagattgatgattatgaggggcagttattgaagatctggaaaccatgacctggagtcagtaatgccagtggtttttyaatccagctgagccctgctacgcactttgtggtggtaaatgaccattatacagcttaggctcatgtgtgtgcttttgaattataggtcatatattgattaatttaaatctataataagcttgatgaattctgtgaaatacaaggaaaccgggttttgtaatccaataaattaatagggacatagaaaggatgcgaagtctctaaattcacctcaatatgaacttcacgagagccattagtcacatgatcaaatgtcttatgttgaccttcaagataaaaccagtgcttcaaaacccaatataaaaagaagccatattgatgattatttccaatttgaatttttattttttggggattaagactttcccctcacaagctgttgcttgcagaaatgcacttgcaaataagaatctgaaacctgtttttttttaaaagtacaga

SEQ ID NO: 47385 - DNA, 561 bp, Homo sapiens
atattaccaaaaaatgagctataaagctgaaagtaactttctcaactaccaataagaaacaatttttgattatgctaaagaaaaaatatttttcattctttcaatttattgttatgaaaaagctatcaaaggctacagctgcaaaatattaaaaaaatgagatattattatggggatagatgaggcagttaaataaaaatgtgttgttttttcatgttttgtaatacctttgatatttgtcagctttttaaaatttggaatttcaaaaaaatgggaaatattttctctttctaaataaatattcagtgttgtacttagtctatgttcttttgcttttgtagaatattggaaattgtatgagcttcatgtttcacaaaacccagacctgctgcttccttactgtcttccatgatattktttgctctaatctttctgtgaccaaatcctaccaccctattgccaacactcccagaagacctgggattagtatgaagttaatcttcaatccaaaaaaatccatcaactctcctgcaatccattaacaggaaaatgttcagattg

SEQ ID NO: 47386 - DNA, 560 bp, Homo sapiens
tggcacagaatagagaacccagaaacaaatccacacggcggacagtgaattcattttcaacaaaggttccaggaacatacactggggaagacagtctcttcaataaatgctgggaaaactggatatccatatggagaagaatgaaaccatcacttgccatatgcaaaagcaaaattaaaatggattaaatagattagagtcagagagagatttgccgatactgctgaccttggagatggaggaagaagccacaagccaaggaatgcagtgttattttaagattcctccttttcaatccatgttgggcaagatggcccaatagaaaatkgtccagtcttgcagctccaagcaagaccaatgcagaagggggtgatttctgcatttccaactgagatcaggagattccctcatgtgcctacacctccagagccctgggtttcaagtacaaaactgggccactgtttcggcagacatcgagctaacttgggcagtttttttcataccccagtggtgccttggactccagcaaaataaaactgtccactccccttgaaaggggg

SEQ ID NO: 47387 - DNA, 532 bp, Homo sapiens
tactagggcaaatttttttatttagttacaactgggtgtctacttatcartctctagtaaagagtaattaatccttctctgcactctatttctaccctgctccttaatgctgtcagaattttctgattgccctatagacattgacaaacaatacaatacaattctaaggtctccctagagaagacagaaggatctattaaagatatgagttacatcatgtccttcatctaaacagaactgggcggtggttttcaaaaatattggaaagaaccagctatttgaaatgttaagacaattccatgcatagaaagggtaggtacagaggttctgacttctagcagagcttggaacaatataagagcttcaagaagaccagtaaacaagcctttccgttgtgtcaggccagtgccactggagtaaagtaatcataggaggtggggaataaaatgatgctggataactgaagaagtgcagtgagtcattgtagtctatagtaaaaagaatgactcctattattattttagggatttaa

SEQ ID NO: 47388 - DNA, 532 bp, Homo sapiens
tactagggcaaatttttttatttagttacaactgggtgtctacttatcaatctctagtaaagagtaattaatccttctctgcactctatttctaccctgctccttaatgctgtcagaattttctgattgccctatagacattgacaaacaatacaatacaattctaaggtctccctagagaagacagaaggatctattaaagatatgagttacatcatgtccttcatctaaacagaactgggcggtggttttcaaaaatattggaaagaaccagctatttgaaatgttaagacaattccatgcatagaaagggtaggtacagaggttctgacttctagcagagcttggaacaatataagagcttcaagaagaccagtaaacaagcctttccgttgtgtcaggccagtgccactggagtaaagtaatcataggaggtggggaataaaatgatgctggataactgaasaagtgcagtgagtcattgtagtctatagtaaaaagaatgactcctattattattttagggatttaa

SEQ ID NO: 47389 - DNA, 531 bp, Homo sapiens
gaaaaataaatgaaaatattctagatgaatgagcatgcaaggacatcagaaaaaaaattttaagtgaataattataaaatagcatatagtatagttggatcataccctgttaactgatgtgaagtagggattataagagaagagagggacagagagagagctacttataaaacgagtcttagactctcttagtgactctaagagattagaccgaagcttttcatcatgccaatgtaataacacttaaacattttaaactgaaacttttttcttggctagttttttttttwaattttataacctttcattcctggagccagtagcactaattacctctgacaagtggctcagaatatctacaagaactaaattaaataaaatgttagataaattcacagcaatcagtctgatatcagaagaattttatttgtgatagctagacacttggggaagatatggcttgttttacactcatattgatcaaaaactaaaagactagaattcctagaagctaactgtgatgatggacat

SEQ ID NO: 47390 - DNA, 1731 bp, Homo sapiens
tgcattagtaatagaagtatcaaatgtgaaagcgtgcaaacaaatctcaatatctatcaaagttattctctttcattttcattgtgtataccttcttgagtagatgaaaacaagttggtactgaagcctatatgtgaggaacaattaggaagttcagttgtaatgtgggggtaaattttaaaatgctattggtgtgcactgcataggtggttgctatccatcatgttatgtgtgtttaatggtaaaattatttactgctctaaaatgcctgtttcttcatggaaacatggatttaatttaaaaaaagaaaaaataataaaatgaaatgcttgtttctgacacataattaaaaaaattacatatttaattatgtttggagagctaattttttttaaggtttcttgcctgggttcattgttccatctgtgtgggttagagaacacgtttaaagttgcaaatggttctgaagtctcccttgtgtgtgtgtgtgtgtgtgtgtgtgtgttgttgttggtggtggtggtggtggttttattttatttgttaccaggcctctctcttatctcccacatttgtgtgtagtttcatttcacccagagatgtatagaaaacttacatcagaccaatgggctctcacttctggtgattctgattacatttcttttttcactgttcctcttgtatgattaccatgttgaactaacaaacctgaaaatttttattgtccatttccaaataagttggtcacttttagctattcaaacattgattctcacctccctcacagaactccttgccagcaaaatcactattttttactccagatctaccctggtatgactagaatttttgctaacttagaaggagatataggaataaatgcaaatagtcccaggcaagcagtccacagattcacttcatccttaagtaatgcttctgcaattttcaagaattacatatcagtttgttttctgcctttggttaattttcagagttccaaagtattttatttttgacatttttctccaattttattctcaattttaatagaagagaatcagtgcctcatgccataattactagcatttctctatagatggcctaattttaatatgaaagtaaatatgatcttgatttataaaatattaggaaaagaaaattaaggaaattagaaaagtaaatgtgatagacacattgcaatatacaaatagatatctatagaacctgaagttaactagatgttttctttaaagaaaaaaaaaaacttttattttaagttcaggggtacaagtgcaggtttgttacataggtaaatatgtgtcatgggagtctgttatacagattattccatcacccaggtattagtagtctagtacctattaagcctagtacctattagttatttttcctgttcctccccttcctcctaacatccaagctctaataggccctagtgmatgttgatcctttctatgtgccaatgtatcctcatcatttagctcccacttgtaagtgagaacatgtggtatttgattttctgtttctgcattagtttgctaagaataatggcctccggctccatccatgttcctgcaaaggacatgatctcaatcttttttatggttgcatagtattccatagttgtatttgtaccacattttcattaaccactttatcattgatgggttgattccatgtctgctgttgtgaatagtgctgcaatgaatatat

SEQ ID NO: 47391 - DNA, 586 bp, Homo sapiens
cctcccagagtgctgggattacaggcgtgagccactgcgcatggcctacttgggaccatttgtcatgtgatatactaggaatccaactgaaaatcatgtaaatttcgtttttgttttgtttttttgagagtgttttgctctgtcacccaggctggagtgcagcggcacaatctcggctcactgcaaccttctcctcctgggttcaagcaattctcctgcttcagcctcccaagtagctgggattacaggtgcctgccaccatgcccagctaggtcttttttaagacagkgtctgcctctgtccccaggctgaagtgcagcggcacaatctcggctcactacaacctctccatcccagactcaagtgatcctcccacctcagcctcctgagtagctgggacaacaggcacaggccaccacatccggctaatcttcgcatttttggtaaagatggggtttcgcctgcgttgcccagggtggtcttgaactcctgggctcaagcaatcctcccaccttggcctcctaaggtgctgagattacaggtgtgagccacctcacccagcctctaaatcatgtaaattttaaat

SEQ ID NO: 47392 - DNA, 586 bp, Homo sapiens
cctcccagagtgctgggattacaggcgtgagccactgcgcatggcctacttgggaccatttgtcatgtgatatactaggaatccaactgaaaatcatgtaaatttcgtttttgttttgtttttttgagagtgttttgctctgtcacccaggctggagtgcagcggcacaatctcggctcactgcaaccttctcctcctgggttcaagcaattctcctgcttcagcctcccaagtagctgggattacaggtgcctgccaccatgcccagctaggtcttttttaagacagggtctgcctctgtccccaggctgaagtgcagcggcacaatctcggctcactacaacctctccatcccagactcaagtgatcctcccacctcagcctcctgagtagctgggacaacaggcacaggccaccacatccggctaatcttcrcatttttggtaaagatggggtttcgcctgcgttgcccagggtggtcttgaactcctgggctcaagcaatcctcccaccttggcctcctaaggtgctgagattacaggtgtgagccacctcacccagcctctaaatcatgtaaattttaaat

SEQ ID NO: 47393 - DNA, 1759 bp, Homo sapiens
atgcatttattcattcatccaccatttatcaagggcctttttcaggcaaagctctgagccaggcatggcacgcaactaaaatatacacaaaaaagtgtgtttgtgctttcaaataacttaggtaagaaaatcaggtacatagcttcatacataagagttctctaattttgtgaattcattcaccaggtgacacatgattagattgtttccactrtagggccagtgtgtgtggatatatgttttcatttatcttaggtagataactaacagtaaatttgctggattgagaagtagtgtaactttacagtgttttcaccccttggaaaacacaaacactatatacagaaaatagcatgataatggctatgatagtattacacattaaatttgatggaagcaagattgggctggaggaaaaagtaacacgaatagaaagtgtggataggtaaggaaacagagtaaggtttttctaaatcagtgatgacaaaaagagaaaagacataattttaaaacagcatgatgaatacctcaaagaaaggcgatacaccaagagatcaggtaatgggagtttggcctctgctcatggttatgcagtttgtaaaactggcccaattcctggaacttaacagagggctgaatctggcccagagaagtaatatgtaattctctttccttttctcttttctttttcttttctttctctttcttttttttctttctctttctttctctttctctcttctttctttgtttctttctttttctttttttctttcttctctttctctttcttcctctctctcttcctcccttcccttccctttccttcctctctttttcttttactttcctttcttctttttctttcctttcttttctttctttctctttctttttctttctctttctttccttccttccttcctttctttctctctttcttctttctctctttctctctttctttctttctttctttctttctttccaaaaaggtactatcaaatataccgatgtctacttgtggcatcttttaaaaatcatctgttgaggctaaatgatacctttttacagatttgcacaaggatattatatagtttagctgcgcttcctagtctagaaagatttctatgtcattaaaaggacttttaatgttctaatttaatgctttccacatttatccatgtcaagcaatcttcagaaagttaggaagcttgcataatgcactaaggtaagcactaagcttttcttagctgaggcactacagcaaccatgggacccttgctgtggccctgagaggggaggacatcaatatctaatcacacttgtcacccctttgtgaagaatgttgaatcaagaaagggagagtcattgatagataggttttaaaaaatatttctcagaaattgagtagcatgttcagttgaggcactctggccacaggctagaggacaggtatgagtctggcaggacatgagagaagaaaaagaatcaagagattaagccagcaatccaggaaagacaatgataagcatctgccctgaacaaaagtgtgggaaagaaaaataaagactgaatttaagaaccattgaggaggaaaatcagcatggcttaatggagaaagagagtgtggaatgattcatagtttatttatttcatttaatagctaagtttaggagggacaccttcactgagatataaaatggaggagaataaaacacatttgaaagtatagcttggatgataaatattacaatgc

SEQ ID NO: 47394 - DNA, 1468 bp, Homo sapiens
tgcctacctgaggcgtctgcktaagtaactcatggtgtcaggcatatagcagattctcagtaaatattcattgattgaatactcatgtggaagattgtatttgatttgtcctttttctgttcctatcagacagttaataaggagagatgggagaggctagaaagaagaaattggcaatttaaaaatgtcctagccgttgattgctataatacctcccaccaggttcagcacatttagaaacccttcagagctacaggaaacatatggaaaaaaaatgtactatacttgctttagttcatatttcatggctaagaaaaatacaagccattctttttgtctgttctgtggtaaaacagcaatggtaaagtccaggctcacaagcaagcctatgggaggtgataaggcacctctgactcatgcatacctgggagcttaatcagtgctgaagccatactccaaccctcaaccactgcctttcttactagggctgttgaaggactttacaaacagcactttagtttacaaatatcttctatgagtagctactcactctcccaaaaggctagtgcagttgataggacagatcttattgttccgttttatagttgaagaaactaaaattaagaggggttacttggctgatatgtattcacactagtacttggacctgcagtcttcccaacttaggctatggtgctttcagggattactctcattgggacttacaaaccatataaccaggaatggcaaaatctaagtgccaagcatttggctaatgttattttggtgtcattcccattggcccatgaggaaatagagcttagaaaacatgcccaaagccatttggcgacttaccactttctctcttggccagggctcgagggaaacacaggcccatatgcctgcaggggtttttttttttttcccttccccgcactcactgtggggatctattcaatcacacggcattgcagcggagaagagcagcagaagcagccctaaggcactgtcttcaagaagggttgggccagccgggcgcgtggtggctcacgcctgtaatcccagcactttgggatgccgaggtgcgcagattacctgaggttgggagtttgagtccagcctgactaacatggagaaacctcgtctctactaaaaatacaaaaaattagctggctgtggtggcacatgtctgtaatcccagctactcaggaggctgaggcaggagaatcgcttgagcccaggaggtggagattgcagtgagccaagattgcgccattgcactccagcctgagcaacaagagtgaaactccgtctaaaaaaaaaaagaagggttgagccaccactcatgcagtgagttagttaccagctaagcactgccaagactcagagtcttgcttctggtctgtcatgctgacacctgcatctcctgattcacagagtattgacacaagacatcaaacatttatag

SEQ ID NO: 47395 - DNA, 1468 bp, Homo sapiens
tgcctacctgaggcgtctgcgtaagtaactcatggtgtcaggcatatagcagattctcagtaaataytcattgattgaatactcatgtggaagattgtatttgatttgtcctttttctgttcctatcagacagttaataaggagagatgggagaggctagaaagaagaaattggcaatttaaaaatgtcctagccgttgattgctataatacctcccaccaggttcagcacatttagaaacccttcagagctacaggaaacatatggaaaaaaaatgtactatacttgctttagttcatatttcatggctaagaaaaatacaagccattctttttgtctgttctgtggtaaaacagcaatggtaaagtccaggctcacaagcaagcctatgggaggtgataaggcacctctgactcatgcatacctgggagcttaatcagtgctgaagccatactccaaccctcaaccactgcctttcttactagggctgttgaaggactttacaaacagcactttagtttacaaatatcttctatgagtagctactcactctcccaaaaggctagtgcagttgataggacagatcttattgttccgttttatagttgaagaaactaaaattaagaggggttacttggctgatatgtattcacactagtacttggacctgcagtcttcccaacttaggctatggtgctttcagggattactctcattgggacttacaaaccatataaccaggaatggcaaaatctaagtgccaagcatttggctaatgttattttggtgtcattcccattggcccatgaggaaatagagcttagaaaacatgcccaaagccatttggcgacttaccactttctctcttggccagggctcgagggaaacacaggcccatatgcctgcaggggtttttttttttttcccttccccgcactcactgtggggatctattcaatcacacggcattgcagcggagaagagcagcagaagcagccctaaggcactgtcttcaagaagggttgggccagccgggcgcgtggtggctcacgcctgtaatcccagcactttgggatgccgaggtgcgcagattacctgaggttgggagtttgagtccagcctgactaacatggagaaacctcgtctctactaaaaatacaaaaaattagctggctgtggtggcacatgtctgtaatcccagctactcaggaggctgaggcaggagaatcgcttgagcccaggaggtggagattgcagtgagccaagattgcgccattgcactccagcctgagcaacaagagtgaaactccgtctaaaaaaaaaaagaagggttgagccaccactcatgcagtgagttagttaccagctaagcactgccaagactcagagtcttgcttctggtctgtcatgctgacacctgcatctcctgattcacagagtattgacacaagacatcaaacatttatag

SEQ ID NO: 47396 - DNA, 524 bp, Homo sapiens
ttgccctaatatttcttctgactttcttttaccagtcatgtttgtctgtttgcattaaaatcttaaaataaagtatctcgttaggtaaaaagaaccaaatggaaatggacatcacctgggatagttatcataggaaagaaaaaaaaatcaaaatragtggttctcaaagagggtaaggtgtaaatgggacaaagcagtggacttcccaagataactgtgaaatttttttgtaaggttttatctctttagaagactagagtccttgaaataaaggaaatttcaagtgaaactctccacattcacagttttcttttggggcaatatgtcaagatgaaaatatttgtattcagggtaaaagagtgatgtgtaaattgggagaccaagaaatattattttacagttatctgccactgtcagccccataaatacactgtagttactctgaaaccttgaagttctggaagatagaattgatccttctgcctttccaggcagtcatttctgctcactcacctacccctgct

SEQ ID NO: 47397 - DNA, 588 bp, Homo sapiens
gttcccagctcttattgagactaaaaccccagataagtctaatgcttatacttgttctttttgaccttttcctcaatttctttctgttatcttttttcttgttcttctcgctcgtttctgtgtagaggagacagtctctcactttgttgcccaggctgcagtgtgcagtagcaggatcatagctcactacagtctcatactaccyggctcaagtgagactcccacctcagcttcctgagtagttgggatcaaaggcttgtgtcactatgctcagctgattttttgctggggtcaggggcagggtttgactttgttgtccaagcttgtcttgacctcctgggctcaagtcatcctctcacgtcagcctcccgactagctgggattagaggcacatgtcatcacgcacagctaattttttaaaaattgtgtgtagagatggggtctctctatgctacccaggctggtctcaaacttctggcctcatgtgatactcctccctcagcctcccaaagtactgggatttcagacatgagccactgtgcctggccatttttttacttttgttaaaccctatatgacctaatattc

SEQ ID NO: 47398 - DNA, 526 bp, Homo sapiens
gttgtatttgtatcrctgtctccctggatatccttcacaatactagaattccctctagacaaagcattgctgttaaaaccttaattcttcccttgttaaatacttgcgttcttttgatttcagcataggtctaaagggtatgctttcctgacacacattctattttgtcaatgactacttcaggaagaagtcaaattgcaatgtgtatgggatgggttatttacattttattttaatagaagctattataattcattgtattctacaataattaggttttaatgtagtcattggcaacaaacttaaactcaaggaagggtagcagtgactcagagaaagctgaagatagcttgacggttacaaaaaatgtttacaaaggaaatatggtttatgaataaatcaaataaatttggaaaaaatattcactggaagaagtcttcaacaatgaacaggtacaatgtgatccttttagcttcctactgacatcaagcttattttgtcttaaaataatcaaatgtttatggca

SEQ ID NO: 47399 - DNA, 650 bp, Homo sapiens
ctctagtgcaaattatgataatgacagactgctggtcttcagctttccagtctgttcactgtcctgccaatcctcaacatttctatcaatgcctttggactaaagacaaatctgattctgctactgttctacttaaattcctccttttctaatatctcacaggctaacaattaacttcttagaaaagtctgtatgtgcttcttgattccatgcttgtctacatgtttagtctcatacaaataacaaaaaagtgctgcaagcatcctaaactgtatgaaacataccaaacgagacatgtcccatcagacccttcaccttttactcaggytttttctttcagccaatactgatctcctctccttttggtgcctcctgtttctactttagaaatctaattgagggtcttctactctatgagttcttcttaaattgctgaagtaacgtttgtagctccattatatattctcctaattgctagaacatcattttgaaatggaaaataacatatactgtaattgtatatttatgaagctttcatcccagctcttccgtgagtgcttgaaaagcagagatacaacctatgcttggcacagtatttgaggtgtgatagagagcaggggtttagtaaatgttagtttactgtattaatg

SEQ ID NO: 47400 - DNA, 1029 bp, Homo sapiens
attgaccgtgtcttataatacctacatttcagcttcactttgttctccacaaagtgatacaaaagtcacttgaaaagtcacctttatgtccatagtatggttaggtttaggagtatttcttgaaagagtcaatcacttttcaatcttaacaataaaagggaagataagatagtaaaatccatctgtaatcgtctattgctccactgaccacaaaaactttacaaagttctcaactactcacaagtctgcactacttcagaaaaatggaatctgagccagaaacgtggattagtgcatgttcatacagaaacagagacttaatagataatgttgaaacaactaactagccattttggaaaactaaaaaattagatccccaatgatgaatgcatcactcaaaaataaatttcatatggatcaaatatttcaatataaaacaccmcaaaagtaaaaaaaaaaaaaaagtcatgttttctttttgtcataatcttggatgatttctaagcatgacaaaaaaaatatctataagcagccaggcgtggtggctcatgcctgtaatcccagcactttgggaggctgaggtgggtggatcacttgaggtcagcagttcgagaccagcctggctgatatggtgaaaccctgtctctactaaaaatacaaaaattagcaggacatggtggtacatgcctgtaatcccagctactcaggaggctgaggcaggagaattgcttgaacccgggaggcagaggctgcagtgagccaagatcacgccattgcactccactccagcctgggcaacagagcgagactccatctcaaaaaacaaaaacaaaaataaaaacaaaaacaaacaaaaaaaaattataacaattaaaagaatatttgatatataaaaacaaaacatggcaaagcacacatacataagcaaagtcaaaagacaaatcactagtttgattaagaaaatattcaaagtacataatcagaggattaatttatttaatatagaaaaagctctaaaaaataataacc

SEQ ID NO: 47401 - DNA, 1029 bp, Homo sapiens
attgaccgtgtcttataatacctacatttcagcttcactttgttctccacaaagtgatacaaaagtcacttgaaaagtcacctttatgtccatagtatggttaggtttaggagtatttcttgaaagagtcaatcacttttcaatcttaacaataaaagggaagataagatagtaaaatccatctgtaatcgtctattgctccactgaccacaaaaactttacaaagttctcaactactcacaagtctgcactacttcagaaaaatggaatctgagccagaaacgtggattagtgcatgttcatacagaaacagagacttaatagataatgttgaaacaactaactagccattttggaaaactaaaaaattagatccccaatgatgaatgcatcactcaaaaataaatttcatatggatcaaatatttcaatataaaacaccacaaaagtaaaaaaaaaaaaaaagtcatgttttctttttgtcataatcttggatgatttctaagcatgacaaaaaaaawatctataagcagccaggcgtggtggctcatgcctgtaatcccagcactttgggaggctgaggtgggtggatcacttgaggtcagcagttcgagaccagcctggctgatatggtgaaaccctgtctctactaaaaatacaaaaattagcaggacatggtggtacatgcctgtaatcccagctactcaggaggctgaggcaggagaattgcttgaacccgggaggcagaggctgcagtgagccaagatcacgccattgcactccactccagcctgggcaacagagcgagactccatctcaaaaaacaaaaacaaaaataaaaacaaaaacaaacaaaaaaaaattataacaattaaaagaatatttgatatataaaaacaaaacatggcaaagcacacatacataagcaaagtcaaaagacaaatcactagtttgattaagaaaatattcaaagtacataatcagaggattaatttatttaatatagaaaaagctctaaaaaataataacc

SEQ ID NO: 47402 - DNA, 560 bp, Homo sapiens
taagtaaagaatttgtgagatatttgattgagacattagttaaatataggtagatgtgtttgttttaagcagtatgtagctagaaactgtttcttcagctgtatttacattaggtgcctgtcagtaggtactcactaaatacctgtcatgcaagactaatcaaasaacaagcaccagtagaacaaaaatattctggagaaatgatgttctaaattctgccatattgtgttttattttatggcataatattcagtgcaacaacaacaacaacaacaaccagtagatctaactggccagcttctgtggatcactatgttaagattggcctagaagtaagccagccaagccagaattctcagtacaaccatgttgcataacaaggagtttggctgaccattgtccctggttcttgggagggatcctataagtccttggaattttccaattgataggaatgtggttattcatggttggtccctagatagtttcagggttggggctggccatgctgagaagtctaaggatgtgaccgtggggttggggctttgagccatgtcata

SEQ ID NO: 47403 - DNA, 600 bp, Homo sapiens
tttttgtagctgttgtaaatgtatttttaatcttaacccccctctaaggaagcaatttataattgaagacaattcaagaggtattttccttctagtcctgcaaaactcaatcttaggttctgtaagcctcttgtaggatacagtccacaccaaataatatctgaagttatccatcttagtagagatatcactttgctgaacctcaagacacagatgtactaaggcttagccacagtgaacagttgcccagatctttcatctaactccaaggagatttttatccatctccttttggctgaggaggactaacaactccctttacatttctaatcagttccagagacatggggtctttgttartgttttttaaaaatatcgatcactttgagcaattgaggaaatattcattaccaaggcaacaaatataagtgctcctctcgaagccaaaaatattccaaaggtctgtaggctgaagtacataaggctgtaggtctgcaggctgttttcatatatcaaatataccaaaggtctgtaggctgttttcattcaaaattatgtaaagcatcctatcaataaaatgcagaactgcacatgggaatg

SEQ ID NO: 47404 - DNA, 593 bp, Homo sapiens
tgaggcaatgaagtcaaaattgacctaatgagatgttgatacgattcttttcctgaagctttaatacatttacatttttatttttggaaactcactttcattctgtacatttatactgtacctattttgtgttgtcagatgtacgtgtgtgagttactgattttcttcctcacacatggagacacttggcagccaatcagcccaccaggaaataggtctgaagtactctcttagaattcagaagcacaagtggtgcccctgacagcagcctaagtgtgagtttctgaagtcagagccaaatagggttctgtgcagcctgaagattatatatgaatgtttttaactttgggtttttttttttttttttttttttttttgagatggagtctccctctgttgcccaggctggagtgcagtggcgtgatctcggctcagcacaacctccgcctcccagattcaagcaattytcctgcctcagccccccgagtagctgggactacaggtgtgcgccaccacacccagctaattttttaaaaatatttttagtagagatggggtttcaccatgttggccaggctgatctcgaactcctg

SEQ ID NO: 47405 - DNA, 572 bp, Homo sapiens
agaaaagacaaaaccaaaaagaagagaaggagggaaagagggtggcaaaatataatgcacagtgacagtgaattactgcacactctcccctgggaaggtgggagtctcagaagaggagcgaggctggggtgggttgggggtggtcctaggccaagcctccactttcccatctgcacaatgggcaaatgacatccccttcagtggctgtgagattagaggtgataggaacaaattgacccgaccagctcctggctggaaaagatgcctgagtgtgacgggtattattctcgccagaggccaagaatgcagccttgctctggggggtccccagccagggggagagctggttggtcacagggtctaagagggaggggatgtctcatgagcacttccaagcacctcttcattccgtcccccttatacctagaagtttcccttcccccagccctacactcatcctacagatggggaaactgaggctctgagggtggtgyagcccagaggctgaaacatggaatctggggtccagtggacctgggttggcaccacttacgcctatgggacctggacgg

SEQ ID NO: 47406 - DNA, 1346 bp, Homo sapiens
tcaagagtgaagcctcctgcttggtgggggacagtgactctgtccttggtcatgtgggcttgagcaagaagcaactccgtggcaaccaagaggagctaagagatgcccctctccttgttgccagggcatccccgtgttcaactgcacaacctagaggaagatggctcccaaccataaccagcatgggcaactttggaacccaaacctgtagcttctctcttttatttattcttttctccaacacatcagtggccctccagctgttgagtggggagagtgacaggttcaatgagaaggacattcagatgcatccacagaggacttttcaccagtactcatgtctcctttctggatcctcagccctctgttcttttcaaagtcatgaagctttcattgtgtcctatgctttggaaactgctgaggatcaggactctttgccttctctagagatctcaccatcagctttcttattcctggctctttccagtgtcctttrgagaatgtcaaccctggggactagaaagggaaggcaatgttgtttgggagctaagccaaggctgcaaattctgtgtgaagcctgtccctgccatgactggtgcacgacctgaggtgagttacataatcctggtcacctcaatttcttcatgtatgaaatggttaagttcttccttcataggcttgttgtcaggaaaaatgagatactgcatgaaaagctcttattccaatgtctgaccaccagtgtagaagatgcaggtaagcagtcatcagtcctgaggcgggctgccctgtgtggtggagatgccccatgcaccaggatccctgaggcattgcccctccccaccatggaattattgcatccacccctgtgcattatatcgtcatagaacagccttagtgccctacccagggaaactgagtgagaaaggacaaggcatagccccacaatgttttcagttcctggatcccaggtctgtgcaaaaacagaatctagaaccaagactctaagactctgggaaacaggtctgagatctccgaagccaggaaggtgcctgagtgtcatttccagaatctgtcagaaacagctccgagctctcaggggcacccgtcgctgagatcactgaggcagggggctgcttcctggcattgttgagtttcattctgttcctcagaagaacagtgtgttttgcttggagtttgtttccatttttgcaggccaggaactctgccacagattttctgagaagctaagtgaatgctccttctgtcaatctgaaattggtgggtgagtttttttttttttttttttttttttttttgcccctttgctcctttttttctttattaaa

SEQ ID NO: 47407 - DNA, 1346 bp, Homo sapiens
tcaagagtgaagcctcctgcttggtgggggacagtgactctgtccttggtcatgtgggcttgagcaagaagcaactccgtggcaaccaagaggagctaagagatgcccctctccttgttgccagggcatccccgtgttcaactgcacaacctagaggaagatggctcccaaccataaccagcatgggcaactttggaacccaaacctgtagcttctctcttttatttattcttttctccaacacatcagtggccctccagctgttgagtggggagagtgacaggttcaatgagaaggacattcagatgcatccacagaggacttttcaccagtactcatgtctcctttctggatcctcagccctctgttcttttcaaagtcatgaagctttcattgtgtcctatgctttggaaactgctgaggatcaggactctttgccttctctagagatctcaccatcagctttcttattcctggctctttccagtgtcctttagagaatgtcaaccctggggactagaaagggaaggcaatgttgtttgggagctaagccaaggctgcaaattctgtgtgaagcctgtccctgccatgactggtgcacgacctgaggtgagttacataatcctggtcacctcaatttcttcatgtatgaaatggttaagttcttccttcataggcttgttgtcaggaaaaatgagatactgcatgaaaagctcttattccaatgtctgaccaccagtgtagaagatgcaggtaagcagtcatcagtcctgaggcgggctgccctgtgtggtggagatgccccatgcaccaggatccctgaggcattgcccctccccaccatggaattattgcatccacccctgtgcattatatcgtcatagaacagccttagtgccctacccagggaaactgagtgagaaaggacaaggcatagccccacaatgttttcagttcctggatcccaggtctgtgcaaaaacagaatctagaaccaagactctaagactctgggaaacaggtctgagatctccgaagccaggaaggtgcctgagtgtcatttccagaatctgtcagaaacagctccgagctctcaggggcacccgtcgctgagatcactgaggcagggggctgcttcctggcattgttgagtttcattctgttcctcagaagaacagtgtgttttgcttggagtttgtttccatttttgcaggccaggaactctgccacagattttytgagaagctaagtgaatgctccttctgtcaatctgaaattggtgggtgagtttttttttttttttttttttttttttttgcccctttgctcctttttttctttattaaa

SEQ ID NO: 47408 - DNA, 517 bp, Homo sapiens
aggaaagatcagcagtcaaagaaaactcaaagatttttagactgagcatacggaaggrtggtgtttccatccacagaggtgagaaaatagcatgtgctgcaggttgtaggaagaaaaacagagatcagctcagggccccaaaaccttgcttgagttttccattcaccctgtccccatttctacatccccttgagatttttgtgaggctgaatgcagaggtgcttggccacttctccccctgggcaccagtcctctcacctcctcctgacagcgtcttccatggccctgtctctgatgaccatctcccaacaagatgtcatcctgcaaaggtgatctgagccatagctggggcaaggccatccactccttgacttgtgtggccttggtgggccccaggagcacttcaccgcttctcagggtagtagatcttttgtttggaactcttcttctgaggaaaacagggagggaaacagcctgaggggtggaaagggagggctgtaccagggagcctaggaaa

SEQ ID NO: 47409 - DNA, 517 bp, Homo sapiens
aggaaagatcagcagtcaaagaaaactcaaagatttttagactgagcatacggaaggatggtgtttccatccacagaggtgagaaaatagcatgtgctgcaggttgtaggaagaaaaacagagatcagctcagggccccaaaaccttgctwgagttttccattcaccctgtccccatttctacatccccttgagatttttgtgaggctgaatgcagaggtgcttggccacttctccccctgggcaccagtcctctcacctcctcctgacagcgtcttccatggccctgtctctgatgaccatctcccaacaagatgtcatcctgcaaaggtgatctgagccatagctggggcaaggccatccactccttgacttgtgtggccttggtgggccccaggagcacttcaccgcttctcagggtagtagatcttttgtttggaactcttcttctgaggaaaacagggagggaaacagcctgaggggtggaaagggagggctgtaccagggagcctaggaaa

SEQ ID NO: 47410 - DNA, 614 bp, Homo sapiens
ataagtaactgtgataagaactgtggatggataagagcactcgtctgatgtactgcagcataaccagaactgctgtyggtctgaacggtgtgttatctgggcctgtttcttgtgtcagggggatcacatgccgtcactctggagtgcctcaatagcttgtaactagaaagagaaggtatagaaagagtagtttacttacctgtttatttatttagaggcagagtcttgctctgttgcccaggctggagtgcagtggcacaatctcagctcattgcaacctctacctcctgggttcaagcaaatctcctgcctcagcttcccgagtagctgggattacaggcatgtgccaccactcccggctaatttttgtatttttagtagagacagggttttactgtgttggccaggcatgtctcgaactcctgacctcaagtaatccagccacctccgtctcccagagtgctgggattacaggtgtgagccaccgctactggccgggaggagaaatttaaaatgggtttgagacttgaggaaccaaaagaaacaatgaaaccattcaatgtgtgtgctcctgtcaagctagcagcgatcttgagagctctgtgttttcgtct

SEQ ID NO: 47411 - DNA, 614 bp, Homo sapiens
ataagtaactgtgataagaactgtggatggataagagcactcgtctgatgtactgcagcataaccagaactgctgtcggtctgaacggtgtgttatctgggcctgtttcttgtgtcagggggatcacatgccgtcactctggagtgcctcaatagcttgtaactagaaagagaaggtrtagaaagagtagtttacttacctgtttatttatttagaggcagagtcttgctctgttgcccaggctggagtgcagtggcacaatctcagctcattgcaacctctacctcctgggttcaagcaaatctcctgcctcagcttcccgagtagctgggattacaggcatgtgccaccactcccggctaatttttgtatttttagtagagacagggttttactgtgttggccaggcatgtctcgaactcctgacctcaagtaatccagccacctccgtctcccagagtgctgggattacaggtgtgagccaccgctactggccgggaggagaaatttaaaatgggtttgagacttgaggaaccaaaagaaacaatgaaaccattcaatgtgtgtgctcctgtcaagctagcagcgatcttgagagctctgtgttttcgtct

SEQ ID NO: 47412 - DNA, 405 bp, Homo sapiens
cccatcctccttgccaacgatttggaatatggcaaagtagatataggtaaatatttttaatacttcataaatacaagcacagatagatggatgaatgtgatcactgtaacactgattagtgagcaatatattttatagagaagactttgcaatgggattgctaagtaatttcccagttgggataacctgtacagcttacaagagtatttctatatctaccatacaaatatctttatgaagatgaaggaagagaacattctaaaacacaaattygaacatactgagctgaagcttaccattatggcataaaataagggtccaaaagaagagataacttatgtacgctgatgaagtggggtgaacaccatgcctttaacatcaatcttacagtactgaaaagcaaaa

SEQ ID NO: 47413 - DNA, 624 bp, Homo sapiens
tgcctgcagtcccagctacttgggagacagaggcaggaggattgcttgagcccgggaggttgaggctgcagtgagacatgattgtaccactacactccagcctgagtgataaagagagaccttgtctcggaaaggaaaaggaaggggaaggggaaggggagaaaatgagatctgacatccctgtgaccttctgaggggcattcatgaacattcataatattgaagagagaaaatcaccaagggtccatcagaatcttagttctcttattcactccaaaaacgtatgaggctgcagcccatttgcttctgagtggcaagtagtaggtccaaagagagccctttctggcaagtctacagtgtcacactgcagccaacagaagcctctctctgatggggtctctgctctctccatcttgtatgatctgagcagagcacagagcaggtgcaaccagccagggcggagaccacagctccgaggactcctatcgtcacttcgacgggaccagcatgatyatgtgcgtttactaaatctagtgaaactcagagtaggaaacaccattaccacgtttgttgcttaatcatgagcaagtgaaacggagtgaaagtgaagagtgctatgaagtg

SEQ ID NO: 47414 - DNA, 539 bp, Homo sapiens
tgtaatgataagaggaagtaaagaatataaaaacactttctaaatatccaatgccatttcagcagtcaataaaaacaatcattaacatttggaacatgaatgcttagaactgtgctacgtctgttttgttatttaatcctcacaacacagctagctactggmatcccattttatggacatgatgactgaggcctaaggacatgaatttactttcctctagttatacagccactaagtggtgaagccagaactcaacgcccagaacttccgatgttggaggcacagttctttgtcactcactgttttgcaataactgtggtaacaatttaatatgaatgtgagttctggcattaatccacattatctaactgcaaaatttcaggaggtctcattctcacacatgaggcagttcttaaaacattttgaaagcctatccacttattcctaagtagttttagtttcaaaagtccaaattcccatttcacaggtatctttcgatgattctgaactccgctttaacctcacacgctgccatgcac

SEQ ID NO: 47415 - DNA, 539 bp, Homo sapiens
tgtaatgataagaggaagtaaagaatataaaaacactttctaaatatccaatgccatttcagcagtcaataaaaacaatcattaacatttggaacatgaatgcttagaactgtgctacgtctgttttgttatttaatcctcacaacacagctagctactggcatcccattttatggacatgatgactgaggcctaaggacatgaatttactttcctctagttatacagccactaagtggtgaagccagaactcaacgcccagaacttccgatgttggaggcacagttctttgtcactcactgttttgcaataactgtggtaacaatttaatatgaatgtgagttctggcattaatccacattatctaactgcaaaatttcaggaggtctcattctcacacatgaggcagttcttaaaacattttgaaagcctatccacttatycctaagtagttttagtttcaaaagtccaaattcccatttcacaggtatctttcgatgattctgaactccgctttaacctcacacgctgccatgcac

SEQ ID NO: 47416 - DNA, 486 bp, Homo sapiens
atcactataggcacaaaggatagagaaatcagtaaaacatactttttacccaaatcctcaaactagttggaaaagaaaataagcagacaaataattttgctgcaagttatcaaagagtgcaagcacacagaagagaccatatcagattggagtgaggtagatgatggatcaagaaaagcttccttgagaaggcgatatttaagctacattttgaaggaccagtaagagttaatgaagtgaagaaagacgggcaaggcattgtaggccaagggtccagcaagtttggtagcacrgtgggcttgtggaactactagtcattaggaagtcttgggacctgaggtatggaaatgggagtccctgaagagggagagaaggcagcattcagagtgtaaggagaatccacagttgctgcaatgtcaatagtttgtgtctgacatagcaaaatgtgaggtgtggtagtgcttggaagcttttggtgctgactat

SEQ ID NO: 47417 - DNA, 634 bp, Homo sapiens
tgcatctcacacggggagaatggaagcaagagggagtgggaggaggtatttcataccttaaacagccagatctcctgagaactcactactgcgaggacagcaccaagccatgcagcatctrcctccatgaaccaaacacctcccatccagtaccacctttgatattggggattgcatttctacatgagatttgggcagggacaaatatccaaactgtatcactgacgtctcaaattatacttttgttttctaaaggtatagagcttattttggtcttactgtctttagtgtatagatcatatttccccgctctctgtataactcttattcttccttcaaaattctgctcagtaaatacagctttaaatctcatctctttcttcctctcatccctccgtatgctgattagggaaaaagaatcctttcaaaataatacttatttcaaaaattcacaattgcttaggaaaaataattatttctactacatatataacagtttgtaatttgcatcaaattccacataatagctggaatagaatagcttctattaagaggtaaatggaaatcatatttttaaaaagtattagttaatctcattatgtccttggtaataattaatctaagtcacatttgg

SEQ ID NO: 47418 - DNA, 634 bp, Homo sapiens
tgcatctcacacggggagaatggaagcaagagggagtgggaggaggtatttcataccttaaacagccagatctcctgagaactcactactgcgaggacagcaccaagccatgcagcatctacctccatgaaccaaacacctcccatccagtaccacctttgatattggggattgcatttctacatgagatttgggcagggacaaatatccaaactgtatcactgacgtctcaaattatacttttgttttctaaaggtatagagcttattttggtcttactgtctttagtgtatagatcatatttccccgctctctgtataactcttattcttccttcaaaattctgctcartaaatacagctttaaatctcatctctttcttcctctcatccctccgtatgctgattagggaaaaagaatcctttcaaaataatacttatttcaaaaattcacaattgcttaggaaaaataattatttctactacatatataacagtttgtaatttgcatcaaattccacataatagctggaatagaatagcttctattaagaggtaaatggaaatcatatttttaaaaagtattagttaatctcattatgtccttggtaataattaatctaagtcacatttgg

SEQ ID NO: 47419 - DNA, 634 bp, Homo sapiens
tgcatctcacacggggagaatggaagcaagagggagtgggaggaggtatttcataccttaaacagccagatctcctgagaactcactactgcgaggacagcaccaagccatgcagcatctacctccatgaaccaaacacctcccatccagtaccacctttgatattggggattgcatttctacatgagatttgggcagggacaaatatccaaactgtatcactgacgtctcaaattatacttttgttttctaaaggtatagagcttattttggtcttactgtctttagtgtatagatcatatttccccgctctctgtataactcttattcttccttcaaaattctgctcagtaartacagctttaaatctcatctctttcttcctctcatccctccgtatgctgattagggaaaaagaatcctttcaaaataatacttatttcaaaaattcacaattgcttaggaaaaataattatttctactacatatataacagtttgtaatttgcatcaaattccacataatagctggaatagaatagcttctattaagaggtaaatggaaatcatatttttaaaaagtattagttaatctcattatgtccttggtaataattaatctaagtcacatttgg

SEQ ID NO: 47420 - DNA, 634 bp, Homo sapiens
tgcatctcacacggggagaatggaagcaagagggagtgggaggaggtatttcataccttaaacagccagatctcctgagaactcactactgcgaggacagcaccaagccatgcagcatctacctccatgaaccaaacacctcccatccagtaccacctttgatattggggattgcatttctacatgagatttgggcagggacaaatatccaaactgtatcactgacgtctcaaattatacttttgttttctaaaggtatagagcttattttggtcttactgtctttagtgtatagatcatatttccccgctctctgtataactcttattcttccttcaaaattctgctcagtaaatacagctttaaatctcatctctttcttcctctcatccctccgtatgctgattagggaaaaaraatcctttcaaaataatacttatttcaaaaattcacaattgcttaggaaaaataattatttctactacatatataacagtttgtaatttgcatcaaattccacataatagctggaatagaatagcttctattaagaggtaaatggaaatcatatttttaaaaagtattagttaatctcattatgtccttggtaataattaatctaagtcacatttgg

SEQ ID NO: 47421 - DNA, 634 bp, Homo sapiens
tgcatctcacacggggagaatggaagcaagagggagtgggaggaggtatttcataccttaaacagccagatctcctgagaactcactactgcgaggacagcaccaagccatgcagcatctacctccatgaaccaaacacctcccatccagtaccacctttgatattggggattgcatttctacatgagatttgggcagggacaaatatccaaactgtatcactgacgtctcaaattatacttttgttttctaaaggtatagagcttattttggtcttactgtctttagtgtatagatcatatttccccgctctctgtataactcttattcttccttcaaaattctgctcagtaaatacagctttaaatctcatctctttcttcctctcatccctccgtatgctgattagggaaaaagaatcctttcaaaataatacttatttcaaaaattcacaattgcttaggaaaaataawtatttctactacatatataacagtttgtaatttgcatcaaattccacataatagctggaatagaatagcttctattaagaggtaaatggaaatcatatttttaaaaagtattagttaatctcattatgtccttggtaataattaatctaagtcacatttgg

SEQ ID NO: 47422 - DNA, 650 bp, Homo sapiens
ggcaagtcagtttcaatgagattgtatatatatttatatatataaaatactttttaaaaccctaacaatgttgggtataattttatttaacaaagaattacattgcttaattcacatattaaattctaggaacttagatcacttctgagctctgcatttttttccaggcatctggtacaataagatcaccagagtgctgccattgttcttacttcctctttttctcctaccaggttatttaaatgctctcccattcttgaaaaatagaaattgtattttcttttgtacaggaagacacatccattagaaagttcccttaaattgatatttgcctcccttctcaatcctcaattctagcaaagctaattatccaatcttggcatctgtgaagagagctctagcttctgagcgcagtctgcagaaaagygatctgtgctgtcacagagatagtaacaactttttattccaggagttcaaggtctgagaacttttaggacaaccttcattagtcatgaattgccaactcgagttctagtttcttttccatgttggtgtctaggacttggaaatctttacagcattctgaagccactgagagggcactggaggacgttcctatagattgttaaattacacaaagtggttgttgt

SEQ ID NO: 47423 - DNA, 607 bp, Homo sapiens
ctgttgccacctgttttcgtgtgaactggcagtccagtccagggcctgtccccacggaacggacccaggaggggggtaacctcgccgctcccctcgcccccgcgcctctttctgagcattctctcccacagacgctaatgggaaggggggtggacaggatcgagtctggccagctgctccgcagtgtygacgctgccagtgtggcctcttcagccagcctgttcaggagacagaatagggggatcaaagataaaaaatgaagccgagacgtaggtgaatttgggctggtaccagtgcgccgtgccttttccagtggcgccctggacgccaaaaccccctcagttgcagagacctttcaaaatatatgcactctcctactgggcgatgcggtccttaggcgttcttgatgatatttaatggtttatagagtattttatggcattcacctaaatctctttccattttgcccaagatcctggcgagggaaacaaggtagaaattttacagattttactcctccggagagagccttttccttataactacgactctagttaggacattttttgttgcaagaaatttgcgatttatcctaaggaaaatggga

SEQ ID NO: 47424 - DNA, 607 bp, Homo sapiens
ctgttgccacctgttttcgtgtgaactggcagtccagtccagggcctgtccccacggaacggacccaggaggggggtaacctcgccgctcccctcgcccccgcgcctctttctgagcattctctcccacagacgctaatgggaaggggggtggacaggatcgagtctggccagctgctccgcagtgttgacgctgccagtgtggcctcttcagccagcctgttcaggrgacagaatagggggatcaaagataaaaaatgaagccgagacgtaggtgaatttgggctggtaccagtgcgccgtgccttttccagtggcgccctggacgccaaaaccccctcagttgcagagacctttcaaaatatatgcactctcctactgggcgatgcggtccttaggcgttcttgatgatatttaatggtttatagagtattttatggcattcacctaaatctctttccattttgcccaagatcctggcgagggaaacaaggtagaaattttacagattttactcctccggagagagccttttccttataactacgactctagttaggacattttttgttgcaagaaatttgcgatttatcctaaggaaaatggga

SEQ ID NO: 47425 - DNA, 607 bp, Homo sapiens
ctgttgccacctgttttcgtgtgaactggcagtccagtccagggcctgtccccacggaacggacccaggaggggggtaacctcgccgctcccctcgcccccgcgcctctttctgagcattctctcccacagacgctaatgggaaggggggtggacaggatcgagtctggccagctgctccgcagtgttgacgctgccagtgtggcctcttcagccagcctgttcaggagacagaatagggggatcaaagataaaaaatgaagccgagacgtaggtgaatttgggctggtaccagtgcgccgtgccttttccagtggcgccctggacgccaaaaccccctcagttgcagagacctttcaaaatatatgcactctcctactgggcgatgcggtccttaggcgttcttgatgatatttaatggtttatagagtattttatggcattcacctaaatctctttccattttgcccaagatcctggcgagggaaacaaggtagaaattttacagattttactcctccggagrgagccttttccttataactacgactctagttaggacattttttgttgcaagaaatttgcgatttatcctaaggaaaatggga

SEQ ID NO: 47426 - DNA, 607 bp, Homo sapiens
agtatgtgactttctactcatggttcaatatggtggcatggtctccagccctcacatctccattgcagctagcagcaaaaggagagggaagagttcacattcacttttttacaaaattaaagagatttttatggtcttaatacattcctacttacttctcatgagctcaaagttcatcatacagtcacacagagctgcaagggagtctaggaaaaacagtctcaaaaagtagaggtggacagcttctcagggwtctcccaagttctgatgactctctcaactctctgcttctctctgggttccagactagattctctcagaaaaagtcttggaatataggatggaaaaaaaaaatccagctgctgcagctatagattcacagtctgagcttctcccaccaccctctcagtctttgctgatcaaattcaggggaaggttaactagcctgtcttgaaccatatgtctatctctgggataatctctgcacctgagaaaggctggcttctcagagcagatgattttgttgttgttgttgttaaactttaaaagatgaatcagatgttacaatgactcagggctgggcaggcaaactcagggaactaggaaa

SEQ ID NO: 47427 - DNA, 607 bp, Homo sapiens
agtatgtgactttctactcatggttcaatatggtggcatggtctccagccctcacatctccattgcagctagcagcaaaaggagagggaagagttcacattcacttttttacaaaattaaagagatttttatggtcttaatacattcctacttacttctcatgagctcaaagttcatcatacagtcacacagagctgcaagggagtctaggaaaaacagtctcaaaaagtagaggtggacagcttctcagggatctcccaagttctgatgactctctcaactctctgcttctctctgggttccagactagattctctcagaaaaagtcttggaatayaggatggaaaaaaaaaatccagctgctgcagctatagattcacagtctgagcttctcccaccaccctctcagtctttgctgatcaaattcaggggaaggttaactagcctgtcttgaaccatatgtctatctctgggataatctctgcacctgagaaaggctggcttctcagagcagatgattttgttgttgttgttgttaaactttaaaagatgaatcagatgttacaatgactcagggctgggcaggcaaactcagggaactaggaaa

SEQ ID NO: 47428 - DNA, 607 bp, Homo sapiens
agtatgtgactttctactcatggttcaatatggtggcatggtctccagccctcacatctccattgcagctagcagcaaaaggagagggaagagttcacattcacttttttacaaaattaaagagatttttatggtcttaatacattcctacttacttctcatgagctcaaagttcatcatacagtcacacagagctgcaagggagtctaggaaaaacagtctcaaaaagtagaggtggacagcttctcagggatctcccaagttctgatgactctctcaactctctgcttctctctgggttccagactagattctctcagaaaaagtcttggaatataggatggaaaaaaaaaatccagctgctgcagctatagattcacagtctgagcttctcccaccaccctctcagtcttwgctgatcaaattcaggggaaggttaactagcctgtcttgaaccatatgtctatctctgggataatctctgcacctgagaaaggctggcttctcagagcagatgattttgttgttgttgttgttaaactttaaaagatgaatcagatgttacaatgactcagggctgggcaggcaaactcagggaactaggaaa

SEQ ID NO: 47429 - DNA, 660 bp, Homo sapiens
tgtcttaacaatcgaatacttaaaagttaatgccctcataatatgcaaaatttttaataagcacattggtccctgtgttcaagtagttggtaatcaaattagcgaagtatggtaagtcttttgaagagcattaaacagcagagaatgtaagaaatttgtctctataatagtgtgggccttctgtgtttcctaagggcacattcatatgatctaataactgagcagagagaagcctaarggatagtttttggtttcatttgtttgtttttccaattaacatacatttctagattaaaggtcaactatcttttccttgggagtcaactataggagaagatagtgaagaggcaaggaaaattacagcagctcaacagctttaccctggaaatatctgtattgtgtaccgctatagcctacctttatcagtcagataacaatgtcaaagaggcaagcttggcaccattgctcttagtgaatccctgctgccagccttttatcctaagtgctctccaaagacccatttaatggaccttcctgaaattgtgctcaggatcaatatgaggctcattgatacagcatttttggaactcaccatttgcttatttattaaacctgggatagttgcccgacttctatcatctgaaatcctctccatgactt

SEQ ID NO: 47430 - DNA, 610 bp, Homo sapiens
gatgagcaaaacaggtagaacaaacaaacaaaaccatcttttaaataatgcttaataaaggtgtgcttctcactatattgcttcacaaattctggagctggctgtaccttaattgtttggatgctagcaatgcaaaacgctgagtaaaacagcatctgtttgtgaaaacaaattctcgttttgaagctccagtaacagaactagccacacagacagtggtgaatgcaatttattttcttttaagttgtgacaaatactaaatgtatactttttagtcttttttcccttgggaaaatgactgccgcaggctccctgctgacaaagcttatcactaattcattcgccttctttaacaataaaaaacattttccataagctgaagtgaaattgctacattataactcaatcamcaactatgagaagtttccttctgcatcagttgaaaaacatttaaatttttctcaatttctttgcaatgttaacaatctatgtgcttttatattcccatttttaacactgaaaaagtgatttctctcattcttgaaatccagcatgttctagacacttaatcaaacctctcctgtgtcttcataaagttggcataaattac

SEQ ID NO: 47431 - DNA, 603 bp, Homo sapiens
ttgcaattttatattcctagggtagaaaaaatatctctaaggctgcatatattgtactctccttttagttgcttattagacttttaacttctatgatctcaagcttttaaattgttgactattgagaagtttctggaacacgtttagtgcggcgagatttcccaacacacatttttactgactgggtgcccctccttggaacaaagagcctgtgcctccatagcacagtgaggtacaacattgaggcaccttccaggtaacccaggccagaagaacagcttctgccccaagtagtggacttggtttatcttcatgaggtggaattaaattccattactttttctctgatgttcaggtcagctccttctcttgacagcaactctccatattgggagtgtttatgccttggaaattggcaaatgctactaatcaagtccttcacccaccaagagagggttgctgaacgtttaccagcacaccgctgtaaattccattactctttctttctgagaaatgacttatttttctctgttttagcctagctaacatccctgtctgagagaggagaacttatttttycctattttagcttagccaacaacc

SEQ ID NO: 47432 - DNA, 537 bp, Homo sapiens
gaaatgaatcgctaaacaaaatgtggtatgtacatacaatggattattactcagccttaaaaaggaaggagattctgatatatgctacaacatgggtgaaccttgaagacattatttaaatgaaataaaccagacacaaaaggacaaacatatggaaggaaattctgatacaggctacaacatggcctcattggaaatagatttccgccggttggaagtaagttaaaacactgtggaaacagagatcagagaaaggggcactggggagggtatsggcaacattacatttcaatttgtcttgggtgtagagcaggatgggttagcccaaggtaatggtgagtatgtgcttgcttcctgatggacaaagactgggatggtggggcatctgaaaagcaagcacaggaagtcctagccagagcaatcaggcaagggaaagaaataaagtacatccaaataggaagagaagaagtaaaatgatctctctttgctgataatatgattctatacctaaaaaatactaaagactctgccaaaagg

SEQ ID NO: 47433 - DNA, 537 bp, Homo sapiens
gaaatgaatcgctaaacaaaatgtggtatgtacatacaatggattattactcagccttaaaaaggaaggagattctgatatatgctacaacatgggtgaaccttgaagacattatttaaatgaaataaaccagacacaaaaggacaaacatatggaaggaaattctgatacaggctacaacatggcctcattggaaatagatttccgccggttggaagtaagttaaaacactgtggaaacagagatcagagaaaggggcactggggagggtatgggcaacattacatttcaatttgtcttgggtgtagagcaggatgggttagcccmaggtaatggtgagtatgtgcttgcttcctgatggacaaagactgggatggtggggcatctgaaaagcaagcacaggaagtcctagccagagcaatcaggcaagggaaagaaataaagtacatccaaataggaagagaagaagtaaaatgatctctctttgctgataatatgattctatacctaaaaaatactaaagactctgccaaaagg

SEQ ID NO: 47434 - DNA, 537 bp, Homo sapiens
gaaatgaatcgctaaacaaaatgtggtatgtacatacaatggattattactcagccttaaaaaggaaggagattctgatatatgctacaacatgggtgaaccttgaagacattatttaaatgaaataaaccagacacaaaaggacaaacatatggaaggaaattctgatacaggctacaacatggcctcattggaaatagatttccgccggttggaagtaagttaaaacactgtggaaacagagatcagagaaaggggcactggggagggtatgggcaacattacatttcaatttgtcttgggtgtagagcaggatgggttagcccaaggtaatggtgagtatgtgcttgcttcctgatggacaaagactgggatggtggggcatctgaaaagcaagcacaggaagtcctagccagagcaatcaggcaagggaaagaaataaartacatccaaataggaagagaagaagtaaaatgatctctctttgctgataatatgattctatacctaaaaaatactaaagactctgccaaaagg

SEQ ID NO: 47435 - DNA, 562 bp, Homo sapiens
catcacctgggagctaattagaaatgctgagtctcaggccccacccagacctgctgaaccagaatctacattttcacatgaaacctggggacacgctggccttggctgagtacctagatacgggatttctgagttacagggcacatccatcttcaacttgaccagctagcattggatgtctaccaatatttaaacacccacattctcacttaaaaatcagtgcacaggccaggcgcggtggctcacgcctgtaatcccagcactttgggaggccgaggcgggtggatcacgaggtcaggagatcgagaccatcctggctaacacagtgaaaccttgtctctactaaaaatacaaaaaaaaattagtcgggcatggtggcgggygcctgtagtctcagctacttgggaggctgaggcaggaaaatggcatgaacccgggaggtggagcttgcagtgagccaagatcaggccactgcactccagcctgagcgacagagcgagactccatctcaaaaaaaaaaaaaaaaaaaaatcatcagtgcgcagaacctgaaaactaaagg

SEQ ID NO: 47436 - DNA, 619 bp, Homo sapiens
catggaaagtggaatcgcggataagagaggactactgtccaagccaaggaacacagggcttgcaggcaacccccggagctggaggaggcaccagatgcatccttcctcacagcctccagaagggaccaacccagccaacacctcgattttggatttctggactcccaagctataacagaataaatttctcttgctttaagccactaggttgtaataatttgtcacagctatcctgagaaactggtaacagtacttgtggatgcygtttttaacaaaaattttgccactttagggcactatatggcctttttttttttttttttttttttgccttatagagttaggtcaatttccaaaagtgctggagtttatgccaagaattaagtgactccctggttgcagtggccaaatagcctgaaattttcaaagtaatactaattttgcaaaacttttcatgtaaactcctttgcctgaccatgccctaatttttgtgattaggaaaatctggctcttatcccactggaggaaaagtgtctagttcatattctaatggaaatcatcacttgggaggtgttttgacaaacatctctcagttttgtttaaaaattatgttagaaat

SEQ ID NO: 47437 - DNA, 602 bp, Homo sapiens
ttacaccctcgtttggtagaaccttcatatttagttgtggaaactaaaatttagagtgctctgtgccttactcaggtttacgcagttgctgaatagttgaacttacactcaaacaggaccagtctttgactccagagcctgtagacttaacgatacaccttttgcaacttagaccctgagaaattctgacttagtgagtgtccgtgattctgagaaaccttgaatgttagagattggtttgaggatacctcatttatgtgaaacctcatcgtaataaaatagtttgaattgaaattgaagtagaaatacttattttctttctgaagtcttttctttgactacatgaatgctttaaaaaggtctattggccgggtgtggtggctcacgcctgtaatccragcacttatgggaggccgaggcgggcggatcatgaggtcaggagatcgagaccatcctggttaacatggtgaaaccccctctctactaaaaatacaaaaattagctgggcatggtggcgtgtgcctgtaatcccagttacttgggaggctgagacaggagaatcgcttgaaccagggagtcggaggttgcagagagccaagatc

SEQ ID NO: 47438 - DNA, 574 bp, Homo sapiens
tgtcgcccaggctgcggtgcagtggcgcagtctcggcttaccgcaacctctgcctccagagtttaagtgattctcccacctcagcctcctgagtaggtggaactacaggtgcccacgcccggctaatttttgtatttttactagagaccagggtgcaccgtgtcggccaggctgatcttgaactcctgtgctcaagtgatctgcctgcctcagcctcccaaagtgctggggttacagacgtgagccaccgcgcccggcctcagttcactgatttcaggttttggtgttttacatttagagctaccttcgtatgctggctccagtattttaacgtgatatatgcgttgtgattatgaccgtcttcagtgcgcaccccttgattccartttatttagtgcatttagggaatgagcagaagctgcgtataatcagaattgtcctcgaaattccttcgcgtgcctgtagagtacagagacaacggccggtgccgcacacagtaaggcacgcgacggggagcagaatgtgcagcgggcattcctagcccgcagctgggaggctgcttttgctaaatgca

SEQ ID NO: 47439 - DNA, 1829 bp, Homo sapiens
acttctgcaattgttttagcggggaggaagtggtaaagagaaagatttatcacattgatacttcatgaaatttggggcccaaaaattcaacctgggattttgcattcctgtcatacataagcctatgcttagtttgctatcctaaatgattagacaaactagtgatgagtcatggactggagttcagcttaggctagtcagctttgctttgtttcatggtctcatgcagccttctcaaaattaccgatctttcaaatgtatgctatttatcccragaagaactggtggaaagactataaatgattcaatgcaaagccattatcaccactgaaaaaaacaacgcaaagataagtatccagtacattaaagatggtatatttataatttgccatggaagaattatatctaaacaccttctccttgattaaaaatagcatctatagagataatgctatatagattttcaaagatatttcaacttagcttattccattccttcaagaaagtggggaaggtatcattatcctcatttctagttcagttcagtccttattgtacccatggtattccaacacaagtgagacccaccccatgtgattaaggcactcatatccagggtgttctcatttctagtccagttcagtccttatgggacccatggtattcccacacaagtgagacccagtccgtgtgattaaggcactcttatccagggcgttctcctgtaagtgtcaggcaacatctgctctgcttgcccttgccatctggattttaaaaaggatctcatactccgttaatcataaaatcatagaatctatgagaattagtctaatatctttgaagattaggaagaggtatcaaataatgcacctaaagtttcagttacctaatagtaaaaccaggattagaacatatttatattctaaccagtattcagaccaatcttctttctcttacactactatttctcaagatacaagtaggtaactgtctgttatctacagcaaggacatttctgaaaatgggatctgagatacacattctctgcaactcaagaatgttatggctaaggatcccaccaaactcctaatccaagggaatatgggccaggaagctaatcagagagggatgaaccatgagatgctgaaccagcgacttcccagtaaacagatttgtgctatatgaagcagctcccccaatatctaccattgttagagccacttgaggatttagaccacttgtgttctagataaccagggtgcagagacagctagaagtcatgttgaaaggaaataattataaatctgctacagccaaaggtggtctttttcaaaagcaggctaaataagccgctgagttaatatagctaaaggaacccggtaagtgactatgattgcatcagtgcactccagcctgggcaacaaattgagaccttgtctctaaatatttatcaatactgatatggtgtccaatttgattcaacaatcatttattgagtgccagttatatgcaaatcactgtagactcaaagacatgccattcctttatccttaagaaacaacagattcaggttggacatggtggctcatgcctataatgcctataatcccagcactttgggaggccaaggcaggaggactgcttgagccttggagttcaagaccagcctgagcaacataatgagaccctgtctccaaaaaacaaaaaacaaaacaaaacaaaaaaaagggcatggtggctcgtgcctgtggtctacttgggaggctgagctgcaaggaccgcatgaacccaggaggttgaggctacagtgagccatgattgtgccaatg

SEQ ID NO: 47440 - DNA, 543 bp, Homo sapiens
tgccccaaattccactcccagcacctctcccacctctacatacagcagccgtagggattcccattcagtttcccactgctcttggaataaggttctcatcccttaccggggccctgcctaacctggccygccagcctcatcttggctgccctcacctgtggtctagttaacctgtgaactcatcaaggcttcattctaccccaaggcatctgcacgtgaggatccctctgtctgaaactctctcccggctgctgttctcaaggttgtgtcccttctagtcattcaggtcccagctcaaaatctcttcttagaggtttttctgactaagcctttgagaaacgagggaactctccttcacagcatcctattcgtttccttcacagtgcttggcaaaagtaacaatagcatcaagccactctcttgagacggcaagcttcctgaaggcaggtgctatggtatcctctccaaaatttatgttgaaacttaatctccattgtggtggtatgaagaaatgggtgcagaagatatccacaaccaaaaata

SEQ ID NO: 47441 - DNA, 540 bp, Homo sapiens
agcagtgaaagtgaattgacagccccgcctataagagaaaaccagagagtttcttggtaaagaacaacaaagtcaagggaaggaagcaagggtgggtggctgcagacctcttgagttattttttttcctttgagatgcagcatttagggtagctatcactctaggttccgcctgctacagcaggtgtttcttttaaataaacaattggtttatgcacaactctttccccctaatcacagtagtcagtttctttctccagttcctctttggcacaytatttttattaagagcaccagtgagaagccaatatgtgatccgaattcttaaccagatagctaaacaaatgtagttcttcagagctttctaatgtgcagtgggactatgcttcttaaaaataccacttgcttttcagtcaacacttggggacaacctactatactttccagcatgattggtatacctctctgctattagagagaaataacccctagataccttttccatttcagtggagatgacgatgcactgaaatagctctcg

SEQ ID NO: 47442 - DNA, 555 bp, Homo sapiens
tcagatactattctgagcattgagaaaacactcgatattcaaaataatattggtgtttctatagctagcttgtattttgttgtgtgagacaaattaaaaaaggaaattgtatataatgtttcaggtggtgaaaagtgttcttaattaaaataaatgagataaggacctaaagagtgacaattttgatrggtcagaaagaagaagttctagtttaaacaatgtagtaagagaggatccttctgaaagagaaatttgagcagaaaattgaaggaggttgagaaataaagcacaaataccagagagcaaaatctttcttgtaaagacaatagcaagtgcaaaaacaaagcaggagtgaacttagaggggcatcaagatggttgaagcatggtgggaaagtgaggaggctttaggacacaggttcaactccaagtgaaatgtgaagttgttgagggtacagttctaatttttttttgaaaatggcactaatgtataaactatttcagacaaaatatatttcaaggtgtaagctatatgtctcagctcattaaattgcta

SEQ ID NO: 47443 - DNA, 593 bp, Homo sapiens
ccatccgagtagcgggattacaggtgcctgccaccacacctggctaagaaagacctattttcattcttaaagaagaacagtgagaagtatttaagatacttactcatgttgtttcacattctaatgcctccctaatcatccaccaacacattacaaaaaaaacagcaatgtacagcaatgaattgagacaaagtttccattatatgtctcagacatgtcatttccaacagagcctattggagtctttattaaattaaatgctttttacttacaacaagattcacatggcttcttcagaaatcctagggctactaaagtaaataaaattttactaaagttttcaaaataaattttgtaattaaaattttaatcacactgatttactgaagggatagaatacattcaagtgtaacaaatatccaaaacatttttaaaacccaagaagttataataatagctctwtctcaatgtgattatacttgcaatattttccataaaattactttaaaagattttttcagtatttaattactcatagacattgtgcaatattatcaaattatatttaaatagttgtttaaatagtcaaatgt

SEQ ID NO: 47444 - DNA, 593 bp, Homo sapiens
ccatccgagtagcgggattacaggtgcctgccaccacacctggctaagaaagacctattttcattcttaaagaagaacagtgagaagtatttaagatacttactcatgttgtttcacattctaatgcctccctaatcatccaccaacacattacaaaaaaaacagcaatgtacagcaatgaattgagacaaagtttccattatatgtctcagacatgtcatttccaacagagcctattggagtctttattaaattaaatgctttttacttacaacaagattcacatggcttcttcagaaatcctagggctactaaagtaaataaaattttactaaagttttcaaaataaattttgtaattaaaattttaatcacactgatttactgaagggatagaatacattcaagtgtaacaaatatccaaaacatttttaaaacccaagaagttataataatagctctatctcaatgtgattatacttgcaatattttccataaaattaytttaaaagattttttcagtatttaattactcatagacattgtgcaatattatcaaattatatttaaatagttgtttaaatagtcaaatgt

SEQ ID NO: 47445 - DNA, 549 bp, Homo sapiens
tgatgaggtgtgaatgagggaggcagagcagggctggtgtggacagccctgtcccagccctatctcccgtctgcgacaccctctccacaccccagtgctgataagcgggtgtgagccacggccgccttgtgacaggcccttcggcagggagggtgatggtgggggtccactccacttctgaattcagacgtcagcatctttttcccccaacccccattgccctgtcagactagacaggccctagcaaccaggcaccctccctgacagtccctggcttggagatttgtttctgctccatgtggcctcagcttctcagagatggtaggagacagacctccctcagtcctttctggcaaaktgccaaggaggataaccacctcccacccccatcaggcccgtccctgcagtgactgctgatgctggggcctggcacacacagtgcttcttatcactgggcaaacttcaatggctgatccttttgtctcctctcctcaccccatctcctctatcgctgtgaccatcagcttccagtcttccccctccagctcc

SEQ ID NO: 47446 - DNA, 521 bp, Homo sapiens
agcaaggttgtggtaggaatacctgccacctattttaggccacatgtctcttacgggcaaaaagtaaagcaaagccataattgtggttcgatattttggatgtattaattctcatttcagcatttgcatagtctcacattttggaaaacaaaattgtggtgatttcacttgtctctccatatcatgattatattcaaaactaggaaacaaacgtagactaaagaagcaaatactaaagagtgagatcatgcaggttaaacagatactctttctcagggaaaagtcatttacccatcatgagctgatatactgttgtgagtttmtatggtttagtgtatttacaacttaactaagtatacatgattcactgtgtactgtagaatataattaaattgacatttgctggtacggaataaatttgcacatcagtgaaataaatgatgaaaataaataaagtctgaggccagataattccattggttaccaatttatgtcttcagctctacaccaaagcaaacatt

SEQ ID NO: 47447 - DNA, 521 bp, Homo sapiens
agcaaggttgtggtaggaatacctgccacctattttaggccacatgtctcttacgggcaaaaagtaaagcaaagccataattgtggttcgatattttggatgtattaattctcatttcagcatttgcatagtctcacattttggaaaacaaaattgtggtgatttcacttgtctctccatatcatgattatattcaaaactaggaaacaaacgtagactaaagaagcaaatactaaagagtgagatcatgcaggttaaacagatactctttctcagggaaaagtcatttacccatcatgagctgatatactgttgtgagtttatatggtttagtgtatttacaacttaactaagtatacatgattcactgtgtactgtagaatataattaaattgacatttgctggtacggaataaatttgcacatcagtgaaataaatgatgaaaataaataaagtctgaggccagataattccattggttaccaatttatgtcttcagctctacaccaaagcaaayatt

SEQ ID NO: 47448 - DNA, 701 bp, Homo sapiens
aaccactatgctaagcaaggttgtggtaggaatacctgccacctattttaggccacatgtctcttacgggcaaaaagtaaagcaaagccataattgtggttcgatattttggatgtattaattctcatttcagcatttgcatagtctcacattttggaaaacaaaattgtggtgatttcacttgtctctccatatcatgattatattcaaaactaggaaacaaacgtagactaaagaagcaaatactaaagagtgagatcatgcaggttaaacagatactctttctcagggaaaagtcatttacccatcatgagctgatatactgttgtgagtttatatggtttagtgtatttacaacttaactaagtatacatgattcactgtgtactgtagaatataattaaattgacatttgctggtacggaataaatttgcacatcagtgaaataaatgatgaaaataaataaagtctgaggccagataattccattggttaccaatttatgtcttcagctctacaccaaagcaaayatttgtactggttcttttttttttttttttagtcacgctgtactttatttaaaggtggccatagcattaaagtgtgaattcattttgtacaaccagaaatggaaaaggagtcagtcaaggtggggcagaagtttctaacaaagtctaaagcatagttttatataactaat

SEQ ID NO: 47449 - DNA, 568 bp, Homo sapiens
ggaccaagtctgtcactaacctgtaaagaactctgaccaagctgactgggcactctgtctgcgcgcctttctttgccaccacgtgtgcgggaatgcctggggcacgactgggccatctcagtgttcttgtttctagccattccgaggttacccctcagcaaaacgccagaggccrgcagacacagtggagcatcctgcagtagggatccgaagccgtggaatctccaaagggccacgactgcttcccagaagctctagcccgttgcccggaaagcccaggtggtctttggcaagacctcccggattgtggttttgatttgcatttctctgatgaccagtgatgatgaacattttttcatgtgtctgttggctgcataaatgtcttcttttgataagtgtctgttcatatccttcgcccactttttgatgtgattgtttgattttttcttgtacatttgtttaagttctttgtagattctggatattagccctttgtcagatgggtagattgcaaaaattttctcccattctgtaagttgccagttcactctaatggaagttttttttt

SEQ ID NO: 47450 - DNA, 568 bp, Homo sapiens
ggaccaagtctgtcactaacctgtaaagaactctgaccaagctgactgggcactctgtctgcgcgcctttctttgccaccacgtgtgcgggaatgcctggggcacgactgggccatctcagtgttcttgtttctagccattccgaggttacccctcagcaaaacgccagaggccggcagacacagtggagcatcctgcagtagggatccgaagccgtggaatctccaaagggccacgactgcttcccagaagctctagcmcgttgcccggaaagcccaggtggtctttggcaagacctcccggattgtggttttgatttgcatttctctgatgaccagtgatgatgaacattttttcatgtgtctgttggctgcataaatgtcttcttttgataagtgtctgttcatatccttcgcccactttttgatgtgattgtttgattttttcttgtacatttgtttaagttctttgtagattctggatattagccctttgtcagatgggtagattgcaaaaattttctcccattctgtaagttgccagttcactctaatggaagttttttttt

SEQ ID NO: 47451 - DNA, 568 bp, Homo sapiens
ggaccaagtctgtcactaacctgtaaagaactctgaccaagctgactgggcactctgtctgcgcgcctttctttgccaccacgtgtgcgggaatgcctggggcacgactgggccatctcagtgttcttgtttctagccattccgaggttacccctcagcaaaacgccagaggccggcagacacagtggagcatcctgcagtagggatccgaagccgtggaatctccaaagggccacgactgcttcccagaagctctagcccrttgcccggaaagcccaggtggtctttggcaagacctcccggattgtggttttgatttgcatttctctgatgaccagtgatgatgaacattttttcatgtgtctgttggctgcataaatgtcttcttttgataagtgtctgttcatatccttcgcccactttttgatgtgattgtttgattttttcttgtacatttgtttaagttctttgtagattctggatattagccctttgtcagatgggtagattgcaaaaattttctcccattctgtaagttgccagttcactctaatggaagttttttttt

SEQ ID NO: 47452 - DNA, 556 bp, Homo sapiens
actaccatccaaatgagcaatcgcataactgggtatctagacagaggaaactaaatcataaacccttctttcaaaatgacacagacatgggtatgttcttggtagtgctattcacaagaaaaaataaaataaaattgacctatgttccctttaacagttgattcgatgttttaaagtgttgtatatagatactgcaaaatcctacacagcttaaacaaattcatgctctcggcagcaagaaggatgaacctgcaggccactaygctaagcaaactaaggaaagaacagaaaaccaaataccacatgttctcacttagggggaaaatacccatagaaaatacaatgactttgccatctctttctctctcactttctctctctctctctctctctctctcatgagacacagaaatccatgctgacaaaagcaaatataaacctgtgagaccaacactttagagcttccgcatgtgggagaaaacaatgaccccaaagagaaagcatcctaccttggcggaaaggatgattgggggaaaactgtggaaaatcataattt

SEQ ID NO: 47453 - DNA, 585 bp, Homo sapiens
tacagcttgttattaataaattgtctctgtttagaaatagactaatggtgaagtgggtttattcacatctggcttatttgatgtgttaatgtagctgaatttggcattattccaaagattggaaagagattagacttcagactttcgtgcccttgcctatggcataatctccagaatatgagtatgaggaatccagtaatgaattcgtagtgccctggtcagcacagtcactcttgtgatatasttggtgtatataccagggttaattactggtccagaagaacttaatctcaagagtcaatttctagttatcccaacatggcacggataaaatcttgcagaaaaaaaatctttgtcattgagaccaaattatagttttcatacagtggatttacattgttgatgttttacttatgtttatgttagacttactttatatttgtagaatctactgtttctgattatttagagaatgggaaactgaaagaaattttaaagacattaagtgaacattatttgttctaatgggtttctagtgaatttccttcaaggtggggcatagagattgagaggagaggttttcta

SEQ ID NO: 47454 - DNA, 585 bp, Homo sapiens
tacagcttgttattaataaattgtctctgtttagaaatagactaatggtgaagtgggtttattcacatctggcttatttgatgtgttaatgtagctgaatttggcattattccaaagattggaaagagattagacttcagactttcgtgcccttgcctatggcataatctccagaatatgagtatgaggaatccagtaatgaattcgtagtgccctggtcagcacagtcactcttgtgatatagttggtgtatataccagggttaattactggtccagaagaacttaatctcaagagtcaatttctagttatcccaacatggcacggataaaatcttgcagaaaaaaaatctttgtcattgagaccaaattatagttttcatacagtggatttacattgttgatgttttacttatgtttatgttagacttamtttatatttgtagaatctactgtttctgattatttagagaatgggaaactgaaagaaattttaaagacattaagtgaacattatttgttctaatgggtttctagtgaatttccttcaaggtggggcatagagattgagaggagaggttttcta

SEQ ID NO: 47455 - DNA, 352 bp, Homo sapiens
tactgaggttaggaaaaacagtattcccaaactgggatccttctgtgcactttgtaacccttgtttacyctggcagttgcaatactaccaatttgaccattaagaacattcggtatgtttaaactatagtgggaaagccaagatatgaagccatcacccatgggaattttgaggctagagtaattagaagctaatttaagatctccattcaactctaggacagtcagggtaactgccagagaagctgcatgctgagtaaatcctgatcccaaagtggaattttgccctagtataatgggttcatatttgattggctgcacttagctataaatcctgaggaggaggaagagga

SEQ ID NO: 47456 - DNA, 352 bp, Homo sapiens
tactgaggttaggaaaaacagtattcccaaactgggatccttctgtgcactttgtaacccttgtttaccctggcagttgcaatactaccaatttgaccattaagaacattcggtatgtttaaactatagtgggaaagccaagatatgaagccatcacccatgggaattttgaggctagagtaattagaagctaatttaagrtctccattcaactctaggacagtcagggtaactgccagagaagctgcatgctgagtaaatcctgatcccaaagtggaattttgccctagtataatgggttcatatttgattggctgcacttagctataaatcctgaggaggaggaagagga

SEQ ID NO: 47457 - DNA, 562 bp, Homo sapiens
tgcctctggaagattcttaaataacactgtactttaagggttcatttgcaagaggaatagccaatttgaagttctgcaaatttaagaaaaacagcggggtggagggtgggctacaataccttttctctaaaaaagggaatggtgagacttgctatctaaagagaccctgtccctgtggtcttcagagactcagtctggttctctyttgttttaaattgagacggagtctcgccctattgccaggctggagtgcagtggcgcgatcttggctcactgcaacctccgcctcctgggttcaagtgattctcgtgcctcagcctcccgagtagctgggattaaaggcatgcgccaccatacccagcttttttttttttttttgagacgatgtctcacttttgtcccccaggctggagtgcgatggcatgatcttagctcactgcaacctccgtgtcccaggttcaagtgattctcctgccttagcctcctgagtagctaagattacaggcactcgccaccatgcccggctaattttcgtatttttagtagagatggggtttcacca

SEQ ID NO: 47458 - DNA, 541 bp, Homo sapiens
ccaaaaacttcttctctaaggttaataaaaggtcggcagttttgatcacttttaaaaatcaatttataaataatttagtcacttgtagatgggacatgatcttcctgctatccctaactactctgatgccaaaactggtcatagcacaagtggggctgcatagcaaactgatccgcccaaataatttctactgggttataagattttaagaaataaccatgtctcacaccatagagaaaaacaattcaaccagatatctgtcccatgtattgtaggtactctctgtyaaagctgtaactctttttaacttggatggtctcacctagagtagatttcttgttgacagaaggaaccccagaatgtgtacaggccagggccgattgtgacttccattggccaaggttgtcccagggccaggacaagggccacacaggtgcactagcctcccaagggctgagcatgtgtgctcaaccatctggaggaagataaaagtgcatcccctaaattctgcccaatccagtctcttgtccatggagtttca

SEQ ID NO: 47459 - DNA, 607 bp, Homo sapiens
attagtgaacttaggtgatgggcatagggtatttatcgaactattcttgtaacttctctgtaacaggaaagaaatacatacatacacttcatctttgaaagtgagagagagaaggaaggaaagaaatactgaatagtactaggtacctggggggatgagtgaggtgctagtttccaaggacagagtgagggtatctcttgtgggattggggtccacaagaatgtgcagctcccttgcaatgggaacttgtggggaatgccattcagaaaatgaaataaaatctacagatccggccaggtgcggtggctcatgcstgcaaccccagcactttgggaggccgaggaaggcagagcacctgaggtcaggagtttgagaccagcctggccaacatggtgaaaccccatctctcctaaaaatacaaaaattagctgggcatggtggcgcacacctgtaatcccagctacttgggaggctgaggcaggagaatcacttaaacccgagatagaggttgcagtgagctgagatcgcgccactgcactccagcctggacaacagagcaagactcatctcaaagaaaaaaaaaaagaccctattggacacagagaat

SEQ ID NO: 47460 - DNA, 607 bp, Homo sapiens
attagtgaacttaggtgatgggcatagggtatttatcgaactattcttgtaacttctctgtaacaggaaagaaatacatacatacacttcatctttgaaagtgagagagagaaggaaggaaagaaatactgaatagtactaggtacctggggggatgagtgaggtgctagtttccaaggacagagtgagggtatctcttgtgggattggggtccacaagaatgtgcagctcccttgcaatgggaacttgtggggaatgccattcagaaaatgaaataaaatctacagatccggccaggtgcggtggctcatgcgtgcaaccccagcactttgggaggccgaggaaggcagagcacctgaggtcaggagtttgagaycagcctggccaacatggtgaaaccccatctctcctaaaaatacaaaaattagctgggcatggtggcgcacacctgtaatcccagctacttgggaggctgaggcaggagaatcacttaaacccgagatagaggttgcagtgagctgagatcgcgccactgcactccagcctggacaacagagcaagactcatctcaaagaaaaaaaaaaagaccctattggacacagagaat

SEQ ID NO: 47461 - DNA, 607 bp, Homo sapiens
attagtgaacttaggtgatgggcatagggtatttatcgaactattcttgtaacttctctgtaacaggaaagaaatacatacatacacttcatctttgaaagtgagagagagaaggaaggaaagaaatactgaatagtactaggtacctggggggatgagtgaggtgctagtttccaaggacagagtgagggtatctcttgtgggattggggtccacaagaatgtgcagctcccttgcaatgggaacttgtggggaatgccattcagaaaatgaaataaaatctacagatccggccaggtgcggtggctcatgcgtgcaaccccagcactttgggaggccgaggaaggcagagcacctgaggtcaggagtttgagaccagcctggccaacatggtgaaaccccatctctcctaaaaatacaaaaattagctgggcatggtggcgcacacctgtaatcccagctacttgggaggctgaggcaggagaatcacttaaacccgagatagaggttgcagtgagctgagatygcgccactgcactccagcctggacaacagagcaagactcatctcaaagaaaaaaaaaaagaccctattggacacagagaat

SEQ ID NO: 47462 - DNA, 522 bp, Homo sapiens
gattacttactttgtgctgggcagtatgctaaattctttatacatggtaactctttatgcttgtaacttcgtgaggtatcacagtcctcatttttacagatgaaacttcagcccagaaaggtaatttgcccgaacagcaaattctgaaactggaattggtggctctggtgcccaagcttgcatatttagaccaggcatcagtaatagcctcagttttgtttattgctttgttaagccttagttttgaagcacttgttaagtgcgaggctccatgtrgagtgtataaacactcaatctctgtgtgacgacagctccaaggagcagtccagcaagttctgtctggccaaatctagacctggttttgattaactttgttcatgatctctagatcactctgctctatgcttgaacctgtatgcttgagtcaagcttacctctctgatgggtgaagaaaatgatatttcactgttatattaattttatttttcttaccacaaaggaaggatatctcttcatttttct

SEQ ID NO: 47463 - DNA, 288 bp, Homo sapiens
tggtaaatatgagtggatgacatatagtggtgtccggagccatgaataaagacaaggagagtgggaacctagtaccacacaactcccaggcaacttgccttaccctgaaaggcaarttaaggccaggaaatcaagttttgtgttgatttgctctatggcatcgtcatttgtacaatgtagagggcatactgcttagtatcgattttactctgatgattgcttaacaagcatagttatgcctaaatgactgatgagacaagtgacccaccaaggtggcagtgagacaaa

SEQ ID NO: 47464 - DNA, 569 bp, Homo sapiens
aatgtagtgtaggaggaggatggaattgaatacaatattggggagagctttagatatgtactcttcttcagaaagcaaactaatgctgaaatcactgaagtataatagagtagcttctgtctaattctttttttcacttttggaattctgctgcaaagaaatgcatgcagatgtgaattcacacaaaatatctaagaccactgcatataagcaaggaaatttacataattcttgtgatatttatacagatgagcagccagctatttcccaccaaagtggacaataacaaagatactaaaatattaaatagtaagatattgttatgttgaataccatatagtcttagaaccattttccttaaaaggatctctgggtgctacactatgtcacacccacatatttgtgctttttcaataataagatcactttttaaaaacagaacaacatgttgtactttgaaatatcccattggtgcctagtgttttttcatcaaccacacgctrttggctttttcatggatatttttggcctaaaaaataatgaacaggtggtgttgtggtaagaagtca

SEQ ID NO: 47465 - DNA, 570 bp, Homo sapiens
ggttttttatttgccttataagtgcaattttacaatctaaaatgtacattccaaaggtatatttatatttacagaatttaatgtaatataatatttacataaatttaaygtttttttatgttcaacatgtacacagcagataagtgaaattcactacaagattttttgtttttttttttaagtatttttagtatatccaacatagattctgtgcagagaggcagttgtgtttcttcctttttactttttgttttgttaaattgcactgactatgacttccaataaaatgttaccagattaggtcagagcagacatctttgctatgtgctcaacttacaggaaaagtttgaaattttaaacctaagtatggttatggatatatgttttcaccttttattcagattgataatggtctttctattcttggtttgctgagtttttaattttttaattataaatggattccgttactgactttttgttgtacttctcctattgagataattatattatttttatccaagttttccttaatgtgctcagttatactgtctttttgattattaaacc

SEQ ID NO: 47466 - DNA, 570 bp, Homo sapiens
ggttttttatttgccttataagtgcaattttacaatctaaaatgtacattccaaaggtatatttatatttacagaatttaatgtaatataatatttacataaatttaatgtttttttatgttcaacatgtacacagcagataagtgaaattcactacaagattttttgtttttttttttaagtatttttagtatatccaacatagattctgtgcagagaggcagttgtgtttcttcctttttactttttgttttgttaaattgcactgactatgacttccaataaaatgttaccagattaggtcagagcagacatctttgctatgtgctcaacttacaggaaaagtttgaaattttaaacytaagtatggttatggatatatgttttcaccttttattcagattgataatggtctttctattcttggtttgctgagtttttaattttttaattataaatggattccgttactgactttttgttgtacttctcctattgagataattatattatttttatccaagttttccttaatgtgctcagttatactgtctttttgattattaaacc

SEQ ID NO: 47467 - DNA, 570 bp, Homo sapiens
ggttttttatttgccttataagtgcaattttacaatctaaaatgtacattccaaaggtatatttatatttacagaatttaatgtaatataatatttacataaatttaatgtttttttatgttcaacatgtacacagcagataagtgaaattcactacaagattttttgtttttttttttaagtatttttagtatatccaacatagattctgtgcagagaggcagttgtgtttcttcctttttactttttgttttgttaaattgcactgactatgacttccaataaaatgttaccagattaggtcagagcagacatctttgctatgtgctcaacttacaggaaaagtttgaaattttaaacctaagtatggttatggatatatgttttcaccttttattcagattgataatggtctttctattcttggtttgctgagtttttwattttttaattataaatggattccgttactgactttttgttgtacttctcctattgagataattatattatttttatccaagttttccttaatgtgctcagttatactgtctttttgattattaaacc

SEQ ID NO: 47468 - DNA, 580 bp, Homo sapiens
ctatgctgtctcccagaggtcccagtggaaaaaaaaggttcagttaaccatagcaataaactggtcattaccgtcttctttattggatttcttccttcctctgtctcactttcccattccctgttgttgctccctgaatccacctcctaattaagctttatacatgacagctcttgtatcaaatactgtttctgaagccaacccaatgcaatgctaaagctggagaagaaataaaacccataacaaaactcaccagcttatttaacagatgactgagatgyttggaagaatcctagggagttttctgagaaatgttctggccctacccacagttagtgttttggcctgtctccttgcaaatatgcacggtcataaattagggcaaaaaaaaaaaaaagttaagctctgcaattttatgttttccaaaataaaaccattgttttgattaagctatacaaaaagcatgtgttttattttaattataatgcaaaataattatttttcttacacatttgtcttttttatgatacaaaattttctgccatttttttccctttctctttcattatttttgtataac

SEQ ID NO: 47469 - DNA, 609 bp, Homo sapiens
ccaggactgatgcagggtgaggacaggggaccaggcctcctcccacctgtgactctccctgtcctgcccacccacccacggaaccacaggaatgtgctagggattgcaggggatgttgtgcccactctgctaccttccatccctgtgcactgccctaccagccccctccccgcacctgctgcaggggccccgggggtgccagggcctgcccaggtcccagatccagactttcaaggtgtgcaaatcacaggatttgtcctaacaagagggagggaagcttccaatgtcatctccctgcatttctgagccaccgaggacttcagaatcacttaaaggtagtgcaattcacccccaaatcacttacttttccaaaaattggggccagctagggggtgtctgggatgcagcggaaatcacctatggggaagtcagtgctgtaacaacaatgctggcttgatcccttcctgccccccacctgctcacacaccacacactcataccacacacttataccacactcacagcayacaccacacttataccacacacgctcacaccacacatgcacactcacaccaaactcatcacagccacatcacacaccataca

SEQ ID NO: 47470 - DNA, 545 bp, Homo sapiens
tatgcacttytcgggggtgggcacaatatttatattcgggtcactggttgctgtatggacgaggcacatctaccttaaaaaagaagctgctgagaggggacaaggggcttgttggggagggggcactgagggcggagagaaggaagaggagaggagacaaagcccctgggcttgctcatttcctgctctatgtaccgtgacttacctagagttctttcagcctttaaataattgaagaccatcttaagtatcagggccttcatgaaagtaagtaatatgcccagtggcctgtctgagctaggataaaaatctaaacactctgaaaggatcgctgtgtgtgtcataaaggaggaatttgtcaacaaaatggaagggcagatacctgtctgtgctggtgccagagtctggttgagagctgtctaaggattgcagcccccagaaatgctcagggcagagtgggtgcacctggaaggacggatggtggagttgtccttgagtgttcacaactgtgtggcctttaatgggatgtctgcttgaaacagagt

SEQ ID NO: 47471 - DNA, 545 bp, Homo sapiens
tatgcacttctcgggggtgggcacaatatttatattcgggtcactggttgctgtatggacgaggcacatctaccttmaaaaagaagctgctgagaggggacaaggggcttgttggggagggggcactgagggcggagagaaggaagaggagaggagacaaagcccctgggcttgctcatttcctgctctatgtaccgtgacttacctagagttctttcagcctttaaataattgaagaccatcttaagtatcagggccttcatgaaagtaagtaatatgcccagtggcctgtctgagctaggataaaaatctaaacactctgaaaggatcgctgtgtgtgtcataaaggaggaatttgtcaacaaaatggaagggcagatacctgtctgtgctggtgccagagtctggttgagagctgtctaaggattgcagcccccagaaatgctcagggcagagtgggtgcacctggaaggacggatggtggagttgtccttgagtgttcacaactgtgtggcctttaatgggatgtctgcttgaaacagagt

SEQ ID NO: 47472 - DNA, 545 bp, Homo sapiens
tatgcacttctcgggggtgggcacaatatttatattcgggtcactggttgctgtatggacgaggcacatctaccttaaaaaagaagctgctgagaggrgacaaggggcttgttggggagggggcactgagggcggagagaaggaagaggagaggagacaaagcccctgggcttgctcatttcctgctctatgtaccgtgacttacctagagttctttcagcctttaaataattgaagaccatcttaagtatcagggccttcatgaaagtaagtaatatgcccagtggcctgtctgagctaggataaaaatctaaacactctgaaaggatcgctgtgtgtgtcataaaggaggaatttgtcaacaaaatggaagggcagatacctgtctgtgctggtgccagagtctggttgagagctgtctaaggattgcagcccccagaaatgctcagggcagagtgggtgcacctggaaggacggatggtggagttgtccttgagtgttcacaactgtgtggcctttaatgggatgtctgcttgaaacagagt

SEQ ID NO: 47473 - DNA, 614 bp, Homo sapiens
atttgtaactcagatgttacctggggttgcctgattctttgatatataaaaaggasttgaactctatcctaggtgctctgcaacgttagaagcttgtggtctcatggtccactcttgctctgatttctggttgctccagaactcttggtcacacatctgtctcacctgtggctcttcccctctgttttctgtgtgaacccaccaccagcttcttctccttggtttaccccaaacaattctcatacatggcatttgtgtgcagtggacattcctagttctttgtggataccagttgggggacagtagcacatagatagtttagggttaaatattagttttcttttaaaaattatcctggggaatatgcacctttgatatgacatgatgaaaatggcactttgcctctgaagtctatttcattcaaacccctaacctcagtctaagtatagaaaaacatcagacagcttgcaacagagggccgtcctatgatatgccttagcaggactttccaaaactctcaaggtcatcaaaagcgaggcaagtctgagaaacagtcacagccaagaggagcctatggagacataatgataaatgtaatgtggtatcctagatgg

SEQ ID NO: 47474 - DNA, 511 bp, Homo sapiens
gtggttttattttcagcccagatgataagcacttggcaaagttaggatgcatcgagatcccagtctttaatttataggcatcttgtagacagaaaataaaggtacaagcattaagaaagcaatagtttttttctttaagtcaagccacatgtggagctgggtccatatactttacagatgaatttttttcttcatccccttttmttttaccatctgattttcttacaacactaattttatgcatggagttgtttgcattctccagagttctagggaccatgacactgtacacagaggagaagaactgactgaatgcctagctgaggcctctgatccatgacatagaggatgaacatctaggatctatggtatcctcaaggccatcactcttacattctatcttctttcctgttacacagaatgaagaatagggtaaaagagaaaaatatgacaaaaattctaataaagtaaacaaagccactgaagaccaagccagtttctttgtctaaaa

SEQ ID NO: 47475 - DNA, 594 bp, Homo sapiens
atatattatctacatatctctctatataaatacatagttatgaagagaagtaggcaaagatttgcttggggagtcatggaaatatttagaaaatattggccttttaatatccagaagttagaatacatatatttacagtaaagatggcaaggaagcatattagttgatgtattttaagaatgggacagatctrccagaaaaaattagaaagaacaaaagttaattgaggaatataatcaataaactggattttttgggtatgtatatatgtaacacatgtgtaataattttacacatatgtagagaaaacttcatactctccaaatactgcatattcatcttttctctgtgttcataaaatatacatatttattgaagaacaaaaaaataaaaaaacaaagaaagtattaacatttgagttggcattccaacaacaaatcagattttaaacattcattttaatcagagaaagcattctagtttacagcatgtttgggaacaattaacatgtatataatgaggagtggtcacagatcacaggaagtgaggctggaaaggtggctggggcaaaattgccaagactttttaattcca

SEQ ID NO: 47476 - DNA, 526 bp, Homo sapiens
ccgcccactccagccactgccgcacatggtctgtactccatagcgtaggatctgaaaggggtgggaacacattcagtcaattcctgaagccagggatcttcatcttggggtagatccccatccacgtgggatttctgaccagctgccttccacaagcacagcctccagccagcctccctggctacccaggagaacattttgggggaaagacaaaagctgcctcacatccatagatcattgtctttaaagtgaatagttctggaatcttgggattattcacatcacatgcccttgtttttgctcaatctaaagtttcctgtaggcataagattttaaaaattcttttttctcatttatgttcaattttatttatttattttaaartgagtaagaataagaggaaacttcttttccttagaaaactactggtatatttatatatatttatatggaaataagagtaagccacacatatcaggaaggtgctaattacagatcacaacaacaacaaaaataataataacag

SEQ ID NO: 47477 - DNA, 609 bp, Homo sapiens
tggagtagaattccatcattgaaagcagtgattctcagattttagtgtgtataagaattactaagaaagcttgttaaaaacagattactgaatcccgttcccagaatttctaatttgataaatcagtggtgcttgagaatttttctttaaacagttcctgagtgatacagaagccgcaggtctgagactacactttgaggtagaaatgactttttaaaatgtttttaatgtgtctttgacgtaactttcctaagagaaagcaaaytgtagacatggaaacaagctgcctctaatagctgtgggatgtgggtggggaaagacttgggaatggcacacagaaaaagctacattgctttctgaaaaccagaatctagtatcatgctgtgatggcttcgtgctgtgtgaccttggccaggctccatttcctgtccaacaattccctattcagcttccacatagggtgggctatttaaaaagatatgtattgacacaatcattctataatttaacctaaatattttcaaacataatcaatttaattattagattataaattttaagggcatgaaaatccacaaaaaattataattctttatccaaaactatgta

SEQ ID NO: 47478 - DNA, 440 bp, Homo sapiens
ccaaaaccccacacaggataccactgttgagagttcttgatgcctctatcagctaccccattattatgcctctatcagtatccccataagatagaggaacataacctctatcttatgttcctcctactgacccaacatgcaagataccaaacatatggttctgtgcctcacaaagctgtacttttaatcagtttgtgttagtccagatactctgaagaacagataccaagacagaggtaagtatgcaaggaawtcgttaggagaaatgtttgtaagggaaaaggggaaggtggccaggtaaggctgactccatgtgaagaagagaaggaaggaaaattgaatgaacgcattcttgaccaccagtgcagtctaataaagtttcagcaagatcattaggtaaatccccaaagccaaagtgggcatgcctcagtgtccccact

SEQ ID NO: 47479 - DNA, 440 bp, Homo sapiens
ccaaaaccccacacaggataccactgttgagagttcttgatgcctctatcagctaccccattattatgcctctatcagtatccccataagatagaggaacataacctctatcttatgttcctcctactgacccaacatgcaagataccaaacatatggttctgtgcctcacaaagctgtacttttaatcagtttgtgttagtccagatactctgaagaacagataccaagacagaggtaagtatgcaaggaaatmgttaggagaaatgtttgtaagggaaaaggggaaggtggccaggtaaggctgactccatgtgaagaagagaaggaaggaaaattgaatgaacgcattcttgaccaccagtgcagtctaataaagtttcagcaagatcattaggtaaatccccaaagccaaagtgggcatgcctcagtgtccccact

SEQ ID NO: 47480 - DNA, 609 bp, Homo sapiens
caagttatatttttgttgatcagataaaatagagacgtttcttgcgtttgccamcggcccccctcctcactctggtaacgatactctcaagttctaaatcattggttctcaaccaggggcactttctccccaggacacgtttgactatgtctggggatgttttggttattacaacttgggcagggaagaggagatagggaccaaggatgctgctgagtattctacaatgcacagcaaagctccccacaataaagagttttgcagtcccaaacatcaatagcgctgaggttgagaaaccctgttttaaagtgtcatgctgtctaaactgactaaactatcattgctcttaagcagatgatatagtatcagatataggatttcatataggatttgccctcaagtcccagggttttctgtaacttataatagaagagttgggagaaatcaagttaatcctagggatgtgctatgggttgaatgtttgggtcccttctaaaattcatgttaaaactgcatcccaagggcaacagtattaagaggtagggtcttcagaagttgattaggacatgagggctctgctctcagggttgggattagtgccttttaaaa

SEQ ID NO: 47481 - DNA, 602 bp, Homo sapiens
cgggatgaatttgttaataatcataaagacagtttaaagcatcaaggatgtttgtttttaaggccctttgtcctgctgctgaaggccaaattggtagcctggggttaaagctaaaaggctgtgttgtaaatgtactgttttatctctgtatggaaaaattttgacttgccatctcaagagagccatcacagatgtctcctaagaaagaactggttcacattttggctttaacaccatcagaatgatctgattatagattctcatccataaggagatagtatrtagtggttaaaagcatagactgctcaattcagagcacagttctgtcatttttttttcttagtgtccttgggaaaatcaagctctgtgtttctcagttttctcatctctaaaaatgggtataataatattgttataataatagtacctccctcattgcattttaaagattaaatgataaatatatgtgcatgacagaggaagtgatttgcaggtgtttgctattatactgctctgttttttttttttttaaataagaatgagccagctttttctgtattaaattactgtaccatttgtcaatttgctggaggtgcaccttt

SEQ ID NO: 47482 - DNA, 602 bp, Homo sapiens
cgggatgaatttgttaataatcataaagacagtttaaagcatcaaggatgtttgtttttaaggccctttgtcctgctgctgaaggccaaattggtagcctggggttaaagctaaaaggctgtgttgtaaatgtactgttttatctctgtatggaaaaattttgacttgccatctcaagagagccatcacagatgtctcctaagaaagaactggttcacattttggctttaacaccatcagaatgatctgattatagattctcatccataaggagatagtatatagtggttaaaagcatagactgctcaattcagagcacagttctgtcatttwtttttcttagtgtccttgggaaaatcaagctctgtgtttctcagttttctcatctctaaaaatgggtataataatattgttataataatagtacctccctcattgcattttaaagattaaatgataaatatatgtgcatgacagaggaagtgatttgcaggtgtttgctattatactgctctgttttttttttttttaaataagaatgagccagctttttctgtattaaattactgtaccatttgtcaatttgctggaggtgcaccttt

SEQ ID NO: 47483 - DNA, 628 bp, Homo sapiens
tgcatgtgggatttaagacctagatgacaggttgataggtgccacaaaccactatggcatatgtatacctatgttataatcctgcacattctgcacatatatcctggaacttaaagtaaaatttttwaaaaaaagaaagaattgctttctggtgaatggtaattgatttaaaatctactttaccaaaacaaaacaaaacaataagtcttttggatgaatgatgactgtcatcaattaaagctgcaaagtgcagagggacccatttcttgattatatccagccatttattttccatttgcaattgtaaaaagctttagtgtcatgaggatgatgatgattgtaaaaagaaagcatatcattgaatgccacagaggaactgtgacataaaaaaactaattaaaacaattatttttaatactacatatattttaatcacctaatttgaaaaacttttagtaactttataacacaaccattttcatgataattctaagttaaatgacaggcaatagagaatagatcaaagaagattatatagaatcaagaaagccatgaaacatatattttctttcctggaagcttagagaaatattttgttctagcactcttcctttcttaccacaaaagg

SEQ ID NO: 47484 - DNA, 571 bp, Homo sapiens
ttgtgtctccctggctactttcacactacaatggcagagtagagtaattgcaattgagtgtgcatacggcacacaaggcctagaatatttactctgtggccctttaaggaaaactgctccacaatcaggaagaaggtcatggaaaaggaggtgacatcagtgggaagaggcagtctggctccaattcactccctagaacaatggtggatgtctcccaagtagcactggtatttctgccttctactaaaaaagaaaaaattttttttgagacggagtctcactctgttgccccaggctggagtgcactggtgcagtcttggctcactgcaacctctgcctcccaggttcaagcgattctcctgcctcagcctcctgagtagctgggattacaggcgtatgccaccatgcctggctaatttttgtatttttagtacagacaaggtttcaccatrttggtcaggctggtctcaaactgctgaactcgtgattcacccgcctcggcctcccaaagtgctgggattacaggcgtgagccaccacgcctggcctaaaaaatttaaaaatccaaaacc

SEQ ID NO: 47485 - DNA, 575 bp, Homo sapiens
tgtctggttggactttgggattttcccctgtaggttaaaatttttttaattttaatttttattttttgagacggagtcttgctttgttgcccaggctggagtgcagtggtgtgatcttggctaactgcaagctccgcctcccgggttcacgccattctcctgcctcagccttccgagtagctgggactacaggcgcccgccaccacgcctggctaattttttgtatttttagtagagacggggtttcaccgtgtyagccaggatggtcttgatctgaccttgtgatctgcccgcctcagcctcccaaagtgctgggattataggcatgagccaccgcgcccagccaggttaaagtttttaaatttgcacattgaaattttctactaaacctgaaaatgtggtgcttgcgatttaaccatcactagttttactaccagaaaagtcacttgaaatgtctgtttaaatgggtgaatatgttataaatgcagattttgtttcatattgaattctcaaggcaatgttgaaccaaagattgaaaagtaggagaaacattcttcttaggaaatcgcagttgt

SEQ ID NO: 47486 - DNA, 601 bp, Homo sapiens
attctataatcatgtagacactcagactcaggggaaaatacaagttatatcctgaaagcctttaaaactctatggtaggatcaaagattcaaatggtttcagagaggttttatttcaattaatttgttctagtgctttcaagagcaagtacatcaaaatgtagaaggtaaaatgtatgcaacactaatataaattattccaagtctttaaggagccaaagaaaaaaaagatttctcacagctttttgttctgttttgtatttcaattaggaacttgcagtattattttgaaaaccattctaaaataataggagttaggaaataaataaagttttgctagccctgctaagttcaggcttagaggcttatcgctaagtrtaaacttcaccagattccacgaaaagctggatagctttttttctgacttatgttgtggttgcacccctcacaaatggcagaacagtatgtaaagctggtaacacctcggtttcagtgcaccatgtgtttgctttgtgaaggtgaagaatatgttggtttagagaaagaaattggatgtaattttatgcaatttacttttaaagacaaacataactatttagcag

SEQ ID NO: 47487 - DNA, 538 bp, Homo sapiens
caaaactaaactaaaacaattaatatcctcccccaaaactctagaaacattttagacccatagttattctgaagacatcagttaagtttatttttcattgtcattaatggcaagtttgataagtttactcaatattatttgaaattattagcaggcttatttcaccattagcaagaagsaggtgctgaagcagcagctaaatctattactttttttttttaaatgatttcctattcatgccctacaagtgtgagggaaatctctgaattttataactcaattgcccactttactttctttctgttgggcactgtgtggtaactacttggtttggtgaaaatgaactaaattaatatttctaaaacataagtttatgtttttgtaaactgcaaatacatattagattttgtatagtatgggaaatatacaatttaaacaagtttaatttttttatattttaaacttacgtagctttaatctcatcagttttttcttaaacaatacctagtgagtgctgacataaccatatgcggtaact

SEQ ID NO: 47488 - DNA, 538 bp, Homo sapiens
caaaactaaactaaaacaattaatatcctcccccaaaactctagaaacattttagacccatagttattctgaagacatcagttaagtttatttttcattgtcattaatggcaagtttgataagtttactcaatattatttgaaattattagcaggcttatttcaccattagcaagaaggaggtgctgaagcagcagctaaatctattactttttttttttaaatgatttcctattcatgccctacaagtgtgagggaaatctctgaattttataactcaattgcccactttactttctttctgttgggcactgtgtggtaactacttggtttggtgaaaatgaactaaattaatatttctaaaacataagtttatgtttttgtaaactgcaaatacatattagattttgtatagtatgggaaatatacaatttaaacaagtttaatttttttatattttaaacttacgtagctttaatctcatcagttttttcttaaacaatacctagtgagtgctgacataaccatatgcrgtaact

SEQ ID NO: 47489 - DNA, 540 bp, Homo sapiens
gcttccaataaatacctttgctcaacgaaaaaatgaaaacccagtggctcacgcctgtaatcccagcactttgggaggccgaggcaggtggattgcctgaggtcaggagtttgagactagtctggccaacatggtgaaacactatctctactaaaaatacaaaaaaattagctgggtatggtggcttacgcctataatcccagctactcaggaggctgaggcaggggaattgcttgaaccagggaggtggaggttgcagtgagctgagatcgcaccactgcactccagcctgggtgacagagcgagactccatctcaaaataaaaaagtaaaaaaaaaaaaaaaaaaggaaaccatattctaagatatgaaccactacagctaagcaaatgacaaataaaggtcatctgactcagtcaaagatacctattgtgaggccaaaaggttgtaaaaacaaagagaagtgatggaatagggaagagagctcaggagtttrggaaaatgtaggcaggcagaagacgatacaccaagacttacaaat

SEQ ID NO: 47490 - DNA, 551 bp, Homo sapiens
ttaggagatttcaacttaacttgaccgctctgagctaaacctagccccaaacccactccaccttactaccagacaaccttarccaaaccatttacccaaataaagtataggcgatagaaattgaaacctggcgcaatagatatagtaccgcaagggaaagatgaaaaattataaccaagcataatatagcaaggactaacccctataccttctgcataatgaattaactagaaataactttgcaaggagagccaaagctaagacccccgaaaccagacgagctacctaagaacagctaaaagagcacacccgtctatgtagcaaaatagtgggaagatttataggtagaggcgacaaacctaccgagcctggtgatagctggttgtccaagatagaatcttagttcaactttaaatttgcccacagaaccctctaaatccccttgtaaatttaactgttagtccaaagaggaacagctctttggacactaggaaaaaaccttgtagagagagtaaaaaatttaacacccatagtaggcctaaaagcagcca

SEQ ID NO: 47491 - DNA, 624 bp, Homo sapiens
accaacatggcacatgtatacgtatgtaacaaacctgcacattgtgcacatgtaccccggaacttaaagtataataataataataaaaagagtcagccccctagcctggcagtgctgctctacaggcaccctcagccctgatcccttcactgcacctaggggacacagtttacaggactgagtcagtgggacaccctgttcctttacaytcccagtcatgggctcagattctgcacttgtctcactgctggagggaggagcctgcatcagtcaccctcaaagaagacatgaagttatttcacctgtaaaggcaagaaactgttcgcagcactgggggcaggcttggggaagatgaggtttgtgaggatgttgagaattcatgcagctcatccttcagccctatagctttccagagaagtgtataatgggggtcactaggcatgtgagtaactgatttggtgaaagatgccacttcagatcaaaagtgcatttccccttccccaaggtgtcagcaacactgaaacatatttgactaactttatagaggaagattaagatagaggatgagagagacataaggcctcaggaatatcttagccaatagaaagcctgctggaagatgca

SEQ ID NO: 47492 - DNA, 624 bp, Homo sapiens
accaacatggcacatgtatacgtatgtaacaaacctgcacattgtgcacatgtaccccggaacttaaagtataataataataataaaaagagtcagccccctagcctggcagtgctgctctacaggcaccctcagccctgatcccttcactgcacctaggggacacagtttacaggactgagtcagtgggacaccctgttcctttacattcccagtcatgggctcagattctgcacttrtctcactgctggagggaggagcctgcatcagtcaccctcaaagaagacatgaagttatttcacctgtaaaggcaagaaactgttcgcagcactgggggcaggcttggggaagatgaggtttgtgaggatgttgagaattcatgcagctcatccttcagccctatagctttccagagaagtgtataatgggggtcactaggcatgtgagtaactgatttggtgaaagatgccacttcagatcaaaagtgcatttccccttccccaaggtgtcagcaacactgaaacatatttgactaactttatagaggaagattaagatagaggatgagagagacataaggcctcaggaatatcttagccaatagaaagcctgctggaagatgca

SEQ ID NO: 47493 - DNA, 1835 bp, Homo sapiens
tttctttctttctttctttctttctctctctctctctctctctctctctgtctctctctctctgtctctctcccctccctccctccttggtgccttctcggctcgctgctgctgctgcctctgcctccacggttcaagcaaacagcaagttttctatttcgagtaaagacgtaatttcaccattttggccgggctggtctcgaactcccgacctagtgatccgcccgcctcggcctcccaaagactgctgggagtacagatgtgagccaccatgcccggccgattccttccttttttcaatcttattttctgaacgctgccgtgtatgaacatacatctacacacacacacacacacacacacacacacacacacacacacacacacacaccccgtagtgataaaactatgtaaatgatatttccataattaatacgtttatattatgttacttttaatggatgaatatgtatcgaagccccatttcatttacatacacgtgtatgtatatccttcctcccttccttcattcattatttattaataattttcgtttatttattttcttttcttttggggccggcccgcctggtcttctgtctctgcgctctggtgacctcagcctcccaaatagctgggactacagggatctcttaagcccgggaggagaggttaacgtgggctgtgatcgcacacttccactccagcttacgtgggctgcggtgcggtggggtggggtggggtggggtggggtgcagagaaaacgattgattgcgatctcaattgccttttagcttcattcataccctgttatttgctcgtttattctcatgggttcttctgtgtcattgtcacgttcatcgtttgcttgcctgcttgcctgtttatttccttccttccttccttccttccttccttccttccttccttccttccctcccttactggcagggtcttcctctgtctctgccgcccaggatcaccccaacctcaacgctttggaccgaccaaacggtcgttctgcctctgatccctcccatccccattacctgagactacaggcgcgcaccaccacaccggctgacttttatgttgtttctcatgttttccgtaggtaggtatgtgtgtgtgtgtgtgtgtgtgtgtgtgtgtgtgtgtgtgtgtgtgtgtgtgtgtgtgtatctatgtatgtacgtatgtatgtatgtatgtgagtgagatgggtttcggggttctatcatgttgcccacgctggtctcgaactcctgtcctcaagcaatccgcctgcctgcctcggccgcccacactgctgctattacaggcgtgagacgctgcgcctggctccttctacatttgcctgcctgcctgcctgcctgcctgcctatcaatcgtcttctttttagtacggatgtcgtctcgctttattgtccatgctctgggcacacgtggtctcttttcaaacttctatgattattattattgtaggcgtcatctcacgtgtcgaggtgatctcgaacttttaggctccagagatcctcccgcatcggcctcccggagtgctgtgatgacacgcgtgggcacggtacgctctggtcgtgtttgtcgtgggtcggttctttccgtttttaatacggggactgcgaacgaagaaaatttycagacgcatctcaccgatccgccttttcgttctttctttttattctctttagacggagtttcactcttgtcgcccagggtggagtacgatggcggctctcggctcaccgcaccctccgcctcccaggttcaagtgattctcctgcctcagccttcccgagtagctggaatgacagaga

SEQ ID NO: 47494 - DNA, 539 bp, Homo sapiens
ggttcaaatgaagtgtaaaggacacatctctgtccacagtgtaaatcctatttccttaaggtggtcaaccgattgagaccagttccacacttccttaaagaaggaaaaactcagcagccagcgccaaggcccagcgatcagagaggacccgtgctcgccgcgaccccgctcgccctgtggccccgcgaccccggcgcaggtgttggggggacggcccttcccttccggtgtgaggggctggcttctcttcaggttgggggctggcaaactcgaacctcgccggcgcctagcmaaggcttcctccccggcgccttcggcccgcgtttccaacgcacattccaagcgcgcgcattcgacccaaacttcagagacgcttctgtggaacggaacggatggtcgctgacacctcgccgttcaaatatcaggaagttaaaaataacacgaccatcgtcatcattccaaacttcggaatagcttttctaaaaatggaaaagacggtggctaaacttcaatcaaaatcgctgtggtcaagaaagtcc

SEQ ID NO: 47495 - DNA, 539 bp, Homo sapiens
ggttcaaatgaagtgtaaaggacacatctctgtccacagtgtaaatcctatttccttaaggtggtcaaccgattgagaccagttccacacttccttaaagaaggaaaaactcagcagccagcgccaaggcccagcgatcagagaggacccgtgctcgccgcgaccccgctcgccctgtggccccgcgaccccggcgcaggtgttggggggacggcccttcccttccggtgtgaggggctggcttctcttcaggttgggggctggcaaactcgaacctcgccggcgcctagcaaaggcytcctccccggcgccttcggcccgcgtttccaacgcacattccaagcgcgcgcattcgacccaaacttcagagacgcttctgtggaacggaacggatggtcgctgacacctcgccgttcaaatatcaggaagttaaaaataacacgaccatcgtcatcattccaaacttcggaatagcttttctaaaaatggaaaagacggtggctaaacttcaatcaaaatcgctgtggtcaagaaagtcc

SEQ ID NO: 47496 - DNA, 539 bp, Homo sapiens
ggttcaaatgaagtgtaaaggacacatctctgtccacagtgtaaatcctatttccttaaggtggtcaaccgattgagaccagttccacacttccttaaagaaggaaaaactcagcagccagcgccaaggcccagcgatcagagaggacccgtgctcgccgcgaccccgctcgccctgtggccccgcgaccccggcgcaggtgttggggggacggcccttcccttccggtgtgaggggctggcttctcttcaggttgggggctggcaaactcgaacctcgccggcgcctagcaaaggcttcctccccggcgcctkcggcccgcgtttccaacgcacattccaagcgcgcgcattcgacccaaacttcagagacgcttctgtggaacggaacggatggtcgctgacacctcgccgttcaaatatcaggaagttaaaaataacacgaccatcgtcatcattccaaacttcggaatagcttttctaaaaatggaaaagacggtggctaaacttcaatcaaaatcgctgtggtcaagaaagtcc

SEQ ID NO: 47497 - DNA, 539 bp, Homo sapiens
ggttcaaatgaagtgtaaaggacacatctctgtccacagtgtaaatcctatttccttaaggtggtcaaccgattgagaccagttccacacttccttaaagaaggaaaaactcagcagccagcgccaaggcccagcgatcagagaggacccgtgctcgccgcgaccccgctcgccctgtggccccgcgaccccggcgcaggtgttggggggacggcccttcccttccggtgtgaggggctggcttctcttcaggttgggggctggcaaactcgaacctcgccggcgcctagcaaaggcttcctccccggcgccttcsgcccgcgtttccaacgcacattccaagcgcgcgcattcgacccaaacttcagagacgcttctgtggaacggaacggatggtcgctgacacctcgccgttcaaatatcaggaagttaaaaataacacgaccatcgtcatcattccaaacttcggaatagcttttctaaaaatggaaaagacggtggctaaacttcaatcaaaatcgctgtggtcaagaaagtcc

SEQ ID NO: 47498 - DNA, 539 bp, Homo sapiens
ggttcaaatgaagtgtaaaggacacatctctgtccacagtgtaaatcctatttccttaaggtggtcaaccgattgagaccagttccacacttccttaaagaaggaaaaactcagcagccagcgccaaggcccagcgatcagagaggacccgtgctcgccgcgaccccgctcgccctgtggccccgcgaccccggcgcaggtgttggggggacggcccttcccttccggtgtgaggggctggcttctcttcaggttgggggctggcaaactcgaacctcgccggcgcctagcaaaggcttcctccccggcgccttcggcccgsgtttccaacgcacattccaagcgcgcgcattcgacccaaacttcagagacgcttctgtggaacggaacggatggtcgctgacacctcgccgttcaaatatcaggaagttaaaaataacacgaccatcgtcatcattccaaacttcggaatagcttttctaaaaatggaaaagacggtggctaaacttcaatcaaaatcgctgtggtcaagaaagtcc

SEQ ID NO: 47499 - DNA, 567 bp, Homo sapiens
gggggccagggcttcctgtaccagcccaacccccgcctggcacccctcagccgcgaggggcctgcccgcccctaccgcctcaagccaggccatgtcctggatgtggaggtgagggccaccttcaaccctgccccgccacggtgctcaggccgcctctgtgggggccagcrgcttaggctcccatgtgtgtcccagggcgagggcctcaacctgggcatcagcaaggaggaggtgcgcgtgcacatcggccgcggcgagtgcctggtgaagacgctcacgcgcacccacctgtactgcgagccgcctgcgcacgccccgcagcctgccaatggctccggcctgccacagttcgtggtgagtccgtgccctgggtgggcaggtggaccgggtgccgccagcatgcactcaggaaccctgcccgccccccaggtgcagatgggcaatgtgcagctggccctgggccctgtgcagtacgaggctgaacccccgctgtctgcctttcccgtggaggcccaggcaggcgtgggcatgggtgctgcagtgctgattgccgccgtgctcctcctc

SEQ ID NO: 47500 - DNA, 538 bp, Homo sapiens
tgcctgacctcttaccctccccctccaaattcttttcgcttttcagcatgaargcaagcgcttatttgtataactagtagaaggacataacctgacccctccccccacccccaaattctttaagaatctctcgttcgacaatgagtaaatgaaagacagtgggacatcgccacctggtggtagaaatgccaaaatacttaagaagagagaactcaattaacaagtgaaagcctgcgatacaggccagtaagtatacaaagaagtaacattcagatacaaaaataagatacaaagaagtaacattcagaagccactcctaggaaactgtttaattgtgatgcagttagtacttgttccttctcacatatacagatttaaatatcatctttatgttggtgaatttttatttttattttttaaaaattttatttatttatgtatttatttttgcgacggagtctcaccctgtcgcccaggctggaacgcagtggcgcaatctcggctcactacaacctccgcttcctgggttcaagcgatt

SEQ ID NO: 47501 - DNA, 569 bp, Homo sapiens
tttgtgctacgattttacaatggctataatgtcactaggtgayagcaatttttcagctccattataatattatgggagcactgtcataaattgttgatggaaataccattatatggtgcgtgactgtataataaaacctgttccagtttgaaccattggccagagacaccaacagacacaatgtaatcaagatgtagaccccaatgtcagccttctagacacaaatgaaacaacacccaacttagctcaagaacactttctaaaagcaggaggctccagttccccaatctgtgggaacaaggagaaccacagtaagtgaagaggaaaatcattatctctgaacttgtcagaagaaaaatcccatcaaggaatgcttttgagaacttgaattctagggaagcccactggaggccacagccactacagaaatatagaggccacagcttcctgacatgcggtgaggccacatctccactcacttcctgtcagtaggtgtcacttgaacaaattttctcatgtcctggccagtcacctggagcctggaggcatgtcttactttgcatacacct

SEQ ID NO: 47502 - DNA, 1533 bp, Homo sapiens
tcactgggactcaaaacctcacagcctcagagaagtttttgcttgggtctagtctaaaaacagcaatgagggtgagataagctccaaggaccagccaaggtagagttcatctggagccacgaggttaatattgagataaactctaaaacttcccaagaacaaaatcagtgaagcaggccaggcgcagtggctcatgcctgtaatcccagcactttgggaggccaaagtgggtggatcatctgaggtcaggagtttgagaacagcctgaccaacatagtgaaaccccatctctactaaaaatacaaaattagctgagcatggtggtrtatgcctgtaatcccagctacttgggaggctaaggaagaatcccttgaatcttggaggcggaggttgtagtgagctgagatcgtgccattgcactccagcctgggagacaagagcgaaattccgtctcaaaaaaaaaaaaaatcagtgaagcagccaagctttaccaaggggcagagccagctgccagcatctgtttagaaagactgcttcagggccaggtgtggtggctcacgcctgtaatcccagcactttgggaggctgaggtgggtggatcacctgaggtcgggagttcgagaccagcctgaccaacatggagaaaccccgtctctactaaaaatacaaaattagccggacatggtggcgcatgcctgtaatcccagctactcgggaggctgaggcaggagaatcgcttgaacccgggaggcggagctcgcgatgagctgagatcgcgccattgcactccagcctgggcaacaagagcaaaactccctctcaaaaaaagaaaaaagaaagcctgcttcagaccagtaagatggtgctaggagacgtaggagacatgggttaggttgatggactttcaggggactgttcccagatggatctcaggaggaaccaagaagtgtctaaaggatatatatagggagaaggagaactctggggataggcttgcctcactgaaagaaccagacatcatcagggagcatccaaggtgtgtgtattgcggctgtggggatggggtgggtgtggataaagagaaagagacatacacacacacagagaaaatgaacaaataaattctgggaagggtaaggatttcatgggtcttgagttgaggccaacccaaggcttcctaggctggggtattctaaggcagggtgaataggagagggctggaggtcctatgtgcccaggaaaacttttcaacccagaaaactgacaaagctttacttcatcctcaacccagaaatctctacgtggccttctcatctggttttatacttcggtatttactatgttgatttccccacagttctcttggtttaggagagtaccttttgaaatttccaatcctacttggctgaatggaggtgtccccatcacagccaacatagctaggcagaacacagcatccttagcggctgtcctagctggacagcacagcaaaatgtggggctgttagaatgctcacagatgtacagttcctcc

SEQ ID NO: 47503 - DNA, 578 bp, Homo sapiens
ggcattatttttgtaagcatgtatgcaaattttggcaattcaagaaaatcaaacaggatatcagggcctcgactgtaggcaaacagatacaataacattggaaacatgtagaatattgatgatgggcacattggggctgatagtactattcctttttttcaatttttggtaagatataattagcataccatataattcatctatgtaaaatgcaaaaattggcccggctcagtggctcacgcttgtaatcccagcactttgggcggccgaggaaggcagatcacctgagatcaggggttcgagaccagcctggccaacatggtgaaaccccgtctttactaaaaatacaaaaattagccgggcgtgatagcaggcaactgtaatcccagctacattagaggctgaggcaggagaatcgcttgaacccgggaggcgkaggttgcagtgagctaagatcgtgccatcacactccagcatgggagacaagagcaagacttcatctcaaaaaaaaaaaattagctgggtgtggtggcatgcacctgtaattccagctactcgggaagctgagacaggagaat

SEQ ID NO: 47504 - DNA, 578 bp, Homo sapiens
ggcattatttttgtaagcatgtatgcaaattttggcaattcaagaaaatcaaacaggatatcagggcctcgactgtaggcaaacagatacaataacattggaaacatgtagaatattgatgatgggcacattggggctgatagtactattcctttttttcaatttttggtaagatataattagcataccatataattcatctatgtaaaatgcaaaaattggcccggctcagtggctcacgcttgtaatcccagcactttgggcggccgaggaaggcagatcacctgagatcaggggttcgagaccagcctggccaacatggtgaaaccccgtctttactaaaaatacaaaaattagccgggcgtgatagcaggcaactgtaatcccagctacattagaggctgaggcaggagaatcgcttgaacccgggaggcgtaggttgcagtgagctaagatcgtgccatcrcactccagcatgggagacaagagcaagacttcatctcaaaaaaaaaaaattagctgggtgtggtggcatgcacctgtaattccagctactcgggaagctgagacaggagaat

SEQ ID NO: 47505 - DNA, 559 bp, Homo sapiens
attgtgaggagtgagcacttgggagggacttgggatttctccaggggcctctgggacctgggtgagagaggcagattagactcatggatggaattctctaaccttcattttgggggtggggggttcactttccttgggctctgtagcaccaccccacatatagtaggaaggascatctctgatctctccttattgctttagagtgttttgagcatttcccttccaaaaaaagaaaaatcttcacaagtttttgcagggctgatgagctcctttcttgtcttcctgtagcagagtctatcaagctgccttgagggtttcttgtgcagattaaaaactaggcttcatgagctccgttgggcactagccaggcatcttaaccaccttcccaaggaaaagcatctcattgtttaatggcgggttgaaacttggcaaccaaggagcagaaccagcattcagactgggtgagcagaggctccagcttgggttggaggaccctgggacaaccttgtctaaatatcttctctcattcgcacatagcccgcctcctgccagggtgtga

SEQ ID NO: 47506 - DNA, 526 bp, Homo sapiens
cagagaatttgcttggaaaacagtttcaaggaactgattcaggagaagaacctctgctccccacctcagagagttttggttggtttccttgtttcctaacactgtgatgttttgggataggaacatacagtattatttttttacaagcagtatgatattacttctctaaaacaaatgttcctggcacaaaataccatttccgtcttctctgttctaattgaaagggagatttcaatcagcagttgaactaacattggcatycattgacttatatagaaagaaagactccgttaatgtgtgtaaatgacctgtgtacacttttggcttctttattgtaagtaaccagggtgacatagcaaaaaaatacaatggtgtctcaccatatttacatataaattactcatattcaaaattactgccaattacaaaacagaaagataacagtttgtatactgtgcaattattcctgctaaccttttaggtgggagcaggcccggggtaagtgtgagatgggagatgagaatct

SEQ ID NO: 47507 - DNA, 553 bp, Homo sapiens
gaatacatgtgttgagcttatggtatgttttrtaaaagcagatcccagccctcgtttcaagggctctttaagatttccttaggagaatctcaaagagaatggcaaaaatgcctaagtttcacaaaatacaaccttgaattcactttaaacaaaggaaaaagtctagttttaggaaagaagggagaatgtgttttacatgtaacaacaaattgctttttcaaagtgctgggtacagaagaggtatgaattgaagtttaatttgaaaagattggatatcagcattctgagattacagaaaattcaacgcgtgactcctcaggttcagtgcgtgctcttagacataggtgaagggaagcaaaagttcctattggaatactaccactcacctccttcccaactcccattgccccctccaccagtaacatacctgtgtaccttaccctcacctgtgaaaggacccatatgtacataaacccagaagataccacagcaggaaggagtgatactggcttctcctccaggccatggcaaagtacaagctgcaggccaaatc

SEQ ID NO: 47508 - DNA, 553 bp, Homo sapiens
gaatacatgtgttgagcttatggtatgttttataaaagcagatcccagccctcrtttcaagggctctttaagatttccttaggagaatctcaaagagaatggcaaaaatgcctaagtttcacaaaatacaaccttgaattcactttaaacaaaggaaaaagtctagttttaggaaagaagggagaatgtgttttacatgtaacaacaaattgctttttcaaagtgctgggtacagaagaggtatgaattgaagtttaatttgaaaagattggatatcagcattctgagattacagaaaattcaacgcgtgactcctcaggttcagtgcgtgctcttagacataggtgaagggaagcaaaagttcctattggaatactaccactcacctccttcccaactcccattgccccctccaccagtaacatacctgtgtaccttaccctcacctgtgaaaggacccatatgtacataaacccagaagataccacagcaggaaggagtgatactggcttctcctccaggccatggcaaagtacaagctgcaggccaaatc

SEQ ID NO: 47509 - DNA, 553 bp, Homo sapiens
gaatacatgtgttgagcttatggtatgttttataaaagcagatcccagccctcgtttcaagggctctttaagatttccttaggagaatctcaaagagaatggcaaaaatgcctaagtttcacaaaatacaaccttgaattcactttaaacaaaggaaaaagtctagttttaggaaagaagggagartgtgttttacatgtaacaacaaattgctttttcaaagtgctgggtacagaagaggtatgaattgaagtttaatttgaaaagattggatatcagcattctgagattacagaaaattcaacgcgtgactcctcaggttcagtgcgtgctcttagacataggtgaagggaagcaaaagttcctattggaatactaccactcacctccttcccaactcccattgccccctccaccagtaacatacctgtgtaccttaccctcacctgtgaaaggacccatatgtacataaacccagaagataccacagcaggaaggagtgatactggcttctcctccaggccatggcaaagtacaagctgcaggccaaatc

SEQ ID NO: 47510 - DNA, 553 bp, Homo sapiens
gaatacatgtgttgagcttatggtatgttttataaaagcagatcccagccctcgtttcaagggctctttaagatttccttaggagaatctcaaagagaatggcaaaaatgcctaagtttcacaaaatacaaccttgaattcactttaaacaaaggaaaaagtctagttttaggaaagaagggagaatgtgttttacatgtaacaacaaattgytttttcaaagtgctgggtacagaagaggtatgaattgaagtttaatttgaaaagattggatatcagcattctgagattacagaaaattcaacgcgtgactcctcaggttcagtgcgtgctcttagacataggtgaagggaagcaaaagttcctattggaatactaccactcacctccttcccaactcccattgccccctccaccagtaacatacctgtgtaccttaccctcacctgtgaaaggacccatatgtacataaacccagaagataccacagcaggaaggagtgatactggcttctcctccaggccatggcaaagtacaagctgcaggccaaatc

SEQ ID NO: 47511 - DNA, 571 bp, Homo sapiens
gcttagcaggggaatggtctgccttgtgggaagttattcagacagaagtgtgaggtcgagctggagggagatggggcgttgtgaagaaatgagaaaaggaagatgcccggttgctcctggaaaaaggaacctctcacctctcctggtctggctctgcacagagctggagccgcggccgcacagaagcccgttcttgtgscttcctccgttggtcaagctctgtgccaagaggcctgccagaatcccctcacccactgcagcctccacaggtggatgttcccgctgtgaccacctcaccttctgaagtcggggtgtggagactatcggggagctcccagagcgcccacctcctcctgcgtacggcgtctgtgccagcaggaaagccggggaactgtgcggctctggctttgggggacggtggcaggtccacatgacaccccacatacatgaccccggtgctccagctgcttctcaaacactccgttctcgcagcctcaccctggggacccccgacacgtactagtcgcagtcctccatccccatgtcctcctcatgccttgtgcctcagctc

SEQ ID NO: 47512 - DNA, 556 bp, Homo sapiens; identical to SEQ ID NO: 21831

SEQ ID NO: 47513 - DNA, 612 bp, Homo sapiens
cactgagattagcatgtcattttatttcttgtactatctctttctgggacttgataacaccattatactaatctcatcagaagaaataccaaatatttatttccctataatctggaagaggttgaaaaaattaatttttctccatctaaaatggttgaaatgytcctctaaaactgattgggccttaaggaatctttatagagatttaatattactgtttcaaattctataatggtttcttctggagttaattggtaattcatatttttctaagaagtatccatactacctaatttatcacttttattataaaataattaataatatcttctttcttaccttttaatatctggcagcaatgctcttctgtatgtttcattcttcttgctctctgtgctttagtctggatattttctactgagctatgatccagctcactaaccctttcttctactgagaagaattggctgttaagctaacttactgagttcttaatttcagttgttaattctacaatttaacaatttccatttttaatagtttccgattgctgttgtaataaattacgacaaactcagtggtttaaaacaacacaaatttattatcatatga

SEQ ID NO: 47514 - DNA, 583 bp, Homo sapiens
cgcacactaccactcctggctactttttcattttttatatagatgaggtctcactatgtcacccaggctggtcttgaactcttgggctcaagtcatctgcccacctcggtgtccgaatgtgctgggattacaggcatgagccatcrtgcctggccacaaatcagatcattttaattactgaactgcaaaggggtaaatgctttaaaaggattccagcaaggtaagatgacaacaccaataatgcaacataggggcggataaaatctaaacagaaaagttacacaaaattatgatgcttcgctgtgatggtttcatggagaaatttagaaacaggtcaagcttcacagcatccctccacatcccttaacacacacgtgcaaatttgagagagttccagctttcctcatcaattacctttaaaattactaagtacactcaagaatataaaaattaaaaacaaatatatatgtatatatgtaaatgtatatatgtgtgtatatatgtatatatgcatacgtatatgcgtgtgtgtgtatatatatatatatatatattttttttttttttgagacggagcctcgct

SEQ ID NO: 47515 - DNA, 583 bp, Homo sapiens
cgcacactaccactcctggctactttttcattttttatatagatgaggtctcactatgtcacccaggctggtcttgaactcttgggctcaagtcatctgcccacctcggtgtccgaatgtgctgggattacaggcatgagccatcatgcctggccacaaatcagatcattttaattactgaactgcaaaggggtaaatgctttaaaaggattccagcaaggtaagatgacaacaccaataatgcaacataggggcggataaaatctaaacagaaaagttacacaaaattatgaygcttcgctgtgatggtttcatggagaaatttagaaacaggtcaagcttcacagcatccctccacatcccttaacacacacgtgcaaatttgagagagttccagctttcctcatcaattacctttaaaattactaagtacactcaagaatataaaaattaaaaacaaatatatatgtatatatgtaaatgtatatatgtgtgtatatatgtatatatgcatacgtatatgcgtgtgtgtgtatatatatatatatatatattttttttttttttgagacggagcctcgct

SEQ ID NO: 47516 - DNA, 576 bp, Homo sapiens
cttccagcactccccaaatccacctgcttttggaaggggcctgtctccgaagcaggccgggtcctcctgttgggggaagctttcatggaggcatctgtgtcacttctgcaggggagacagccgctagagggcactgtccttctggcctttcccacatccccgtttccatggcaggtgcatagtaaagcctttctttttctaacgacttaatgatttaatcttcttattttctcagcagacaacgctttggacttccctggatacattgggacgttaccagtcacattaattaatacgagtttcacaacttgggaaccagcgaacgtgcttctccagacttagcttctgcacggccgtttctgctttcctttatgaagtgcgtttctctaagagcctggcagtctcatggggctcgtctgttgctggaagtgagcagcgggttccattgccccccgcctcggtggggctcattgtgcagcttgctggcaagtggctgggctyggaggggcggtgacggtgacacacgccaggggaaaggttggcatcctcttctgagaattgtttcttttgggtttc

SEQ ID NO: 47517 - DNA, 608 bp, Homo sapiens
ggacttactcctggaagggccagggatctgtgggtgctgtgggggcagaggcagccgcggtagaataggaggcgctctctgctctctctccacatcctcactccacccctcattacatcctctgcccttggcctgaatgatgtcggctcggcatggacaccttgtgcatctttggtgaaaagggacctcaatgtcaggtgcagtttgccagggtgaccagacttcctgagcatggaccaggggaggtgaaaatggctggactccctgggtgagaaggaaggcttctccctgtggggcatgcactgtggcaggcaaggtgagcaggctgtccagggcagcttgtctgctgtctggggcagggtrtctgtctatctgctgtctggggaagtgtgtctgtctgtctgctgtctggggcagtttgctgtctgctttccggggcagtttgtctgtctgctgtctggggcagtttgtctgtctgtctgctgtccggggcagtttttctgtctgctgtccggggcaacgtgtctgtctgtctgctgtccggggcagtgtgtctgtttgtctctctgctgtccagggcaatgtgtctgtttgtctgtctgctgtcc

SEQ ID NO: 47518 - DNA, 608 bp, Homo sapiens
ggacttactcctggaagggccagggatctgtgggtgctgtgggggcagaggcagccgcggtagaataggaggcgctctctgctctctctccacatcctcactccacccctcattacatcctctgcccttggcctgaatgatgtcggctcggcatggacaccttgtgcatctttggtgaaaagggacctcaatgtcaggtgcagtttgccagggtgaccagacttcctgagcatggaccaggggaggtgaaaatggctggactccctgggtgagaaggaaggcttctccctgtggggcatgcactgtggcaggcaaggtgagcaggctgtccagggcagcttgtctgctgtctggggcagggtgtctgtctatctgctgtctggggaagtgtgtctgtctgtctgctgtctggggcagtttgctgtctgctttccggggcagtttgtctgtctgctgtctggggcagtttgtctgtctgtctgctgtccggggcagtttttctgtctgctgtccggggcaacgtgtctgtctgtctgctgtccggggcagtgtgtctgtttgtctctctgctgtccrgggcaatgtgtctgtttgtctgtctgctgtcc

SEQ ID NO: 47519 - DNA, 580 bp, Homo sapiens
tggaggagatgcctgtgagtcaaaagcccctgccaggtggctgttctgtctctgtgtctgtgccgtgggggccgtgtctaagcctgtgttrggaaggggtggttaggtagttcagccttggcgcccacacctcccgggatggggagctcactccttctggaggctgccacgggcactggggcaggagggctgagttaccgagtggcagagccccccacagtttatacccagatgcccatggcgggctgggacttggagctgctgggcagcgggaacagagtgtggtattaaagggggctgggctgggtgtagtggctcacacctgtaatcccagcgatttgggaggctgagatgggaggatcacttgagctcaggagttcaagaccagcctgggcaatatagtgagacctcgtccctacaaaaaatttaaaaatcagctggccgtggtagggtgcgcctgtcagctgaggtgggaggatcacctgagcccggaggccgagtcccccagactggccacaccgcggctattcagccttaggccagaggctttcctgtctaggtttcagagtccccatctgtc

SEQ ID NO: 47520 - DNA, 601 bp, Homo sapiens
tcgatatgggagctaaggagctgaggaaaaggcgtatctggaacatgacgagagctggtcattttgccaaatcgagccctcttctccactgtcctcattagaggctccccatcttttgcacggaccgttgcactaagtgatctttttaccagggccctgcctccctttcaactccaattccctctgtgactcctctcaacagctcccctggcaatcatgctcctacacgatccactctcgtctcagctaaacttcctagcctcacatccagcccacccttagctacagcctttcaaaattctttgccatcctctgacaataccactcgagcccagacctccagtcctttgcatttgctgtcaactccacttgacrtaatgcctttctctactttttctttctttcttttttttttttgattaatgaactcttctcatccattctttcacatcctactcaaataccacctcatttacgagattccttcaggaagagtttatgactctctcccgtgttcttttttgtttgtttcgttttggttttgagacagagtttcattcttgtcgcccaggctggagcgcaatggcgcgatgttggctca

SEQ ID NO: 47521 - DNA, 514 bp, Homo sapiens
tttctatctattctttactttcagttttattaaacaagagagactgtatgttaaaagaatagagttccttttaagaaaaaataatatcagctatttgtcatttgtcagaaatggcagatattttttaaagaggacactcactgttatcactaatttataaaaccatagtttctttcgagttgaagattcaagagcaattagaacatgtctgttttaaaatatggtagtcactaggtgtagcatcaaaagaaaaactatcaaagaataataaaactttaaattattctttttaacttaaatggatgtgtattttaaactatttttatctaagatattaagttaacatttaaagttggccacatgaaaagataggtcacatttyatgttcttgtgagtcaactgaaatactgaaggaaaaaaaaagtttgtttccttgctagtcattgtaccttgctggctagaaatgttccatggaatgtgtgagagtttggttccaaaatggctgcatataagg

SEQ ID NO: 47522 - DNA, 605 bp, Homo sapiens
taagttagaaataggtcccaaaactgtgagttttaaacaccagcacatagacaacttgaaatattgtttaaagtatttgaaataaatatggtttatatagacagttacttcaacaaggcatgctgtgcagcttcaatcctgctgttcagtgatgcttcaatacccttttgttgactattcaggaaattcactataggctcttttgctttcttcatactcactcagcttgcttactttcagcagttgacttaatcttttattayacaagaaaatataaatcattagttttaagtttcctgtcatttgcctcaaccccagtcagcctctcacctcaaaatatatttgcctatacctttgtctctgctgctgaatctgtcggtagctcttcccacctctttctttctcctcttaggaagatataatccttttgcactttgaactaagacttattgacatgtacttcttttaacttacacccaagttaaaaagtcaaacaatgttgaaaggttaattcaaaaataatcaatcctttggttttaaccctttcaactctttcagctattttttcattcatttgacatttcaccttcacattttaaaataga

SEQ ID NO: 47523 - DNA, 578 bp, Homo sapiens
ttaacaattaaattaagagaagcaaaagcaaatatatgcaggaagaacactgtcaccattccaccattttttatctacttttggggctaaattttgaattcagcatttttttgtattttaaaaaggcattatggcatacatattaccccatcatgtcagagatagtgctatacaaccaaacatattagtatttctgcttccagatataggaatatttacactaaatgcaatagagactaaaaaaaaaaaactttattatagctaaggttcaacttttgccaccaaataaattcaggtcagtttttctatcaaataatttaggaaaaagcaacaacatgacactttctttcttttttttttttttaacggattctgaattaaagatgagtgtttgtagttttgtaatccaacattatcaaattatatttcattttacctcattttaacatgtaacaaatgcaggttttacatcaattagtggctttagcttgttgtaactattgttattgttagaattkgttacaaatgaagcagattccctggtaatttttatacagaaaggccaaggaattcaattt

SEQ ID NO: 47524 - DNA, 1767 bp, Homo sapiens
tgcatttatttattgtgtttaatcatttatttatttatttataacttttatatattcttagcttttcgctgtggcctgcagtttttaggcaacattgcctcacggaatgaagattcccagtctattgtttgggtgcatgctttcccagaactgtttttgtgagtatattgataagcatttttctaacttgtgagaagattgtggctatatttttccattttatataaagttcgaaaacaggaaaaagtaacccactgtaatagagttcaggatagtagttgttcttggtgggtgggtaccagctgggagagggcactagggaaacacctgggtcctggaagtgttcgtctatatcttgaccttggtggtggttacatggatgtatacatatccaaactttgttcattgagctgtatgtacacttaagatttatgcccttgattgtatatcagtttacttttacaaaaataaagtcatggataaagtaagtaatattgttaaggacactgaaatttataagaaacacaattaaaatagagcatcaaagtatgggcaatgaattaaaattgtttatgtattgaatactgatatgctgagcacaatgctgtatgttttggaagataagaagaagatgtggataaacaatcagtttatccatgtaagaagtgagtaaccagtccatttatcagtgtaagatgtgggtaaccattccatttgtctcgattggatcctggtactttttctggtgattctacttcttaaaaaccagctctgttcataagaaattgagcattgaggtaaaaggtgagcagggaatagagtcagtatacctagtaggaaaggcacagtctgggagtgggagacctggctttgaatctaggctttggtgccaatgaatggggtgactttgatggttgcaacagtataagcagcacagcagggtagcagctgttgtgtacataccctgaactgggcattatccgtatattttttctgttctcacaatagcctgcagagtaagtgttactgtctccccatttggacagatgagagacctgaagctcatcactggtaaatggcagaggtagagtgtaaacccattgctgccatctggatctaaagcctatctatgctcattgtaaatactgtgctgcttaaattccgtaatgcccttccttgttgtacagctttcctgggctcctctgtgaagtatagcgttaagatgggataaactctaattcacctgtagctcatggaatttctcaaattcctgcaaataattaagagttgaaggtgtatatatattaatgttacatatattaatgatatttgagcttaggtggaagaagagaattacgaaattcaagctacagaaataggcattgcttatttttgagaattcattcccttaaaacgttttggatacctaatatctgccaggttttgggatagatgattagaatgtggtggtaacttatatattcgttattcctgaaggatttcattctttggttggggaagtaaaggaacaggcacataggttgtgatgtaagaactaaggtaattagggcaaatccagggtgtaatagaaaaacaagggagaggyttaagtgtaggtcagtcagagaagtcttaacagtttacatgttgcttttagatgatctcatttgatcgtcattaaaaaccctgtgaaatagaggttttgttattgtattttattttttataccagaaaacatattaagagaggttctttgccttcactttt

SEQ ID NO: 47525 - DNA, 605 bp, Homo sapiens
agatgagactcaaggagggccagccgcaggattttggttcagtctgatgatgtaacagtcagagtggactgtgatatgctgcaatataactaatacctcctaaattctcagttacagtgactcaggtttttaaaaattttttttattaatttattaattttattttttatttcaattggtttttggggagcagatggtgtttggttacatgaataagtttttaatggtgatttctgagattttggtgcacccctcaccccagcagtctacattatacccaatgtgtagtcttttatccctcaccccctcccaccctttcccgtgagtccgcaaaattcattctgtcatttttatscctttgtgtcctcaaagctaacctatcacttgtaagtgtggaatgtttggtttcccattcctgagttacttcacttagaataatggtctcaaatgccatccaggttgctgtgaatgcttcgattttattcctgtttatggccgagtagtattccatggtgtatatatatctatatatcaccttttctttatccgctcgttgattgatggtcatttgggctagttccatatttttgcaattgcgaattgtg

SEQ ID NO: 47526 - DNA, 604 bp, Homo sapiens
caaatagccacaaatgatagcttttccatttcactttttttgcttgccactattactcacttggtttaatggaatattttcattccagttacgattgcacctcaattactaggtctggtggttgatgaaatcaatagaagtagccactgctgaaatggaatatcttctgggtgaatctttattactttactgccccagtagatctataccctctcaggggtattggaaaactttcattaaaccttttgagagttatgatctaactggggagacaaaatacaaacaggctaaaactaagtaagatcactggatctaaatagaaattttcaataaaacctatgaggtgccacatggtggtctatgatcattgtttgattcaatggtgaagctaattctaaggcaggatgtctgatcttccagagatatacgtcacctaatagttgytacaattgattgggtcatgctggctggctcatgtccactctccttccagctcccttatttaacttacctcacctcctgtactctctgaaaatgtcatgttcagtcattgaattctacttcctgaggtgtagcagggcccatattcacatgagtagctgat

SEQ ID NO: 47527 - DNA, 604 bp, Homo sapiens
caaatagccacaaatgatagcttttccatttcactttttttgcttgccactattactcacttggtttaatggaatattttcattccagttacgattgcacctcaattactaggtctggtggttgatgaaatcaatagaagtagccactgctgaaatggaatatcttctgggtgaatctttattactttactgccccagtagatctataccctctcaggggtattggaaaactttcattaaaccttttgagagttatgatctaactggggagacaaaatacaaacaggctaaaactaagtaagatcactggatctaaatagaaattttcaataaaacctatgaggtgccacatggtggtctatgatcattgtttgattcaatggtgaagctaattctaaggcaggatgtctgatcttccagagatatacgtcacctaatagttgttacaattgattgggtcatgctggctggctcatgtccaytctccttccagctcccttatttaacttacctcacctcctgtactctctgaaaatgtcatgttcagtcattgaattctacttcctgaggtgtagcagggcccatattcacatgagtagctgat

SEQ ID NO: 47528 - DNA, 614 bp, Homo sapiens
tggtcattattaactaatccttaataagagaagcattcatcacttagcatggtggtttctgcctcatttggcttggctctgatgtgatgattttggcattcaggaagtgtcggaaggtttgcgtgtttggctggtgcacrcttgaaggatgaggcaacactgacaaaattcgtatgtcatgcatcctacccatgtattttctcctgttacatgcctctatccctgtgcattgagaaagaaaatgcagaactcttttcctctactgaatcccttcccacactgcccactacagaatgatacggtagttctggtgtgtcatattccatgtctcttttcctctactgaatccttgcccacactgcccactacagaatgatacagtagttccggtgtgtcatattccaggtccaaagcctccttcttaacccagatctaatcctcatgaagagatggagcatagcaagtttatgaatatcaggagcccacatgcctttattttaaatggcaaaaaattacattttcctagctcaacccactcaaaagcacaaaaccacaaaatacacaaatacacaaaaactctgaaactccaatataatctttcaagaatttctgcc

SEQ ID NO: 47529 - DNA, 590 bp, Homo sapiens
ttttttcaagtagcaacctctggaaagcagcaagagtagggatttgatggccgagcccatgccaggctatttgctaggtccctctagagacaggatcctgatgagtgctcacaaacagacctgggtaaagatctggaccatctccccattttatagatgggaacactgcagcccagggaaattatgaactttccgaatcacaaagctcagaagcaggagagccgcattkgaactcaggtcatctggctccaagtccacatgcttttgactccatcacagggccccaggaggattcacacattgtttgattcataccaccaaagatcaaactatttttggattccttatttttaagtaacacaaaaaaatcagcccaggctggggcaatagggagcacttataaccatttgctacttttatctgattttaaaagtaatacacattctttgtgtataaaaaaacaaaaattccttggcatgtacaaagaagtaaacaaaatgctcataattttacaatgcagaggaaactcctaacaacctttgtatatacatttttgatccaatgatcaatttcaatgtatataatatgca

SEQ ID NO: 47530 - DNA, 590 bp, Homo sapiens
ttttttcaagtagcaacctctggaaagcagcaagagtagggatttgatggccgagcccatgccaggctatttgctaggtccctctagagacaggatcctgatgagtgctcacaaacagacctgggtaaagatctggaccatctccccattttatagatgggaacactgcagcccagggaaattatgaactttccgaatcacaaagctcagaagcaggagagccgcattggaactcaggtcatctggctccaagtccacatgcttttgactccatcacagggccccaggaggattcacacattgtttgattcataccaccaaagatcaaactatttttggattccttatttttaagtaacacaaaaaaatcagcccaggctggggcaatagggagcacttataaccatttgctacttttatctgattttaaaagtaatacacattctttgtgtataaaaaaacaaaaattccttggcatgtacaaagaagtaaacaaartgctcataattttacaatgcagaggaaactcctaacaacctttgtatatacatttttgatccaatgatcaatttcaatgtatataatatgca

SEQ ID NO: 47531 - DNA, 540 bp, Homo sapiens
gaagatgtgacagaatccgtgcagatgttgaggccaaatgtatgtagcttggagggcacagtggtatggggcagagccrgaggaaacctgttgcaatcaagaagagttgagatgggccaggcggccaactgttcttcagctttacttaggaaaagggaaccgagcagcagcagcactagagtagaccgagggcagagaacttccctggctgtgaggagagaggctgggcagttctgagaatgccaaacccacctagacctgttacacccaggatagctatgttgcttagaggcctgggcgaactggcctacctctaggggaccccagttctctctccatgtgggcccagaccctttcttagccctcttttctcaggcaagccctcaacaaatatgtgttggattctaaagaggtaggaaagttggaagaagatggccagatgtttaattgacaaatacccttgaccatatagtttcacatgggcagatagcgtggggagatgtaatgggggcagcgctgagacagtggggtgagagagca

SEQ ID NO: 47532 - DNA, 540 bp, Homo sapiens
gaagatgtgacagaatccgtgcagatgttgaggccaaatgtatgtagcttggagggcacagtggtatggggcagagccagaggaaacctgttgcaatcaagaagagttgagatgggccaggcggccaaytgttcttcagctttacttaggaaaagggaaccgagcagcagcagcactagagtagaccgagggcagagaacttccctggctgtgaggagagaggctgggcagttctgagaatgccaaacccacctagacctgttacacccaggatagctatgttgcttagaggcctgggcgaactggcctacctctaggggaccccagttctctctccatgtgggcccagaccctttcttagccctcttttctcaggcaagccctcaacaaatatgtgttggattctaaagaggtaggaaagttggaagaagatggccagatgtttaattgacaaatacccttgaccatatagtttcacatgggcagatagcgtggggagatgtaatgggggcagcgctgagacagtggggtgagagagca

SEQ ID NO: 47533 - DNA, 534 bp, Homo sapiens
tcaccttgcattatcctccattatttgtttgctaacttatcttgaccaawtgatttccctagctgtaattgatgacaagaagaattcctaatactaatggtatgaaagtattctgatagcttattttccccccctggactttacagaggaaataatggaatgctagaagtagcagagtacgtgttttgtttgtttgtttgttttgttttgttttttgtttgttttttaactcctgagacaacaacctctttaatataccataccactcccagtgtaggaactagaatgacaaaatgacacaatgaatattgcagtaatggaagattgatcttgaagcagtgttgatatggggaccgagaaactgtttatatgttgctgaagagatgggaaaatggatccctctaaaggcaatctacctcttgcatgaagcctttcttatttcctgctgaaaattctctctcctctctgacctcccacatttatgcctatcttcttatggcatgttttcacttcctgtttttcattatagatatt

SEQ ID NO: 47534 - DNA, 1275 bp, Homo sapiens
tatatgcatgtatcaaaatatcacatgtactgataaatatgctcaattatcatgtatcaatttttaaaaattttttaaggaattgccacaactaccccaaactttagcaactaccaccctgatagtcagcagccatcaacatcaaggtaagaacttccaccagcaaaaagattatgacttgtcaaaggcttagatgctcattgacattttttagcaataaaatattcttttttttttttgagatggagttttgctcttgttgctcagcttactgcaacctccaccaccccggttcaagtgattctcctgcctcagcctcctgagtagctgggattacaggcatgtgccaccacgcccagcaaattttgtatttttagtagagacggggtttctccatgttggtcaagctggtctcgaactcctggcctcaggtgatccacctgcctyggcctcccaaagggaaaccaatttgtgtgactcactttattgcaatattcactttattgcagtggtctgaaactgaatctgtaatatttctgtggtatgcctgtattttttcattgatgtatctttatcaccgggaacacaatatgtgctcaataaatatttgctggcaatgctcagcattaattaaagaacatgttttctgtgtgatacatatgtacctggccaaataacatctgatttttttttttttttttgagacaaggtctcactctgttgcctaggctggagtgcagcggtgtgatcatgactcactgcagccttgaccttccggattcaaatgatcctcctgcctcagcctcctgagtagctgggaacacaggtgcacaccaccacacccagctaatttttgcatttttttttaactgcagagacaaggtctcactatgttgcccaggctggtctcaaattcctgggctcaagcgatcctcccatcttggtctcccaaagtgcagggattacaggcatgagccatcacacccagccaacatctgatcttttctagtggaatatttcaatgtcttgattctcaggaccacttttccaaaagataattaagagtagcttcatccatccaaccacacactcactcattatccacaacccatccatccatttatccactccatctttcgccatccatccacccattttatctaccattcatccacctacccacccatccatttacccatacacccatcatccacccatcatacacccaccatctatccatccatccacccacccatccatccacccatccatcca

SEQ ID NO: 47535 - DNA, 1275 bp, Homo sapiens
tatatgcatgtatcaaaatatcacatgtactgataaatatgctcaattatcatgtatcaatttttaaaaattttttaaggaattgccacaactaccccaaactttagcaactaccaccctgatagtcagcagccatcaacatcaaggtaagaacttccaccagcaaaaagattatgacttgtcaaaggcttagatgctcattgacattttttagcaataaaatattcttttttttttttgagatggagttttgctcttgttgctcagcttactgcaacctccaccaccccggttcaagtgattctcctgcctcagcctcctgagtagctgggattacaggcatgtgccaccacgcccagcaaattttgtatttttagtagagacggggtttctccatgttggtcaagctggtctcgaactcctggcctcaggtgatccacctgccttggcctcccaaagggaaaccaatttgtgtgactcactttattgcaatattcactttattgcagtggtctgaaactgaatctgtaatatttctgtggtatgcctgtattttttcattgatgtatctttatcaccgggaacrcaatatgtgctcaataaatatttgctggcaatgctcagcattaattaaagaacatgttttctgtgtgatacatatgtacctggccaaataacatctgatttttttttttttttttgagacaaggtctcactctgttgcctaggctggagtgcagcggtgtgatcatgactcactgcagccttgaccttccggattcaaatgatcctcctgcctcagcctcctgagtagctgggaacacaggtgcacaccaccacacccagctaatttttgcatttttttttaactgcagagacaaggtctcactatgttgcccaggctggtctcaaattcctgggctcaagcgatcctcccatcttggtctcccaaagtgcagggattacaggcatgagccatcacacccagccaacatctgatcttttctagtggaatatttcaatgtcttgattctcaggaccacttttccaaaagataattaagagtagcttcatccatccaaccacacactcactcattatccacaacccatccatccatttatccactccatctttcgccatccatccacccattttatctaccattcatccacctacccacccatccatttacccatacacccatcatccacccatcatacacccaccatctatccatccatccacccacccatccatccacccatccatcca

SEQ ID NO: 47536 - DNA, 502 bp, Homo sapiens
tggagaaatgtctcttcgggtcctccgcccattaaaaaaatggggttgtttgtcttttagttgttgagttgtaagagttcttcatatcgatttatttttattgagctattatcaccgctgtggttgtttcctcagtagggctctgtctgaatccccaggcatcatgaatgtcctctgctkagaaggaaagggactataaatgccccttctcttgagtaacccactcaccgacttgtctgcatcaacttccctccagagagcagagctaataatcccctttctcactggcctcagccctccttgaaaattactctgaaggctccctggagtcctcttacctaaatgcctcccccggggctgcttagatggctttgtggggggctctccagctgggagaaggagattctctggggaagagcacaggcttccagctccctagacctgtctcaccttccacccctggtgggttagagactctggggactctaggatgagcccaggg

SEQ ID NO: 47537 - DNA, 502 bp, Homo sapiens
tggagaaatgtctcttcgggtcctccgcccattaaaaaaatggggttgtttgtcttttagttgttgagttgtaagagttcttcatatcgatttatttttattgagctattatcaccgctgtggttgtttcctcagtagggctctgtctgaatccccaggcatcatgaatgtcctctgcttagaaggaaagggactataaatgccccttctcttgagtaacccactcaccgacttgtctgcatcaacttccctccagagagcagagctaataawcccctttctcactggcctcagccctccttgaaaattactctgaaggctccctggagtcctcttacctaaatgcctcccccggggctgcttagatggctttgtggggggctctccagctgggagaaggagattctctggggaagagcacaggcttccagctccctagacctgtctcaccttccacccctggtgggttagagactctggggactctaggatgagcccaggg

SEQ ID NO: 47538 - DNA, 2199 bp, Homo sapiens
cgtctgtacctctcctgagacgtcacacttggaccagcatggttctctagatgtagtccatggatggggtggtgcccagatgaattttagtcccctgtgacccagacactctgctacagccagagtaacttgaaactaaattttcatttagcaatcacattaggacttagtgaacaattgcttgttgtctgtttattcacctattgacgtttttcaagcacccactataagtttagtatgtctgttaaactatagcttagacatggccttctactcactacagtttctaaggaaggagaaccaaccttagaaaaataaaattctttttaacaaatagttggttgccctccattgtagctcccccaaaaagccttccacagactcattctcaaaagtaagtgtcgcatgtttaaaaaattggaccgggacctgaaactacatagcggcaaaggctcttcctccactggcatctatccaggatgaattagtaaaaatctttaaatctgttgtcagtctgacataaggattagttaatgtattttatgcaaaggcaaagccagcacagattctcattttaataagaaatatatgatatagaaagataaattttcatctttatatcattgatatagtacattatacagatgtacctaattaagagataatgatatgtaatatggtaggcattaataacaaagacaatgtggaagattgtaggacaaaccatcagtgaaatgattgtattaggatatagcttttgtaatagaagaaaacatgctgtaatgaaggcatgaaaaatacagttgtttacagtgacttttccaggtttggtcactgttcagtccagggtaggtgatgagaaagaacagaacgcagactccaggcaagaaggagagtagagtagataaaagaacctcctttcttgtttcctgtactccttcctgttgattacaggctgcctctgaccatacacccaaagaaaggggtaacaactttaacccttaacttaggtgaggactagtttgagaaacacctgatagtaaggaataatcaagggcatggaaagataaatggcctggagtcatcctttcctgacttttccaaatctctccatttttgtcattgtcagaagtagtttcatttggaccatggcagctacagggtgcaagtatttttcctttacctttaatgcatcttggaacaggtggagtaggtggaggttggagagcacagaacaaatgaaaaaaagaaaaacccacatctgacccaagaagactgaagatggactctctgactcctatttgcctccagactcctaggactaattcagttcagcaaacagtctaccaaaatacactgtgctagtcattataggatcccaaagacaagagatgtatcactcccacagtctagtggggaggaaatggcaccaacacccagataatgagaatcaagagtagaatgtgctaaatggcctaaggagcccataacccctggcccayggactggtactggtcatggcttgttaggaacccagccacacagcaggaggtgagcagcgggctagcgagcactgctgcctgagccaaaaaggttggagacctctggcctgagagaaacagagtgttgtagaagcttaaaaggcaaaagccttcacatttaatttggggacttggggtccccaaattactcaaactattgagtaaatagtctgtgaggtaaaccttaaaggatgaataggattttcataggtaaagatgagcaggaaaatgcatgctaggttgttactccagagggaagtcccaagtgatgttgtgcacacagaattcttcacctactgtacctaaagagctaagtagtaaagacatccatgttcttgctctctgggtctcgtagtatcatgaagataacccagattattctcagagctagagatcacctttgcttccttgacaagtcacgtgcaattttgacagccagctaccaggttaacaaatataaatgtgaacccaggatacagatagagtcaggtctttttcctcctcttaaaggcaattagtagttattgacctggggcttctgggtaaatgattgtctaaaacatccatttgtaaaggacatctttacaactccgtaagcactaactttcgggtagccaacttcagcagactagaaaaatcagcatattatgtatttaag

SEQ ID NO: 47539 - DNA, 2199 bp, Homo sapiens
cgtctgtacctctcctgagacgtcacacttggaccagcatggttctctagatgtagtccatggatggggtggtgcccagatgaattttagtcccctgtgacccagacactctgctacagccagagtaacttgaaactaaattttcatttagcaatcacattaggacttagtgaacaattgcttgttgtctgtttattcacctattgacgtttttcaagcacccactataagtttagtatgtctgttaaactatagcttagacatggccttctactcactacagtttctaaggaaggagaaccaaccttagaaaaataaaattctttttaacaaatagttggttgccctccattgtagctcccccaaaaagccttccacagactcattctcaaaagtaagtgtcgcatgtttaaaaaattggaccgggacctgaaactacatagcggcaaaggctcttcctccactggcatctatccaggatgaattagtaaaaatctttaaatctgttgtcagtctgacataaggattagttaatgtattttatgcaaaggcaaagccagcacagattctcattttaataagaaatatatgatatagaaagataaattttcatctttatatcattgatatagtacattatacagatgtacctaattaagagataatgatatgtaatatggtaggcattaataacaaagacaatgtggaagattgtaggacaaaccatcagtgaaatgattgtattaggatatagcttttgtaatagaagaaaacatgctgtaatgaaggcatgaaaaatacagttgtttacagtgacttttccaggtttggtcactgttcagtccagggtaggtgatgagaaagaacagaacgcagactccaggcaagaaggagagtagagtagataaaagaacctcctttcttgtttcctgtactccttcctgttgattacaggctgcctctgaccatacacccaaagaaaggggtaacaactttaacccttaacttaggtgaggactagtttgagaaacacctgatagtaaggaataatcaagggcatggaaagataaatggcctggagtcatcctttcctgacttttccaaatctctccatttttgtcattgtcagaagtagtttcatttggaccatggcagctacagggtgcaagtatttttcctttacctttaatgcatcttggaacaggtggagtaggtggaggttggagagcacagaacaaatgaaaaaaagaaaaacccacatctgacccaagaagactgaagatggactctctgactcctatttgcctccagactcctaggactaattcagttcagcaaacagtctaccaaaatacactgtgctagtcattataggatcccaaagacaagagatgtatcactcccacagtctagtggggaggaaatggcaccaacacccagataatgagaatcaagagtagaatgtgctaaatggcctaaggagcccataacccctggcccacggactggtactggtcatggcttgttaggaacccagccacacagcaggaggtgagcagcgggctagcgagcactgctgcctgagccaaaaaggttggagacctctggcctgagagaaacagagtgttgtagaagcttaaaaggcaaaagccttcacatttaatttggggacttggggtccccaaattactsaaactattgagtaaatagtctgtgaggtaaaccttaaaggatgaataggattttcataggtaaagatgagcaggaaaatgcatgctaggttgttactccagagggaagtcccaagtgatgttgtgcacacagaattcttcacctactgtacctaaagagctaagtagtaaagacatccatgttcttgctctctgggtctcgtagtatcatgaagataacccagattattctcagagctagagatcacctttgcttccttgacaagtcacgtgcaattttgacagccagctaccaggttaacaaatataaatgtgaacccaggatacagatagagtcaggtctttttcctcctcttaaaggcaattagtagttattgacctggggcttctgggtaaatgattgtctaaaacatccatttgtaaaggacatctttacaactccgtaagcactaactttcgggtagccaacttcagcagactagaaaaatcagcatattatgtatttaag

SEQ ID NO: 47540 - DNA, 506 bp, Homo sapiens
cgtagtagaaatatgagcttagttctgtgttagactgttatacaataaatggcagaaattaacatcgtattatattttaggaccctagctatcacggctccttttttttttttttgagacagagttttgctttgtcgcccaggctggagtacagtggcgcagtcttggctcactgcaatctccacctccccggttcaagcaattcccctgcctcagcctcccaagtagctgggattacaggcgcacgtcaccaggctcggctaattttttttgtatttttagtagagagagggtttcaccatgttggccagactggtttcaaactcctcacctcaggcaatcgmctgcctcagcctcccaaagtgctgggattacaggcgtgagccaccgtgctgggccacagtttcccctctaagagtaaggtgcatgtcttactcgttgtatctccacagttccttgtatattgcaactttgataactatttgctaaatgaatgagaactgtaa

SEQ ID NO: 47541 - DNA, 1326 bp, Homo sapiens
aagtgtctaccatatcggacagcacagatctagagcagtgtttttcagactctaatgtgcatgtgaatcttctgaggatcttgttaaaatgcagactggaattcagtacatctggtctgaatctgtgattctgcatttttttttttttaagacagagttttgctcttgttacccaggctggagtgcaatgatgggatcttggctcacggcaaactccacctcccgggttcaagtgattctcctgcctcagcctcgcgagtagctgggattacaggcatgtgccaccatacctggctaattttgtatttttagtggagacagggtttctccatgttggtcaggctggtcgcgaactcctgacctcaggtgattcgcccaccttggcctcccaaagtcctggaattacatgcgtgagccaccatgcccggcccgattctgcatttttaattagccccaagatgctcctggtctggggaccacatattgagaagcatgtctctagactagatatacttatgtccatttgttttagattattacctgaaaggaaatactgaaagtaaaaattctcacagaactctaggattttcagggggcctcataccccaatttagggatcccgtcctggtgtgctactgctacagcatacatagtagcaggcaagcatatagccaggaaggttcagtgagcttgccaagggctcaccctgggatgcatgacaagttgagtttttcattatgcttttcatatagtattaaaaakaatcttatggtaaaataaagacacttatttcatctttcccactctttttttaaaaaaacaaattaatttttccttcttgtaggttttgcgtgtgaagctgtgtggaaatgtgaaatactaccagtcacaccattatagtaccgtggtgccacctgatggtaagctttcttaccatttatttgattcatatgttaattgtttccctttcttccaaataaagagctgcgagagttttgagcagaatagacttttcttacactatccccatcccaccccaccctgattgggttcacttccacctttttgtgctcccataatatagctgctgtcttttgtcaaattcccacctcagaatcagaggagtcagagatgataagcaatagtcgggtgggtgtggtggcctgtaatcccagcactttgggaagccacggcaggcggatcacttcagctcaggagtttgggaccaacctggccaacaaagcaaaaccccatctctacaaaaaatacaaaaattagccaggtgtgatggcacatgcctgtagtcccagctacccaagagattga

SEQ ID NO: 47542 - DNA, 546 bp, Homo sapiens
aatgatgctgtctatatttccwtatcatgtgtgctatttcagatatcgaatattgacacttttccatgtgactttcgaaaaaaaagtcagttatgttatttttttgtttgtttttgcattattttttaaagcagtacacctcagtggtttcaaatgcctgaacttctatgctatcttccttttcttttccccacattagcaaagttaaccaatgacatgggcataggcaactcactttcctccttgacccagattgttaagaaacccaaacatacttttatggaagtaaatcattgcaactcagcattacccagctattaatgttacagtataagagtaatgaaggtcaccggctagggccatccttgtgtattgtgccattcttgaatgggagtaactctgctatccaaagactctcagcaccatgtcaaaccggctggcttctagtaatgctgaagaaggcctatgtctaagcacatgtggagatgagcactgaggtaagccctaaaagcaagtttttctgcctcttttgggaacatttctaca

SEQ ID NO: 47543 - DNA, 575 bp, Homo sapiens
ttggagagccaatttgctatctgtgaacttttgcagatgcgtgaatcgtgagtgagatagagaggtgacatatatttgagtgtgtggtatgggggagagaaagagtcactttttgtgctcttccgggcacgtcttcaaacacaccatgctgtcccccacacagtgagtagaattatcccaactgtttttaagttttaaagtgctaacaaacagaaaaaacaatgaaaataattttctcttcaaggatctctgagaactctggccacacctcattcttaaaagcataatatgtgagtgactaggacagaattctttccytggattcccttagagaatgtctcacgaaataacgtctcatggcaatgaatcatcggctcaggatccgaccagtaagccactggccacatttctatttttaagagtcactaggaaaagttggaaataattttagaaaataaagaaaatactctttggcctttctttcattttcttttcatttggggagtaagtggagaatgggggaagagatctcatgtctttgattcatgtaaagccaagttctggaaatatagcaa

SEQ ID NO: 47544 - DNA, 575 bp, Homo sapiens
ttggagagccaatttgctatctgtgaacttttgcagatgcgtgaatcgtgagtgagatagagaggtgacatatatttgagtgtgtggtatgggggagagaaagagtcactttttgtgctcttccgggcacgtcttcaaacacaccatgctgtcccccacacagtgagtagaattatcccaactgtttttaagttttaaagtgctaacaaacagaaaaaacaatgaaaataattttctcttcaaggatctctgagaactctggccacacctcattcttaaaagcataatatgtgagtgactaggacagaattctttccctggattcccttagagaatgtctcacgaaataacgtctcatggcaatgaatcatcggstcaggatccgaccagtaagccactggccacatttctatttttaagagtcactaggaaaagttggaaataattttagaaaataaagaaaatactctttggcctttctttcattttcttttcatttggggagtaagtggagaatgggggaagagatctcatgtctttgattcatgtaaagccaagttctggaaatatagcaa

SEQ ID NO: 47545 - DNA, 550 bp, Homo sapiens
ctgacttaacccttttagcttttatccacagccactcagttccactgttgtgattcttattttgaaatggctcatatatctcttccattcattcatctcttcctttcattctattcctactgcaatgcccttctttaaaagccggcctgatgactcccacctgtaatcccagtgctttgggaggccaaggcaggagaatcccttgagcccagaagttcaagaccggcctgagcaatgtagtaagactcccatatctataaaacatttaaaaaattaaaaaaaacaagcaaacaaaacaatgcccttctctatgcttactccatctatcagcctatatctggttactcgcctttccataaccaactcctccaatcttgctctcgcaagcccactttctcacatacattcatgccatgaagtcttcccaaatcactgtcatttatcatatgctcgggaaaaattactaccccctcaggcctcagtttcctggagacatgtttcttctccttgccattcatcctcctctgaggcttagttcaratatcctctc

SEQ ID NO: 47546 - DNA, 535 bp, Homo sapiens
cttttcttgtaattttactgacaattctccttcacactgattagttctttctctaattcctgtaaatggaaagaaccaaaaaaagttgaaaaaacatgtattgtacatataacaaacaatcatatgtggtatacaatatatatcaaatgagtattaagataaacattcaaagagttttaaagaaaaaagtgttatagatattggagggcagaagatacaattgccattaagaacaggtggaggaggttatgccaaggacattgacctgaccctttaggaattagtgaaaattgaataggagaagaatgaggtacacaatgtgtgaaaaatacctaaattgatataacaggaggagaccttttcatatcaattatcattacttctgtgtatataaccatattagatacccacaaacaaatagaaagtggatagttcttgattgacaagtargactaataatcccagatcatagtaaggtcttaacttcaagtcaataatctttattacttatggttcattcctctccctcatgttt

SEQ ID NO: 47547 - DNA, 535 bp, Homo sapiens
cttttcttgtaattttactgacaattctccttcacactgattagttctttctctaattcctgtaaatggaaagaaccaaaaaaagttgaaaaaacatgtattgtacatataacaaacaatcatatgtggtatacaatatatatcaaatgagtattaagataaacattcaaagagttttaaagaaaaaagtgttatagatattggagggcagaagatacaattgccattaagaacaggtggaggaggttatgccaaggacattgacctgaccctttaggaattagtgaaaattgaataggagaagaatgaggtacacaatgtgtgaaaaatacctaaattgatataacaggaggagaccttttcatatcaattatcattacttctgtgtatataaccatattagatacccacaaacaaatagaaagtggatagttcttgattgacaagtaggactaataatcccagatcatagtaaggtcttaacttcaagtcaataatcyttattacttatggttcattcctctccctcatgttt

SEQ ID NO: 47548 - DNA, 1397 bp, Homo sapiens
cgcccggctacgggttcttcttttcaatccttttcaatcctaagaaggacataacatgctgaagtgaaggtatattaggatggttttctctgatttttttttttaatttgatcctaagtatggtatcatgaaygtcacatgttaggatctagcagagtttgaagaattattgtaaacccctgtaaacacagagcaaggtagaaagtgattttcatcgttctcttgctcctcttaccatcctacctgggaaatacactcccattcttatttggactgatttttttcctatgtagtgcagtggccttcattttaaagcctacaattcaacatgatgtttttgggtttagaagttatgttcttgatggtgtgaaagctacatcaaatttcagatttgtcttgtgtaatgtgatacatggacatgcggtcgctggtattggttgcttgtagccaaagaaccataaaaagtacacctaggaatagggcctatggttttgacagtaagtatcgttagagatatagctttccttctaagttggcctactaggttgagattaatgaggaaggtgtgtgtgtgtatacacataccattcactcaatcaattccagtgaaataacacagagaagacaaaaaaagtggccattagggaaaataagtggaccatgggcacagaaaacctcctgttccattcagctgtgctaattagtaatgagcataacattctttttttttttttttaaggccagacggtgtcatttagtaaaataaataaatactcctccctgccatttactaatagtctgaagccttggttgctagttctgcctctatctgttactagtcatatgatcctaggaaattggaaacttctctgagcctcaggtttctgcatctacaaagtggagatagacctaactattgtgttatcttcacctttaaagaatatagtgttcatgaaattgctctgtaaactggacagtggggccttggtgtaaggcattatgttcaggtgtgagttgagattccccgaggtatagagatcttgcattggcacttgagggtcttgaagaagattttcaatttcaatttatgcatgtacccaccggctgtattgacacagcacaaagccaagggcagatttgacaatgatttctttaattttattgatgtgaactgcaaaactgggccattcagtctgcaaagtatctaggctgtaatgatctgacattggctgtctacattcatcaaattaagtggataattagcaaaacaccatttgactttgtgatgtaaagacagtaattgtggctctttctcaattaaaaatctcatccaaagtcatgattttggttgtcacatctgtgcagatgatttccacatttgtttatacctccagctt

SEQ ID NO: 47549 - DNA, 1397 bp, Homo sapiens
cgcccggctacgggttcttcttttcaatccttttcaatcctaagaaggacataacatgctgaagtgaaggtatattaggatggttttctctgatttttttttttaatttgatcctaagtatggtatcatgaacgtcacatgttaggatctagcagagtttgaagaattattgtaaacccctgtaaacacagagcaaggtagaaagtgattttcatcgttctcttgctcctcttaccatcctacctgggaaatacactcccattcttatttggactgatttttttcytatgtagtgcagtggccttcattttaaagcctacaattcaacatgatgtttttgggtttagaagttatgttcttgatggtgtgaaagctacatcaaatttcagatttgtcttgtgtaatgtgatacatggacatgcggtcgctggtattggttgcttgtagccaaagaaccataaaaagtacacctaggaatagggcctatggttttgacagtaagtatcgttagagatatagctttccttctaagttggcctactaggttgagattaatgaggaaggtgtgtgtgtgtatacacataccattcactcaatcaattccagtgaaataacacagagaagacaaaaaaagtggccattagggaaaataagtggaccatgggcacagaaaacctcctgttccattcagctgtgctaattagtaatgagcataacattctttttttttttttttaaggccagacggtgtcatttagtaaaataaataaatactcctccctgccatttactaatagtctgaagccttggttgctagttctgcctctatctgttactagtcatatgatcctaggaaattggaaacttctctgagcctcaggtttctgcatctacaaagtggagatagacctaactattgtgttatcttcacctttaaagaatatagtgttcatgaaattgctctgtaaactggacagtggggccttggtgtaaggcattatgttcaggtgtgagttgagattccccgaggtatagagatcttgcattggcacttgagggtcttgaagaagattttcaatttcaatttatgcatgtacccaccggctgtattgacacagcacaaagccaagggcagatttgacaatgatttctttaattttattgatgtgaactgcaaaactgggccattcagtctgcaaagtatctaggctgtaatgatctgacattggctgtctacattcatcaaattaagtggataattagcaaaacaccatttgactttgtgatgtaaagacagtaattgtggctctttctcaattaaaaatctcatccaaagtcatgattttggttgtcacatctgtgcagatgatttccacatttgtttatacctccagctt

SEQ ID NO: 47550 - DNA, 1397 bp, Homo sapiens
cgcccggctacgggttcttcttttcaatccttttcaatcctaagaaggacataacatgctgaagtgaaggtatattaggatggttttctctgatttttttttttaatttgatcctaagtatggtatcatgaacgtcacatgttaggatctagcagagtttgaagaattattgtaaacccctgtaaacacagagcaaggtagaaagtgattttcatcgttctcttgctcctcttaccatcctacctgggaaatacactcccattcttatttggactgatttttttcctatgtagtgcagtggccttcattttaaagcctacaattcaacatgatgtttttgggtttagaagttatgttcttgatggtgtgaaagctacatcaaatttcagatttgtcttgtgtaatgtgatacatggacatgcggtcgctggtattggttgcttgtagycaaagaaccataaaaagtacacctaggaatagggcctatggttttgacagtaagtatcgttagagatatagctttccttctaagttggcctactaggttgagattaatgaggaaggtgtgtgtgtgtatacacataccattcactcaatcaattccagtgaaataacacagagaagacaaaaaaagtggccattagggaaaataagtggaccatgggcacagaaaacctcctgttccattcagctgtgctaattagtaatgagcataacattctttttttttttttttaaggccagacggtgtcatttagtaaaataaataaatactcctccctgccatttactaatagtctgaagccttggttgctagttctgcctctatctgttactagtcatatgatcctaggaaattggaaacttctctgagcctcaggtttctgcatctacaaagtggagatagacctaactattgtgttatcttcacctttaaagaatatagtgttcatgaaattgctctgtaaactggacagtggggccttggtgtaaggcattatgttcaggtgtgagttgagattccccgaggtatagagatcttgcattggcacttgagggtcttgaagaagattttcaatttcaatttatgcatgtacccaccggctgtattgacacagcacaaagccaagggcagatttgacaatgatttctttaattttattgatgtgaactgcaaaactgggccattcagtctgcaaagtatctaggctgtaatgatctgacattggctgtctacattcatcaaattaagtggataattagcaaaacaccatttgactttgtgatgtaaagacagtaattgtggctctttctcaattaaaaatctcatccaaagtcatgattttggttgtcacatctgtgcagatgatttccacatttgtttatacctccagctt

SEQ ID NO: 47551 - DNA, 536 bp, Homo sapiens
gccaycacctcccgcccggcccctctggccccagcgccgccggctccggggttcacgctcgggggtcctggctcgagcctctacccggcccgcgcgaaccctgggccgcacagctcccgcccgcctaggtgctggcccgggcggtcagcgtctagccccgcagactcggtgattctcgtccactagaggccaaagcctgggaaccagagcaagcgatgacctgaacaggcgcaggaagcgagggcagtgcggaggtggcgcgcatgtgcgagcacgcacgcgcgaacacgcacgcagggagaggtgcacacgcgcaggagtgcaccggaagtccgcctccccggacacccaccgcggtcccaggacaagtaacagactctatttcccatgagcctacgcgctccccaagtttaggggctgtcttaaatgtctctaccccgcctaaaggttaagaagctccaggctatgagctttggcagccctgaaccccggactgaacttcacctttgtctttactcccttttagggtcaagtcc

SEQ ID NO: 47552 - DNA, 619 bp, Homo sapiens
ccattttaaaaacaagtaatcatttcttaggtttatttgttcatttattcacttaaatacttactgagcacatgcaaagagctgacatttgatgacccagtcttcaaaaatgtgacctgctatttgtgcgttgagggtattgaacaaagtgatatgcctcttacagtgcttcccaaccataacctcatggcaagtttgtttcgggaaggagggagaaagagaaagggtgaaattctttgagcctctgacgttttccagccactgtgctgggcactgtctatatgcttatctaatctggtcttctctttgctgaattcctagcacctagatcagggtttgcatctgatgagcaaatggatgattgaattaataaataaataaaggaatgaattgtggtgcctgggccctctgtcaagagggagcaagtggcctgaggaagggcagactctcagctgagcccaagacccaggctccctgctgggtgctgctgagaggaggacttacacactgagctttcctggtgctcccyctggggaagagtgtgtgcgtaataaccactcagcgtttttgcccaggaagcagcagacaagccaggaggcttgtttaatattttaatagt

SEQ ID NO: 47553 - DNA, 585 bp, Homo sapiens
tgtgctaccaggagggacagatgcttcctcatgcagcgtgacatggttcactcttcagggcaaaaaatggattcttgccttagccaggtgagcttgctctgtggccacctgtgccacagctggtcaagctccccattagagaagtcacactggagtctgggtgcaccccccagcacccacacacgggccagaacccacatttccttctttgaagccagcccagctagggcagagcacttctagccaaagcctgaaactgccagttcacccagaaacgaaatcatccccctaagagactgacagagctccccaagggaggggcagagagtgccaaattgggggtggggtgggggtcagaaaacgagtgttgggaggggcggcttgctgaagagagggcacattcgggccaactctttcttcatctggccccggtgtgtgaggcctccttcccacaggccttggagggggcgagaacagtcatgggcagggtcggtgcccacatcccctgctctcgctgctggagtggttctgccggctaagwaggaacctgggcagagggagcccagcctgcaggcccgcagacac

SEQ ID NO: 47554 - DNA, 584 bp, Homo sapiens
ctgccttcctgttgaggtggtggagcccatggaagcatcycttgtcacttggcaccttttccccttctcggctctgcgaggctgcccttatttagagggatgagcagatttctcttgagctgtagaatttctcctggagagtggggactgtcctaggcaggaaaacgtggaatatttgtgccaaagatagaagaacggccctgccttgagttccttgaactgtggggcacattcttgctgaaaatgagtgatgggggaagaagtcctgtaaaaataggaccgagctcacagccgaagcccttggtgtggcaggatttcctaaagacccgctctgtagaatagccagaaaaaaaacaccatcaggacattcaactatcaaaccaggagctcagctccgatggccctctgtttatgaggaagcatcacatcttgaagtcattttttcctctctttctagaaatcatattgtcagaatgctgccaaccctcctgacttgggtgtgtgcctcttggaacagactcatatcctggggaagtatccaggaaatgtttattctttatttcaaacttagcttttagaaaata

SEQ ID NO: 47555 - DNA, 584 bp, Homo sapiens
ctgccttcctgttgaggtggtggagcccatggaagcatctcttgtcacttggcaccttttccccttctcggctctgcgaggctgcccttatttagagggatgagcagatttctcttgagctgtakaatttctcctggagagtggggactgtcctaggcaggaaaacgtggaatatttgtgccaaagatagaagaacggccctgccttgagttccttgaactgtggggcacattcttgctgaaaatgagtgatgggggaagaagtcctgtaaaaataggaccgagctcacagccgaagcccttggtgtggcaggatttcctaaagacccgctctgtagaatagccagaaaaaaaacaccatcaggacattcaactatcaaaccaggagctcagctccgatggccctctgtttatgaggaagcatcacatcttgaagtcattttttcctctctttctagaaatcatattgtcagaatgctgccaaccctcctgacttgggtgtgtgcctcttggaacagactcatatcctggggaagtatccaggaaatgtttattctttatttcaaacttagcttttagaaaata

SEQ ID NO: 47556 - DNA, 867 bp, Homo sapiens
taaagcttctggtataggttttgggaattcgccattatgaaaccatcctccaaagaacgtagctacaaaaataataggtgattaattaacaattgggcaggaatacttcagtccctaataagctccttgcccatgatacacaaattgctgaaacccagggagtcccctggggatgtgcatcctaacaaaggaggccaggagttctgaccacattgctagaaaatacccagagtgatctaggggagacagagcccaagagaagtcaccaactgcaatttctctgcagcagcctcacacccagccactaattttccaccctgatttcggctttgtgagtasactttgatatgttcatgattcctgcacagacctggaccgcatcaacccagcatttgagtcttcccagtacagggtcttgtggatgccaggatagtctagtagacatgtgatcctaagataggatttgatggccacatagacatagcctcagtcaccaaggacttactgcctgaccctgagtcattaaatctaaccttaggggcaagagtttgtctgggattttgatttccatgtattagcaaatccttttgtacattttttgtgcaataaataaataggtaaatgagagcccaaaggcctattttgccaccacagatttgctaactgttttctactctttctgtcctcctctaaattctcctcatccttccctcactctctgtagatgaactccatcaacttttctctttcacttcctcaaaacaattatctacctcctctgaactataaccttctcaatatggattagatagacataggtttgagtcctgaccccaacatttactaccaagggactgcaggcaggat

SEQ ID NO: 47557 - DNA, 867 bp, Homo sapiens
taaagcttctggtataggttttgggaattcgccattatgaaaccatcctccaaagaacgtagctacaaaaataataggtgattaattaacaattgggcaggaatacttcagtccctaataagctccttgcccatgatacacaaattgctgaaacccagggagtcccctggggatgtgcatcctaacaaaggaggccaggagttctgaccacattgctagaaaatacccagagtgatctaggggagacagagcccaagagaagtcaccaactgcaatttctctgcagcagcctcacacccagccactaattttccaccctgatttcggctttgtgagtacactttgatatgttcatgattcctgcacagacctggaccgcatcaacccagcatttgagtcttcccagtacagggtcttgtggatgccaggatagtctagtagacatgtgatcctaagataggatttgatggccacatagacatagcctcagtcaccaaggacttactgcctgaccctgagtcattaaatctaaccttaggggcaagagtttgtctgggattttgatttccatgtattagcaaatccttttgtacattttttgtgcaataaataaataggtaaatgagagcccaaaggcctattttgccaccacagatttgctaactgttttctactctttctgtcctcctctaaattctcctcatccttccctcactctctgtagatgaactccatcaacttttctctttcacttccycaaaacaattatctacctcctctgaactataaccttctcaatatggattagatagacataggtttgagtcctgaccccaacatttactaccaagggactgcaggcaggat

SEQ ID NO: 47558 - DNA, 622 bp, Homo sapiens
tgaggccctcaactcttagaggctgcctgccataggaccctctccattagcagcttgcatcaagaagcttgcttcttgaaggccagcaggagagtctggcactcctttctcctaagatggagtctttataacatagcctaacatttgccattttatactggccagaagcctgtcacaggtcatgtccacgcttaaagggagaaaattccaataagatgtagatataggaggcagaaattacttatcagtctaaggtctgtttacaacagtatgtgtgtgctctaaaacatatatatgtaaatacgtagaagttggtatgtgccaatctcttatttatgtttattaacccatttcgtttttaccttatttaaaaattaaatgttattattctcattttacatatgagaaaactgaggcagagagcatttaagttactcatccaaagcacgcagctgggcagcagcagaataggtatgtgaatgcgataatttggccccagagtctatcttcttaacacattctktggctcactgtgataatagcttactcttttatataccccctaaatgctttacatactttaatatttaagcccctggtgattaaagaattttagtatgca

SEQ ID NO: 47559 - DNA, 578 bp, Homo sapiens
tcttcctcctctcaccctccaccctctgataaattattccaattttataaaggataaaatttacctggtttaaaagttttgtgttcaagagttgtttaggacttgtgtgcctaacacaatagttacttgtagtgggatttttaaggaatcagagagattgatggggttcaggaggatatttattaattatttaggtgcactggcccagtcagattaatattcaaaggactgggattatagatttgagccatcgtgccyggccctaaactttttaatcatacaagttttatgctctgtacagttcctcctgtttccacttaattttacctacttagccaaatgcccagtagtcattttatcctttggatgtttcgggtaatctctcaccttcttccaattcttttttgttcattaacttttttccacagggtctttaaatatatatgtggctctgtacttaatacttcagctcctcagtcaacaaactgttcttcagttcttttccctgtgacaaaatacatgcatttcatatttacaatctggcaagtataatttcgtttatacattagcctatttac

SEQ ID NO: 47560 - DNA, 578 bp, Homo sapiens
tcttcctcctctcaccctccaccctctgataaattattccaattttataaaggataaaatttacctggtttaaaagttttgtgttcaagagttgtttaggacttgtgtgcctaacacaatagttacttgtagtgggatttttaaggaatcagagagattgatggggttcaggaggatatttattaattatttaggtgcactggcccagtcagattaatattcaaaggactgggattatagatttgagccatcgtgcctggccctaaactttttaatcatacaagttttatgctctgtacagttcctcctgtttccacttaattttacctacttagccaaatgcccagtagtcattttatcctttggatgtttcgggtaatctctcaccttcttccaattcttttttgttcattaacttttttccacagggtctttaaatatatatgtgkctctgtacttaatacttcagctcctcagtcaacaaactgttcttcagttcttttccctgtgacaaaatacatgcatttcatatttacaatctggcaagtataatttcgtttatacattagcctatttac

SEQ ID NO: 47561 - DNA, 626 bp, Homo sapiens
gcttctgaggaatacaaattgtgaattagatggatcctatttctctggctgtaatgctatttgaaatattttaaatattaacaacagtgtgtttctctcctagagtgcatgctactgcatctctcaaaaatgacttgtgtaactgagctgctgatgaaagcaatggtggccttctataatggttgtcattgattgagcttctacaatggactagtctctggatttaatgcttcatgtaacttatatctaatcttcaaaactctttaaggtaaatattatcttcacttcaccatgaggaacagttgggtgactaacttaattaaggtcatgatccaatgaaggtcacggctaagacgaattcaaactcagatctttcagactaatacatcatgccataggttctctagcttgatcttacatcagaatagtctggtggactttttaagacccagatcgttatgccccaccctcagagctcttgattcagtaagccttggggaggttctgacttcgtacatttctctgaagttcacaggtgacgttgatatttgcatttcctgaaccacattttgaatcctatcattttcctgtactatatgctctgasttagaaggtaggacctggga

SEQ ID NO: 47562 - DNA, 606 bp, Homo sapiens
cctagccctgcccgtgagggcaccgacaaggctgtgagtgctctgaagtctccccagcctagtagggggatggggagaggtcagaggcagggctccccagtgtacagcaacaataacccctcacaccagtggttttccaaagcaacctcagctttccctaaaggttcaaactcaaagggcaaaggggaggctgagtcactgggatcttgaaccctaactttcactttagtcagatctggtctacttttatttctcatgcgtcaagtttctgcataggattttaaaaagtttctggctgggtgyggtggctcacgcctgtaatcccagcacttcgggaggccaaggtgggcagatcacttgaggtcaggagttcgagacccacctggccaacatggtgaaacccccacctctactaaaaatacaaaaattagcctggcctggtggcacgtgcctgtaattccagttactcgggaggctgatgcaggagaatcaattgaacccaagaggcagagtttgcagtgagttgaaattgtgccactgcactccaacctgggagacagagtgaaactgtgtctcaaaaaaaaaaaaagtttctgtgacaacatg

SEQ ID NO: 47563 - DNA, 606 bp, Homo sapiens
cctagccctgcccgtgagggcaccgacaaggctgtgagtgctctgaagtctccccagcctagtagggggatggggagaggtcagaggcagggctccccagtgtacagcaacaataacccctcacaccagtggttttccaaagcaacctcagctttccctaaaggttcaaactcaaagggcaaaggggaggctgagtcactgggatcttgaaccctaactttcactttagtcagatctggtctacttttatttctcatgcgtcaagtttctgcataggattttaaaaagtttctggctgggtgcggtggctcacgcctgtaatcccagcacttcgggaggccaaggtgggcagatcacttgaggtcaggagttcgagacccacctggccaacatggtgaaacccccacctctactaaaaatacaaaaattagcctggcctggtggcacgtgcctgtaattccagttactcgggaggctgatgcaggagaatcaattgaacccaagaggcagagtttgcagtgagttgaaattgtgccactgcactccaacctgggagacagagtgaaactgtgtctcaaaaaaaaaaaargtttctgtgacaacatg

SEQ ID NO: 47564 - DNA, 606 bp, Homo sapiens
cctagccctgcccgtgagggcaccgacaaggctgtgagtgctctgaagtctccccagcctagtagggggatggggagaggtcagaggcagggctccccagtgtacagcaacaataacccctcacaccagtggttttccaaagcaacctcagctttccctaaaggttcaaactcaaagggcaaaggggaggctgagtcactgggatcttgaaccctaactttcactttagtcagatctggtctacttttatttctcatgcgtcaagtttctgcataggattttaaaaagtttctggctgggtgcggtggctcacgcctgtaatcccagcacttcgggaggccaaggtgggcagatcacttgaggtcaggagttcgagacccacctggccaacatggtgaaacccccacctctactaaaaatacaaaaattagcctggcctggtggcacgtgcctgtaattccagttactcgggaggctgatgcaggagaatcaattgaacccaagaggcagagtttgcagtgagttgaaattgtgccactgcactccaacctgggagacagagtgaaactgtgtctcaaaaaaaaaaaaaktttctgtgacaacatg

SEQ ID NO: 47565 - DNA, 620 bp, Homo sapiens
tacattgaatcattcagtctctgtaagagtcttcacaaggatacagggtcagcattattatcctttgtttttgccctggaaaattagggaaatttttcacagaaaaggaggaaaccaagttgtgtctggaagcatgaataagaaatctcttaatcccggaagaaatagcattctaggctggggaacaggactyctgaagacctgtagagtcagagagctcggcatgttcagggaaagctttagatatggctagggcagtcgctgtcaacgggaaacagctgacccccaggagacatttggcaatgtctagagacatttttgtcacaattaggggtgtgtactactggcatctagtacatagaggccagtaacactgcaattcacaggacagtccccacaacaaaaaaattacctggtgaaaaatttcagtagtgccaaggttgaaaaacgctttagagagggcagggatggtgaacatgtaaactgggactagattatgaagggccaaggttagaggtttattatctcctgtggcctgcaggacttcagagcctagatttggtaagaaaattgaagcataatttagagcgagctgagtctgggatctgggagatcattta

SEQ ID NO: 47566 - DNA, 1108 bp, Homo sapiens
aggctgggtgcagtgtggcaggtggctatagttctagatactcattcaactgaggcgggaggattgcttgagcccaggagtttgaggcaatgatcagatccatgaagagccactgcactccagcctgggcaacatagcaagatccatctctaacaaaaaaaaagtcccaggacctcacttctgcccagttctttaagtcatgcaggtcactgagatcagcctagattccaggaaaatggtagtgaaaatttgtggtcatctttaatctaccaaagtacaatattaaaattaactttaaaaagtcaattgagccaggcacggtggctcacgcctgtaatcctagcaatttgggaagccgaggtgggtggatcacctgaggttgggagttcgagaccagcctgaccaacatggagaaaccccgtctctactaaaaatacaaaattagccaggcatggtggcacttgcctgtaatcccagctactcggaaggctgaggcagaagaattgcttgaatccaggaggcagaggttgtggcgagcccagatcacgccattgcactccagcctgggaaacgagagcgaaactttgtctcaaaaaacaaaacaaaacaaaagaaaaaaactgaattgtttgaatagcagtgacaataatcattaatgctgctacaactttggattaatacggcttctttcctcctgtggtcttaaagtattttcatctataaaagtctttactatgggccaggcgtggtggctcacgcctgtaatcccagcactttgggaggccgagttgggcggatcatgaggtcaggagattgaggccatcctggctaacacggtgaaaccccgtctctactaaaaatacaaaaaaattagccaggcgtggtggcaggcgcctgtggtcccagctactggggaggctgaggcaggagaatggcgtgaacccgggaggcgtagcttgcagtgagyggagatcgcaccactgtgctgcagcctgggtgacagagcaagaattggtctcaaaaaaaaaaaaaacaaaacaaaaaaaaaaaacaaaagtcttcactatggcatttttgcacattttagagatctttaattctttctttc

SEQ ID NO: 47567 - DNA, 1822 bp, Homo sapiens
ccttcagatccttttcattttatcctttctttctttctttttctttctttcttttctttctttctttcttttctttctttccttttctttctttctctctctctccttccttccttccttccctccctccctcctttcttccttccttcctcccttcctttcttgctttctttccttctttcatttttgagacggagtctcatcctgtcacccaggctggagtgcaatggcgtgatctctgcttgctgcaacctccgcctcctgagttcaagtgattctcctgcctcagcctcctgagtagctgggattacagacatgtgccaccagacccggctaattttttgtatctttagtagaggctgtgtttcaccatgttggccaggatgttttcgaactcctgaccttgtgatctacccgccttggccacccaaagtgctrggattacaggcgtgagccatcgcacctggccaccccttctttcaacttactacattaaaatattaagtggagtaggcttgtcaatgtgtattcaaggatcaatacacttataccatatactatgtggagggtggggtgcgggatggtggtagatgtggggttcatcaattaaatatgcctggtcaatatttatactatattatttccttggagctttactttgcatattaaaggctctgaaaaagcctttcagttaacaaatatgtttaactgttcaacccaatgtttctgaactgatttgacctcacaacatcctgttgaacggacaggaaaatgtcatcacaacatacagagacattttcttcagagtctgataaacctgtttagatcctgaatttgctacttattagctctgtgggcaaactacttagcctctctgatcttctgcttcttcagaaatagtaacaactactttgaagccatctcctaaggattaaagagaataaagtaaataaaatacatcacacggtatctatcacacagaaagtgcatcataaatgttggtatcaacaatgtcattattattgtatgaaaattatgcaagtctcttacataggttacattacaggatttttgtagtctctgtgactcagatatatatatatattttttttcttctttttttttttgagacggagtcttgctctgtcgcccaggcgggagtgcagtggggcgatctcggctcactgcaagctccgcctcccgggttcacgccattctcctgcctcagccttcggagtagctgggactacaggcgccggccaccaggcctgggtaattttttgtgtttttagtagagagggggtttcactttgttagccaggatggcctcgatctcctgacctcaggatccacccgcctcggcctcccaaagtgctgggattacaggtgtgagccaccgcgctggccgactcagatatttttgatagactgtcttgtacattgttgtactcaattaatacagggtcgaatgtatgatgtatatattagagggatgagatacagtataaggaacaattatttaaatcattctccattgtcatgtcatgtaatgacccaatctcagttgaagaggtaaaatttttctacaaataaatgaaaactcaggctttggctgtgtctaaaaaccgcaacagatttttcagaggaagaattcccacagtaaaatagatgggttataagcactttggaaaatatctaggaaattaaaatatattaatttcatcactaactgctgttttcaaaatagttacttgaatgaattcatttccctctcctttgtaatatactactatgtttggtattcttattaaatcactatgca

SEQ ID NO: 47568 - DNA, 624 bp, Homo sapiens
tgggctaaagagtgaaactctgtctcaaaaaaaaaaaagaaaaattacctgttgggtacaatgttcactatttgagtatttgggtattgggtacactagaaacccaattccctccagtatgtatatacccatgtaacaaacaagcacatgtacaccctgaatctaaaataaaaataaattttaaaaataaaagataaaaaaagctatccaggatattctttttttctttttcctttttttttttttttttgaaagagggtctcactctgttgcccacgctggagtacagtggtgcaatcatggctcactgcagcctcaactgccccaggctcaggtgatctttccacctcagcttcccaagtaactgggactacaagcatgtgccaccacacctggctaatttttgtattttttgtagaggtggagtcttgctaygttgcccaggttggccttgtactcctgactcaagcaatcctctcaccttgtcctcccaaagtattgggattacaggtgtgagccactgctcccagccccactagagattctaagcacacctaggttggcaaaccactattgtatgcatatataagactctccctatatattttttaaacaagaagggca

SEQ ID NO: 47569 - DNA, 637 bp, Homo sapiens
tttttttttttttgagacacagtcgtcactccgttgcccaggctggagtgcagtggcataatctcggctcactgcaacctctgcctcccggattcaagtgattctcctgcctcagtctcctgagtagctgggattacaggcatgtgccatgacgcctggctaattttttgtatttctagtagagacggggtttctccatgttggccaggctggtctcgatctcttgacctcaggtgatccacccacctcagcctcccaaagtgctgggatcacagccrtgagtcactgcatccagcccacacctgtatttgtagggccaattcaagggctcagtcaagggatttgttttcagtctacagttggagagattctctagataaaaaagaactgctattttctaaatgacctttctcctaagtaccctaaaataatcatagaatctgatccgaattcttgctgcactacggacaccaatagcccaagaaagtccaagcctcagatgagcacctggaacctcagtccttcatcccacggccaagcacgagactcgcaccaaaccactaccaatgttatcaaccaatgaggttcttagccacttcctatgcattacacattattgaacttttgcaatggcaca

SEQ ID NO: 47570 - DNA, 542 bp, Homo sapiens
gggaatgtcttttattattgttattgttttacagatgctctctaggtcgtggtctgaggaatgttgctcccgtcgtaaggatgaggccactcccctaagagagctctaacccaaagggcaggtcacagcaggctgtattaatcacctcagtctggcctctaaaaagagcactgaaggggaggcagcattttggaaactaaagtttgtcatttgtcaacctcggttaggtgtctggacaatggatacttaatctggctgatgataagatacaagatccgtggtcccaccccagatattaaaatacaccaggagggaaggcaatgaacaatttccctcatgcagttcacattctgttggaatgagacatcgaaagatgaagagtcaggcaaagtagcagaagcaagtgtgggccgttaggtgcaatgatgtcgttctgtccagaggaagaagacacacaggagatagtgaagtcaccagctgtcaagtgtaytgtccatgcaatggtcagaaaccagtaaccagtaagccagacaaaatgtatt

SEQ ID NO: 47571 - DNA, 3492 bp, Homo sapiens
tacagtgaaaggattttccacattcattacattcatagggtttttcccctgtgtgagttctgtgatgtactgtaaggtatgacttgtggctatatgtttttccacattcgttacatgcgtatggtttttccccagcatgagttctctgatggacagtgaggaatgacttacagcgaaaggttttcccacattcattgcattcgtagggtttttcccctgtgtgagtccattgatggatagtgaggaatgacttacggtgaaacgttttcccacattcattgcattcatagggtttttcccctgtgtgagttctctgatgtaacctgaggtttgacttattgataaagggttttccacactcattacattcatacggtttttcccctgtgtgtgttctctgatggacagtaagccttgacttatggctaaatgcttcttcacaatggtcacatgcatagggcttttcccctgtgtgagttctatgatgtattgtgaggtatgacttctggctaaaggtttttccacattcactacactgatagggcttttcccctgagtgagttctgtgatgtaaagtgagaagtgacttacagtgaaaagtttttccacattcaatacatttgtagggtttatcccctgtgtgagttctctcatgtaaagtgaggaatgacttacggcgaaaggttttaccacattcattgcatccatagggcttttcccctgtgtgaattctctgatggataatgaggctggacttatagctgaacaatttttcacaccagttacaggcataaggtttttcctcagtaggcatcttgcactgtagcataaggtctgatttgctaatggagggtttctcacattcaacacattcatagggtttctctcctgtgtgtgtctgctgatgtttagtgaagtcagactttctacagcaagttggctgtcctacctgagttatcacttggacaataacagctgagttattacaggctttctcatattcattatatttaccaaaggtctgtactatatgaaccctcttatgtataaagaacattgcctccgtgttgaaggttttcccttgttcattacattgaaaagtctgcagcagagtttgaatcttgtgatgctgagtaagatgttcatgatgtctgtgggatctcctggttatatcacagacatgaggtttctctccagactgtgtctccccaggcttaatagggaaaagcatgttctggcaatcattaaactgcccaggcttcattcctgaactgtttccattatttataatcagatttaaaacatggtttgagttcaaattaaatgtttttcctaattcaactctctcctgagttgatgtgttgctgttggtgattacaatttgccagaaaaatctatcatgactttcatggctcctttcaataaggtcatcaatgatctggacagctgaaatgagaaaaaaggtatccatgaaccacacatgagcatgtcttacagaatgcttgtgtaaaggtaaaaaaaattacttcctatctcagtggagtaagatttgacaaaaataaatatgggtattggttttatatgcatatggtttctgttcctactgacataatgtaataaatcagtatattttctaatgttcaattgagtttttctttgcattttgaagttttcctgttcttttttatttcacaaagaattatttggtaataatatgcatctacttcctactcataggttttaataagtgctcattattgtcatatgttttctctctttttttttatttattcatataacaatagtggctgttttaatagctgctattttttctttattcttctttgaagatagccagtttttcctgggtcagcaactggtaggtataggagatggccatttttctgtctcctaagcatggaagcagcttgtggacaggattttgcctatatgttaacctttcactcctccctgagaatggttaaatgtgtctggaggttttccaagcagaaaatctcttattccccatgttaaacaaaaacagatcctggcaaattcctacttaaacatgacatcccctgcttcccagaaccataataggcacagaagctccagtcaaaaaaccacactggtgatctgaaggattggttctgcaactcaggctgtgcccgtcatcttcgaaaagtgtatttctggttccttctgagatccacagccgtgcccctctccactcaccaatcgctgcttgataattcaccatttttgaagggttttattttgtgttttggagtttcagatgtcacacagttttatataaaaatgaagtttcctgtacatttctcatcttccaatggtaactacaaactccactctcaaacagaaatctgagcccttcaacaggaaataattagtttctttggacttgagacccagaatcttctggttctcctcccaagtccagcaccacccctatccaggcccctatgatgggtcctcctcagcttcataatttccttccgagacaggatcttactctgttactgaggctggagtgcagtgttgctatcatagctcactgaagcttgaaactcctgagctcaagcaatccttccatctcagcctcccaagtataaaaactgggattacaaacccttgtcaccgtactcagctattttttttttttttttttgtaggtggttgtctacgaggatcatttaaggccagaagttcgagaccagcctgggcaatagaacaagacctcatctccacaaacaataaaaaattagccaggtgtggtggcacacacctgtagtcctagctacttgggaggctagggtgtgaggaacacttgagcccaggagttcatcattacagtgaactataatcatgccactgcacttcagtctgagaaatagagtgagaatcatctgtttaataaaaaataaaacaagaataaagctatagcttaaaaagaaacaccattttcatcatcgttataatgactgattcttaaaaatcacttaagatacattcaaaggataaataaatgcatgaatgtctaaaaaaatttttaagatactacatcagaatagaggaaaagggggaaacagagaaaataaatagcagagaaaaaggcctaaggagaggatggcagggattggatttggggtaaatagaagaagatactcagaaaaataagagactgggatatatgcatgagagttacccctggggactatataatgcacatttaatgcagaccaacagccttcaggtcgaagacctagggaaaaaagtggtgaaaacaagataacactacaaaaatttgctgggcattactcctccaggcctccctgcctggtattcactgactgacctgaaagtctcaggtttrgggtttcttctactatccatggctctgctccttgctctagcttgaagatcatctcaggtttggtaatgtaatgccctggtaatgagaaacaatggaag

SEQ ID NO: 47572 - DNA, 3492 bp, Homo sapiens
tacagtgaaaggattttccacattcattacattcatagggtttttcccctgtgtgagttctgtgatgtactgtaaggtatgacttgtggctatatgtttttccacattcgttacatgcgtatggtttttccccagcatgagttctctgatggacagtgaggaatgacttacagcgaaaggttttcccacattcattgcattcgtagggtttttcccctgtgtgagtccattgatggatagtgaggaatgacttacggtgaaacgttttcccacattcattgcattcatagggtttttcccctgtgtgagttctctgatgtaacctgaggtttgacttattgataaagggttttccacactcattacattcatacggtttttcccctgtgtgtgttctctgatggacagtaagccttgacttatggctaaatgcttcttcacaatggtcacatgcatagggcttttcccctgtgtgagttctatgatgtattgtgaggtatgacttctggctaaaggtttttccacattcactacactgatagggcttttcccctgagtgagttctgtgatgtaaagtgagaagtgacttacagtgaaaagtttttccacattcaatacatttgtagggtttatcccctgtgtgagttctctcatgtaaagtgaggaatgacttacggcgaaaggttttaccacattcattgcatccatagggcttttcccctgtgtgaattctctgatggataatgaggctggacttatagctgaacaatttttcacaccagttacaggcataaggtttttcctcagtaggcatcttgcactgtagcataaggtctgatttgctaatggagggtttctcacattcaacacattcatagggtttctctcctgtgtgtgtctgctgatgtttagtgaagtcagactttctacagcaagttggctgtcctacctgagttatcacttggacaataacagctgagttattacaggctttctcatattcattatatttaccaaaggtctgtactatatgaaccctcttatgtataaagaacattgcctccgtgttgaaggttttcccttgttcattacattgaaaagtctgcagcagagtttgaatcttgtgatgctgagtaagatgttcatgatgtctgtgggatctcctggttatatcacagacatgaggtttctctccagactgtgtctccccaggcttaatagggaaaagcatgttctggcaatcattaaactgcccaggcttcattcctgaactgtttccattatttataatcagatttaaaacatggtttgagttcaaattaaatgtttttcctaattcaactctctcctgagttgatgtgttgctgttggtgattacaatttgccagaaaaatctatcatgactttcatggctcctttcaataaggtcatcaatgatctggacagctgaaatgagaaaaaaggtatccatgaaccacacatgagcatgtcttacagaatgcttgtgtaaaggtaaaaaaaattacttcctatctcagtggagtaagatttgacaaaaataaatatgggtattggttttatatgcatatggtttctgttcctactgacataatgtaataaatcagtatattttctaatgttcaattgagtttttctttgcattttgaagttttcctgttcttttttatttcacaaagaattatttggtaataatatgcatctacttcctactcataggttttaataagtgctcattattgtcatatgttttctctctttttttttatttattcatataacaatagtggctgttttaatagctgctattttttctttattcttctttgaagatagccagtttttcctgggtcagcaactggtaggtataggagatggccatttttctgtctcctaagcatggaagcagcttgtggacaggattttgcctatatgttaacctttcactcctccctgagaatggttaaatgtgtctggaggttttccaagcagaaaatctcttattccccatgttaaacaaaaacagatcctggcaaattcctacttaaacatgacatcccctgcttcccagaaccataataggcacagaagctccagtcaaaaaaccacactggtgatctgaaggattggttctgcaactcaggctgtgcccgtcatcttcgaaaagtgtatttctggttccttctgagatccacagccgtgcccctctccactcaccaatcgctgcttgataattcaccatttttgaagggttttattttgtgttttggagtttcagatgtcacacagttttatataaaaatgaagtttcctgtacatttctcatcttccaatggtaactacaaactccactctcaaacagaaatctgagcccttcaacaggaaataattagtttctttggacttgagacccagaatcttctggttctcctcccaagtccagcaccacccctatccaggcccctatgatgggtcctcctcagcttcataatttccttccgagacaggatcttactctgttactgaggctggagtgcagtgttgctatcatagctcactgaagcttgaaactcctgagctcaagcaatccttccatctcagcctcccaagtataaaaactgggattacaaacccttgtcaccgtactcagctattttttttttttttttttgtaggtggttgtctacgaggatcatttaaggccagaagttcgagaccagcctgggcaatagaacaagacctcatctccacaaacaataaaaaattagccaggtgtggtggcacacacctgtagtcctagctacttgggaggctagggtgtgaggaacacttgagcccaggagttcatcattacagtgaactataatcatgccactgcacttcagtctgagaaatagagtgagaatcatctgtttaataaaaaataaaacaagaataaagctatagcttaaaaagaaacaccattttcatcatcgttataatgactgattcttaaaaatcacttaagatacattcaaaggataaataaatgcatgaatgtctaaaaaaatttttaagatactacatcagaatagaggaaaagggggaaacagagaaaataaatagcagagaaaaaggcctaaggagaggatggcagggattggatttggggtaaatagaagaagatactcagaaaaataagagactgggatatatgcatgagagttacccctggggactatataatgcacatttaatgcagaccaacagccttcaggtcgaagacctagggaaaaaagtggtgaaaacaagataacactacaaaaatttgctgggcattactcctccaggcctccctgcctggtattcactgactgacctgaaagtctcaggtttggggtttcttctactatccatggctctgctccttgctctagcttgaagatcatctcaggtttggtaatgyaatgccctggtaatgagaaacaatggaag

SEQ ID NO: 47573 - DNA, 594 bp, Homo sapiens
atctgcattcagatgatcaagctgtagaatggctagccgaaaaacacaatgctgaaagttcagggttgcagaaagtcagaggcacacatcagcttcaaagagaaggctgtcaatggagacgggaagtggggaaggagtgggtagccttctctctgccacacagaaatggctccaaggctatgatgcaaggtggccccagctctgtgaaaaggcactttcacctttaaagcactttgctgagagggaaaatcaatgctgatgtcctccttgaataaagcactcaggtctactggggagtccaaaaataaaagcatgacgttaagtatttctctacctgtagctactcctcacccttaagaggaggggcaaggtggagctgttaagggagcaggtagagggagaggcaggtgggggaccgtggttgaagcactagaaaagggcatctgggaagactcgcaaatgggagtgggggaagggacaggcttccagaggaagtggttttggttgaggctggctgagagcaacaatgaggctaggaacaccgaggacrccgtgggaaggtgagtgacccagaactcatcacatgtgcttctc

SEQ ID NO: 47574 - DNA, 655 bp, Homo sapiens
gacttttctacctgtttttttaaataatactttatttgataaatatatcatatatgcaaaaagctttaaattgaatgcayagtttaaagaatcataaaatgagcacttttgtctttgactccgagcttaagaaagggattagctgtactgcatggagccctccctgaccacacctcctccctcctggatgaaccaccatcctgaattttgtggttataatttccttgctttcttttatagttaatctgcatgtggacgattttgtgatttgctttctttctcgcagtattttgcttttgagatgcatccatacagctttaatgttgcaatccatcactgctgtcaatttcactgttgtgtaatattctaatgtagaatatatcgagttcttttgacatgacaatatgggtgtacatgtgcaagagttccaactctagaagatatacctaggagtggattggctcgttctctatgcatgttcaacatttctaggatgtgatgctattttgtgtttcaaaatggttgtactaaaattatcctcccactggctacatatactgattccttctccaaaaccttttcctactgcttttaaagttccgggaggacagtcagtctatctttttttgcaggtccagcttttaacagggaactt

SEQ ID NO: 47575 - DNA, 655 bp, Homo sapiens
gacttttctacctgtttttttaaataatactttatttgataaatatatcatatatgcaaaaagctttaaattgaatgcacagtttaaagaatcataaaatgagcacttttgtctttgactccgagcttaagaaagggattagcygtactgcatggagccctccctgaccacacctcctccctcctggatgaaccaccatcctgaattttgtggttataatttccttgctttcttttatagttaatctgcatgtggacgattttgtgatttgctttctttctcgcagtattttgcttttgagatgcatccatacagctttaatgttgcaatccatcactgctgtcaatttcactgttgtgtaatattctaatgtagaatatatcgagttcttttgacatgacaatatgggtgtacatgtgcaagagttccaactctagaagatatacctaggagtggattggctcgttctctatgcatgttcaacatttctaggatgtgatgctattttgtgtttcaaaatggttgtactaaaattatcctcccactggctacatatactgattccttctccaaaaccttttcctactgcttttaaagttccgggaggacagtcagtctatctttttttgcaggtccagcttttaacagggaactt

SEQ ID NO: 47576 - DNA, 655 bp, Homo sapiens
gacttttctacctgtttttttaaataatactttatttgataaatatatcatatatgcaaaaagctttaaattgaatgcacagtttaaagaatcataaaatgagcacttttgtctttgactccgagcttaagaaagggattagctgtactgcatggagccctccctgaccacacctcctccctcctggatgaaccaccatcctgaattttgtggttataatttccttgctttcttttatagttaatctgcatgtggaygattttgtgatttgctttctttctcgcagtattttgcttttgagatgcatccatacagctttaatgttgcaatccatcactgctgtcaatttcactgttgtgtaatattctaatgtagaatatatcgagttcttttgacatgacaatatgggtgtacatgtgcaagagttccaactctagaagatatacctaggagtggattggctcgttctctatgcatgttcaacatttctaggatgtgatgctattttgtgtttcaaaatggttgtactaaaattatcctcccactggctacatatactgattccttctccaaaaccttttcctactgcttttaaagttccgggaggacagtcagtctatctttttttgcaggtccagcttttaacagggaactt

SEQ ID NO: 47577 - DNA, 621 bp, Homo sapiens
aatcaatcccttatgcttcacgtcagattctttaatgatacctttccagcccagtttgatgtttcactcacacaagaaaatcaccttycctttgtggatgctgcaagaagccttaccttccacctgctttagctcgctgatctctcagtggccagcctcatcctccacaacaatgaccaccaggagctcctggagcttctctttggaccagctggtggcatcccactcagtgccagctgttcacgttgcttccatcctcctgctcctccacaatccagcgtgggttctccagcttcacttaaccatggctgtgcaggctggccaatcatacaattgctggtggaattgtaaattggcctgacccaattattgggtcaatcatacaacaattgctgatgggactgtaaattagcccaatccttttgaatccaaactttagaacattgtccaaacaactggcctatacttccaagaacatcataaaagaaaaaattcacataggttagtaacaggctagagaactgttccagattaaaggagaaaaaagagacaagacagcaaaacataatctgagatctttaattggatcctgatctgctaaataattagctgtgaaggtca

SEQ ID NO: 47578 - DNA, 621 bp, Homo sapiens
aatcaatcccttatgcttcacgtcagattctttaatgatacctttccagcccagtttgatgtttcactcacacaagaaaatcacctttcctttgtggatgctgcaagaagccttaccttccacctgctttagctcgctgatctctcagtggccagcctcatcctccacaacratgaccaccaggagctcctggagcttctctttggaccagctggtggcatcccactcagtgccagctgttcacgttgcttccatcctcctgctcctccacaatccagcgtgggttctccagcttcacttaaccatggctgtgcaggctggccaatcatacaattgctggtggaattgtaaattggcctgacccaattattgggtcaatcatacaacaattgctgatgggactgtaaattagcccaatccttttgaatccaaactttagaacattgtccaaacaactggcctatacttccaagaacatcataaaagaaaaaattcacataggttagtaacaggctagagaactgttccagattaaaggagaaaaaagagacaagacagcaaaacataatctgagatctttaattggatcctgatctgctaaataattagctgtgaaggtca

SEQ ID NO: 47579 - DNA, 516 bp, Homo sapiens
ttcccgtttctttagatagattttccttttcctggagtaaggktaaatggaaccatcacagggatgcattcattaagagcagcaattgaatagtaatagaataattgtgccggccctggtaccacagagatgatagctagcattgctctaagaacctacagaggccacatttacgttttagggcagcccttttgaaaactttggcataggtccccaacactgtttttcttcccgcagcgtgatgtgagaacagtgttacagtgcatgccttgtttaagcacaagccaggcactgtgcagcctgggaggtggattatgctccagatgaattcacagaaatcctcagcaggaatgggttcagttcctgcaggctccgtgtatatatattacaataatgtctgttgcaaataggctccatggttatcataccaatgtaaggagcagctgaatgtgaaggaacaagcacatgttttgactattcatatacttgaacttgacattttgacttgcaaggccc

SEQ ID NO: 47580 - DNA, 915 bp, Homo sapiens
agcacaaccaggattcacatgccagtcaaaaaccagaagcttctgtaatctttcaaatgcacatgctaaaacactgagttgtaagactgccaacacactcattcttaatttttattgttacgaaatcattttacaagactgaaagcataaatataaattttgtatgaagagcctagaaaaggctttattcacccgattttacatttgaggaaacatgcagaaggtctacattcagtgagttccaatcagaagtctaatactatcattggataaatgttattgaacctctatcatacatgggaaatgaaagctactaagatcccactctcaacaaatttacaacaaaagctaccaagagcccaccctcaacaaatttacaatcctagctggaggtatgatacatatatacataagaaaactaacaataccagatagtatatgataaactattggagtcatatatttacattgtttcaaataactggctgctccaaatatcactctagcatttagattgttccccataaatgagtcactgaaggctaaaatgtctaatagtaaacttctctaagaaagtatattcaaatctctattattttctcatgcaatatatgcaatatggtatattagcccattctggcattactataaagaaatacctgaaactgggtaatttgtttaaaaaaggggtttaattggctcacagtttttcaggcagtacaggaagcatggctggagaggcctcaggaaactttcaatcatggcaaaagaagcaggcacatcttacatggccagagcaggaggaagacagagaagggggaggtgccacatacttttaaacaacaagatctcytgagaactcaccactgtcatgagaacaacaagggaaaaacacactcccatgatcccatcacc

SEQ ID NO: 47581 - DNA, 598 bp, Homo sapiens
ggtgaatgtactgcctaaaaggtattaaacatctgagtccaaatttcaaagtagaatttcccaaggaattttcttataatagaaataaatgttgtcacctactatcagaggtcaattgaarttttttgttataaattcctatcaacttactattagtaattaaataattaggggcctttgagtagaaaggctgtcaaatgagactggcaatacagatggcttgtaaagagaacagagtcaccaaatacttcttaatgagtagctagttcaaggcaatccaaagcacctctctattttgccaagcatgtttttggtatggttatggacatggtgctcctgcaaagacattgccccaaattcggcatctttctacatggttgcttatgcttcaagctgtttaatagccacagagccctccaaggctgggcctagattagcatttttgaatcttttttgattataacccacaaaagaaatgcatcctaaaccatgatccaggactcccatatgtgaatgtatgcttgtacgtatatctacgccagtcagaacggtgatttttaaaaagtcaagaaacgacagatggtggcaaggttgtgga

SEQ ID NO: 47582 - DNA, 586 bp, Homo sapiens
ggawggaactttccacaacatagaaccttgaataaatagtattgatatagactaggcttgggagaaatcagtaaagttgccatcttgtccctctttcaccaaaggtagcttgcggacttcacacaagtaaccttccaatgacagatgttacttccaaaggttaaaactctgagggattgctttttttcactctggagaaaaacgcatacattctgggggcttatgaatacctggtgaaagatttttttttgcaacagcgtgagcactaacagaacaacacagggctgactattcattttttggataccttttcctaagcagctcaaaaccggcagtagaacgtgacattaccatgtaacaggaggctggcctgatcctgtgctgtgtccaccgccaaggtgtttttgtcatatctgtcccctgctgggtggggacaggggcatcaaaagcctatctacagtcaacaaaacaaagcacattctaaagaaagccaaatcaggcacaaaaagcttgggccaatattaaaaccacaggtattcaaagcgaagagatattctgatttttaagatgattacttggttttctc

SEQ ID NO: 47583 - DNA, 906 bp, Homo sapiens
ggttggggacttccttttgcctggttctcctgggcttgaatggcaacctatattgacagatttcatgccactgttctttttcaaacaagatgattaacaatggaataattgggtttgggaagaaggcctttttaaagcaaactatggaaaataattgatgagtagcgcagttttataaagcttttttttctattaccctttaaaaactatgttgctaactgcacatcacactgcattcatatcctgggactaataccccttgacctctgccatatgaattaaggtggaagaagggtcataagtaacaaagtttcraagttgaatgaaccttttttttcctgtaattttactgaccatttccctttctgtttgagagatctgtgcggtcctgttgctgaggttctgtggttcaggggtgttatcggtgacagagtgctgatttcacttgggtctgttctggtttgtcttaatttctcttttagagcttaattttcatttccaacgaattaggcaagacagaaagtgacatttggaaaagagtgaatggatgactaaacattcaccagacgtcattcttgtaacagttaaatggtagtgattcatgtctccatctcttgataaaatataaagcattaaatcttgatggctaaacacactgacaaaactaccgaaccacgttcctggttgaggatacctgaaggtcgacatttatctgggatcttttgctgctgctttggtatgacttctatcaagatagctttcgacgaggtagaacgtttgctttcactctgggttttccttggtttcgacaatttttaggtgttaactgaaggaaatcccgtcttgtcagaatgttcttttcaatacaaatcgcagtgaaataacgggctagaaagatgtggatcc

SEQ ID NO: 47584 - DNA, 906 bp, Homo sapiens
ggttggggacttccttttgcctggttctcctgggcttgaatggcaacctatattgacagatttcatgccactgttctttttcaaacaagatgattaacaatggaataattgggtttgggaagaaggcctttttaaagcaaactatggaaaataattgatgagtagcgcagttttataaagcttttttttctattaccctttaaaaactatgttgctaactgcacatcacactgcattcatatcctgggactaataccccttgacctctgccatatgaattaaggtggaagaagggtcataagtaacaaagtttcgaagttgaatgaaccttttttttcctgtaattttactgaccatttccctttctgtttgagagatctgtgcggtcctgttgctgaggttctgtggttcaggggtgttatcggygacagagtgctgatttcacttgggtctgttctggtttgtcttaatttctcttttagagcttaattttcatttccaacgaattaggcaagacagaaagtgacatttggaaaagagtgaatggatgactaaacattcaccagacgtcattcttgtaacagttaaatggtagtgattcatgtctccatctcttgataaaatataaagcattaaatcttgatggctaaacacactgacaaaactaccgaaccacgttcctggttgaggatacctgaaggtcgacatttatctgggatcttttgctgctgctttggtatgacttctatcaagatagctttcgacgaggtagaacgtttgctttcactctgggttttccttggtttcgacaatttttaggtgttaactgaaggaaatcccgtcttgtcagaatgttcttttcaatacaaatcgcagtgaaataacgggctagaaagatgtggatcc

SEQ ID NO: 47585 - DNA, 906 bp, Homo sapiens
ggttggggacttccttttgcctggttctcctgggcttgaatggcaacctatattgacagatttcatgccactgttctttttcaaacaagatgattaacaatggaataattgggtttgggaagaaggcctttttaaagcaaactatggaaaataattgatgagtagcgcagttttataaagcttttttttctattaccctttaaaaactatgttgctaactgcacatcacactgcattcatatcctgggactaataccccttgacctctgccatatgaattaaggtggaagaagggtcataagtaacaaagtttcgaagttgaatgaaccttttttttcctgtaattttactgaccatttccctttctgtttgagagatctgtgcggtcctgttgctgaggttctgtggttcaggggtgttatcggtgacagagtgctgatttcacttgggtctgttctggtttgtcttaatttctcttttagagcttaattttcatttccaacgaattaggcaagacagaaagtgacatttggaaaagagtgaatggatgactaaacattcaccagacgtcattcttgtaacagttaaatggtagtgattcatgtctccatctcttgataaaatataaagcattaaatcttgatggcyaaacacactgacaaaactaccgaaccacgttcctggttgaggatacctgaaggtcgacatttatctgggatcttttgctgctgctttggtatgacttctatcaagatagctttcgacgaggtagaacgtttgctttcactctgggttttccttggtttcgacaatttttaggtgttaactgaaggaaatcccgtcttgtcagaatgttcttttcaatacaaatcgcagtgaaataacgggctagaaagatgtggatcc

SEQ ID NO: 47586 - DNA, 906 bp, Homo sapiens
ggttggggacttccttttgcctggttctcctgggcttgaatggcaacctatattgacagatttcatgccactgttctttttcaaacaagatgattaacaatggaataattgggtttgggaagaaggcctttttaaagcaaactatggaaaataattgatgagtagcgcagttttataaagcttttttttctattaccctttaaaaactatgttgctaactgcacatcacactgcattcatatcctgggactaataccccttgacctctgccatatgaattaaggtggaagaagggtcataagtaacaaagtttcgaagttgaatgaaccttttttttcctgtaattttactgaccatttccctttctgtttgagagatctgtgcggtcctgttgctgaggttctgtggttcaggggtgttatcggtgacagagtgctgatttcacttgggtctgttctggtttgtcttaatttctcttttagagcttaattttcatttccaacgaattaggcaagacagaaagtgacatttggaaaagagtgaatggatgactaaacattcaccagacgtcattcttgtaacagttaaatggtagtgattcatgtctccatctcttgataaaatataaagcattaaatcttgatggctaaacacactgacaaaactaccgaaccaygttcctggttgaggatacctgaaggtcgacatttatctgggatcttttgctgctgctttggtatgacttctatcaagatagctttcgacgaggtagaacgtttgctttcactctgggttttccttggtttcgacaatttttaggtgttaactgaaggaaatcccgtcttgtcagaatgttcttttcaatacaaatcgcagtgaaataacgggctagaaagatgtggatcc

SEQ ID NO: 47587 - DNA, 629 bp, Homo sapiens
aaaccagcccagatggctgaattaatagcattaactagagcttgtaaattagctaaaggaaaagtggcaaatatatttactgagagccaatatgcttttggagtagcccatgattttggcatgctatggaaacagagaggatttcttacctcatctgaataacccatatgaaatgggcaccaagtctcggagttactagaagcaattcagatgccaaatcaacttgcaatcataaaagtttctgggcactcaaaggataacactcgagaagcaaaatgaaataatctagctgatgctgcagcaaagaatgctgccctaggaaagatggcctgtcctgtacggcaatgtacctttcgtcctacaaataccctcactaacatttttttacaatatcagtaagcatctacccctcaagagaaacagaagggagttatgtttgacccaagtaagtaattatggataggrtctaacaaaaaacccatagttcccataggtgcacaattgcctttccttcagtttattcacaaaatgactcattgggcccctgaaaaaatagtatcatgggaaaacaatacttttggaaaccatcccccatggtagcccaaaaggtatacgcttgatgtactata

SEQ ID NO: 47588 - DNA, 582 bp, Homo sapiens
tgggggagtagttgggatgagatacccaggakttcaagagagtaattacccaactcttcaatgaatacttattacacatccggtaagcgttcagcttgtacagggatctgaagatacgaggaaatgagcaacgcggttctttccctcaaaagttaatgggtaaagagatacatgggagaaatgacaaagtgtacttgggctgaattgggcacttcacttctctgtgctgtggtttctgtactctgaggacttagtgtagagaaatgcataaagacattgattcattccaggtactggcacgttacaaatcctcgggaagtgtaagctgttgttcttatcaaccatagtagtagcaagatcttaaaagatcagtgagccgggaagctctcacagcaaaaagggtgggtgagtgggcattgaggaatgagtaggagtttgccaggcaaacaggagatgggagagaagaagaggattcaggcatagaaaacagcaatagcagaagcagagacatgggtagaatagggcagatgggagccgcagagagagtgagcccagtttcacagtaggatttaccccacatgg

SEQ ID NO: 47589 - DNA, 578 bp, Homo sapiens
atttttggatcatcgtctgtatgtctatcgccggcaggtaccactgatattagcacctaagcttgctgtgtgccaggcactgctctcagggttttacctggctcatcttgtctcacctggtttagagataaagaaactgakgcacagcatgtttaagtcacttgcccaaagtcacacagctaataggtggtagagccaggatttgaaaccagaaatgtcagactctaaagccaaagctctttacgctgcaggccttgcctctggatgtttgtgtgcccttgtggatagacacacacaggggtttggattctgcacagagcctgagtcagccgtagtgtggggagtgccttggggagcctggggtaggggcaggattttactctctttctgtataatgtcatttctcctttatacactttttgccctccctgacctgttggtgcctgtgcccagcttaccatagtcttatgtgattgggggcaggagggactctgtcttctacatgtgaaggcatttggactcttgggtgcttcctgttgtggccaaaccaagagccttttagctcacgagggccctga

SEQ ID NO: 47590 - DNA, 866 bp, Homo sapiens
tgaaatagatgagtcaacaataatattggagatttcaatactctgctttcaattgtagattaaataactagttagaagatcaacaaggaagtagaagacaaaactacaaagcaattataagtaacagttatgtacagaatacttcactcaacagtaacacaaaatacatacttctcaactgtgcatagaacattgttcaggatgaacaatatgttacaacataaaatgaatgtaaaggaatagaaataatttaaaatatgtccttcaatcataatggaatgcacttagaaaaaaatatgggaaaattgcaaatattttaaaattaaacaacatggtaataaataactaaggtggtaaagaagaaatcaaaatggaaatcagaacacatattgaaatgtggacacaaaatacctctacttatggtatggagttaaagaagtgttcagagagaaacaggagctaaaaagtgttcagagagaaacagtatatgcttatattaagaaagataagggaaagcaagatggcccactagtcagagacaggtggagcagctgccatygaggggacaagacaactggtgcacggctaacatcttcagagcaaaggcactgagagtgaatggagggaagacacagaagctgggctataggaggaggaagcttggaaccatgcaagggcctatcacagactgggacttgttcctggtccccaacaactctggaagaatggataaattgaactagcaagaagcaacctgttctcaccataggcctgtgtcatcccagcagaaggagacctctcaaacactctggacactcaagttagcaaggattgctgcttagtgaagtggtaggggcagaaagcca

SEQ ID NO: 47591 - DNA, 866 bp, Homo sapiens
tgaaatagatgagtcaacaataatattggagatttcaatactctgctttcaattgtagattaaataactagttagaagatcaacaaggaagtagaagacaaaactacaaagcaattataagtaacagttatgtacagaatacttcactcaacagtaacacaaaatacatacttctcaactgtgcatagaacattgttcaggatgaacaatatgttacaacataaaatgaatgtaaaggaatagaaataatttaaaatatgtccttcaatcataatggaatgcacttagaaaaaaatatgggaaaattgcaaatattttaaaattaaacaacatggtaataaataactaaggtggtaaagaagaaatcaaaatggaaatcagaacacatattgaaatgtggacacaaaatacctctacttatggtatggagttaaagaagtgttcagagagaaacaggagctaaaaagtgttcagagagaaacagtatatgcttatattaagaaagataagggaaagcaagatggcccactagtcagagacaggtggagcagctgccatcgaggggacaagacaactggtgcackgctaacatcttcagagcaaaggcactgagagtgaatggagggaagacacagaagctgggctataggaggaggaagcttggaaccatgcaagggcctatcacagactgggacttgttcctggtccccaacaactctggaagaatggataaattgaactagcaagaagcaacctgttctcaccataggcctgtgtcatcccagcagaaggagacctctcaaacactctggacactcaagttagcaaggattgctgcttagtgaagtggtaggggcagaaagcca

SEQ ID NO: 47592 - DNA, 866 bp, Homo sapiens
tgaaatagatgagtcaacaataatattggagatttcaatactctgctttcaattgtagattaaataactagttagaagatcaacaaggaagtagaagacaaaactacaaagcaattataagtaacagttatgtacagaatacttcactcaacagtaacacaaaatacatacttctcaactgtgcatagaacattgttcaggatgaacaatatgttacaacataaaatgaatgtaaaggaatagaaataatttaaaatatgtccttcaatcataatggaatgcacttagaaaaaaatatgggaaaattgcaaatattttaaaattaaacaacatggtaataaataactaaggtggtaaagaagaaatcaaaatggaaatcagaacacatattgaaatgtggacacaaaatacctctacttatggtatggagttaaagaagtgttcagagagaaacaggagctaaaaagtgttcagagagaaacagtatatgcttatattaagaaagataagggaaagcaagatggcccactagtcagagacaggtggagcagctgccatcgaggggacaagacaactggtgcacggctaacatcttcagagcaaaggcactgagagygaatggagggaagacacagaagctgggctataggaggaggaagcttggaaccatgcaagggcctatcacagactgggacttgttcctggtccccaacaactctggaagaatggataaattgaactagcaagaagcaacctgttctcaccataggcctgtgtcatcccagcagaaggagacctctcaaacactctggacactcaagttagcaaggattgctgcttagtgaagtggtaggggcagaaagcca

SEQ ID NO: 47593 - DNA, 643 bp, Homo sapiens
ctttggaaagtgtgatgggttttattagatttatgtattcagttgaaatcatcttcgacaagctgtttctggagtatgaagtctatatgacaaaaccgtcattaaaataacaaactggagtagttaataatagttaaactmgtctctatgcaagtttttatctgccagatttaaaatattcaacacagagaaaaggtgattaaataatggttacctttagaagatagtagttggcactgggaaggggcacaaaaaaaaataagtctggagcgctaacagtattttatgttttcatgagggtagtgatgacagaagtgtatctactttatagaaattcatccgtcacctaaaatttgtgcaccttagtgtatgcatttcatgtcaaaaatatttgataaaagatttcaactcttagaaggatataatatgtcatagcaggccaaacattctctaacaacaagaaaaataacactttagtattttagttttaaaaacatcagaatcttaacaaacagtcgagaattaacaaattaaaatttcagagcagagaacctttgttaggtgaactggtaatctctagcagaacccttccttgccttcctcttctcccttctgccccaccccaacaatttcccatagcctc

SEQ ID NO: 47594 - DNA, 1169 bp, Homo sapiens
cctacaggatttttgcaattgaaattaagacctattggttaggaatcattaagattgtaaaaatttgagcctgaaagctgatgatgcaacatccytgagtaggaaagactgagttgatattaccattaatatgtgtttctgaaaagccagagtggaaataatttcatatgtcagaaatcacaggcattttatcagcctcccagacttacaaatacccacttgctattgccagtcaggtccagtgtgtttagtttgcaaattaacacttccctcctgtgcaaagttttatgagaaggttaacaaaacatttgaaggagctgtgaaaaggaagttacatgcagcacaaaccaggcaaccaagagcttttggtggtcatcactgaagatggaaactgtggcagatggaagtctctgcttcttgaagagaaactatgcattgagtatgcatgatctgtgtgcctggatatcatctttacctgctttgttctgtatgttgtcaaagaggatcgctttggggagcattgtgtctgtacactctggatgaacccctttgaagcaggaggtaggatggaatacttgtgcttttgtttaaaacatgcctggggcctatattgacaattttgttaggttctttattaaaaatgtatttgaataaaccataattaatttataccagaagagcaaaacagcagacattgtgccttttttcacagattatggctgaatggattctaaccagtaaatctgtacatttgaattttatttcctggatcttttctcattaagtccaatggagtgatgagcttgggatggaggctttatagaggtatcttttaatatacttttgataaagcactaagaaaatttataataattttaattgataatgcggaagcagaggagcagaacagaagatagtttctcagtgtttagagaccttgaatttattgtttcctttgcaaagtctattagtcacccctgacaagaagcctgcaatttcaggtgtttgcagtttcctgacccttcatagctactctctgtgggatctttatctggcctggctgctgagactgtggctgttttatattcattatttgattaaagactcaacaactttattaaggaggtatcgctctagctttgcagctgggagtttcagagagggaagtg

SEQ ID NO: 47595 - DNA, 522 bp, Homo sapiens
tgtgtgatctgggtattctgtaatttgcagcacatgacccttccagagactctgagtctgatttatgatacattgcacagctgtggattagtgtgggacactgaacaggtgaagggatgctgaggaaaggcaaggatgtggttttaatcacccaaacatccagtaatcacatagcttcttatgtgaggcttgtttaggaaggcgaaggaaacactttgcaatgttgacctatgcaccagggaacatctttttgaaaggcttaatgaataccagacctattacagaacaacagtctcttccaaagcagaggcaatgaaatgcatagatactcrctcatagattgctgaattctgcaatcagggaagccccatgatccctttgaaagattgcaggaattcctgaattcctaaaactcaagatatatcctaaagtggcatgccagctagagccacggtaaccacacagtcgttagttcattcagcagatttccttggtcatccgtttctaggtactgttgtacac

SEQ ID NO: 47596 - DNA, 576 bp, Homo sapiens
ttacaggcgtaaaccaccatgcctggccaaggtgatttttttttttttttttagtttaaattaagatgcttttctatctttcccacctataacttctctgcctctggccatgttttcaaacccaacccaggtctagcaagagtacaagacaaagagctgaaatgaaatgtggtagcttcatttgagagctgggcttccacctttctaactagttgcccttctaacttggctgttggacttggacttccatgtcatcttttgattgcgtgttgccaacagctctggagctgctgttgtctcctttgccaaggaggaagtttgcatctcagcgttccatccccttggtggcttttcccatagtctgggccrtgccaagatataaatgtgcgtgatctggtttccagttggctctgccatcttctgtcttcacagagccgtcattttcagaatttaaaatggtgtccccagtgcttttagtggaaatccaggaggctctggaaaccaaaagttgttattttgttttagtaactaatttggcatgtgccgtgcatttggtggcaaaagcccacctgtcct

SEQ ID NO: 47597 - DNA, 777 bp, Homo sapiens
tgaggtatcttcaaggcatctcagactcatgacccttcgctgtgaccaggtcccctttccacatggcctgtgtcagtaaattggtgcaccagccacccatctgcacaagcaaagaacttcagagccatccttgacatttccgctcccatccatccactaccaaggtctgcccatccagcccctaaatgtctccccagtccatctacatcttcctgccaaccccaaatccaagctgccatcatccaccatttcattcttggactcctaagaaaacctcccaactaggctgcccacctccaatcttgaactctctcaacccattctccagccaaagcctgggggattgttttcaaaatggaaatctgatcacatctccatccacaacctgtcccttctctggcttcccacggtgtttaggataaagatctgaatgctcaccaggactggtgggccttgtgtgattcycccctctccacctccccacagccactgggtcccacccagccttccctacccctcacgctccccggactcttcctaggtctttgcacatcttctacctgggatgttctgcgcgcacttcaggcctctgaagcatcctccagaacttagctcacatgaaatcccctcagggcagccttccctgccctcaagcctaggtagagttctgggttagaagttcttagagctccctattcctttcgagcccttaccacggtttgttgccctttagtttctgcaatcattctctttttcacaagaccacgggttccctga

SEQ ID NO: 47598 - DNA, 777 bp, Homo sapiens
tgaggtatcttcaaggcatctcagactcatgacccttcgctgtgaccaggtcccctttccacatggcctgtgtcagtaaattggtgcaccagccacccatctgcacaagcaaagaacttcagagccatccttgacatttccgctcccatccatccactaccaaggtctgcccatccagcccctaaatgtctccccagtccatctacatcttcctgccaaccccaaatccaagctgccatcatccaccatttcattcttggactcctaagaaaacctcccaactaggctgcccacctccaatcttgaactctctcaacccattctccagccaaagcctgggggattgttttcaaaatggaaatctgatcacatctccatccacaacctgtcccttctctggcttcccacggtgtttaggataaagatctgaatgctcaccaggactggtgggccttgtgtgattctcccctctccacctccccacagccactgggtcccacccagccttccctacccctcacgctccccggactcytcctaggtctttgcacatcttctacctgggatgttctgcgcgcacttcaggcctctgaagcatcctccagaacttagctcacatgaaatcccctcagggcagccttccctgccctcaagcctaggtagagttctgggttagaagttcttagagctccctattcctttcgagcccttaccacggtttgttgccctttagtttctgcaatcattctctttttcacaagaccacgggttccctga

SEQ ID NO: 47599 - DNA, 756 bp, Homo sapiens
tcatgtggaacatcacagatataaataagaactataaattttctttaattttgtctgatttgatgtatttaaaataggaccatacaaactttgcaggcagttttatgacttgtggatccatttttttaatagasactaggctctgaaatcaagctagatgtaagtgaaattaagtcaaaccagccctaggaatactgctgaagaattccagagaattttatcccaaaatatggcaccctggtatgctaattattttaaattacaggctcttgaaagtcagcagattttggaaaaggctcttctctgctattcccttatctaccttaagactggacccaccaaagagaacaaaattaccttccctctccttcctgatatttcattatctatcatggaaaagaagactaaagaatgaaaccacatctggatgaagtttttcacaagataatgtctgcctcttgggatcatttaaattccataaccatataattttgatctccaagttcattcattctccctcataatcatctaccaccccctcaaaaggattgtctaaattttccatctcctccaccatgaataagggtatatatgcatctgtagtccattgagttaataggtaatcttgtaattcccccatgctgtgcagattaaataaatctgtatgcctcttctctaattaatttgtctattgtcagttcattttcagggactcttcagagggcagagggaatctttcccttggcccatacactg

SEQ ID NO: 47600 - DNA, 756 bp, Homo sapiens
tcatgtggaacatcacagatataaataagaactataaattttctttaattttgtctgatttgatgtatttaaaataggaccatacaaactttgcaggcagttttatgacttgtggatccatttttttaatagacactaggctctgaaatcaagctagatgtaagtgaaattaagtcaaaccagccctaggratactgctgaagaattccagagaattttatcccaaaatatggcaccctggtatgctaattattttaaattacaggctcttgaaagtcagcagattttggaaaaggctcttctctgctattcccttatctaccttaagactggacccaccaaagagaacaaaattaccttccctctccttcctgatatttcattatctatcatggaaaagaagactaaagaatgaaaccacatctggatgaagtttttcacaagataatgtctgcctcttgggatcatttaaattccataaccatataattttgatctccaagttcattcattctccctcataatcatctaccaccccctcaaaaggattgtctaaattttccatctcctccaccatgaataagggtatatatgcatctgtagtccattgagttaataggtaatcttgtaattcccccatgctgtgcagattaaataaatctgtatgcctcttctctaattaatttgtctattgtcagttcattttcagggactcttcagagggcagagggaatctttcccttggcccatacactg

SEQ ID NO: 47601 - DNA, 580 bp, Homo sapiens
gaccaataatattctgaaataaattatgataaagagtaatgatatcctgaaataaattaagataaagaaaaaccaccagaaggacaggttaagaactgtaataaacattgaatgatcaaagcgggaattgtatttctcagttacgagtatttattgcaatcaaatgtgtcaggggggtgattctgggtgatctgggactgcttaatgggaaatttggtagtctgccacatgtctctaatcataagtcagcttgcttaggagtgtggcttgattcctctatcagtgtacagaatcagtattgtggctagaaaaaaaatggaatataaaaatctgacctcaagtagctgggaaatgagccaataataacaacaacaacaacaaagaaaccgacaaacaagtggggaagggtctgtctaaaacccaaataaagatggcagtattatgcgagggggaaaaaaaaactacagaagatttaaaggcttttttttattagaatagtcaagtgacagaatccmctgtgtacatatcagaaattcaactcaaaagaacactcaccgggaggaaaggcttggcttcccac

SEQ ID NO: 47602 - DNA, 890 bp, Homo sapiens
gtgaacacacaattagatacacaaaatttcttgaactgatggcaataaatgcctaaaaccctgactcccagaggtatgcatctgggagcaagtctttgtcacggaggagcaaccttacattaagaaacaacagaattcacaacttttttagttgaatttatgttcattcttttcctttcttctaagtttaggaggtcatttttggcaacaatcagatgtttgtatcatcaagaaaaggattacaaactccttctcaatttttaggtcatccaagcaaaattagctttaaaaaagtattctgtctgccatgtttcccattgtctgcagattttttttgccagcagatgaatctacaagacattgtcactctgaaatcagtytgcagaagcacatcctgaatactggaagactcccatgacaccttggccaaatgaacttgtgatctctcagctgcatccatccactgaaagttttacctcatctaaatatccaaaatatctctcaagccaagccatgaataaactcctccttgtcaagccgttctgagaatattcttttctttctcataaacaaataaataaatgaataaataaggagacagatatttagactgcaatgtagtgctttaagacattctctggggaaccagcacactttttgcattgctggtaatctttcaggctgcttccattacttgtgaacatttgttgaaaaggtagtacctgtagttcaagatgctggctctgataaagttgtttactttcagggtggtaagcaaaaatctttcaggattattatgagtctttgatgttgatatatgccaaaccaactgtagaagacatgaatcaagaggacttaaagctctttcttcatagaaagggtaaaacctg

SEQ ID NO: 47603 - DNA, 589 bp, Homo sapiens
gtgacttgtagttacaagtgaggccacataaaatgactactgttaccttatctaagaaaatgccagggtcgggagtggtggctcatgcctgtaatcctagcactttgggtggctgaagcacaaggattgcttgtggccagtagttcaagaccagcaacatagagaccctgtctcttttaaaaaaaaaaaaagctgacatggtggtacacacctgtagtctcagctactcaggaggctgaggcaggaggatcacttgaatccaaaagtttgagcttacagtgagccataatcatgccattggacttaagcctgggtgacagaatgagaccccatctcaataaaaaaaggtcatgctatatctgtggtgctggaaacgygtgggatgctatctgaatgacaacctaacattcaaaaatcacaaaagggcctggcgcggtggctcacacctgtaatcccagcactttgggaggccaaagtgggtagattacctgaggtcaggagttcagcaccagcctggtcaacatgatgaaaccccatttctactaaaaaacaaaaattagccaggcgtggtggtgggtgcctgtaatct

SEQ ID NO: 47604 - DNA, 567 bp, Homo sapiens
taaaattttcttaattattacattgataaacatttgtttcaaaattattctacagggattcttaatagcacctagcagagagcctggtactactatgagcttacttataaccttagttatagtaagttacttcatgttaattgcagaaatttatgaattttaatatattttagatatctgaaatttttgaaattaaataaaagatactctaaaatataccagtgatttctgatagcattaggttttcttcctttgtattttctttccttctccttcctcctytctccctcttcccctttttctttctttccctacccccttacttttttccttcctttaacatttcctgccaaggaaacacattttggctaaaatataatttgtatcagttaatttttttttttttaaaagaacaggtgtactaaactctcccagactattagttgttggtgtggtaaccagaccttcatgccatcagacgagttaatctagtgcaggggtccgtaaactgtgatccatgagccacatctagtccttccccctccatttttataaataaagttttat

SEQ ID NO: 47605 - DNA, 601 bp, Homo sapiens
ttggacgagcacttggtggaaagagccactcaggaaagcaccttagaccactggaaattccttcaagagcaaaacaaaacgaagcctgagttcaacgtcagaaaagtcgaaggtaccctgcctcccgacgtacttgtgattcatcaatcaaaatacaagtgtgggatgaagaaccatcatcctgaacagcaaagctccctgctaaacctctcttcgacgaccccgacacatcaggagtccatgaacactggcacactcgcttccctgcgagggagggccaggagatccaaagggaagaacaaacacagcaagagggctctgcttgtgtgccagtgatctcagtggaagtaccgacccacacgtaggggtgcacacacacacgcacacacacagacacacacataactacacccagaagcgcgcacgcaaacacacacacacccacacaaacacgaacaccgtcaatcctacataaactaatgaggagcccaastttctgtctctacaacagggacaactggatagtgatggctacatctcaggatgagcccgcatatgggaaacatcaagttttggggtcgtgagtcttccgaacctctgg

SEQ ID NO: 47606 - DNA, 545 bp, Homo sapiens
ggaggctaaggcgggcagattacttgaggtcaggagtttgaggtcagcctggccagcatggtgaaaccccatctgtactaaaaatmcaaaaaaaaaaaaaaaaaattagccgggcatagtggcgcatgcctgtagtcctagctacctgggaggctgaggtagaagaatagcttgaacttgggaggcggaagttgcagtgagcagagattgtgccactgcgctccagcctgggcgacagagcaagactccccctcaaaaaaaaaaaaaaaaaaaaaagtgctcctttggctccaagaagtgtgttgaatgggttacttctgtcaaccttttccaagcatggtggcaacacagctagaatctagtggtcttaagcaccctactggatgctgttcccccaatggacaatggtgtcatttacttaggaatctcaagcacccagcagaatctgatactcagaaagtgctcaatcaaattttataagagttcaatgaatgaataacactatatgtaaggattctagattgtctctctgctataccacatgg

SEQ ID NO: 47607 - DNA, 648 bp, Homo sapiens
cccccttccctggtaacaccaatattccaccatcctaattccctcacaagcattcagtctctccaccctgaggtggtgaaatccctgcaggcatttataagtatacctggacagaagaaatacaagataccgttctattaactcaatatagtgttgctaagttcgtacttgtgcttggtttattttattttataaatasgtatcactcgcatggttccaaatgcggtaggcacagagagtatatatgatggaattacatcctccttccctgcactcagcaaccgagatcttcccgctacgggcactcaaaggtttcattgtctgaaatatcagcctaaacgtagtttatgtttaggaagcaacaaccgtaaataggcccacatccaaacggagtggatttaggtttcactttttcaaggaaaaaccatcaaagaatttttccacatacttataaaccatcccacgtatagaatccatttttactgacacaaatttagtaccaataaacgactcttcttctcaatttgttttatttaacaataagtcttgaacgtcattcccagttaacattttgaagagtttcctctctttcgttctgttttagctgcaaagtattcttccgtaaggatgaacgtactataatttatt

SEQ ID NO: 47608 - DNA, 629 bp, Homo sapiens
aagggaagttcttcagcatgataaacaatgtctatgatgaatctacagctaacgtgcatcatagtgaaaaactgaatgcatttcccataagatgaggaagaacatgggaatgtctgctttcactacttgtttgtagcattgttctgaagattctagttaatgcagtcaggcaagaaaaagaaataagaggcatccaagtttaaaaaaagaaataaaattgtctttatacacaaccatgaccatacaataggtatgggtaaaccccaacctgtgggccagcttcttgtctgataagcttttattggaacacagctgtgttcattaatttatggatgatctatggctgctctcatcctaaaatggcagagtttatcagctgcaaaagagacccttttgccacaagtctaaaatattcactatccttagtaagagggtagtttgrgaaagaaaggtttaacaacctttggtctatgaagaaaatctgatcaaatctaccaacaatgtgccagaactaacaagtgagtttaacaagattgaaggatccaaattcaatatagaaaaattaactgtatttctataggctagcaataaacaatcaaatgaaaattttaaaactatcattttctata

SEQ ID NO: 47609 - DNA, 575 bp, Homo sapiens
gggtgtaacatcttgtttgttgtgaattcctttagctattgtatttcttttcattaaagattttagtccatttatatgtaacataatctctaatggaaaagttactattaccatttggtttgtattttctttctgtgtttcctgtggatrtgtttttcttcatttgctctgtgtcttcattttttttggcgattttgtagtgacatgctttaattcctttctcatatttttgatatactttctataagatttttatgatcatcttaagaaatgcaaagtatataaaacattaaatttataactatattctaataaagttacttcaattaaatcataactatacatctttacatctgccattttattattaatgtcacaaatattttatttcttatcaacaaagatttatgctttttttattttttcaaattctgtaacattttaaaaactttatgcaccattattataatagtagcaaattttttatctgtctaaatatttcccttaaaaaagagtgttatattttcctatggttttatgacactgtcctgcattatttcacttttcaacatatt

SEQ ID NO: 47610 - DNA, 565 bp, Homo sapiens
gcattcctgaaatggaacacgataggacagagatgacaataaactcaaatgagtattcttcagactccgatggcctatacctgagggttcttgtgcttcttgtccatggtctggagagccaggcttccactctcaattgcatagattccattctacaaagccagatatacaatagaaaccctaaataggcactttcttcccttggtgcctgggaggtgaccaatctaggggagagaacagggccactgaaggtgtcaagatgacttgccttcaagccttcagtggggttcatctgattaatcatttgggtgagtatttttgaaatatctgacaatttcttcttgagtagtagtttgtgtgtgagacagcgactgaaaratacatgtttagaaaaaacaaatctctttatttcacctacactagtaagcaaatcagtataataaaagaagactagtcagaaatactttatttcacgataaatgaggtaagaaagaatcttcctttaatattttggtgcttgatatacagcaaaataattccttatagccccatctctaataaagtt

SEQ ID NO: 47611 - DNA, 611 bp, Homo sapiens
tttcctcttgcygtaataaaagatctgtcatccccaaatcctcaattttcagactgagagtctacatagattgaactaattgtataatttctactttgtgtgggagacttttttctttttcgtatcctcaatcaattcacccttctgcttcaatttacttgacatattccttgttcctaagtgttccggaacaaagacagaagttgaaatctaaggtcaatctcataacttagaatgttttctctttcaggaaaaggagcgttgaattgtttatcctgtgtgtggagttaccacctcatgggagggatctgcacctcggactgtcttgtgggggaatacagagtgggagaggtatggagggctgggggtcctgggccttctgctctttctagagggaaacatgagcttacttcctgcatgtcattctgggcaatcaaaatgtcccaaaattctcatactatagaaatagtgtatgtttagtattttaaaaccttctaccattgcatcatggaataatggtgctacacacctgtagccttagctttactcaaaaggaactgagaagatctaagataatggggaagttaagtcgtgagggcctcggaatgaat

SEQ ID NO: 47612 - DNA, 611 bp, Homo sapiens
tttcctcttgctgtaataaaagatctgtcatccccaaatcctcaattttcagactgagagtctacatagattgaactaattgtataatttctactttgtgtgggagacttttttctttttcgtatcctcaatcaattcacccttctgcttcaatttacttgacatattccttgttcctaagtgttccggaacaaagacagaagttgaaatctaaggtcaatctcataacttagaatgttttctctttcaggaaaaggagcgttgaattgtttatcctgtgtgtggagttaccacctcatgggagggatctgcacctcggactgtcttgtgggggaatacagagtgggagaggtatggagggctgggggtcctgggccttctgctctttctagagggaaacatgagcttacttcctgcatgtcattctgggcaatcaaaatgtcccaaaattctcatactatagaaatagtgtatgtttagtattttaaaaccttctaccattgcatcatggaataatggtgctacmcacctgtagccttagctttactcaaaaggaactgagaagatctaagataatggggaagttaagtcgtgagggcctcggaatgaat

SEQ ID NO: 47613 - DNA, 786 bp, Homo sapiens
atattttcatctctagttgtctggaaacggaaacactccaacatttaaagatggttttgatggcgaaaccactggaatgaaacacacatcatcgggcaattctgtgtgttgagttccatccctctttgtttatcattttaaataatttcccgacaaatctagaaggcaggtcttgtcttaactttgcaacgaggaggctggggacaggtagctgagctgtgggttgcctaagagcactcggctgtgatggggcagtgctggcctttgagtctgagctggagagagtgtgaggtccgtrttctgtccctgtctcctgctggggcccattttgtatcagatttgtttttaacagggtgggcatgactaggactcatgaccactggtgggcacgtaaaggtgctaattttcaacacaagccgagagactgatggctggcatcggagagtcgtggaaatgccacagatgacgtgggccctatacagcgatgggaaaagggtctgggagctagccctccaggaaggtggctgacgtggttggtgggacactaaggtgttttccattttgcacttgaagccaacatggattcttagcacttcttgtccctagaatcaactgtgcagagagacgtttggtcgtgaaactctcaggcaaagacagttctgaggaaactcttattagtaaatagtgagtcggagaacactattgacatttaggattttcagttgagatacatatgtactgtcatgcatcacatgacattgttttggtgaatgatagcatatatga

SEQ ID NO: 47614 - DNA, 786 bp, Homo sapiens
atattttcatctctagttgtctggaaacggaaacactccaacatttaaagatggttttgatggcgaaaccactggaatgaaacacacatcatcgggcaattctgtgtgttgagttccatccctctttgtttatcattttaaataatttcccgacaaatctagaaggcaggtcttgtcttaactttgcaacgaggaggctggggacaggtagctgagctgtgggttgcctaagagcactcggctgtgatggggcagtgctggcctttgagtctgagctggagagagtgtgaggtccgtgttctstccctgtctcctgctggggcccattttgtatcagatttgtttttaacagggtgggcatgactaggactcatgaccactggtgggcacgtaaaggtgctaattttcaacacaagccgagagactgatggctggcatcggagagtcgtggaaatgccacagatgacgtgggccctatacagcgatgggaaaagggtctgggagctagccctccaggaaggtggctgacgtggttggtgggacactaaggtgttttccattttgcacttgaagccaacatggattcttagcacttcttgtccctagaatcaactgtgcagagagacgtttggtcgtgaaactctcaggcaaagacagttctgaggaaactcttattagtaaatagtgagtcggagaacactattgacatttaggattttcagttgagatacatatgtactgtcatgcatcacatgacattgttttggtgaatgatagcatatatga

SEQ ID NO: 47615 - DNA, 786 bp, Homo sapiens
atattttcatctctagttgtctggaaacggaaacactccaacatttaaagatggttttgatggcgaaaccactggaatgaaacacacatcatcgggcaattctgtgtgttgagttccatccctctttgtttatcattttaaataatttcccgacaaatctagaaggcaggtcttgtcttaactttgcaacgaggaggctggggacaggtagctgagctgtgggttgcctaagagcactcggctgtgatggggcagtgctggcctttgagtctgagctggagagagtgtgaggtccgtgttctgtccctgtctcctgctggggcccattttgtatcagatttgtttttaacagggtgggcatgactaggactcatgaccactggtgggcacgtaaaggtgctaattttcaacacaagccgagagactgatggctggcatcggagagtcgtggaaatgccacagatgacgtgggccctatacagcgatgggaaaagggtctgggagctagccctccaggaaggtggctgacgtggttggtgggacactaaggtgttytccattttgcacttgaagccaacatggattcttagcacttcttgtccctagaatcaactgtgcagagagacgtttggtcgtgaaactctcaggcaaagacagttctgaggaaactcttattagtaaatagtgagtcggagaacactattgacatttaggattttcagttgagatacatatgtactgtcatgcatcacatgacattgttttggtgaatgatagcatatatga

SEQ ID NO: 47616 - DNA, 612 bp, Homo sapiens
ttttttgaaaaggagtctcacttactctgttgcccaggctggagtgcagtggtgtgatcttggcttactgcaacctctgcctcctggtctcgaactcctgaccttgtgatccacccacctcggcctcccaaagtgctgggattacaggcgtgagccaccacgcccagcctttttttttttttttgaracggagtcttactcacttctgttgcccaggctggagtgcagtggcatgatcttggctcactgcaacctctgcctcctgggttcaagtgattctcctgcctcagcctcccgagtagctaggattacaggtgtgtgctacgacgcccagctaatttttgtatctttagtagagacggggtttcaccatgttggccaggcttgtctcgaactcctgacctcaagtgatctgcccgcttcagcctcccaaagtgctgggattacaggcgtgagccaccgcacccagccccacaatatcctttaatcttcagtccatgcccatctttccctgcatgtcccaagaatgtgttttatagttatttcttttgaactctaatataaatcaaactaaggtcacatactgtatttggaagttatgtttctttactg

SEQ ID NO: 47617 - DNA, 792 bp, Homo sapiens
tgtttatttgcataaataaccccatagggcatcatctacagttcagaagttgagtttacttatggtggaattaaaatatgaagatgctggcagagcaatcacagagcaggttcttctaggttttaatgcaaatttgtaagtcttttacaatttttagcacactcaatacttttttagtgaaccaattaaaaatgctcagttatcaagtgtttatagaagaataaactatgttttygtagatataaaacactttttttactcctttttaaaggtttatataatattatttcaataaaactttcactattaaatcatgtaaataaccggcataatgaatattggggctgaaaatactaaatgtcacccagtcagtctgaaaccccagtggtggggtcaagtgtgcctgggagttggggtgggcccatggctgctgatgccagcctgcgttttgcgtgtccagactaaagtttagagaaggactggagcatattggctaatcgtgtaaggcagttaaatggagatgcacgaaggagttcatctatcatgtgctttgaaaacaacaaaacatgattccactgatacctttaaatatttaaaaatcgcacaaaacacttagctttgcataattacaataaaggaagttaatcttattaactatcttttctttcttaatgtaaaaccattctccaatatctgtgatttgccaataattttctgaagacaatgattaaatttttataaggagataaaaacgtgtgaggtatgtatgtgtgcgtgtgcaattatgtttca

SEQ ID NO: 47618 - DNA, 792 bp, Homo sapiens
tgtttatttgcataaataaccccatagggcatcatctacagttcagaagttgagtttacttatggtggaattaaaatatgaagatgctggcagagcaatcacagagcaggttcttctaggttttaatgcaaatttgtaagtcttttacaatttttagcacactcaatacttttttagtgaaccaattaaaaatgctcagttatcaagtgtttatagaagaataaactatgttttcgtagatataaaacactttttttactcctttttaaaggtttatataatattatttcaataaaactttcactattaaatcatgtaaataaccggcataatgaatattggggctgaaaatactaaatgycacccagtcagtctgaaaccccagtggtggggtcaagtgtgcctgggagttggggtgggcccatggctgctgatgccagcctgcgttttgcgtgtccagactaaagtttagagaaggactggagcatattggctaatcgtgtaaggcagttaaatggagatgcacgaaggagttcatctatcatgtgctttgaaaacaacaaaacatgattccactgatacctttaaatatttaaaaatcgcacaaaacacttagctttgcataattacaataaaggaagttaatcttattaactatcttttctttcttaatgtaaaaccattctccaatatctgtgatttgccaataattttctgaagacaatgattaaatttttataaggagataaaaacgtgtgaggtatgtatgtgtgcgtgtgcaattatgtttca

SEQ ID NO: 47619 - DNA, 546 bp, Homo sapiens
ggagaccttagtgttagtttggctagctagtgactaatcctttgacgttggatgattcactcatcctctctctggacttcacttccttttatttagtatgagasggtcagtcttgattgggagttttctagttttgctccagaaagcaccaggattgtgtaagcactccttagcagccatcatcgaggagaaaggaggcacactgctttaatccctttctccttcggatatacttatgtttcctggcataattttgtttgaggggggaaaaaaaggaggaaaatataggctcaaaagatcactaggctaaatattctcttgaatcttttttgtcagcatttataggactactccaggaagaggtgaggcagtaggtagcctgtttctgatacttaaaaatatgcattggcatatttttatacatcccaggttacatgaatgtgaagtccagattgagatctactgattgataccatataagtaaaggcacagaaaatgccattttaattctttccctcaaacagtctccacaccagtgattcaatc

SEQ ID NO: 47620 - DNA, 845 bp, Homo sapiens
ctttccccatctcctcacaccatcattatattctacctggatgagggcagtgttctcccagggtgtcttcttgcatcctgtcgggcccaccctgctatctctcctccttattacacactcagatgctcagttacttcccatgagtctctctccttaaaattctcctctagatccctatcctagttaacagcataatgtcgcaattcattctaacaaagtccctaattatttgaccctgtctgttttttcccatcactgtcctactattcatcccttcattcaaacaactgtgagcttcatttccagaatgtgccggtctcatcctctctctaggatgttatgcattccttccctttgtcagaaatgtcttcacctccctttgttcacctggtgaactcatgcttatcctcaattctaatttcttcccttctaggtatccttccctgacatccatgggcacagttaagtccaccttagtggacttagtggacttagtgctctcctagtacctgtatatcaacctccttttcacattctctgtgcagccacaacagaattttgtcagttcctcagatgtgctaaactctgcattgttcctgggcctctccacacactattgcctctacttgaaactttccttcccccatccttctttctctcactggttaactgctacctgtccttcrgatctcagcttacacatcacttcctttacaagaggttcttgatcatatgctaaagtcccctttctttaaaaactcatagatctccacacttcttctattgcaaccctgtattattgttactacttgggtaattatctgtctctcccaagagactataaa

SEQ ID NO: 47621 - DNA, 773 bp, Homo sapiens
aaaacagaataaatagtcttctcctttttcagatgagcagattaatattcacaacagtcacatcatatgcttttaatgctatatagcaagaagtgcaattctgatttccagatttttaatcttatattttacaacatcatagttgtaagattttatttctagttgaaatacattttgtattatatttgttagcatttcttacaacagagtaattgtgaattattttttttactatctcagactggtcagttttttcagacttgctcagttacaggtactactgataattctatctgtcatgtaagaggccgagtgttgagattgtaagatcaaaaaattaaattgagtactaccatggaagaattttagcctggagaggtgcctcaagctcataagtgtcttatgtgaacatgaaatgtacacttattgtgctaaatcacaaagatttggggatcgtgcgttgctgtaggacattttttttctagccagcctaattcaatgttttaaaaaatktctgtttcaagtctagaacctagcacatggggaaaagaatgttaaatatatttaaattatatattacattttaaacgtaggattcagtatggaaatatcaatcagaacatcttagaatattatctcatctacattgttgctacttggcctggtcaatgtgttgtgatcaggaaatatttgtatgtgttatgtgccttctatctaatatatatattttttctaatttagtgttaaaaaagtttaaaaagtataattatttt

SEQ ID NO: 47622 - DNA, 1460 bp, Homo sapiens
  misc_feature (1)...(1460): n = A,T,C or G
gctcagatatagtacccctttcagtttggtcctctctggctttcccaggaacccccaggaaaagtccaaagggcttggcttcacactcaagatcctctctaatgtttttgccaccataataaaaatcctaataataaagcagctaatttctacacagagcttactatatgcccatcaatgtcaatacattatcctactgaatcctcaaatggccctgtgaggtaagctctattttcatgcccattttacaaacgaagaaactgaggcacagnagaggttaaatatgtgtcttgtgtcaaacagctagcaagctgcttggttgggatttgagaccaggcaggctgattccagaggcccggtgcagaacctctattgctatactgtcatagtatcaggggagtgttaccccatttcctggcttcatgggctgtgtttaaagtctcacctgcgagcctccactccaattctctgtcttcttctcttgacctatttaaattctccttttgtaggccctagttcacatcacctcttccaaggacggtctgtctccctaattaattttgtttatagtaattaattcccttcatgaattcctgctacatgcttacatcttatgggttcaaggattcctgagggtgggtcatgaatgcaaaaggtgggcatggggagttgtgcactaatgccctaaaactgtatgcaaaatctggtgtgtgtgcttatgttttgcttttttttgttttccgaaggacaagatttatagccaccgtcaagctttcaaaaaggtctataacaccatttatttcaatggytaattgtatgttatttagtgcctactgtgtataaatattgtcttcccactgttggcttggtaataatatagcaactacacttattcattactatatgccagctactgtgtcaagtactctgtgcagatactaattcatttgatattttctgcaactataggaggttgggtttatcatacctactgagatcaaaagctcaggacagttgcataatttgcccaagatcatacagctattacatggcagaaagaggatttcaacccagatatctgactttaaagccatgccctaagcagacagctgagttatcccatgccatcttctctcatattgactaatgtggagaatgaggcctcaattaaaactggattagattaagacatgcgatgtagcaaccaacacatcagccagcctgagtctcgcaccctgggtgtttgcgtgcccagtgtttgttttcttagaaacaggatacaccttgctgctccttcctacaagtatcccgtgaaatactgactgttctgagcccacagatgctcacttgcttggtggcctgcacagctctgagaagcctgggtggagcttctgatgtttccatgcatttgattagggccagttgctggtgctctgaactttcacctccagcatgagatg

SEQ ID NO: 47623 - DNA, 563 bp, Homo sapiens
ttggccaggccactgacctcttgtgtgccttgggtttgagcctcagttttcccatctgtaaaatggggggtttagacaaactctccaaacgctcagcattaacagatatccagaactatggaggctctgcagtcctagtgccagaataggccttaactcagagcagacagtcagtgaatgtttggctgttgattgaacaaatgagcaaatcgatgagagatgccctctgctctctccctccctacactggcctaggacttctcatcttccacctcctctcaacagtccagatccacgttccaaactcctcttaactcttgtgttatggggctgctgcctggatcagaacggtggggaggctggttcagtcttgaargtgaatctaatcacagcatcacactcaccccgcctccacccaatctctgagcctacctagaagtaattctgagcacatactctgaaaaaacaggtcctcagctgtctggggcagaagaggcaagattttacgaggtgcggggaggaagacacagcctgtgtcatattaagcaagggagagccaggga

SEQ ID NO: 47624 - DNA, 563 bp, Homo sapiens
ttggccaggccactgacctcttgtgtgccttgggtttgagcctcagttttcccatctgtaaaatggggggtttagacaaactctccaaacgctcagcattaacagatatccagaactatggaggctctgcagtcctagtgccagaataggccttaactcagagcagacagtcagtgaatgtttggctgttgattgaacaaatgagcaaatcgatgagagatgccctctgctctctccctccctacactggcctaggacttctcatcttccacctcctctcaacagtccagatccacgttccaaactcctcttaactcttgtgttatggggctgctgcctggatcagaacggtggggaggctggttcagtcttgaaggtgaatctaatcacagcatcacactcaccccgcctccacccaatctctgagcctacctagaagtaattctgagcacatactctgaaaaaacaggtcctcagctgtctggggcagaagaggcaagattttacgaggtgcggggaggaagacacagcctgtgtcatattaagcaagggaragccaggga

SEQ ID NO: 47625 - DNA, 513 bp, Homo sapiens
tagtaataaaagtatttttcataaagcatatgatttactatgacttaaatgaagagtaaacacaactgaatcatttacatatatccttatattttattagcttcaagggtataggcttttacatacttgaaaatgctagctgtagatgtttaaataaaagttaaaaatcacagttctttgtgccagttggctcaatttttttttcagccttcaattactttgtacttttatcttttttattaccaccagaactcatatacacagtcaagtctgaatttctttagttgcagctggcttctcctgaacttaacattacctcgcaaagtcctgggggyaccaattggtatatcttatctaaaagttcataaaatatgatgaatataaacattaaaatacaacactgaggatgaattgtttgaaacatgcatgggtctttaaacccaagatgttagtgaaatcaagctaaattcaaaataatcagaacttttgacaaaatcaaaaatttatctggaa

SEQ ID NO: 47626 - DNA, 642 bp, Homo sapiens
  misc_feature (1)...(642): n = A,T,C or G
gtctctgtggttactgtcacgtcatggcatctttgctttctaacttgttctcttctgtgcagtgttcctgttacccttgggtctcctttggtcccaastgcacttgaattttaatgtcagtttttaaggagattttagttagcatctttttacttttagatgatattggcaagggatacagagtagagtgaatttctactctttctaaaacactaggcttcaaggtcctggacggtcctgcgtctcttgcaggaggctgtggggtattctgctgggccaaccctgggcatcagcttgtgggtgccttcagtctctatatggctctttccttctctaaactttcttatacgctgtgtgtccagctgcttaggtctaagatctcccagggcctgtgtgaagagcgttgcatntgcatttgctgctgaggctccttggagctacagtgatacaagcatttcatttgtacctgtgttcctgtgtgaaattctcttcctagtggctgtgtgtgaccccagtcctatcccagtcctggtccacacttgactctgactggttgctgtactgccctctccctgagtgtaagccccttgcggactaggcccagtttgttttgctcaccatcatatctgtagtactggcata

SEQ ID NO: 47627 - DNA, 566 bp, Homo sapiens
tgaaatatcttattccaggccctaacttaactacctyttcctgagatgagaattacagtaacctacatggtattcctatttctataaacttattttgtacaatgataccagataaatgcttgaagagcttttcataataaaattatcctaaaataacaataacaagaacagcatttgtagggtgcttgctatgtgccaagcactttaatgatgttttaattctcgtaataatcccatgaggtaggtactattactaccctcattttacaaatgagaaaagcgaagtttagagatgcttaattaacctacccaaggttacacagttgctatgtggtagaatagaactcaaacaggcagacatattccagcggtcacattcttagccattttgctctattatttctacatataaatatcattattgcctacagcatttaatccaagttcctttctttggctttagagacctcaaaatctgatccaatcctaattatacttcattgtgtacccgtcctactagacttactcttctcttctacatgtcatcttcctatattattattctc

SEQ ID NO: 47628 - DNA, 608 bp, Homo sapiens
atctgttagtacctggttagcacataataactcatcaacagtcgtggttcagttattaattcaacaaataagtatgtagcatttgcttcgtgcaagataaacagaaggtagtcttttattttgagaggctcagggtctggaagaggaaaagatataaatcataattagagtaagatgtacagaagtattgtcaaagtataaaggccacagaggactccactaggccctgaaacttcaaagctacttgaggaagtcagggtcaataccaggttcttaaagggaactgagagtctgtctggtacttaggaaaatctgtagatactcatggggatccaagggagttagaagaggaaattgccaatgagacaatatgtgtgaggtcttaaactcatgggccttatataaaagtgagtggttcaaaaagactgaagccaccccaggttaatcactccacgatcctattattaggtggtatgtttcttaaacaaagtggtagtacaggaattattgtttcatttctgtcaagtcagcagatatttgttgagtacctattatgtgctaggctaggatctcagaatacaatggtgggcaaamtgcaaaattcctgc

SEQ ID NO: 47629 - DNA, 605 bp, Homo sapiens
gcctcgcgcccaccctcgccgctctccgcagcgcccggcgcagtggggaaattcgaggcagaggttcctttctcctctgggcggcagcagcaggaatcagggggcgggaggcgagctgtgtcgaggggcgcacgcgggcggacaggggccgcggggctcgaactcgccaccggtgtgtgtgcgtgcgtgcgtgtgtgtgtgtgtccgtgcgcgcgcgactgtgtgtacctcctttccccggtgacggaacwaacagcccgggctgctccccgaggctgctcgccctaccagccgctccctagcgacagcgccgcttaaaaagccaatggtgaaggtgcttctttcaaagtgcacataaatctggtgcttgttggctactccttggcagctacaaatgcagttcgaaaggggatcgtccccaccgccccttctgagcctctcctcagcaccttctgccctgcctactctagcgcaggggttgagaagggcagagttttgagaaggtgcgtgggtttaagggtttgccgcgaaaaagaagttgccttccttttcaaaatctggtttggcctggagcaagtcgacgggtgaacgcagcctgagaaccc

SEQ ID NO: 47630 - DNA, 418 bp, Homo sapiens
gagttaacttctagaaggaaatagggcccatacgtgtcctggagccccaaacccggtgtccagaggcttctgctggttgggtgtggcagggttgagtcactcagcaggagaaaaaattgggaaaacatttccgttgtcctcctcccttctcctcctggtgctcccgagsagtgaggctgagcaggatcaacaccgtccacgcctgtccgtgttggcatgtttagtcacctgggcaagctgggggaatactgccatgggatggaagagccaggcacttgaacgcccatgcacacacatgctccctaccactaacctgcagtggctttaatgaaccccttgcaaagctacagccctttaaacaggatcgtatccatcacatcggaagaaaagcatcataatttgcccctggacccagtaa

SEQ ID NO: 47631 - DNA, 601 bp, Homo sapiens
catatgttcctttgttatttccctttggttactttctgaaccatcttgtactttccattaatttgaaaattagactttgytccaaggagcatactttctggaatgtatttctggttcctttttccagggacaagaaagaccaggtgccttgctggaaaaaactagatcctgctgaccatagcattattttggtgagtgagttggccataaggtctttgttattttgttatacatgtatcccaagccccctcttcatcagggaaaagctagaagaaagaaaaaggaaaaatgaaaatcctgtcatgccactctatccttttattgaaattccttagcttttacaaagaaaaaaaattctcattttctgttagggagggaaagaactatgctaccttaaacaccacgaaccacacacgggcttacagagttcaaaccagtctataaatgcactggaatttgctcctcagtttaatctcaaatggggtgaacttgttcctgtatatctttgtcaaataccctaaaacagaggccaaagagaaaatcatgctccctcagaaacacagaaatggaaagaaaaccaagaacatttttttctatttta

SEQ ID NO: 47632 - DNA, 580 bp, Homo sapiens
aaactagttgggtgtggtggtacatgtctgtaatcccagctacttgggaggctragggcaggaaaatggcttgaacctgagaggcggaggttgcagtgagccgagatagcgccattgcactctagcctgggcaacaagagtgagactctgcctcaaaaaaaaaaaaaaaaaagtatatatacatatatatggatgaatttaactgcagcatgaagggctgaggttaggcagtagaaagaactacttattcaaacaagggaattgctaacacaggaagctaggatatttcttggaagtatttctctagaaaggagagagcctagacttggtggggcttggggagcagggaacagggcatcaagtattaagagctgcctaagatggctcttcccaggcttcacctctagggtggggtcaggagccagggatgggtgtccccaggctctcacctgaccctgggctctgggtaggaggctaggtgggtcaccagtccctcctgctaactcctcctttcctgccccagccctagaaataaggcactcaccagggcaaacttgttgacttgcacgtagagcctttg

SEQ ID NO: 47633 - DNA, 618 bp, Homo sapiens
cgcctgtaatcccagctactcaggaggctgaggcaggagaattgcttgagcccgggaggcggaggttgcagtgagccgagatcgtgccactgcactccagcctgggcaacagagcgagactctgtctcaaaaaaaaaaaaaaatttaggtttcactgtctataaatatttattggaacacggcccgcccatttggttgtgtattgtctgtggctgttcttacactgtaatggcagaattgagtggttgcaacagagacaagtgtgacccaccccccaaacctacaatatttgctctttggccctttacagaagaagtttgctgatccctgcactacacactttcctttagtaatgcgtgttagagacagttggctctcagcacttttcttgcgtgctaactgtgctccccaaaagcagagcccagctgcaagccgtgggcatgcccaggttcggctggcggtgggtctgttggtgcctccgcgtgcacactcactctgagcatttcttgggccctggctgcgtggcaggcygctggctgggagccagggcaggtctaggcctgccctcaggaatccacaggctggtgggtggggagagtcagacagtatcgggcagtc

SEQ ID NO: 47634 - DNA, 561 bp, Homo sapiens
ggtgggctgggagggcagctggagcccagccaggtagagtggcccccaggtgacctcactgcctgccatccctaggtctgtggctgaggccttgaagacggggacaccagtggagcccgagtactttgagcaagtgacactgtactttagtgacattgtgggcttcaccaccatctctgccatgagtgagcccattgaggttgtggacctgctcaacgatctctacacactctttgatgccatcattggttcccacgatgtctacaaggtgcagtgtgtaggggacaagccctcctgaccttcaattcagcttcaccagcctccagcccagcccttcctgcgcagcccctagcctacctgcccaatcaatcttstttcccagacctcccgtcccttatttattcctccagtccccagctcagtccttccactagcaacctggttctgcactaaccccaggtgggcccggtgacaagaggcaatcgcttcgtgtactcggggggaatgctcaaaagaaaattcacacaactccttcttcccccaggtggagacaatagggga

SEQ ID NO: 47635 - DNA, 1327 bp, Homo sapiens
acactaccaaaagtggtgtgattattacaaagtgcccccacatatttttgtgtgaccctacatgaacaacaacaacaaaatttggratgctctcctttcaattttaagcagaggaattagttcaactaagcaaatagtcaaggataataagattcctgagagagtagagaaaaacagggacaatcgtatttatcttttgtaaaatcaagtttataagaatatgtctcagggccacagttaataaaatatctatttgttttcttgagaaccacaacgaagatatttgtgtaaaaggtcatccatagatgccctacggagttaacagcacaattgaggtcttgctgcttctgttacaagagtgcttcaaacgtaccattcaactgatagaatctattggaccttgttagagtccctcaccccattcttgcaacagttcccagaaaagaagaggaatgtgcttttcagagacttatgtctctactggagcccccttgatggcagggtaaggtgggagagcatggaggaagcctctcaagaagtgagacacatgcactttctagattattgttattactattatttttgatggagtcttgctctgttgcccaggctggactgcagctggttgatctttcagctcactgcaacctccacctcttgggttcaagcgattctcctgcctcagcctcccgagtagctgggactacaggcatctgtcatcatgcccagctaatttttgtatttttttggagacaggttttcaccacgttggccaggctggtcttgaacttctgacctcaggtgatctgcccatctcagcctcccaaagtgctggggttataggcgtgagccaccacacccggccgacacatacaatttctagattgttatttatttatttgtttgtttgtttttgagacagagtctggctctgtcgcccaggctggagtgcagtggcgcaatcttggctcactgcaacctctgccgcctgggttcaagtaattctcccacctcagccactttctagatcttgtaggacaagaagttgccacatggtgagaaggaaaaaggacagattatgagcaggaactgagtaatttttacctatgaccctgggactcatttaacctctaatcaaacagagaaaactacagtaaccataattattcttaagacagattatgcatgaatatatcattgattttattgcctaattcagcagaggaattactaatagatattttgctagttctacaggaagatagtgtagaaacataagctaatcaatgcctcatttctgatatttcttacctagtatggtgattag

SEQ ID NO: 47636 - DNA, 505 bp, Homo sapiens
tgttcaactaaatctatttagtgtrttatcctccatatttctatagcacttttctctgctgtaagttctataattaatataaaaaatagcattcctcttcttcatcaagtgctcatgagtacttttaaaatttccttctcaaaaactttactggaacttttttactacaatcaacagaataatgtagttttatttcctaggcagcatttctgataagcatgaaatagggtagaccactctctccctcaatcattacataaaaaccagtgcaaatacaatgagtatttccttctgctatggcataatgatcacttctgagtcaatctgtagactacagaagaatgtgatagaagaaggtgagttattttatgtaaataatgaaatagatgttctagagttctatgttattggtcagattaggttaggtgattccgcagtaataaaaagaccccaaatcacagtggtttaacacataacagtttatttcttacacttaaaaagttta

SEQ ID NO: 47637 - DNA, 1154 bp, Homo sapiens
caacaaaacttacatagttatgagtgtcctgaattcattccaacaatcttggagccatattttaaaaaagaacattaacaagacagactttggccagagagggacagctgtgctgttaaaggctctgaaaattacatatttgagaaataatgaaaagaaccagaaacgccttaggctcttgtcactcaatgctgctcaatggtaaaacctcttcatgcctttaaaaattacaagccactagtcgaagcttgcacaaatatgcttcaaaaatcaattgtatttaaatggtatataattgtttacattctataaaaatatatattcaattaaatagacatttattgcattatttcacaaaggattatattaggtgctgggtgttgtgagtgaagaggatgggcttagctttggatatgaagcatttgaagggttgtcaggatggtcatgtatagcaggcaattagactggcaatgatggactgggtaaagaaaatgtggcacatatacaccatggaatactatgcagccatacaaaaggatgagtctatgtcctttgcagggacatggatgaagttggaaaccatctttyttggcaaactatcacaagatcagaaaaccaaacaccgtatgttctcactcataagtgagagttgaacaatgagaacacatggacacagggaggggaacatcacacattggggcctgtcgggagttgagagggctagaggagggatagcattaggagaaatacctaatgtaggtgacgggttgatgggtgcagcaaaccaccatggcacgtgtatacctatgtaacaaacctgcaccttctgcacatgtaacccagaacttaaagtataattttaaaaaatatgagatacacattttgcaacaagagccaagctatttaggagtaaaggaattgtaatatgaattaagtacaatacatgacatttgatgatttttaaagattaatgtctgttgcaatttttaggcattccattttagcctaggtcattactgtcgttttacttgtcatggcagtacctgaaaccacatcattgtttctattattaatcagattccctaaattttcctttttcaaatttataataattcatatgtgccccatcccttaatttgaaatgttcttttttt

SEQ ID NO: 47638 - DNA, 1331 bp, Homo sapiens
tgtgtctttcatctgtgggtagtcatcattggtctggagagattaagctgagagctgtgaagctatggagtataggawtggccactggccaataaagccaataagatgttggcatcacttagtacaggtgtgcctagaaaggagaaggtcacctttctgttctgttttgataccattctggtgactgcaaagggaagatgacaattgtattgagtttggatgctcctgtgaacatgtagagggatcaggtcctccaagtaaacgttgtaggctaaggaaagagacaatagagctgcctttgatatccagagaactaacctggtatgtttgccataatgatgagtccccaggaagaaccagaacaagacagagggatgaaagtgagtatagaaatttgttagacaaactagggtaaaactttctaagtggaaagcagaataaacagccttgtcattgggcattcttcctgctttgaggctagaggaccatttctggatgtgggacagaggtaatggtggttatggtgctagaaagcgattttgcacagaggctggacactgtgcttgatgtccatacattcctgagaattgaggaatattgtcctccaagttcaaacttagttcgcaactagtacttgaaatgctaagaaatgttcattgtgttatatatactcctcttctatggctaatgtctaatttctccccctgtttggatccagacttctagaactagtgttcccaactaagttctccaaagtctagagtcccaattttacctcaactaagagaaatctgctttttgtgccatcactccactgaaatggccttgcttttggttgccagtgtctttcttgttgaaaaatgtaagcattctttacattttaccatttgctttgcctttagccagagttttacaacatttctcaatcctttgaaacacccccctgctttttttttttttttttttttgccttggcttctggtctctgcatgttctttcttagtcatattagtcatatttggagtttcttcttctgccatctgccctgtaatatttctttgtcattttcactactttttctattttttttatatactttgctggcatttgctcactgtttcttagatcaatgacaatcccagcctaaaccaatggatccaaggccatgcactaaatgactaatttatatgtgtgacttttaatttgcatgaagcttaaaagcctggtatgaaagttaaatgtttatatactagagattttcattgacatttagacatgtttgttagcagagggtggggttttgacagaagccaggtttcaaggaggaatgc

SEQ ID NO: 47639 - DNA, 1297 bp, Homo sapiens
ttgttggctttcctttataagttgacacgtgagtaggcgaaacattagtggctaaaagataaaacaattatccagtttttagataaactttgtaaatattcatttgcctttgggtttcactaattactgtccaacaagagaacccagggtgataagtaatcaataacacaacacacttaaaagcattttcttcattaggttgcatgtaacctaatgaagcgtacagttcttactctgttttttgggttttttgtttgtttgtttgtttttgttyttgtttttagtttcctcaccaaactgctaaaaatttatctctggcattcatttactggaatttagggcaattacctgagcataggtcagataataacttgtgtctgtccatatttaaatacaatagatgttacttatcaggcaccaaataaagtcagttttctattatgcaaattaactatcaaacttgttttaaaatatttaacctagtacatttaatgtactagggctgccatagcaaagtgccagagattgggtggcttaagacagctgaaatttatcgtcccacagtttaggattctagaagtctgaaatcaagttgccagcagggccttgctctctctctctgaaggctccaggggaggatcccttcttgctttcttggttgctggaaacccttggcattctttggcttagagatgcatcactctaatctccgcatggactgtcacatggcattctccctatgtgttccgtttgtcttctcttttataaagacaccagtgatattggactaaggtccgccctaatcccataaaacttcatttgaactacatctgcagagaccctatttccaaataagatcacattcacaggtgggagtggtggttaggactttgacatatcttttctaggaacatagttcaacccataacaactaatatcttagtgactccattgcacgtctttaaacaggtcaaatattttaagccactcatgtattgatattcataaagatgattctttactttgaagtccttggaatttgaataaaatccacctgtgcatctttgaacagtaaagatttcactagttgccagcaagagccttaggagctatcattcctcaggctgatcacatccccacatgcactttggatgaattggaaaagaagttggtgggctagatacgagaagcttgacctaatacctgcttctaataggaacacaagaattaagaggatgacaagatagctttcttccataaaactatgttctgtgttttgttagcttgttttgtcaaa

SEQ ID NO: 47640 - DNA, 423 bp, Homo sapiens
ggtcgctcacacctgtaatcccagcactttgggaggccgaggcaggaggatcacctgaggtcaggagtttgaaaccagcctggccaatgtggtgaaaccccatctctactaaaaatacaaaaattagctgggcatggtggtgggtgcmtgtaatcccagctacttgggaggctgaggcaggagaatcgcttgaacctgggaggcggaggttgcagtgagccgagatcacgccactgcactctagcctgggcgacaagagtgaaattgcatctcaaaaatcaaaacaaaacaaaaaaacacacaaaaacaaaaacattggcaactctcacaccctgctgataggaatgcaaattgtcctatgcagtttgaatttgacagtacatacaaaatgggaaaaaatcatccccttgccactagatggcg

SEQ ID NO: 47641 - DNA, 1983 bp, Homo sapiens
agcttaatcaggaaaacatctaagaaactaaagtgaaaaaaaagggttgctttggttttacctgtactaaacaggtctatgctaggagcagcatctggcttaggcgctgcagcaacttcaggagtggactcaaataaatctaagaccaagaacacacatgcctttactcaacttgaacaataagcctgacacagcatcacttcccagtccttaattagcactttgaagaactctgaattaagcagcaaatggtttctagagaaccatttaattacacagtcttcatgcagtacatctcaaggatcagaattcaatccactagacggaaagaggtcgacaacaataacaaaaaattaccaccaaagatatctagagcaggaggagcagtggtggcggtggcagcggaggtggtggtagtggtggtggcagcggcggtggcagcagtagtggcagcagcagcagctgcaacggcaggagcaggagaaggagcagttgcgggaactggaggggctgtgctagctgtaggggtaactacaggaacactggtctcaggtggcttcattgcaaagaggtccagctcaggtgcagcctctgcactaccttcagacggggcaaaggggtcttttggaaaggaaagtggagacacacacagcatcagtaaggaaagagacaagagacagcatcataactatggcaagagacaccttatacagatatttacacactagctaggtgtgaggctccttggatttaactactatcctactggcaggggttagtgattaggatgtttttctaaagaaaaaggaaaacttagtaggtaccacaagttagcaaactaaagcattttgcaaagtgccgtaagattaacctacagtctaggatcagagattgctatccttcaaatcttcactttatttggtcaatctggtagctttgaaaattcattaaaacatgccaatatatttgaactcaatgttacaaaagagtacaatatagcattagaaaaaaaaacattaagacagcatacttgcactgacaaaaattgtcaatcttaagaaattgtcaattttgataagtatgtacttcattgtcttaatgttttaaatgctggcattatttatttagttatgatgaatgatactttacactcagaagaaagtaaaattagaaaaacatatggcctcttctaactacgggggttttacattaggacagaagaataacagactggctaatgactttaaacccaccatttcctgaacatgcatcaagtgctgctgctacaggggttggggtagctggtgcggcggccccttcggatgctgcaggggcctccccaggagaagctgcaaaggcatcttgggtgcggtttttaaaacagcagaaattaaaagaataaaaagagaagaaaatacagtaaaagaaccaagttaaattgtgaagaaggctcccttatacaacatgaatttttaaaaatgcatttttatggcccatgcgctgtcggtggtcacaaaacaattattctttgcacaccttcatgttagttaacatgcaagtgatacartgttgatactgctgaggcctaataggatccaaaaggtaatgagattctcattgtataagggctctgagaagcatgttttatgtatcattagaaattaatggatgtaaaaattaaaacaaaaaatatttttattatgtaatttaagacattaaactttcatgtccaggtaacactgattcactgttattaaaatgtccctgtctcatagtttctagcaaacataatatcttctttaatgccaataaaattaaatatacaatggcaatgtaaataattctagttttaagattttttataatctagtacaggcaaaattacagtgttaacatgaaaggtttactaagcattcctaagtgttaagtcttcactatccctgaaaagcattttcaaacataaccaataattttactaaggtt

SEQ ID NO: 47642 - DNA, 1390 bp, Homo sapiens
gtacatgctcttccttggtgatttacttagtatattaggctctaggacatgctactgtcaagatacttgtttctcagtttgacctggcatgtcccaaactgagtatgaaacactctttagtaatgcagagttctagttttatgtggaataacaaacattaaactagatacttacttgggttaaaaggccctttaccaaatcacaaatatcccttagaagggacaacaggacatcagttattcatatcttatggattaatctgatctgattgttcctctttgttatactgaggaaatatatgttcaatttatttattattagagacagagtcttgctctgttgcccaggctggagtgcagtggcaatatcatagctcactatagctttgaactactggtctcaagtgagcctctggcctcagcctcctcacggactgggattacaggcctacagcactatgcccagccaggaatataggttttgagtgtcaggtcagctgagaggccaaataaataaaactaaagaatgaagaatacatcaagggatagagtaggcctactttctaaatgccatgttaaagatactatacttcaggacttagagcaacacaccctctacaagcagggcagaagaatgtaagagaagtatgaaaagatgttgggagggctgtaaatattttgccatgagtcaggtcagttgttttatttttttttggttcctataaaatttggaactgaggccaataatattgcaaagagtagaaacacatagcagtcatatatattgccattattaaatttatctgtaacaatcttgtgatttaggttctactgtctccagtctgtagataacacaaccaaagcttaaagcgtgtgtgttctcatcacaaacaataagtgaggtaatgcatctatgttgattagctcaattagccattccacaatgtatacacacttcaaaacatcatgttgtacattatatatatatgtatatactttttcaattaaagattwtttttttaaaaagtctgatgactaaagttacacagcaagaaaatggcagagttaggatttggctcagagctgtctgagctttatgtgtttagccactgtactgcattttttatgaaatatgcctcattctattatattactcccttctttataattgaataaacatcagttacattagtgccagggatcaaatagatatttatgggctgacccctttaggttatcacttatgtgtaaggagataaagcccatattgttatagctacatccttagaagagggttttaaaaaatccccttgtcagcaagatatctccttttaattcttctcttgttacttgaaactaaatattatcaacttaactcatctacacctgtc

SEQ ID NO: 47643 - DNA, 533 bp, Homo sapiens
gaggtgtagttaagcggaagccaactgaagcatagggtttataacctggagccagtgctttgtgttctattcctatctggggagacctttgttgggtatatgtgcatgtgtcctaaacacagctgttcacacagctgctatctcttggtattgtgccaaacccataccagccccctatattgcactgaactgagagaagactctgatgctcttggcttgtcccacttggagagagagaagggagtccccatggtgaaggtgtgaatgagtttcttagctgggtttctcaaaacacccctttctgcctgctattcctacccatcggggccagctaggcacacccctgggtctctcctggcaagggggaacccatccataggggagagagggggaggaaagagacaggccacaagagagctgattgtgggggcttctgcttggcttcttttctgctcytccttgggaagggctccaagaaagcctcctgcctgtctcacaaacctagacatagccattagcataatctcatagct

SEQ ID NO: 47644 - DNA, 1311 bp, Homo sapiens
cttattcaaaaggacattatttcttctttggtgtcctgcatacacagttttaaaatgcttgcagacgttttacctggctctttgcattaaattatctcatcagtcgtaattcatcttcacttctccgaagttttcatggcacatggcaaactgggatgtacccttcctcctcctctgtgttctatcagttatttaatctcatctccaagcaacatgttctcgtaatggctagattttggtctagaacaatagccttactgctattattcttttactcaacagtccggattgttacgtacccatgatctggagctctggacttcttggttttgtgaaccgcaggactcttgcaagtctactgtgttagtccgttttcacactgtattataaataaatacctgagactgggtaatttataaagaaaagaggtttaattgactcagaatttcacactgttggagaagcctcaggaaacttacaattgcggaggaaggtgagagaggagcaaaggcacgtcttacatggtagcaggtgagagagagagacagcaaatgagtaaagggagaagagctgcttataagaccatcagatctcatgagaactcactcagtatcatgaaaatagcatgggggaactgcccccatgatccaatcaccacctgcccaccaggtctctccctcaacacatggggattatggggattacaatttgagatgatgtttgggtggggacacagagccaaactatataatctaccatgtcataagtgctcaaaatatggattaattgattgcaacaagaagccacgtttttcctttscaatttatcagttagcaactcattcactttgaatatttttttttcttttctcagaataatcagagggaaaaggtcattatagatgaaacaagtacataacaaataaacttgaaaaaagtgacactatctgtctaattagaatggctttaatggcagtctgtatttaaaatgtgcaatgcagcagcatctaagggcctttttaattgatttgatttcatgattttcctagattttataaagactcataaaccaatgtcttaaatttcattttacagttattgccttaattttagatttcaaagtatcttttgacaccttcactggtgtgctctatcctggaagaaatatgcattcacagattccatacctcccccttaattccccacttggtcagattagatgttcatttctattatatcatcttttaagccttacttacatttttaagaagatactattttgactttgataaattctggcactctgaattca

SEQ ID NO: 47645 - DNA, 512 bp, Homo sapiens
gtttctaactttcttagtgtctatgactaactttcttaacagaccctattaatttttcttgaaatgtgttgtattctccctagagtgctaatgcacttttgtaaagtggtggctagtactctactacacagagtggggaaaactgattaattgcttttagaatagtaaatgaagccttttaatttaatgaatatttcaacagaaccaattcactttgtctctctaaaggcaaaatcccatagggagaatttcttttgggtgacctagagagcaaattggaacctctgtgaggttggcatacaaccatatgttttcacaagcatgtagattgtctgtatacctctaatatattactcctaacctaaaatacattcgatgtcaagagtttagatttacaaattatccttcagtattgtgagttgtgagaccagggcatgggttctctctatttgaggtmtgtttatactaagtacactcctgaagttgtattgcttaaaaggcaggagggtata

SEQ ID NO: 47646 - DNA, 605 bp, Homo sapiens
tgttccttatttagaagctgggtgatatttctgtaaccagaaatttgccataggaacttaactcttgttcctatcaatcagtctatagtaaatttggcatgtttagacgttstttcacttaaactctgggtttctaagaactatctgtgacttaaatgaggacttactatatgaacttttatttaatgtatcaatattggttcactaatcgaaacaaagatcccataccaacctacgatattagcaacacgggaaactgggcatcaggtatacaggaactttctttgccatcttctcaattttcctgcaaatccacaactccaaaaaataaagtttatttttaaaaattcctgccttgccttccatacaaggttaaatttttcagaagtttatggaaacacatagtttgttaaaaggctacaccacttaaaaatttaaaataaatttaaaaataaatattataggctttcatttttttcacttttttgaaaaaggaaagcattccatttcacttcagagggttctttccaaagaatttttccatccaggaaaaaagaagaaaggaaaagaaaaaagactgaacaactatgtcactgggtgggacc

SEQ ID NO: 47647 - DNA, 530 bp, Homo sapiens
tttgttattctttaaggataataatcagaacttgttggttttggtggttttctgagtttggtgtacatcatacaccgtgtataccaaactcggaaaatcacctgtggattttaaaattttcagatatctggagatgacctctgatctattggatcatgagattcagggaacaggctgtctttctcaaacttcacatggtgctgacagtcaccaaaatttgagaatctccagtgtgctatattctctttggttagatttgagctcatatttaaatgtgttaataaagtcacatatttttattgactatttttatctcctaggcactactttctggtgagagagattgatgagaattaatcaaataaattaacaagaaaatataaaatagtaataagagctgtgataaaacagtgatggtgtgagtgactgaggtcctcctttagagagcgcagtcagggaaggcatctctgaggatttgggctggaggctgataagaaggagcmtgtgccaggaagatctgaggtagagac

SEQ ID NO: 47648 - DNA, 625 bp, Homo sapiens
tcggggggtattaaaacaaataaatgaaccatcgaacaagtaaataaataaatacacaaaggaaagcggggagagagagggaaggaaccggttagggcactcacacagtgcagaggrgtctgaaaaggaatgctgcctgctggcgccctggctctctgtctctctccctgtctttctgtctctgtgtgtgtttttcctcactctctgtctctctcgccatctagctgtctctcctctctcggccctttctcatcataaacccccttacatgtgatctcctttaatcctcacaacagcctgatgtagtcactggctttcctcctattttacagctgagaaaactggagctctgagagatggactaccttgctccaagacacacaggtgaatcctagtggagctggagtcagccccagatagctctatgcccaccctccacctccccctccagcctgtgtgtgcacgtatgtgcgggtgtgttgatgggaatataccctaagtcagattgcaacttgcaatctacagctcacggaccagaaaccttagcatttcctgggagctctgtagaaatgcggtgtcccagacccctccccagacctcccaagtcagaaactgcattttcaca

SEQ ID NO: 47649 - DNA, 679 bp, Homo sapiens
gcaaaaactttttgttcacctttaaagttacaggaaaacttgaggtaaaaataaatgaactataattctgtccatttgttaaaacctgtggaactatgcaccaaaaggtgtgaattttactgtatgtaaatttttaaaaactcaaccacattggcagtagataccaggattgaatctagatgatgacaaattaatgtaattgatgtatgacataaccactctgaaagtgacaaatactctgtctagccatgtggtgactagatactttaaggtgaaacacaaaagggttgtacacaaacactgtatgctagttggtagaattgtttctcacagaaattctagttagtagttccgaaacattatgtgtattattagacttgagtaaataggtaaaaatattgttactaacaaaaaccaagtatctcagagttggaaaaagaagtttcaaataatgaaaatggaaaggctagaattaaccttattgygctggattagaatcaaagatatttgtatagtctcatgtttgctttagtctttacttagatataggtgtggacagaaataaatataggtatgtgtatataaaaaattagtatacgtatatgtactacttatattcctatctctgtcatgagaggacctaaaagcagtacatcctagtactgctaagcacatgtag

SEQ ID NO: 47650 - DNA, 612 bp, Homo sapiens
gagctgacaacactcatcatcacatactccccaagtggtgtgactatagcacctacgcccctcccttaccatgaacccgtaagaaagctgggtgcagggatggtgaaggatttgccagaagagacagctagtaaggaggagaagtgggattcagtcctgggtccatctgaccctgaatttattccctgctgtgaagcttcctctgataaacgagcagaggccacacgcaacagtgacgggaggagggtgaatgaagttggccttggttccatatgatcccttgaagcccggcgttcacaacgtttgtgcaaagcagtgccgttaatataagtccttccacattttactgcctgttgtagagtctgcttgtcattctgacaaaggcaaaactttctggcaagcagaagccccaaggtgctacaccagggctgtcctgtggggatggggcttagaacaaaggcaggactggagaacacaggcagacggaagaattaggaagccccgaacagttcagacaaagactcaatgcacgrtgggctgggcagaaatgcgagatgctcacagatgctgaggaagggggtctcgggccagagaaaccagccaatgttgggg

SEQ ID NO: 47651 - DNA, 1364 bp, Homo sapiens
aagaaactgagattcaaagaaattgaacatcttgtacactgtcacatggccaataagtaactgagcctgaagaaatccttgtctcctgacccctagtcatgcagcattgaagaaaaaaaaaggacagccaacctatgtgattacactcataaagatgactaaggaatactaagcagtgactaataaccaattttcaagttgcagttcttttaataaatgttttcttcatctacttgtggcaagaacagaattagctaacgtgtaggcactgactagtttattgcctagaaattcaaactcatttttaaatcctgattgttttctaaaaaactctcattgaccgtgtcttataatacctacatttcagcttcactttgttctccacaaagygatacaaaagtcacttgaaaagtcacctttatgtccatagtatggttaggtttaggagtatttcttgaaagagtcaatcacttttcaatcttaacaataaaagggaagataagatagtaaaatccatctgtaatcgtctattgctccactgaccacaaaaactttacaaagttctcaactactcacaagtctgcactacttcagaaaaatggaatctgagccagaaacgtggattagtgcatgttcatacagaaacagagacttaatagataatgttgaaacaactaactagccattttggaaaactaaaaaattagatccccaatgatgaatgcatcactcaaaaataaatttcatatggatcaaatatttcaatataaaacaccacaaaagtaaaaaaaaaaaaaaagtcatgttttctttttgtcataatcttggatgatttctaagcatgacaaaaaaaatatctataagcagccaggcgtggtggctcatgcctgtaatcccagcactttgggaggctgaggtgggtggatcacttgaggtcagcagttcgagaccagcctggctgatatggtgaaaccctgtctctactaaaaatacaaaaattagcaggacatggtggtacatgcctgtaatcccagctactcaggaggctgaggcaggagaattgcttgaacccgggaggcagaggctgcagtgagccaagatcacgccattgcactccactccagcctgggcaacagagcgagactccatctcaaaaaacaaaaacaaaaataaaaacaaaaacaaacaaaaaaaaattataacaattaaaagaatatttgatatataaaaacaaaacatggcaaagcacacatacataagcaaagtcaaaagacaaatcactagtttgattaagaaaatattcaaagtacataatcagaggattaatttatttaatatagaaaaagctctaaaaaataataacc

SEQ ID NO: 47652 - DNA, 573 bp, Homo sapiens
taaatcccactttttttctcaaaccagagctgccgagattttattatttgtaactaaaatcccaaataatgtatctgataatccactaaactcatctactcatcttcatcacttcatcctcaacccttgagcagaacttccaaaattcatttaggtagatgactatgagcagacaataaaaattcacttactataaactgtgagaatttttaaattgaaaatactacagatgaatttgtggtaaagaatttagccttgcccaaagagaggtctggccttgtccatggctacttggaaggaatctctgagctcctggaatgtcatgctcaataggagtgtctttgtttgcctggcagacttgaatcacattggatagcctgacaatttgatttasagtgggggctggaaacaccaggtagccttattaggctactgattgagttaataataacaatgtcattagggtggggactttgggtcatatggtatcgattgacctctggagagacaggagactaagatcagctatatgagcaatcagtcatgcctataggatgaagccccaataaaaac

SEQ ID NO: 47653 - DNA, 561 bp, Homo sapiens
aactaccatccaaatgrgcaatcgcataactgggtatctagacagaggaaactaaatcataaacccttctttcaaaatgacacagacatgggtatgttcttggtagtgctattcacaagaaaaaataaaataaaattgacctatgttccctttaacagttgattcgatgttttaaagtgttgtatatagatactgcaaaatcctacacagcttaaacaaattcatgctctcggcagcaagaaggatgaacctgcaggccactatgctaagcaaactaaggaaagaacagaaaaccaaataccacatgttctcacttagggggaaaatacccatagaaaatacaatgactttgccatctctttctctctcactttctctctctctctctctctctctctcatgagacacagaaatccatgctgacaaaagcaaatataaacctgtgagaccaacactttagagcttccgcatgtgggagaaaacaatgaccccaaagagaaagcatcctaccttggcggaaaggatgattgggggaaaactgtggaaaatcataattttgga

SEQ ID NO: 47654 - DNA, 542 bp, Homo sapiens
tgccaggtgggcctgggcttgggctacctggagctgccacagatcaactacaagctctccgtggaacataagcagcgtcccaaggtggagctgatgccaagaatgcggctggtaagagatgcaggaggagggcgtggggccagatccctccccgttggctgggctttgacctccagactcccggtccgcagctgcagagtctgctggacacgcgctgcgtgtacattctggactgttggtccgacgtgttcatctggctcggccgcaagtccccgcgcctggtgcgcgctgccgccctcaagctgggtcaggagctgtgcgggatgctgcaccggccacgccatgccacggtcagccgcagcctcgagggcaccgaggcgcaggtgcgcttgcagcttcggaggcccctccccaggatccttcgcaccctgacatgccctgacccctgtggcttyactacctccctacagagctgggcccaaacccacctcctctttgctgactctgcccaggccccgccccctctgcaagctgcccctcct

SEQ ID NO: 47655 - DNA, 542 bp, Homo sapiens
tgccaggtgggcctgggcttgggctacctggagctgccacagatcaactacaagctctccgtggaacataagcagcgtcccaaggtggagctgatgccaagaatgcggctggtaagagatgcaggaggagggcgtggggccagatccctccccgttggctgggctttgacctccagactcccggtccgcagctgcagagtctgctggacacgcgctgcgtgtacattctggactgttggtccgacgtgttcatctggctcggccgcaagtccccgcgcctggtgcgcgctgccgccctcaagctgggtcaggagctgtgcgggatgctgcaccggccacgccatgccacggtcagccgcagcctcgagggcaccgaggcgcaggtgcgcttgcagcttcggaggcccctccccaggatccttcgcaccctgacatgccctgacccctgtggcttcactacctccctacagagctgggcccaaacccacctcctytttgctgactctgcccaggccccgccccctctgcaagctgcccctcct

SEQ ID NO: 47656 - DNA, 681 bp, Homo sapiens
aatattatattaacttgatcaatttaagaaccctatatggataattcaggcaagaataaaacctttactcaatagcagttttacctattttatccaaagaacttcagcagccccttaccacacgtgttaactgctgagccagaaaagaatcagaaaaagtatggaatagaactgcattcttaacaaaccatgccatgtagcctaacttctacattatacagatgaggaactagacctaggaaatgggttgcccaagaccaaatagtgacagaagttactaaaatccaggccttgcccctcagtctctgccctttccgctgtaccctgccacatattcttcgttggaagagcatcatgacccattacacggccctgagctccatcccatgtgtcccacctggtggcaagtaggttgaggatgggactccawctattccctgtgcactttcagtgtcttgctctacagtttataaaccatgtggccttcattcacacataatggcaataatttgccaaagcagtcttaccttcctcagaaacataaataaacaaaaataacaggttttactgatcctgagtcgagtgtttaagaagcaaaactgcagggagcaaagggttattacacagcaggaggaggtacaacaggtgtggagctattttagtctttttggtcaagtggtg

SEQ ID NO: 47657 - DNA, 681 bp, Homo sapiens
aatattatattaacttgatcaatttaagaaccctatatggataattcaggcaagaataaaacctttactcaatagcagttttacctattttatccaaagaacttcagcagccccttaccacacgtgttaactgctgagccagaaaagaatcagaaaaagtatggaatagaactgcattcttaacaaaccatgccatgtagcctaacttctacattatacagatgaggaactagacctaggaaatgggttgcccaagaccaaatagtgacagaagttactaaaatccaggccttgcccctcagtctctgccctttccgctgtaccctgccacatattcttcgttggaagagcatcatgacccattacacggccctgagctccatcccatgtgtcccacctggtggcaagtaggttgaggatgggactccatctattccctgtgcactttcagtgtcttgctctacagtttataaaccatgtggccttcattcacacataatggcaataatttgccaaagcagtcttaccttcctcagamacataaataaacaaaaataacaggttttactgatcctgagtcgagtgtttaagaagcaaaactgcagggagcaaagggttattacacagcaggaggaggtacaacaggtgtggagctattttagtctttttggtcaagtggtg

SEQ ID NO: 47658 - DNA, 571 bp, Homo sapiens
atccaaccctttatctggcaaccctagcagtagtctttgtatgttatgttgtctctattcatatttatctcctcactactactactgtctccaggaagcagaaaaataaaaattaattaacttatatacccaaataagtgttttaccttaaaaaatcactttggaaaaacatgtacttattcattgacactgatgttgcccagaacatgtttgaatttctttttttttaaaaaaagaattgcatgcacaactctcttactggttatataagaaaagtagcctcattatctgaaacctgtgtgtttaaaaaaattcacaagccatattatctgtttttatagcttatcttatttttcagcattgacgtcctgtatcattttactctttttgaagatcacatttatcttgaaagggtgaataattgccaccactgaaaataattttaagacatacttacaacttaaaaggacaattcccaaatatatgcaaaactgttcatgaaagccctctggattaaatgcatagcttccaaggtattactatgaagacaacattcaaaracatgtctcat

SEQ ID NO: 47659 - DNA, 590 bp, Homo sapiens
aacatgcttttaaaaaactctactttctattaggcwtcagaacgattggaataagtcaacatttttttgcataccagctgtcataacttaatgactgaacatcattcagaagagctaaattccatgtaataattctaactcattctggtagaaattactaattaaggagatttataaaactacatctttggccctaagaaaaggaaggatggctgaaaaattcaaacagctcatttccactctgtgtattatttgacaatctttttggccttattccaaaagctgttgccaagtagttagaaacagattgcaatgcctccggagagaacctcacaccaatacactgagaagaattccaccctggcaagtataagaaaagtcgtcactgctttccagttgaccaagtgacacactgcacagactgtgtccttaatacttttgtttagtaacctcttttcagccccacaaggcctacttctgaccgcattattattacaagcagaaatgtttatggatgactaaccatgcatgaaactgcatttaatatggcttctgaccaatgggtccatggtacacattgttttaatata

SEQ ID NO: 47660 - DNA, 590 bp, Homo sapiens
aacatgcttttaaaaaactctactttctattaggcatcagaacgatyggaataagtcaacatttttttgcataccagctgtcataacttaatgactgaacatcattcagaagagctaaattccatgtaataattctaactcattctggtagaaattactaattaaggagatttataaaactacatctttggccctaagaaaaggaaggatggctgaaaaattcaaacagctcatttccactctgtgtattatttgacaatctttttggccttattccaaaagctgttgccaagtagttagaaacagattgcaatgcctccggagagaacctcacaccaatacactgagaagaattccaccctggcaagtataagaaaagtcgtcactgctttccagttgaccaagtgacacactgcacagactgtgtccttaatacttttgtttagtaacctcttttcagccccacaaggcctacttctgaccgcattattattacaagcagaaatgtttatggatgactaaccatgcatgaaactgcatttaatatggcttctgaccaatgggtccatggtacacattgttttaatata

SEQ ID NO: 47661 - DNA, 1744 bp, Homo sapiens
  misc_feature (1)...(1744): n = A,T,C or G
tggagaccgggtctcactctgtcgcccaggctgtagtgcagtggtgcgatcttgggtcactgcagcctccgcctgccaggttcaagcaattcttccaccccagcctcccgagtagctggggttacaggtgcctgccccacggcgcctgactccatttcgtattttcagggaagacgggnggttnnaccacgtnggccgggctggtctcgaactcctgacctcgggatgacagacgtgagccactgcgttcagtgtacagtgccatttcttagaaatcactcctcacgggaacacacacttagaggtgacgtgtagagattttatttatttagttagtttagttagttagttagtttgttagttagttattatgtgcgcggggaggtggggggacggagtttggctcttgctgcccaggctacagtgcaatggcctaggggactcaaggagtcaacctacggcagagaggacacgtcattctgagcgtaagggccacagcgaaaggtggcagggcccgcgcttttaaaggctgaaatcccggcggctcaggcctgtcgtttccagcactttgggaggcccaggaaggcggatcatttgaggtcaggagttcgagaccagcgtggccaacgtggagaaaccccgtctctactgaaaataggaatatgagccggccgtcatggtgtgcgcctgtaatcccagctaccgaagaagaatcactggaacccgggaagcagaggtttcagtgagccgagagagcgccaccgcaccgcagcctgggtgacagagcgagagagactcagtccaaaaaaaaagaaagaaaagaagaagaaraaaaaagaacgggcccaaatactgcattgtcgctgaacgttctcccaaaaggccagaaaccccctgactcaggtcaaggaggtggtgtttcgttttctctctccctcctctctctctctctctgtctctctctgtctctctctctctctctctctcctctcttctcccccctaacttttatttgtcgttcaagcatacatgtgcaagattgtgacataggtaaacttgtgacgggggtgttcagtgtgcagatgatttcatcacccgggtagtcagtgctgtgtccgacagtattcgtgttttgttttcttcctgaagctgtctctccttccacccctcctccctcaagcaggcttccgcgtccccggtccccctcgttctgcccatgcaagaactgtcatctgtaagttcccacttctagatgagaacacgcggtatttagccgatccttgctgtcatcttcggtggtggtggtggtggtgaaagaggcatgacactaaatcgacccttaggacgctcccctccgtccccaccccgcaccccctccccacacacaccctcattcccgcaccccctcctcaaacgcaagaaaggaagaaatgaaagtaagaggtgagcctgcaaggcggtggaggcgggggatctcagagggcgagcaagcgatggcggtcgggggatgtgtcggctgaggtatcaaaaataggggacccagttttcagccccaacacaccccctaatcctcagccgcagccagcctctgggtggggttgcgcctgtcaaagcttccgaatggagagaagcccaaggctacggaaggcatcagctccaactccaggaagggaataaggctctgtgcatacgaatggggctttgaaaggcgttgccgcggcttccaaagcgatgcgctgtgcct

SEQ ID NO: 47662 - DNA, 606 bp, Homo sapiens
ccatgtccagctaactttkttttttttttgagacagtgtctctcattgtcgcccaggctgctggagtgcaatggcgcgatctcagctcactgcaacctccacctcccgggttcaagtggttctcctgcctcagcctcccgagtagctgggattacaggcacacaccaccactcctggctaaatttttgtatgtttagtagagaagaggtttcactatgttggccaggctgggctcaaactcctgaccttgggatctgcccacttcggcctcccaaagtgctgggattacaggcatgagccactgcacctggccccagctaactttttaaagtgtgtgtgtgtgtgtgtgtgtgtgtgtgtgtgtgtgtgtgtgtagacaaggtctcgctgtgttgcccaggctggccttgaactcctggccttgagtgagcctcccacctcaacctcccgaggtgctgaggttacaaatgtgagctactgcacctggcactagaaattagcttttatttacactttctaagcattcacactgtgcctggttcaggtcttacattctctttagactctcagcaatgctgtgaggtagctttgctgatggagaaacaa

SEQ ID NO: 47663 - DNA, 607 bp, Homo sapiens
cctgggctcaagtgattctcctgcctcagcctcccgagtagctaggattacaggtatgtgccaccatgcctggctaatttttgtatttttaattaattaattaattaattaatttttttgagacagagttttgctcttgttacccaggctggagtgcagtggcacaatctcggctcactgcaacctctgcctcctgggttcagatgattctgcctcagtctctgaagtagctgggattacaggcatgcgccaccamgcctggcaaatttttgtgttattagtagagacggggtttcactatattggccaggctggtctcgaactcctggcctcaagtgatccacctgcctcagcttcccaaagtgttgggattacaggcgtaagccaccatgcccggcctcacatcatatatttctaccgggggagagaaagagtcagaaaaaaagagaagcatacatggaggaaggagagagaaggccagaggtcagctctgcacacgccggtgctgagaggtgatgctgcctcacctgcctgagccctgggagcagtcaggttccagctcacctgcgtgaggtgctcccagaggactttcacatcaggccagaca

SEQ ID NO: 47664 - DNA, 607 bp, Homo sapiens
cctgggctcaagtgattctcctgcctcagcctcccgagtagctaggattacaggtatgtgccaccatgcctggctaatttttgtatttttaattaattaattaattaattaatttttttgagacagagttttgctcttgttacccaggctggagtgcagtggcacaatctcggctcactgcaacctctgcctcctgggttcagatgattctgcctcagtctctgaagtagctgggattacaggcatgcgccaccaagcctggcaaatttttgtgttattagtagagacggggtttcactatattggccaggctggtctygaactcctggcctcaagtgatccacctgcctcagcttcccaaagtgttgggattacaggcgtaagccaccatgcccggcctcacatcatatatttctaccgggggagagaaagagtcagaaaaaaagagaagcatacatggaggaaggagagagaaggccagaggtcagctctgcacacgccggtgctgagaggtgatgctgcctcacctgcctgagccctgggagcagtcaggttccagctcacctgcgtgaggtgctcccagaggactttcacatcaggccagaca

SEQ ID NO: 47665 - DNA, 607 bp, Homo sapiens
cctgggctcaagtgattctcctgcctcagcctcccgagtagctaggattacaggtatgtgccaccatgcctggctaatttttgtatttttaattaattaattaattaattaatttttttgagacagagttttgctcttgttacccaggctggagtgcagtggcacaatctcggctcactgcaacctctgcctcctgggttcagatgattctgcctcagtctctgaagtagctgggattacaggcatgcgccaccaagcctggcaaatttttgtgttattagtagagacggggtttcactatattggccaggctggtctcgaactcctggcctcaagtgatccacctgcctcagcttcccaaagtgttgggattacaggcgtaagccaccatgcccggcctcacatcatatatttctaccgggggagagaaagagtcagaaaaaaagagaagcatacatggaggaaggagagagaaggccagaggtcagctctgcacacgccggtgctgagaggtgatgctgcctcacctgcctgagccctgggagcagycaggttccagctcacctgcgtgaggtgctcccagaggactttcacatcaggccagaca

SEQ ID NO: 47666 - DNA, 560 bp, Homo sapiens
gcaacatactgagagccctgtctctacaaaaaaataaaaaattagccagtgtgcggcatgtgcctgcctgtagtccaagctactagggaggctgaggcaggagggtcgcctgagtccaggaggttgaggctgcagtgagctatgatcgtgccactgcactccagcctgggcaatagagcaagaccctgtctcaaaaaaacagaaacaaaaccttggcctctacttcccacaaattggccctacctctgtgaccaccaaatattcagttggagctataaatgatttaggcacaaacccccaaataagrtagctattcaaatccagcagtgcaccaaaaaagtaataggtccttaccatgtagttcttcagaaaatctgtttatgtaatccacctcattcacagattagaagataatagagtttgatgaacttcaacacctatgcatgatgaaaactcttgctaaactaggaaaagaaagaagcttcttggcacatagatcctggctgctgcactccccagaaagcattgcactagtgtgagacattaaaagcctccctttt

SEQ ID NO: 47667 - DNA, 592 bp, Homo sapiens
gccagagaaccttgcccgcatcttgctgtatttttgggaatttgtctgttccttgagaggcgattgcctcctcctgagccttgaccagtggrtgctacaggaagatgaggcctcacctagtcccaaggctgtgggtgcccctcagccctctggggttcagagtgcctggcagtgtcaggccgctccccaccccaccacagcctggaggctccaaggctgccagctttgtttcatgaccctttgaaccttgaccttgggcttggagcaccattaagacaaattctttcccagtgatgaagagcaatggcagcgccaactccccgtgtccaagtgggtcaggaaccacagagtccgtctccccctgcacttggtgtcatctttcaggcccaggcggggccagctgccagctttgcggggccctggagttatttatgatttctttctggatgaggaagaaagggttagagcacttgaagcaataacttcagatgaacaatgcgatcctcagaaatccacccaagagaagcaattgaatcgctgaaaccggcaagataaacatgtacagtgatgttcccctctcctggtatccttg

SEQ ID NO: 47668 - DNA, 514 bp, Homo sapiens
caaactatatgataaggcaaaacttccaaaatcaaacttgaaagccacccaagcaggatcayaaatagataaggattcatatttgcttaaatgtattctcatatttctacataatttacttttgagaagagtctcttataaatcctgtgtcataagccacttgcttagagctatgagcagctgtcatttttactaaggaggatgctcttggggggaaaaaaacccccaaaacctaaagaatttaaaataaaatagtctttcgttcaaacatgcaatcaggcaaaaacattttccaccccttcaaacctgcatccccaagaggcaaaaggcttacgtgttcagacttctcctgttcttttttgtccgtctgcaaaaactgatagttttcttttgccagcttctggactagttcaattcgtccgatttcatctctttcctggagcttgcacatcacccctgccttaagagttggagaaaaagcgaagatatacttaaaaccacagtcccaggacat

SEQ ID NO: 47669 - DNA, 574 bp, Homo sapiens
cgcctggctaattttttgtatttttaatagagacggggtttcaccatgttagccaggatggtctcgatctcctgaccgcgtgatccgcccacctcagcctcccaaagtgctgggattacaggygtgagccaccgcgcccggcccgcacccagccttttacatttatttttatgctaactttatagaatatattttccactaaacctacacatggcctccccgtaaaacaaactcaggtattatgtgagaggagcatgctgtttcccagatgaggagaggaggatttgtaccttattgatccaatgatgtttagtcagatttcagcatggttgtgacagctaccacactatttcacttacacatagaaagggtataatgggtttgtgtgctaaagataggaagagaaaattccttctttcccacttcccttcggacttctgtctcctaaaagctcactctaaattttgccaagatttttttttttttttttagctttttgtttgttttgtttttagagacaggatctcactctgtcacccagtctggagtgcagtggcacaatcatggctcactg

SEQ ID NO: 47670 - DNA, 596 bp, Homo sapiens
cgatgattagtgtgttaaatttatcccgatcattttttgtgtgtgtgatctaaagcacccatgttttcttctgtgccaktgtcattcgtggtgacgctaggaggcaggaacaaatagaatgcaatattatttccacattatgcaaaatatatttgagccacctccatgctcatggccataatgaatgtgtcaacgtttgctgaaaatcttgttaaaaagtacatttccttccttctaagaagcattcccctgacgacaaaattctgattcagaattcataacctccttaaaggtagaacttccttgaataaaatcgcgtggtcctcagatgtgcaaacgtttttacgttcacataatacgcttttctcattcaacatgatttgtcagattttccttttaaaaatcaaatcaacagccaacaaagggctcaagactccttctcccatagagagcggctccagatggaagagcagagatgcgggctgccctctgtcccctcccgaaggagaggatgtaatctcaaccaacgcatcagggtagcctgggattcctgaaattggatcaagaagcctctgggcctctcttgtttacaccac

SEQ ID NO: 47671 - DNA, 609 bp, Homo sapiens
gatggagcacccaaggggcaaggagagggcagcagggacagcccagcacacttgctccagaggggattctcctgagggcaatggacacacagcctcttgggaagctrcttcgtgctgtgccacggaggagcagctgcacacgggggagcgggcccgaccacaccgaccggtaggaaagaccaaggtccagacgtcaggaacctggtgtaggtgggcaatgagggagcagaaacgacctggggtctagggtggggaaaaaaggcaagagaggaggagacccacaggaacccacctgcagagaggagcggacccacaggaacccacctgcggagaggaggaacccgcaggaacccacctgcaattacaatctcacgcccaccaaagacccctgcactccgggaaacgtgcaagagcagccggcactgtgggcgtcaggggagcagacgcctgctaggaatgagaaagcctagggtggagttgctggggcctcagaaccccactacccacgcaggcacgcagctggcaatggccccagagccggtctgaactgactccgaccagcggctgtgacctcaagcaagagacttctgctcgcacctgagagattaa

SEQ ID NO: 47672 - DNA, 582 bp, Homo sapiens
gtaaattgtttgcaaaatgttctgtgtttcaggaatactgcaatcatttgattcaaaggtcattgtgtgtgtgtatacagtcatgggtcacttaatgatggggacatgttttaagaaatgtgttgttaggcaatttcattcttgtgtgaacatcatagggtgtatttcaacaaacctagatgggatacatattttcatttatatattttattatggaaaatcaaatgtcccagcactgttactaaatatcagtcatttcccctacttgatctgccatgccaacattaagtgccatttattagatctctatatatgctccattataatcttacaggatcactgttgcacatgtgtttcctcattgactgaaatgttattcagtgcatgactrtacatatagtaaaaatgttatgcaccatattttaacatactgatattactaatgagttgtcctcatggtgactttaaatatcataattaatgccatcaaccagaatatatcaaataaattcagataccacttgttctgtttatttccttcccctgccaattttttatttttcctgattctgctgaagccaa

SEQ ID NO: 47673 - DNA, 530 bp, Homo sapiens
ttatcttaatttaagcattcctttgcactgactttcagtctttagacaaagctgaactctttcaaccaattgcaaattaaagaatctctgaatccacctataacctgtaagcctctgcttcaagatatcctgcctttcagtccaaaccaacttatactttctctatattgatttatgtctttgcctgcaactcctgcctccttaaaaatgtataaaactaaaccgtaacctcaccatcctgggcacagtttttcaaggcttcttaggtttgtgttttctctgggttacagtcactcatattgactcaaaataaacctctttaaaatattttagagttyggcttttctgttaacaaaatgaagcacctgacctttgttatacatatgcaatgtatcgctggtataccagtggttacttttgcagctaccttgcctctttgaatccccagtgagaagtggagattgagacggcaaccttgatgtcaaaatacaacagaagctccagaagcaatgttgccacattgctcaaag

SEQ ID NO: 47674 - DNA, 530 bp, Homo sapiens
ttatcttaatttaagcattcctttgcactgactttcagtctttagacaaagctgaactctttcaaccaattgcaaattaaagaatctctgaatccacctataacctgtaagcctctgcttcaagatatcctgcctttcagtccaaaccaacttatactttctctatattgatttatgtctttgcctgcaactcctgcctccttaaaaatgtataaaactaaaccgtaacctcaccatcctgggcacagtttttcaaggcttcttaggtttgtgttttctctgggttacagtcactcatattgactcaaaataaacctctttaaaatattttagagtttggcttttctgttaacaaaatgaagcacctgacctttgttatacatatgcaatgtatcgctggtataccagtggttacttttgcagstaccttgcctctttgaatccccagtgagaagtggagattgagacggcaaccttgatgtcaaaatacaacagaagctccagaagcaatgttgccacattgctcaaag

SEQ ID NO: 47675 - DNA, 746 bp, Homo sapiens
cctacaaacagaaatagtttgacttcctctcaccctatttagatgctttttatttctttctcttgcctgattgttctggctaggacttccagagctatgttgaataggagtggtgaaagtaggcatccttgtctagttccagctctcaagagggatgcttccagcctctgcctgtttagtgtgatgttggccatgggtttgtcatcaatggctcttattttgatctagctatgacccttgagggcattgagttgggttgaatcctttggctcttggctgtctggctatgaaaccagccgtgtgtatggttgtttttgtgtttacttgtttactttgacagggacataaatgaaatagcatgaaatataggctcagttcatatttactttgcagaatattctatgattttaatattattctagtttagagaatattattattttgggtgacactataaccaataatcaagtagttcttaactacatgacagaagctatcctaaacactttaaatagagttgattctccttattcaaggtagttatgttctrtaaagtcaccacaaacactgaattaatgaatactgaatcattgctcctaggggaaatacagagttaagttcctgtgagtctccaatcaaaacgtttttgatagctcatcaatacacaaccttgtttcatgggtgtttccatttaaagacaccttatttagtggatattgttaattcatccacaatgaactcatgac

SEQ ID NO: 47676 - DNA, 601 bp, Homo sapiens
acacaaattattggaaccgttaagaaagttcaataaaaatatttgatacaaggtcaatattcaaacataaataacattcttattataagatacaagaaatctatgtaaccaataagtgattaatatcaagactattgaccaggcgtggtagctcacgcctgtaatcccaacactttgggaggccgaggcaggcggatcatttgaggtcaggaatttgagaccagcctggccaacatggtgaaaccccatctctactaaaaaatacagaaattagctgagtgtagagtcrggcgcctgtaatcctagctactcaggaggctgaggcatgagaatcacttgaacctgggaggctggggttgcagtgagccaagatcgtgccactggcactccagcctggacaacagagtgagactcagtctcaaaaataaacaaaaaaagactatatattgatttatataaagactatataaatcaacaagaatacaacccaatagaaattgtcacagtatatgaataggcaattcagaaagaaacttaaatgaccacgtctcattattaatcaggcaaatgaaaattaaaaataaaatgaaatattttcaca

SEQ ID NO: 47677 - DNA, 574 bp, Homo sapiens
cctggccttagctgataattttaaataacacactaaactaagttattattcagttctayagatgaggaaactgaggtacctggaagttaagtaattcgcccagtgtaatacagctagtaagtggcaaagccaagatgtgaacacatttgcttggctacagaatctgtgtgctcagccactgttgtaagttaagctgcctgggacagagtgattaagagtttaggctctgggacccaacaaatcaaggtccatatcccagttgcacacaagaccttggataaacagcttcactcagctccaggttgataggttataataattacggcaagatttgctaaatcaaatcattagcagtggccctggcacatagcaactttctaaaaacattagctgcccgccattgttaagaaatgaacaagttgagagcaaatgaaccaggaagtctggcccacaatagaatcgtccaaggaggaaaatcgacatctggaaagaacacatttccctacacactccactaaagggtgggccagaatagaaggggaaaaatgaaagaagtgggatggtgtgacagggg

SEQ ID NO: 47678 - DNA, 1219 bp, Homo sapiens
tcgcaaggacaaaaaaacaaacactgcatgttctcactcataggtaggaattgaacaatgagaacactggagacacaggaaggggaacatcacacactggggcctgtcgtggggtggggggaggtggggggatagcattaggagatatacctaatgtaaatgacgagttaatgggtggagcataccaacatggcacatgtatacatatgtaacaaacctgcacattgtgcacatgtaccctagaacttaaagtataatttaaaaaaaaaatgagaaaaaaaaaaaaaaagatgctacttttcccctgtgttatcttcttatgcttttctaatttcagagattttgacaggatgctccagatggctgcctatggggaaaacctgactttctcagtaaaatcttataaaccccacagcatcaaggtccacaatgagggagagggacaggagggtggggctctatgtgaaaatcaaccatgagctagagaggaaggcagtgtgtccaagagtccaaaacaggactggagtggtgaaagcagtaagtaattctgaatgggatgaagaacaaggaaacaaaggtagtatttatggaggtctctccatgtaatcttttcattgctatcttgaagggacctaagagtttaaagcaagcaggtttcctcaggggaataaagaaagggggagcagtgactcagtacagcatcccctgagtttggtagttacaaagccgtcttgcaaggccacaatgtctgggttctaagagtggtaaggagaacaaatggctggaaacatgaaaggtggagcacggaaaggaatgaggaattaagtggaagagagatgggaagtcagtccccaccccatgtctccaggtactgcagaggaaacatatgagggatgtatatatggttttgttttgttttctgttttttgtggggkttttttgttttgttttgttttttaaatacggagtcttgctctgtcgccaggctggagtgcaacggtgtgatctcaaatcactgcaacttccacctcccggcttcaagcgattctcccgcctcagcctcccaagtagctgggactacgggcacacaccaccatgcccagctaatttttgtatttttagtagagacagggtttcaccatgttggccaggatggtctcgatctcttgaactcgtgatctgcccgcctcagcctcccacagtgttgggattacaggca

SEQ ID NO: 47679 - DNA, 577 bp, Homo sapiens
tcaatttgacaaattaacatattaaaagagaggaaaggtgatcatttacttaggttgaagggaaatatttaacaaaatttaatatacatattattaggaaataagaamtaggaaagaatatctttaaccttataaaaatgatgtacatagggtaaatattttcctgaaaggggaaagatttaaagagttccctttataagcaggactaagacaatgatgcacaatatcagtactcttatgcaacattgtattacaagtcttagcaagtacaataagacaagaaaaaaaatggagacataaagatacaaattaggaaaggtaatcatttacataaaaaatgaagagtctttaaattactacaaataatttagtaaattggttgtatataaaattaacatttaattaaatattaatacaacatttgtcagttgcatttctaattaccagtaacaaacatcctaatactacaattaaagagagaagataatttacaatattatcacagaatatcaagtatcttttcaaatattcaaaactactaaagggaaattgcttcaataaaggatatcaaagacca

SEQ ID NO: 47680 - DNA, 577 bp, Homo sapiens
tcaatttgacaaattaacatattaaaagagaggaaaggtgatcatttacttaggttgaagggaaatatttaacaaaatttaatatacatattattaggaaataagaaataggaaagaatatctttaaccttataaaaatgatgtacatagggtaaatattttcctgaaaggggaaagatttaaagagttccctttataagcaggactaagacaatgatgcacaatatcagtactcttatgcaacattgtattacaagtcttagcaagtacaataagacaagaaaaaaaatggagacataaagatrcaaattaggaaaggtaatcatttacataaaaaatgaagagtctttaaattactacaaataatttagtaaattggttgtatataaaattaacatttaattaaatattaatacaacatttgtcagttgcatttctaattaccagtaacaaacatcctaatactacaattaaagagagaagataatttacaatattatcacagaatatcaagtatcttttcaaatattcaaaactactaaagggaaattgcttcaataaaggatatcaaagacca

SEQ ID NO: 47681 - DNA, 513 bp, Homo sapiens
gacatgattggaaccacaaactctgcatcctttagaacaatgcttttcattgtatgtataacacaaaccatatatgtaatttaaaaatgtttaatagccatattaaaaaggtaaaaaggtgcagtaaaattaactttagtaatatattttaactcaatctatgaaaataaatctaatatgtaataaacataaaatattaatgagatattttatagttttttkgggggtaataagtattaatacttctagtatattataagccatataaagttttagcagaaacactgacttatatttagttttcatgaaatttacaattgaaaaagtagattcacatactcaacttgttccaaaaatacttaaaagttttccaatatctgaatcacacacacaagttttttttttttttgagacagaatttcgctcttattgcccaggctggagtgcaatggtgggatcttggctcactgcaacctccacctcctgggttcaagcaattctcctgcctcagcc

SEQ ID NO: 47682 - DNA, 826 bp, Homo sapiens
tgtagaactggtcctgtccactaacgggtgcttttctgaagagcagctctaaattatatactaagtttttatctaaatcaccagtaactgttttttcctaaaggaacagcttttgctagcagcctaaagcacacagcactgacccccggaggctcccatattgagatgatttctttagatgcttgatgacattgccattctatacaaaatgcacaatcagcccagttaaaaacactgaaatgaattattcagaaatccagacttccagaaaacaatctctctaccaggctactttacttgaagtagcacccacatgaaaatatcatccagagtaaaaagtcggatggctagaactaggggccatctatcctaagtgaaataactctgaaactgaaaggcaaatactgcatgacctcacttagaagtgggagcaaaacaatgggcccacatggacaaacagagtggaataagayaatggagactccaaaaggtgggagatgggacaggggtaaggattgaacaattatttattggtacaatgttcaccattcgggtgatgggtgccctaaaagcccagactccaccattacacaatatatgcatataagaaacctgtaccccctacatccatacaaagaaatttaaaaattattaaaataaacattggacttaatagtattatctcctagaggtattaaattaattacgtgttattgaaaggcatttaataagtgtgctctattattagtattaataaggacaataaaataatacccttttataaccaaaaaaaagttggtgcaagcctcccaccacatgaacatat

SEQ ID NO: 47683 - DNA, 826 bp, Homo sapiens
tgtagaactggtcctgtccactaacgggtgcttttctgaagagcagctctaaattatatactaagtttttatctaaatcaccagtaactgttttttcctaaaggaacagcttttgctagcagcctaaagcacacagcactgacccccggaggctcccatattgagatgatttctttagatgcttgatgacattgccattctatacaaaatgcacaatcagcccagttaaaaacactgaaatgaattattcagaaatccagacttccagaaaacaatctctctaccaggctactttacttgaagtagcacccacatgaaaatatcatccagagtaaaaagtcggatggctagaactaggggccatctatcctaagtgaaataactctgaaactgaaaggcaaatactgcatgacctcacttagaagtgggagcaaaacaatgggcccacatggacaaacagagtggaataagataatggagactccaaaaggtgggagatgggacaggggtaaggattgaacaattatttattggtacaatgttcaccattcgggtgatgggtgcmctaaaagcccagactccaccattacacaatatatgcatataagaaacctgtaccccctacatccatacaaagaaatttaaaaattattaaaataaacattggacttaatagtattatctcctagaggtattaaattaattacgtgttattgaaaggcatttaataagtgtgctctattattagtattaataaggacaataaaataatacccttttataaccaaaaaaaagttggtgcaagcctcccaccacatgaacatat

SEQ ID NO: 47684 - DNA, 1152 bp, Homo sapiens
ttgggtgttgagacatctgacttccagagaggccacaagcctctccagggttctttcctgactggatcctaacaagccaagtttgtgctctgatcctcaggggcttcccaggccaggggagcagcgagaagccactgggacwtcagagctgccgagggtcaggacagaagcaccaaggcggggcaaacacctggcaggtctgacctgggctcctggtgcggaggaaacctggctggggaatgcagtgagaacggctgcgtgtcctgtggggagacagcaagtgcaatcctcactaagggaacaacgcctggcacacccagaagtagctgtaaaatttcactccagacacttatctgggtttgttcaacatccgttgatcacttttgaaagttactactggctgggcatggtggctcatgccagtaatcttagcactttgggaagccaaggtgggcggatcacttgagcccctgagttcgcgactggtctgggtgacatggcaaaaccccatctcaaaaaaacaaaaaaagaatattactgtgtaaaacatggactgcaaagatatacacccaacctatggtgacagctgcctctgggaagtgggtgagagggatgggcccatagagggtgctcatctgaaatgtgttacttcttgaaacacaattggaagcaaataggacagactgccaacatccctgaactctggctggggagatgaggacatgtgctctgcgcccctccacatcttccctccattgtggaagcctacatgctccctaagcccagatacccaagtgtgaacggtccaggcatatggcggaatgaaatgcagaacgcagccatcatatgctgaagtacaaatttaataaagcctttgatcacatctcaatccataagttagctacaaaaacaaaaaatcctacaactttttagagccatcaagagccatcaaggtgtcagtgaacaccagttacaaaaggagattcagtgtttcagatagtgcaatatttccagctgctgaaaagaatttaaatgaaattacaaactacccctccttgtcaaaaatccacatgaagttgatattggtgcttataaatcactctctcccagtccctcactggttccaaccttcaggtgataaaaattaggatg

SEQ ID NO: 47685 - DNA, 600 bp, Homo sapiens
tctgcaacaggagcaccccctccacccccaaaaggcaggttgtgttttcttggagacagtgatggggtgggtggtggggcagcaggcagagaaagagaagggaggaagtggaggaaggagccaagctggggcactgaacctggacgagccccactccgcccagctccagcttctgactcagagcaatggcggctctcgccccagctccctggggccggggccaggcaccctctacagcagaacagcttggtggccgacagttcggacctcagagctggaccctgacactcctggcagggtggtcctgggcattctcctctctgtggggtggggatccctatccacccctgggtgccggggtgaagggagaggagggtggcgctgtggctggctgaccratgtggatgatatggcccttcttgtccagcataatgttgccgttgtgtctgtccttgatctgcagcaggaacagcaggaggctgtaggcggccatgcttcggatgaagttgtagcgggcctgtgcagagagcgccctgggctcaaaaaggccctggggcctgtgggcattctccctggtcccacacccaggatccctgggcc

SEQ ID NO: 47686 - DNA, 425 bp, Homo sapiens
ctcagaaggctgaggcacaagaatcgcttacttgagccccagggacggaggttggagtgagccaagatcgcaccacgcaccactgcactccagcctgggcgacagagcaagactgtgtctcaaaaaaaaaaaaagaaagaaagaaagaaagaaaaaagtgggtggatactgacttgtgatttaacttagtcaaggttgtcctgtccactattcttgaggaaaacctcaagttggcccaatgaatttctcagcagaatgaatctttggcctttgttattttagctagcaataacatttataactacctataactttaaaaattacaattaaaaaatgtttatttgggaggctggggtggaaggatcatttgagcccaggagttcgagaccagcctgggcaacgttgtgagaccccgtcrtacatca

SEQ ID NO: 47687 - DNA, 425 bp, Homo sapiens
ctcagaaggctgaggcacaagaatcgcttacttgagccccagggacggaggttggagtgagccaagatcgcaccacgcaccactgcactccagcctgggcgacagagcaagactgtgtctcaaaaaaaaaaaaagaaagaaagaaagaaagaaaaaagtgggtggatactgacttgtgatttaacttagtcaaggttgtcctgtccactattcttgaggaaaacctcaagttggcccaatgaatttctcagcagaatgaatctttggcctttgttattttagctagcaataacatttataactacctataactttaaaaattacaattaaaaaatgtttatttgggaggctggggtggaaggatcatttgagcccaggagttcgagaccagcctgggcaacgttgtgagaccccgtcgtmcatca

SEQ ID NO: 47688 - DNA, 610 bp, Homo sapiens
tgactttatttttgccagaaacwgggtgttgctatgttgcccaggctggtttcaaactcctggaggcactcaatcccccgaccttggcctcccaaagctttgggattaccggcatgagccaccacacctggccaaagtatcaaatttttaagtaaaattggcatcagtattgtgtcactgattcttccacttacttcagacttcagtgtagctcagcaaagcacttttattgatcctgtctttatttgattcttttacaactttggccattctaaagccttttgtgaaaatggcctgtggttcagctgggcatggtggcgtgcacctgtaatcccagctactcgggaggctgtggcaggagaatcgcctgaaaccaggaggtggaggctgcagtgggctgagatcgtgccacttttgacactctgtctcaaaaaaaaaaaaaaaaaaaaaaaaggaagcctgtcggcttgactccagtagcctctgatggggtggagtggacaaggggaagtgaaagctcccaggcctcagtcagggcaggtcccaagaagccctgagcatggaggaggggaacaatccagtagaggcagctctgaagttttctcccatg

SEQ ID NO: 47689 - DNA, 558 bp, Homo sapiens
tgcatatatcaaaacatcagtctgtacctgctcaatatgtatgattttcatgtatccagtatacctgaaaaaaaaaaaaaagtgaggcctagggactcagaataagcccatcccttcccatacttccagacctccatctgcaggagtgaggaaaggactccattttcttttatcccctttctatccttataytcttgcaacactcccagtctcaccactctctgccttatgacctgtagaccacatgcaatagaatcgccttgggtggttgtaccaaacagatgcccaggcccttctccagaccactgacagaatttctggggaggggtctctggtatctgcatttttaccaagctccccaggtgattctttggcccactgtggtttcagaaccattgtccccagcgtctgaaagacagagaaattgcagatttctccttgtaagtgtatagtactttacagtttgcaaaccacttttatacatcatctcattagatccctaggaccatcaaaggagataaggtgagtattgacattttttaaaaaataaatgagaca

SEQ ID NO: 47690 - DNA, 558 bp, Homo sapiens
tgcatatatcaaaacatcagtctgtacctgctcaatatgtatgattttcatgtatccagtatacctgaaaaaaaaaaaaaagtgaggcctagggactcagaataagcccatcccttcccatacttccagacctccatctgcaggagtgaggaaaggactccattttcttttatcccctttctatccttatattcttgcaacactcccagtctcaccactctctgccttatgacctgtagaccacatgcaatagaatcgccttgggtggytgtaccaaacagatgcccaggcccttctccagaccactgacagaatttctggggaggggtctctggtatctgcatttttaccaagctccccaggtgattctttggcccactgtggtttcagaaccattgtccccagcgtctgaaagacagagaaattgcagatttctccttgtaagtgtatagtactttacagtttgcaaaccacttttatacatcatctcattagatccctaggaccatcaaaggagataaggtgagtattgacattttttaaaaaataaatgagaca

SEQ ID NO: 47691 - DNA, 570 bp, Homo sapiens
aatctcatattaccttccagttttaatgttagtgaataagactgataatttaataaatcttaggatgatggtgtgtatatagtctctaagtaacatggtgaagaccagttggttaagcctggtgatgcagcaactcaattgtaagaactaaactgtaacaattgaacttaaataaaagacaaatgaatgaaaaaaattatattttaatgctcaaaattattcttcattgttgttggaggtatgaataacagaaaatgaattatgttatttcctaagcatataatgggtagaaataagaatgtcttttgaaattttttttaccagtttaaaaatatgacattaaaattgcatttgtgcaggaaataatacaacgggtatgaaagaaagaaaaagaaaagttttttgctgtgaggaatatattttttctcctaaggatatgtcactttcacccaagtaatctggttgccacattgcaatatttcacctgacaataaaaaaatcattgtrtgttattcttcttctgtccctggagaatatgaacgttaatgataacagcattgtgtctaccta

SEQ ID NO: 47692 - DNA, 516 bp, Homo sapiens
caaattcacttaaatctctgagtgacaaaagaccatacagacatttgttagaatagggtaatcacacaatttattatccataccaggatacttttgagggtgtagagggtgttattaataaatatgctgtaacaacaagtgtatatctgcattgtctcaggcaaaatgggacaaatggctgccccacgtatatcacttaatagtttttcattatattgcacaatggcttgaatgcagttttaggaaatacctatttgcaatgagtatttacaaataatcttgaatatacacacttaaatattcaacctaagctcaagctcacccatgatgtattttccagtttccccctactctttgctttccttctttttgaccatagaccaagccgttctagattgacttctctttctctttgatcccatggacccattccatgtctgaattctcaattacaggcctaggctatatcatacaktagttttgtcagtattcttcactaaaccttattactcatgg

SEQ ID NO: 47693 - DNA, 271 bp, Homo sapiens
ggggaaggcgggccagaacgtggtgctgtcgggcttccccgcgcctgcgctgcaagcgaacgtcttcaagcagccaccggccaccaccaccggagcggccccgccgcagccccccggggccctgagcaaacccatgagygtccacctcctgaaccaaggcagcagcatcgtcatccccgcccagcacatgctgccgggccagaaccagttcctactgcctggcgccccggcggtccagctcccgcagcagctctcagccctgccggccaac

SEQ ID NO: 47694 - DNA, 1300 bp, Homo sapiens
ttcctatcatcatgcgatgaggacataacctaagtgagtccaccctgggagtgaaattcaattccaggacattgtcctttagttctttcagaacgcttagggaaaggaagttatctttctgttaaacttggaggtggttagggcatccatctggagctagtagtggccacctgtaaccacacaaagaaagtcaacctgagaatgaaggaaacacagactaagaggtagagatggagtttgttgttgttgttgttaatcatcattcaaggatgagttgtcatccttgaagccagaatttattccttagattttgtgaattctatgagctaatacattttggctttcctcaagacacttgattcagatgttccgtaggtaggaataaggcagttttgactaatattgcaactattgcaataacactatgatcaattctctgattagcaagaaagcataggagctatcacaccatacaatagcatcaaaataggttcttcaaaacagtattcctatcattttatgaatacatcgttttctcttttaatactttcccttaaacagaaaattttttgtagccagggaaagttactgtaattatctatttaaaaatatttatttattttgagacagggtctcactctgtcgttcaggctggagtgcagtgatgtggtcatggttcactgcagcctctattttcctggctcaaacaatcctctcactccagcctcctgagtagctgggactataatcacacgccaccacacccagctaatttttgtaattttgtagagacagggtctctccatgttgcccaggctggtcctgaactccttagctcaagcaatttgcccaccttggcctcccaaagtgctgtgattataggcatgagccactgcacctggtctaattctttctttaactagtttatgcatctatttaattggcagttaatgaacttcttgtctaaatgtcgtgttggatactagagatacagtgatcaaaaaacaagtctctttctccaaagaggtcaaagtttagcgttgaggacagtcatattcacatatgagtgcaataaaataaatcaaagcttagcagaggtatgtacaaattcttacggtagcacaagggaaggatacattggcataactctcgtagttcaacaaattttataaataattttagaaaatgaaccaatttctatctcctgaagtaaataaaactttgcacctataatgagaaatagactgattaacctagtagagaatcaattagactgttatgtagataaytgcaaagtttg

SEQ ID NO: 47695 - DNA, 644 bp, Homo sapiens
ttgtcccacccccatagacagatattgcatctgaactttgggtttccctagcactgggtacacccctctgtttttgctatcacatgccatgtgagaatcaccatccacaaattatatacatcctgtccactcactcataccaccactatactcttcatctcccagccagcaccagcactgagcacagagcctgaayatggcaggtggggtcccttgtgtggtgaactaaaaccacatggaggaaatttgcctttggttccctggtaaagacattaaactaaggagaggagccctctatagagcagctctactactcaccaggtgtctgactggggttaagtttatgtcaaaactaagggcctcactttccatccttgtaaaatggtgcataacaatgtattcaattacacttacaactgattataagaaagcagtgagagaatttggattaatatttatataaataaatattacatataatatttatttattaaattttatttattaaaatttatttatatttatataaagaaattatatataatgtttatataaagaaattatatataatgtttatataaagaaattatatataatgtttatataaagaaattatatataatgtttatataaagaaattatat

SEQ ID NO: 47696 - DNA, 644 bp, Homo sapiens
ttgtcccacccccatagacagatattgcatctgaactttgggtttccctagcactgggtacacccctctgtttttgctatcacatgccatgtgagaatcaccatccacaaattatatacatcctgtccactcactcataccaccactatactcttcatctcccagccagcaccagcactgagcacagagcctgaacatggcaggtggggtcccttgtgtggtgaactaaaaccacatggaggaaatttgcctttggttccctggtaaagacattaaactaaggagaggagccctctatagagcagctctactactcaccaggtgtctgactggggttaartttatgtcaaaactaagggcctcactttccatccttgtaaaatggtgcataacaatgtattcaattacacttacaactgattataagaaagcagtgagagaatttggattaatatttatataaataaatattacatataatatttatttattaaattttatttattaaaatttatttatatttatataaagaaattatatataatgtttatataaagaaattatatataatgtttatataaagaaattatatataatgtttatataaagaaattatatataatgtttatataaagaaattatat

SEQ ID NO: 47697 - DNA, 621 bp, Homo sapiens
cttccttattatgtaggtattagtatttttctcttaaaagcaaaaaaataaaaaataaaaaaaaggaagctcagaagagatacatgttccaatctacataactacaaagtcccgttatacaatgataacagcccattttccaacaggcaaactcaaacatagtttggtaatgaagcatgctacartgtgagacaagcttggtacagagctgtaaaaatacttgtgtcagtttaaaaacaacaataggatttcacatttttattgaatgaaaatgtgtatattaaataaaaattaggcaggtggttatttaaacagttgttcatttgattacagtgaaaaaacatttacaaagatataatcatattgattaactttgagcaagtttgaaatctgatcctagtgcctttttggtttctttttctttgaacacacatgtgtaaaaactacaggaacatttatagactcacaaatttcccggagtttgacaaatcttcagtaccaaatcacagaagtcatctgcttgagtcaagtatatggattctatttattcttctcagccagaatggaaactttctatttcataaatttttttaggaaaggaaaaaagttattccctaacta

SEQ ID NO: 47698 - DNA, 611 bp, Homo sapiens
attgatgtacttcactttaaagtaaaaacactttattagggaaagcattaaagatttcttcatggagaattagctaaattgatacacagacacattgtttcagcgttcttgtgggttcacattaatttattcctgtagtaaacttgctttctttccatagtatgaatagcccaatggatatttttgtartgatgaaaaatagtttatgcaattaataacccatgttctcttttcatcaggttagtagcagggagtgacatcacgagagaaaacagtagccagggataatggaatgtttctaatgaccctttgaataccatcttcataggctggggcagaagggccatattcttgcctttccaccccttttctcagtgtcttctcatggagttgtaaaaataatataaaaaataatttaaagattaagaaaattatgttcgaatattggtgtttttttttttttctagatatcaaaagggtggtgagtggcccagctaggaatctacgactcatctgacaacagtctctgtctccatgtttgtgttcctcactcgttccatgtatacacccccataggtacacctgctcagtttgcaatttacaagccatgc

SEQ ID NO: 47699 - DNA, 611 bp, Homo sapiens
attgatgtacttcactttaaagtaaaaacactttattagggaaagcattaaagatttcttcatggagaattagctaaattgatacacagacacattgtttcagcgttcttgtgggttcacattaatttattcctgtagtaaacttgctttctttccatagtatgaatagcccaatggatatttttgtagtgatgaaaaatagtttatgcaattaataacccatgttctcttttcatcaggttagtagcagggagtgacatcaygagagaaaacagtagccagggataatggaatgtttctaatgaccctttgaataccatcttcataggctggggcagaagggccatattcttgcctttccaccccttttctcagtgtcttctcatggagttgtaaaaataatataaaaaataatttaaagattaagaaaattatgttcgaatattggtgtttttttttttttctagatatcaaaagggtggtgagtggcccagctaggaatctacgactcatctgacaacagtctctgtctccatgtttgtgttcctcactcgttccatgtatacacccccataggtacacctgctcagtttgcaatttacaagccatgc

SEQ ID NO: 47700 - DNA, 611 bp, Homo sapiens
attgatgtacttcactttaaagtaaaaacactttattagggaaagcattaaagatttcttcatggagaattagctaaattgatacacagacacattgtttcagcgttcttgtgggttcacattaatttattcctgtagtaaacttgctttctttccatagtatgaatagcccaatggatatttttgtagtgatgaaaaatagtttatgcaattaataacccatgttctcttttcatcaggttagtagcagggagtgacatcacgagagaaaacagtagccagggataatggaatgtttctaatgaccctttgaataccatcttcataggctggggcagaagggccatattcttgcctttccaccccttttctcagtgtcttctcatggagttgtaaaaataatataaaaaataatttaaagattaagaaaattaygttcgaatattggtgtttttttttttttctagatatcaaaagggtggtgagtggcccagctaggaatctacgactcatctgacaacagtctctgtctccatgtttgtgttcctcactcgttccatgtatacacccccataggtacacctgctcagtttgcaatttacaagccatgc

SEQ ID NO: 47701 - DNA, 611 bp, Homo sapiens
attgatgtacttcactttaaagtaaaaacactttattagggaaagcattaaagatttcttcatggagaattagctaaattgatacacagacacattgtttcagcgttcttgtgggttcacattaatttattcctgtagtaaacttgctttctttccatagtatgaatagcccaatggatatttttgtagtgatgaaaaatagtttatgcaattaataacccatgttctcttttcatcaggttagtagcagggagtgacatcacgagagaaaacagtagccagggataatggaatgtttctaatgaccctttgaataccatcttcataggctggggcagaagggccatattcttgcctttccaccccttttctcagtgtcttctcatggagttgtaaaaataatataaaaaataatttaaagattaagaaaattatgttcgaatattggtgtttttttttttttctagatatcaaaagggtggtsagtggcccagctaggaatctacgactcatctgacaacagtctctgtctccatgtttgtgttcctcactcgttccatgtatacacccccataggtacacctgctcagtttgcaatttacaagccatgc

SEQ ID NO: 47702 - DNA, 705 bp, Homo sapiens
caaatgtcagtggttactattatgatcatcatcatgatcatctggtagtggtaataaaaggaagctagtgatctaagaaaggaatacagtataggagtcttcatgggagaactagttacrtattctgatagaacaatgcactctttttgtaacatttattttactctaattattcagtatttgtcttccctgctagcttgtaaattcacaggggcaaacaacatgtctgctttattctctactatatccctgacccataatagatgctcagcaaatatttcttgactgattatgctagtgaattagtatacaagaaccataaagaggctgacaccactcaccggtcagctcactctcccctctccgagggtgttaccccgcttaataaaccttttgctgttttgctttaaaaaaaaaaaaatacgtaaagagaagtgcagcacaaacagagtgagaccactcaggggccgtaatcattcagcccttgcatgagggcaggtttgggattgtcagagtcattcgaaccagagcgactccattttgagtgagggctaggaaaatgaggctgggacttgctgggctgcattcccagaaaattacgcattcctagcccctagatgtttatggttaagggaacaaattaataatgtttactataacaaactcagatttgggagcgtccagatatcccaatatctggagaac

SEQ ID NO: 47703 - DNA, 596 bp, Homo sapiens
cgtgaccagcgtttaagaggatcagttaccaatcagctgcattttccagacagccataacaattytaaacttgcatgcacctaataaaacagaaaacataaactgtaaggagaaattgtgaaacccaccatgtatttgagaaatttcaacacacgtgtcgagtagacacagtgttactaaaaacttagaagatttgaacaacacaattaataaacttggttttaatggtcttctaaagaatcctcccccaaatcatgtattgaaacaaatctcaataaaattcaagaaatagtgggaaaaaaaaaaaaacttgctggttttgcagcttgtggggcatcacggaacttactgacatgtgatgtctcccccggacgcccagctttaaaatttctcttttgtactttgtccctttatttctcaaaccggccaacgcttagggaaaatagaaaagcacctacgtggctatcggggcaggttccccgatagtatttaagatagaaatgatctaatacatagaatttgccttaaaatacttcaaagaaacaaaagttgggatagatgaaacaagtatggcaacatgttgatggttgttgaaa

SEQ ID NO: 47704 - DNA, 545 bp, Homo sapiens
acacacccctaggctgaaagggggaagggagggagagcattgcaggaaaggctgccccaggagcggagccctttgctcacagtgtgcggccagccagaggaggaagaagccaggccatcaacaccctgatctccttttcttccctccttccaccctcctgtgaggctccctatgggctaactcaagccatgggacaggggaggatggagagttgccgagacgaggggatgagctgatagatatgcagcccagagtcaggcaaggctcttagcatttgtctcggaaaataaatcacttgcctaagataatgcagtaaatatcaggttcagaaatgatgttgtcaccactattttttaagtttttttgtgccagcactgagcaaagcacctcacatacaaataatcagaaggcagtgcggtgtggtggatctggaagtcacacttcctagggtttaaaggtcagcctcactacctatctgctgtgtgactctagacatgttaccagacctttctgagcctcagttytctcatgtacaatatggggcc

SEQ ID NO: 47705 - DNA, 615 bp, Homo sapiens
ttctccagaacttttttaaaaagggctttcataggtcctggtgaggtgactcacacctgtaaccccagcactttgggaggcagaggcagatggatcacttgaggtcaggaattcaagaccagcctggccaacatagtgaaaccctgtctctactaaaaatataaaaactagccaggtgtggtggcatacacctgtgatcccagctacttggaagtctgaggcagaagactcacttgaacccaggaggtaggggcctcagtgagctgagatcacaccactgtactccagcctggatgacagagcaagactctgtctcaaacaaaaggagggttttcatagaatttcatcagtatctttactgatattaattggggtaactcaaaacaataaaatatggttgacagaccttgatattactcctgtctgagccagtttatgtgcataaaaacataatgataacataaatatccaacattcagctatgtaagaaatgtgcaggtgggatagggagttaaaaatcagaaataagcatagatagacatagatagtgaggactaaactctgattttttatcttgcccargctcctacctaaggggcctacggaatcatgccc

SEQ ID NO: 47706 - DNA, 545 bp, Homo sapiens
tactccttgctgttggtcggtttggtgtcttcttttgctttgttgttgttgtaacaaggaagattccctgtaggaactgcgaagcacctgcggggttttcatgatttcattgtgatgctaagaattgacagttagctttaatagtatgttttaaaatattttgcctaactttacatcagaccagcaattcttcttatctaagagcaatctctcccaatcccacctcattctgccacgacataacattgcactgcaatcatcccccaatgcagtatcttcaagttctctatttgctcttttccatcagatatctcctgcctactaaaaaccctcgttcaacacattatcctgtcttagctattgcccaatctctttcttccacactcatagctaaagaattgtttaagctctgtctctggttcctcatttgtcacacttttctcagctgactcaaatctgtccctctcactccaccaaaatgattcttgttaaaatcaygaatgaattccaggttgttaaaattttaagaaatgccttttctgtct

SEQ ID NO: 47707 - DNA, 580 bp, Homo sapiens
gcataggtttcaacatacgatttttggtggaagacaaacattcagtctacagcaatatataacagtagaaaaaaaccatgaagttaatattaaaagtagccaggaaaaatttttttaaaaaagacgaccttcaaataagtcagattaatatctatggaagaaatcaagttttttattaaaaatctttccaagaagaaaactccaaacccagatggcttcactgattaattttcccaaacatttaaagaagaaataacatcagcaaaacataaactcctgcagaggaaaggaaaaaaaaaagatcccttcccarctcattttatgaaggtaacatatgcttgatctctaaaattgacaaggacattataagaaaaaaaattgcaggctaatttctcttatgaatatgaatgaaaatgtcccaagcaaaatgttagcaaatgaaatccagcaatacattaaagggatactatattacaacgaagttgtattttttccccagaatacaagttgatttaacatttgaaaatcaattaaaggagtataacagaaaaatcatttgattatctcaaaagatgccaat

SEQ ID NO: 47708 - DNA, 600 bp, Homo sapiens
cagtctgatgactgcagcctctractcctccctgcatattatattccagccatgcaggccttatttctttgcttcaagcatgccaagttcactcccacctggaggactggacattagttgctgcttcgacattgaattgatctttccctaatccttacatgtctgactccttttcatctcaactaaactgtttaccttcatagaggtattttccctagttaaaaaaaaaatggtgttggagtatttatttaattaattaattaattaaatttttttagggttgaggtctcactctgttgcctaaagtggggtaaggtggcaggatcacagctctctgagggcccagttttgtcttcattggctcactaatataaactcagcaaagaatgctgtggctggcacgcaggaaaagcccaaatatgtgatcaaagcatgagaaaatgaagagtgtggtcacttggattgcctacttcaagtcctggccataacacacacaggaaggatgtgacctgggcatgctgggtgaatggctggccccctctctgtgcctgcgggaaacagtagcccctacgtaacccagagaaaccagatttttctgaa

SEQ ID NO: 47709 - DNA, 594 bp, Homo sapiens
tgcataataaatccttggaagataacacaagtaactgggaacagtagttacttctgaggagtaaacctagtgtgtgtcttggggttgcagggtggtggtggcagggaggtgggcagtacttttactgttcacttctttttttacttatttttttgagacagagtcttgctctgtggcccagsctggaatgcagtggcctgatctcagctcactccaacttccacctcccaggttcaagcaattctcgtgtctcagcctcccaggtaactgggattacaggtacacgccaccatgcccaactaatttttgtatttttagtagatacggggtttcaccatgttggccaggctgctcttttattttatttatttttttttttttgagacggagtctcgatctgtcgcccaggctggagtgcagtggcgcgatctcagctcactacaagctctgcctcccaggttcgcgccattctcctgcctcggcctcccgagtcactgggactacaggtgcccgccaccacgcctggctaattttttgtatttttagtagagatggggtttcaccgtgttagccaggatggtcttgatctcctga

SEQ ID NO: 47710 - DNA, 594 bp, Homo sapiens
tgcataataaatccttggaagataacacaagtaactgggaacagtagttacttctgaggagtaaacctagtgtgtgtcttggggttgcagggtggtggtggcagggaggtgggcagtacttttactgttcacttctttttttacttatttttttgagacagagtcttgctctgtggcccagcctggaatgcagtggcctgatctcagctcactccaacttccacctcccaggttcaagcaattctcgtgtctcagcctcccaggtaactgggattacaggtacacgccaccatgcccaactaatttttgtatttttagtagatacggggtttcaccatgttggccaggctgctcttttattttatttatwtttttttttttgagacggagtctcgatctgtcgcccaggctggagtgcagtggcgcgatctcagctcactacaagctctgcctcccaggttcgcgccattctcctgcctcggcctcccgagtcactgggactacaggtgcccgccaccacgcctggctaattttttgtatttttagtagagatggggtttcaccgtgttagccaggatggtcttgatctcctga

SEQ ID NO: 47711 - DNA, 594 bp, Homo sapiens
tgcataataaatccttggaagataacacaagtaactgggaacagtagttacttctgaggagtaaacctagtgtgtgtcttggggttgcagggtggtggtggcagggaggtgggcagtacttttactgttcacttctttttttacttatttttttgagacagagtcttgctctgtggcccagcctggaatgcagtggcctgatctcagctcactccaacttccacctcccaggttcaagcaattctcgtgtctcagcctcccaggtaactgggattacaggtacacgccaccatgcccaactaatttttgtatttttagtagatacggggtttcaccatgttggccaggctgctcttttattttatttattttttwttttttgagacggagtctcgatctgtcgcccaggctggagtgcagtggcgcgatctcagctcactacaagctctgcctcccaggttcgcgccattctcctgcctcggcctcccgagtcactgggactacaggtgcccgccaccacgcctggctaattttttgtatttttagtagagatggggtttcaccgtgttagccaggatggtcttgatctcctga

SEQ ID NO: 47712 - DNA, 594 bp, Homo sapiens
tgcataataaatccttggaagataacacaagtaactgggaacagtagttacttctgaggagtaaacctagtgtgtgtcttggggttgcagggtggtggtggcagggaggtgggcagtacttttactgttcacttctttttttacttatttttttgagacagagtcttgctctgtggcccagcctggaatgcagtggcctgatctcagctcactccaacttccacctcccaggttcaagcaattctcgtgtctcagcctcccaggtaactgggattacaggtacacgccaccatgcccaactaatttttgtatttttagtagatacggggtttcaccatgttggccaggctgctcttttattttatttatttttttttttttgagacggagtctcgatctgtcrcccaggctggagtgcagtggcgcgatctcagctcactacaagctctgcctcccaggttcgcgccattctcctgcctcggcctcccgagtcactgggactacaggtgcccgccaccacgcctggctaattttttgtatttttagtagagatggggtttcaccgtgttagccaggatggtcttgatctcctga

SEQ ID NO: 47713 - DNA, 1322 bp, Homo sapiens
  misc_feature (1)...(1322): n = A,T,C or G
gtttggctacgacagaatttgtgtgtactttctgcctactgggactctgagttgtctatgatggaaaagtagatgttggaaataaaagactgtacacccagtgttgtataggctgtacacatttctttattaacaccttactctctttctcctttatggaattcaaaccccagccctcttaccttctcccaacagctctatgacttctagacagcattgcacatatgttgagaagtattttcgatctccttagcagcttcaactgaactgctaagaaacagctggtttgggcatacatgcttttttacacctgaatttctagtcacgtgttagcccagggccaagacttgcagcagcaaacttagctcccaggcatgatcgttagcaggagtgagctgttgccttctatgagcccaacagtgagttgcttgccaaagtcatcactccaccttgatctcctggttagtcragttcagtcaagatttccctcagaagctggagctcgttactgtttctccagtctcttccaaggttacctaccttctctggcagaggataaggaattcatcatctttcagactgcagtctgttgcttggaggcttggaggaaactggctgagaaaatcatagttagtagttgataacaggccaatgaaaattagcgagactaaggggactacgaaaagtagttgctaatgggacaaagttttactatgtcttccatgatgaaattcaacctcttcatggcctctttaggaaggggtcagtaaaaacttctactatttttaaaagttgccacaaacaaagtttgatttgctttgaatgtgacaccataacagaagtaggctttcaggaaagaggaaaatggccagttttgtatttttggtttggttctgtttctttgtatttttttcccactttagaacatacaggaatgttgtagaacattctctctttctttgagaaacatttagcacggtttctaaatataccctgcagagttaaattcctgtgtttggtttagactgagatctgttgacctaaggcaagacttcgacagattcagttttttcacctgtaaaatgggatggtacctacctcttagggctgagctagagattaattgagttaatctatataaacacttagaacattgcctggcacaaagcaagagctagatgctgtgtaactattagttactcttaacatctccctctcatttgagttcatttcctccaactgatatttcactgggcatccatttggtatggtcctgataagatgtctcgtctaattccttgtctcttctcccttaatngagt

SEQ ID NO: 47714 - DNA, 623 bp, Homo sapiens
ttgactcatgccataataaaactaataagaaaaaactaaagaagtttaagaacagtttaattttaaaaataattctagaccatccatataattgtatcatcctcaattacttgtatcacatttcacttctttctgttggaaataatggagttacaagccatgtactctgaactgcacacatcctcagatacatttactaaggtgtttttttgttttgttttgttttggtttttttgcctgtgaacatcaacctctgacatgtgcctccattgatgaaaggatgaaaattagtagagaagatgacatatcatagagaattccargccaatgtaaccattatatgtcaaagtaaggccatacacagtagagaatgtcaaaaattacaaaatgcaatttaataatttttactagtaattttactggtaaataataataaaacattaattggttgatttttttaaaaaaatttcaataaaagatgtttttagaagcagtgctgaggcaaacatatatttaatgttgccacaatacaaattaaatatcacattggctttttaaaaaactgtttgctttatttcctctgcacatcccaatccagtgttttctacaggtacacatacatg

SEQ ID NO: 47715 - DNA, 1526 bp, Homo sapiens
  misc_feature (1)...(1526): n = A,T,C or G
tcgagggcatcatcatagctggatgcccagcagtttatcctgatgggcagggacatctttcctagaagcccacccagcctcaagagcaggcacttctggttgtgttgaagccagtgaaagactgggacccaggtgctttttccatatatatagaattctgagctgagtccctcccaccacagtgaaatgatgtaatgactaagctgacagatgttaatgaggaacacagtgcagcagctgcaaattagcaaagcttcccaggaagagtgcatccagaggttctgctatcctgctgctgctgctgctgggctgcctgcggcctggagtccrgcgctaaagaggttctgagggcccacgtctcccgagaggctgtgacgcagtctggactgaaggcatggtgagagcagtggcaacaccgaaggtctccaggacccagcagacaacactgcccccctgctatggttttgaagtgtcgttttctgtactcaacccttacgtggactgtggcgaatgggaatcagttttcaatnnnnnnngcggggcgnnnnnnnnnnnnnnnnnnnnnnnnnnnnnnnnnnnnnnnnnnnnnnnnnnnnnnnnnnnnnnnnnnnnnnnnnnnnnnnnnnnnnnnnnnnnnnnnnnnntagaagaaatgcccccaggtgtcctctccgtggggcaaggtggatccccaggaggtcagagaggcgttgctgccatcaaaggcccaagaggaggctcatcaccacccagctttgggccagctccttttctttctctttttttttttttttttttttttttctgagacagagtctcgctctgttgcccaggctggagtgcagtggtgcaatcttggctcactgcaacctctgcctcccaggttcaagcaatccttgtgcctcagcctcctgagtacctgatattacgggcatgcaccaccacacctggctgatttttgtgtttttagtagagatagggttttaccatgttaaccaggctggtctcaaacccctgggctcaagtgatccaatcaactcggccgctcaaagttctgggatgacaggtgtgatttttagtacagacagggtttcatcatgttggccaggctggtcttgattcctggcctcaaggaatctgcctgcctcagcgatccacccacctcggcctctcagttctgggatgacaggccgcgcccagccccatcaccttttcagttactcccatcctntgggcccctctgcctccctcccacatgcaggctgggggtgttggttaccttgccatcagcaggcccgtgtcaggctttctcgccatcctgcacctagcaggtgcatcataaatgctgcatattcagagtttctcatccctctgatctctggtccactccaaaatccttgctgcactgctaagatctacccatgaaagatttgcttttcagcagggtccccacgtcacagtcttccagcatgaggggtacacagtggtagtagaggcttgttacttattttcagaatgataaaact

SEQ ID NO: 47716 - DNA, 538 bp, Homo sapiens
aatatgataaagttgtttatattttaaagtgatcattgaaagccaaaagtgatatagttacatagtgatacatttttttgtgtgtgtttaagctcgtatacacatataagagcatattaaaactaatgaacaaaagaaacttcagtatgataaagatgatggacctgatagcttaaaatctcttggaatattccagtctgttgtaaacaagaggtattggaaggttatttttgacctttgtgtagtctgcccagagagcatggattcttatcttgtcaaaatattcttactctgagcacttgagacctacttaactttttgttaaatcaaataaccaaaactggccacatctgaaagatctaaaatcccttaataattatactgtgatgtgctgttaggtgtatttaaaaatcaaaacaaaactattgtcactctggctcttaaggcagccaattacagctmttccatagtttttgtttagaaaaataagtctatagaggtgtttttgcattcaaagtcatctttggtacttcttagg

SEQ ID NO: 47717 - DNA, 605 bp, Homo sapiens
tataggtacatatatacatataggtacatatatacaaatgtgcatgtgtatacatatgcatacacacacatttaaatggagtatgtttatctagaaatcaggaaagttagaaactgagagtaaataaacatttaaaaatggagaggcaartggcttttcaagatagccctgattttaggtcaatggaaaaaatctaagcagttattttaactaaagtatctggtgatcatagtttggaagatctggaattttaaggtgggtggctcacttgacttgaaaatccaatattttttctgaagtaggtgttgccatggtgacagaacggcttagcaactgaagacagatttcattggctggctgtctgcagacttgcttgttgagtggcattaatatgttgcctcctgctgttttttttctgaggagaccatctggcattagctgtatttaaaggtacagttctgttaaacaaagaataccaggtgatatacactgaggtgttaaaaatatgttttgcaggcattagttggtttaatcaatcaatgactaagaagttccacttcaaatcacaacctattataaccaattaattcactattctaggcttt

SEQ ID NO: 47718 - DNA, 341 bp, Homo sapiens
aaawaaagagaaccatgtactccacattccccttttcaccttatgtgccaagaaattcaaagctaaattcagagttcaactacaataattaacttgtctcaggtgcttctaatagctactaacagtcagggtacagctccttttactggtttccaatctgctttaacttgtacttatccggttttatgttacccataaatgtagtgagctttcctcacattctgcattttggattttatggggtataaatcataaacaaacaaaaatacccaggtgtgcatttttctcacattcaaaggtttaacatttggctccacaaaagagcagctcagcaggaaatc

SEQ ID NO: 47719 - DNA, 641 bp, Homo sapiens
tttttaatagcacaattgtgaggtctttctttttttcttttactttttttttttttttttgagacagagtctcactgtcacccaagctggaatgcaatggtacggtctcggctcactacaacctccacctcctgggttcaagcaattctcccgcctcagcctcccaagtagctgggactacaggcacatgmcaccacgaccggctaatttttgtatttttagtagagacagcatttcaccatgttggtcaggctggtctagaactcctgacctcgtgatccacccacctcggcctcccaaagtgccgggattacaggcatgagccaccgcacccagccgaggtctttcatattaatgattttccagtcgaaatatttaaccaattaaatgtttcatgttaataatttttgagtcaaaaacttaaccaattaaattttcagcattctcctgaaaactcttacatcctccactttatacaaggaaggaataaagtgcacaatgcccaggttctcttcctgctctcagattctgtgatttctttacagcaaaattcatccttatttattcaaaatgtattaaaacatatattacaggcaaagttttaatcaatgcatcatataaaatttttagcaagacaacat

SEQ ID NO: 47720 - DNA, 641 bp, Homo sapiens
tttttaatagcacaattgtgaggtctttctttttttcttttactttttttttttttttttgagacagagtctcactgtcacccaagctggaatgcaatggtacggtctcggctcactacaacctccacctcctgggttcaagcaattctcccgcctcagcctcccaagtagctgggactacaggcacatgacaccacgaccggctaatttttgtatttttagtagagacagcatttcaccatgttggtcaggctggtctagaactcctgacctcgtgatccacccacctyggcctcccaaagtgccgggattacaggcatgagccaccgcacccagccgaggtctttcatattaatgattttccagtcgaaatatttaaccaattaaatgtttcatgttaataatttttgagtcaaaaacttaaccaattaaattttcagcattctcctgaaaactcttacatcctccactttatacaaggaaggaataaagtgcacaatgcccaggttctcttcctgctctcagattctgtgatttctttacagcaaaattcatccttatttattcaaaatgtattaaaacatatattacaggcaaagttttaatcaatgcatcatataaaatttttagcaagacaacat

SEQ ID NO: 47721 - DNA, 583 bp, Homo sapiens
ctcaacatgtcttataaccacaaagcccagatttgaaccttgtatatactcatggaaaggagaaccagttctcaagcaactcttctcatttttaccaaccacataaacatgtagcttccggtaaaacaatacttctcattttacaagttcattaatcaataatgagcaggctcagtgggggcacaggacaacctgagcctgacagcgaggaaggcggattttgtcacsgagggagggttctcatgaaactctggatctcccagctagttggggggcactaacaagggctgcccagagagcacgcaaggtctctccaatcatgccacaaaccccgcaatgtcaggacaaaggcaccggtgttgacagagaccttggagttcatcagagaggtgacatcacctgcctaggtctctacttccctgctcttttccccagcaaaaccaaccacactttgcattccccatcattattaatcctccaaacaagcaacccgtccacataggaacaaggaacctgaggtgaagtgagccgaactggcttacccaagctcacacagcgcagggccgtcagcattgggaggcag

SEQ ID NO: 47722 - DNA, 651 bp, Homo sapiens
atttttgtattttttgtttgctcatttagcagagacagggtttcaccacgttgctcaggctggtctcaaactcctgaccttgtgatccgcccacctggcctcccaaagtgctgggactacaggtgtgagccaccgcgcccggccctcttcctcttcttataagggcattaatcctatcatagtggctcagcccttatgtcttaatttaaacctaattacctcccaaagatcctacctcctaataccaccccattgggagttagggcttcaaaatatgaatttgggaatgtttggagaggacataaacattccattcacaacagatatcagatcattagatagaagaagtatgctgccttgaaacaagatcaatataaaaatgaaatgctttaggaaatcacttttttcagaagagttgttttatcagattgctacrtttctccacaattacagaaattacacacatatgcgcacacacacacacacacaacatcagaaaggacactgccaaaaatcacattgttgatttagacatttcaattgtctgtgccacagagagctagaacatagatattgtctagttcagcaacctcctttttaaaggggagcaaacaaaccatgagagttgaagggcctacccaagacagcttc

SEQ ID NO: 47723 - DNA, 1088 bp, Homo sapiens
ggactagccaagcccttccccttcttcccagaatctcctggtccatgagtctcaacttgaacaccccaagggttcttgttgaaatccttatcatgcagatcctatgtgtgagcagctgacattctatctactcacagattaggattttgccttactctatactctatctagaatgacagcctggtgtttctccaaaatagctgcagtttgttatatattcctgcaattttctctcrtgagtctacctccttaatgatctttgaaatttcacagccatctccattcctccagatgcaacccacctcacttgaatctgaaacactctccaatctattcactacagcaggtgcctgcattctgattgaacttccacaggaaaaaatatttcagcatgccctttcaccctcattatctacctatcatctatctatctgtaaatctacctacaatcacttatggttatataaatatagacatcattatcatttcttaatatcccaaggcagaatgtatatttagacaaggtttatcattaatgattatgaatattaagtgcatgctttacttacatttactccacagtgtcacttacttaccctttcaggacattagggaactcctacatggctcggagtcaaactggattcaattactaacttagagatggccgattggtaaggtgtatttctatccctcctacttccagcattcctaagccatgggttggagttcaagttctctccctgctcctcctcctatcactccagcaaagtgtggacatgctccaggaattcacatcatctgcactgggagacagttcactgagacaaccacgaaggacctcataatcctcagctctctgactgccagatttctgcagaattctacaagccagtgtgactggatatggagcctgggctcattagagcagtacctgatccatgccttactgttgcagtgtttctgaatctgagagacaccttgatgctggtctcattcactccctcattttagaggggaaccactgggctgctcctcctcagggtcccctactgggtctttctgctctgttcctcgaggcaccccag

SEQ ID NO: 47724 - DNA, 1675 bp, Homo sapiens
tgcatcatatagcattaattatcatatataatacctaccctgagaattaaataatgaaattgtaagctaaataagtagtcaactggctcattttgtggaatggggaatctctcaattatgagtatatatatatatattttttttctgagacagggtctcgctctgttgtccaggctagagtgcaaaggcacattcacagctcactgcagtctcaacctcctgggctcaagggatcctctgacctcagcctctgaggacctgggactacaggcacacactaccacacccagctatataattttttctcgggaggagttcattattttctcagttaactttcctatttgaaatctcccatctccctgaacagagagatgctgttctctgcctggcatatccaatccagagcctcactgatgcagtttcccccacagcatatactttatgtctttcacggggttcagggtagaggcacatatggagacagagggctgagggtctaacccttccttacagacactttcaatgtacccatccacccctccttccacagtaactgtgctaattactccaatgcaaatggctttccagaattctgcagggtgaatgatatttgattgctttccattgctatccccttggcagatccttgagtttcaccttttctgttctgagtcattttactacttttcaatgttctgtgacatggagttacagatgtcttctagttttgacacgtgtaaatcagtttttctatttcttcatatccttatttttgtaatgagatttttgagaagggcagaaatacctttactctgccattctgaaagggaagtctacatgctgtttcttcaagttcataaagttctctttttcaagttccattgaaaggatttagtagtttgttccttctgcttaacatttatattattgttagtctttaggccacatgtactcacttacactgccatgcattttaaatgacttcatctaattttttcatgtgtaggaaagattcatcaaaatgatgtgtttcttactataagccacaacatgtaggcttaggagcttgcagttttagccaccgtatatgccatattcatttaaataataaaattataggttttcttaggaatttattgactcttgaacaataaaatacaaagcaatgccctgatgattttaaatcaaaattttatgcattgcataaaatcctcttcataaacacactccaataatatctgtagtattaaaactttatttcctttttttgttccataatttttctcattttgaagtgatcttctgaaccaaggttaagtaagtatgtaaaactcattttgtgctcaaaataagtaaatgatctcttaccctactgtaaaacgcagcatgttaagtaaatagttttgcttaaaattttcaatcaaccaggygactacatgaaaccattcttttccttgcatgtgtttacatactatttttgacaattatatgatggttttggatgtatattcaaacggctatgtttttgtgagtgaattttgaaaaactccttgactccttcttttctcagtgcagttatttttattctcccctcccttgccatcccccgctgcccccatctcccttaaccaatctttatacttcctcactatttatttcacttgtggcttat

SEQ ID NO: 47725 - DNA, 1675 bp, Homo sapiens
tgcatcatatagcattaattatcatatataatacctaccctgagaattaaataatgaaattgtaagctaaataagtagtcaactggctcattttgtggaatggggaatctctcaattatgagtatatatatatatattttttttctgagacagggtctcgctctgttgtccaggctagagtgcaaaggcacattcacagctcactgcagtctcaacctcctgggctcaagggatcctctgacctcagcctctgaggacctgggactacaggcacacactaccacacccagctatataattttttctcgggaggagttcattattttctcagttaactttcctatttgaaatctcccatctccctgaacagagagatgctgttctctgcctggcatatccaatccagagcctcactgatgcagtttcccccacagcatatactttatgtctttcacggggttcagggtagaggcacatatggagacagagggctgagggtctaacccttccttacagacactttcaatgtacccatccacccctccttccacagtaactgtgctaattactccaatgcaaatggctttccagaattctgcagggtgaatgatatttgattgctttccattgctatccccttggcagatccttgagtttcaccttttctgttctgagtcattttactacttttcaatgttctgtgacatggagttacagatgtcttctagttttgacacgtgtaaatcagtttttctatttcttcatatccttatttttgtaatgagatttttgagaagggcagaaatacctttactctgccattctgaaagggaagtctacatgctgtttcttcaagttcataaagttctctttttcaagttccattgaaaggatttagtagtttgttccttctgcttaacatttatattattgttagtctttaggccacatgtactcacttacactgccatgcattttaaatgacttcatctaattttttcatgtgtaggaaagattcatcaaaatgatgtgtttcttactataagccacaacatgtaggcttaggagcttgcagttttagccaccgtatatgccatattcatttaaataataaaattataggttttcttaggaatttattgactcttgaacaataaaatacaaagcaatgccctgatgattttaaatcaaaattttatgcattgcataaaatcctcttcataaacacactccaataatatctgtagtattaaaactttatttcctttttttgttccataatttttctcattttgaagtgatcttctgaaccaaggttaagtaagtatgtaaaactcattttgtgctcaaaataagtaaatgatctcttaccctactgtaaaacgcagcatgttaagtaaatagttttgcttaaaattttcaatcaaccaggcgactacatgaaaccattcttttccttgcatgtgtttacatactatttttgacaattatatgatggttttggatgtatattcaaayggctatgtttttgtgagtgaattttgaaaaactccttgactccttcttttctcagtgcagttatttttattctcccctcccttgccatcccccgctgcccccatctcccttaaccaatctttatacttcctcactatttatttcacttgtggcttat

SEQ ID NO: 47726 - DNA, 601 bp, Homo sapiens
ataactccagccttcaagaagcatctcacctactggtggaaactgtccaagaatcaggattacaatatagtataataaggtgttaccatcagatatcaaagctgggaagagcatggaggccttcctggaggtggaaacatttcagctgagtcttaaaacacattttggaatttgtaaagaggaagaagaggccattccaggcagaagataaaggtattgataggtaatcacactttggctctgatccgggttctcaatctttcacacattagaatctcttgggaagctttgaagatctgagatagccaaacttcaccctccasagattttgatttaattttcctgggtgtggggcctagctgattctaaagtacagccatatttgggaacccctgatccagttaatcctaaattgcaaccagaaccttgaaagaaggccaggcatagtggatcattactgtaatcccagcactttgggaggctgaggcaggaaggtcacaaggctaggagtttgagaccagcctgggcatcatagcgacactcccatctctacaaaaaaacaaaaacaaaaaatgtttaactaccccagtgtggtggtgct

SEQ ID NO: 47727 - DNA, 601 bp, Homo sapiens
ataactccagccttcaagaagcatctcacctactggtggaaactgtccaagaatcaggattacaatatagtataataaggtgttaccatcagatatcaaagctgggaagagcatggaggccttcctggaggtggaaacatttcagctgagtcttaaaacacattttggaatttgtaaagaggaagaagaggccattccaggcagaagataaaggtattgataggtaatcacactttggctctgatccgggttctcaatctttcacacattagaatctcttgggaagctttgaagatctgagatagccaaacttcaccctccacagattttgatttaattttcctgggtgtggggcctagctgattctaaagtacagccatatttgggaacccctgatccagttaatcctaaattgcaaccagaacctygaaagaaggccaggcatagtggatcattactgtaatcccagcactttgggaggctgaggcaggaaggtcacaaggctaggagtttgagaccagcctgggcatcatagcgacactcccatctctacaaaaaaacaaaaacaaaaaatgtttaactaccccagtgtggtggtgct

SEQ ID NO: 47728 - DNA, 567 bp, Homo sapiens
ctactaaatgcaataaaaatagccaggcatggtggcacatgcctgtaatctaagctacttgggaggctgagacaggagaattgcttgtacctgggaggcagaggttgcagtaagccgagatcacaccattgcactccagcctgggcaacaagagcaaaactctgtctcagraaaaaaaaaaaaaatcctgtaaatattggatagagcaattaaacaagaaatgttgagcatatacagcaggggccagcagactatttctacaaagggcaagacagcaaatttctgttttaaatattaatatatattaaagagtttacaaacactgaatttctatgtacaaccacaactgcactcatccctcatcctaaaggagggaacccatatccctttcagctgtggacatggaatccacggtttccagggaaagacattccttttcttggtcagtcttgatttgtacctcctttccatcctgcactgtatgaactaaatcagcgattaacccatgtcttcaccatgcacatcaaaatagggggttgtcttgaagcatgaacaagttacactgtg

SEQ ID NO: 47729 - DNA, 589 bp, Homo sapiens
gtgggtgagcacaactgacctgggaatcttggctggatcctgttgaggagatttccttcctcctcattgyagaacgcagtgggatatcaaagtatgtcatgactcttttatcggtttgtcctggattgtttgtttcttttgggcaccttctagtattattttgtgcccagtggaaaatgttgacttttctaatgagccagtgtaaagcttcattgaatggcctctaaaactgaagaagctacacccaaatccagtatcctttctaattaacagggtatcacattcccaacccagaggtcatcttcagaatgctaaaagaaaaggagccgcgtgtggaggaggctgaagtctcacatcagaggtgtcaaggtgagtaagttgtacccgggcaaatgtagatatctttgcagggaaccattaccagtctaccatacttttctattccctccattcccccagtgatggcccgtagattgcctcctactcccagtttcccatcaaacactgtaaatgtgctataaatgttaaatgtcctataggggctgccttaagaattttccattggtgaatactcaggaatgggattgcc

SEQ ID NO: 47730 - DNA, 589 bp, Homo sapiens
gtgggtgagcacaactgacctgggaatcttggctggatcctgttgaggagatttccttcctcctcattgcagaacgcagtgggatatcaaagtatgtcatgactcttttatcggtttgtcctggattgtttgtttcttttgggcaccttctagtattattttgtgcccagtggaaaatgttgacttttctaatgagccagtgtaaagcttcattgaatggcctctaaaactgaagaagctacacccaaatccagtatcctttctaattaacagggtatcacattcccaacccagaggtcatcttcagaatgctaaaagaaaaggagccgcgtgtggaggaggctgaagtctcacatcagaggtgtcaaggtgagtaagttgtacccgggcaaatgtagatatctttgcagggaaccattaccagtctaccatacttttctattccctccattcccccagtgatggcccgtagattgcctcctactcccagtttcccatcaaacactgtaaatgtgctataaatgytaaatgtcctataggggctgccttaagaattttccattggtgaatactcaggaatgggattgcc

SEQ ID NO: 47731 - DNA, 652 bp, Homo sapiens
ccaggaaccttgtccagcttgctgttgtgaagtaggggctcctcttccaggtccgccttctgggggacgtcagcttttgaatcttgcttgttgaaggagccgggctggggcctggccttgccttgagagttggctgcaagtcagaccctacaaggccggtcactgcaggcaccaacagtcaccgcccaagttttccaggaacagctgtgtgtacccaagaagcccctgtccctgcctcagtttcctcctctgtaaagggaagcctgccttggagggttctggggggaatcartgtggttctgagggtgaagcccatgggtggtgcctgtgaacactctagaacaatcaacatagtggaagctggccccatcttgggtaaaatgaaactgcatgagaggcttgggacccagcctgcatgggtttcctcggcaaggacaaggcccgtccagcacctgggcccatcacaggaatggtgagggttagggctgggctgaggaaaatgcccggcctcacagagtggggaaaagaggctctctgctcccagttcactctgcagaaggtgccatgagcccagggctccgtgggcagtgccatccctcctgtgtcctgcctgcttgtggcggggacacggccaagcagggctgctgctggg

SEQ ID NO: 47732 - DNA, 652 bp, Homo sapiens
ccaggaaccttgtccagcttgctgttgtgaagtaggggctcctcttccaggtccgccttctgggggacgtcagcttttgaatcttgcttgttgaaggagccgggctggggcctggccttgccttgagagttggctgcaagtcagaccctacaaggccggtcactgcaggcaccaacagtcaccgcccaagttttccaggaacagctgtgtgtacccaagaagcccctgtccctgcctcagtttcctcctctgtaaagggaagcctgccttggagggttctggggggaatcaatgtggttctgagggtgaagcccatgggtggtgcctgtgaacactctagaacaatcaacatagtggaagctggccccatcttgggtaaaatgaaactgcatgagaggcttgggacccagcctgcatgggtttcctcggcaaggacaaggcccgtccagcacctgggcccatcacaggaatggtgrgggttagggctgggctgaggaaaatgcccggcctcacagagtggggaaaagaggctctctgctcccagttcactctgcagaaggtgccatgagcccagggctccgtgggcagtgccatccctcctgtgtcctgcctgcttgtggcggggacacggccaagcagggctgctgctggg

SEQ ID NO: 47733 - DNA, 591 bp, Homo sapiens
ttcattctgtcttcatagtgaaaaatcattgccctttgctgagaattaataaccttttgagttaataccctttgggtaggaaaattggtttcattaacacctccccttgcactttgtaggttcatcatctcttggtcctgctgtcccctgaaaccaaaagcccaagacatattatttgagaagcctgaatgattttattctcagaaagaatgatcagggtccttattaaatgggctgaattgagttcactgaccaaaaaggtcagagcggccttgtgtctgctcctcagccgcaggggagcccaccttctaccagaaggaagggatgagagcttcctctcccagctcttggcctgatccctaatcttggcagaaaagatgcgcccatcttgacatgccacgccatggaaacgcgccaccttgccaggctctaccaggcctcttggcagaggtgtccgtctctggtscagcaccacagacaggacagctgtcgggctgcctggcagagttggatggccactcacccacccctccaaagtggctcatggtcatagtgaggctcccccagaagagaggctggaaggcccttcgg

SEQ ID NO: 47734 - DNA, 605 bp, Homo sapiens
gcccgaggttggacctagtaaaacaaaagactcagagaagactgactataattttggtaaaaggggagagtgtattagtttgttctcacactgctatacagaattacctgagactgggtaatttatgaagaaaagaggtttaattgactcacacttccacagactgtacaggaagcatggctagtaggtctcaggaaacttacaaccatggcggaaggcaaaggggaagcaagcacatcttaccatcgtggagcaagagagagagtgaagggggaagtgccatacactttcaaataaccagatctcactcattatcccaagaacagtaagggggaagttcaaccccatgattccatcacttcctaccaggcycttcccctgacacatggggattacaatttgagatgagatttggatggggacacagagccaaaccatatcagtctttgtcaatattttaataaatgctaaagatgataagattaatagccttggtacaccaattaataatatgtttctagaattgaaagcaaaaatcatatgatcatctcaatacaggcagaaaaagcttttgacaaaatccaacatcccttcatgataaaaac

SEQ ID NO: 47735 - DNA, 905 bp, Homo sapiens
aaaaatcttatcatcagtgtcagttttctggatctgtgaccctttgatctcggaaaacttggcgtgcagctgagagttcacacccctgccctggccttctctctcccagcacttcacaaggatctctgggatgtttgaaggcatttaattccctgtattaaatatcatcctgcttaaaaaaccaagagcgaatgctgtttgtggacataactcttgctgatatacatttttttttctttctactacccattttaacttggaaactggctatcttttagttcactagtaagttttcaaaacacttttttcatttrctgtatgtttttatcttactattttcagtgaaagtgccagagattagacataacaataagatgcctctgaaatataaaaattatattattggaatttgttgatatattgtttttgctattaccaaatcaaatgcattaataatatacttgtttccatggggtaaatccacttttaatagttttggaccaaatttcttcactgtgtaacttaataaaagccataaaattcaggaactggtgcttttgcaataggtgagaggaaagaagttaatggctgtggctgctctggcataaaagcaatactttccacctctttccagggaatgctgctggattcaggaaataagcactgagacacttcatcaagaatatcgtaaaaactgttcattaacattgtaattattcttgtaattttagtcataattttaattcatttccattacttaagctgaaagtgccaaattaccctttaagcatttctttatttttctcacctttctattagaaaaatgttaatgatctttattactgtttctgatatttaagaagaaacagcggggggttataagttcataagcatctttaaagcta

SEQ ID NO: 47736 - DNA, 403 bp, Homo sapiens
aatcgcttgaacccaggaggtggaggttgcagtgagcggagattatgccactgcactccagcctgggcgacagagcgagactccatctcaaaaaaaaagagaaaatctagaatccagtctggtctctggtggcgctgggctgttggtctactcgggtctgagggggaacagcgcctcctggtggccacarcacagagctcaaggggaaggaatgagagagcgacagagaggcaggcaaggtcacactgccctgtcgggcaggctcagaggcacgcctggagagcaggcgcatgtctgctctgggaaagatgagccgtttggctcctgggaggaccatgtcccaggcttacctagggctggagccagagctgactgttcccgattgcgagcatcacagggcagg

SEQ ID NO: 47737 - DNA, 576 bp, Homo sapiens
gtcctcttatgttcagctgacagtgatggtcattatgtccactgatgcagagctcccacttgagactccttctgcacctaatttgctcatttgtctttctcgctctttctgtctctctctctcaatgtagaaaaacaatgactatggccaatcaaaaacatcagaagctagactacccaaataatagttagaaaatttccaggagaaaaatattgtgcttaagtgtttacatttcattaaaaaaggggacttaataactaggggaaattaacatgtaagaayataataattattttacataaatgagagaaacaatgaaattataaaatgcactatcactttaattttttactttacttttaatttattacataaaaagaaaataaatattttatattattttttgtttttcttataatcaatttgattaaggtaaatatgcagataataatttattacatacattttaggtgaaatgttcgacaaatgtatacactcatttaacaatcacctcagtcaagataaaaaacagtttccttatgccatcttacccaaccctcttcccctgggaaccat

SEQ ID NO: 47738 - DNA, 491 bp, Homo sapiens
tttgcatatttatctgtattaaaaaatactgtaggtacttggaattatagaaagacctcaaaatatatttgtatattaattaagacaaatgtctggctaaccatttaagataagtattgtatacattgctaacactattccccaaatctcttaaatttgagtaagaaagtatcacttcataacacmtgcacgttgtccacatgtaccctaaaacttaaagtataattaaaaaaaaaaaaaagaaagtgtcactgtatgtgtacttgcagaaattatgcaagccattcatttttttttgtgctgccctcaaatggtatgttagttgttatgagaaaaaagctcagatgagacacaacaatcctggataaaggattatttgcatgtgtgcgtgcgtgcgtgtgtatgtgtgtgtgtgttttaagaagtttcctccttgaaacccagaactgatcaagataaatgtgcataagaaattcagagcctttggaaaa

SEQ ID NO: 47739 - DNA, 433 bp, Homo sapiens
tcctttattctcgtggcaggatgagggcatgtggggcacagggcacaggagagccatggaggatgtgcagcatgggcaggaaaagagccttcagtggtgtacattttgtacatttccatcgtttggggctgtttcttacctacagtgatacctagcccatcctagcaggcatgcaccatctaccccacactctgtgatgcagactagcctgccgtcagaacakgaactggtggtcagacacacataggtttcagttccagctctgcctcttattgactgtaacctcaggcttaactttcagtctctgagcctcagtttcaactctgtaaaatgaggtggctataccatctcaggttgcagagagaattaaatgaaatataagtgcatgtagagcattgaacccagggcctggcacacacagtgagtacacaat

SEQ ID NO: 47740 - DNA, 433 bp, Homo sapiens
tcctttattctcgtggcaggatgagggcatgtggggcacagggcacaggagagccatggaggatgtgcagcatgggcaggaaaagagccttcagtggtgtacattttgtacatttccatcgtttggggctgtttcttacctacagtgatacctagcccatcctagcaggcatgcaccatctaccccacactctgtgatgcagactagcctgccgtcagaacatgaactggtggtcagacacacrtaggtttcagttccagctctgcctcttattgactgtaacctcaggcttaactttcagtctctgagcctcagtttcaactctgtaaaatgaggtggctataccatctcaggttgcagagagaattaaatgaaatataagtgcatgtagagcattgaacccagggcctggcacacacagtgagtacacaat

SEQ ID NO: 47741 - DNA, 604 bp, Homo sapiens
ctgagaagctgggcatgttaggactcctgctgctctgtgattctgggtggggtctgaggctcttctgctgtgaccaaggataaacagactgactgaattgatgagtgcggttagcatcaatccaggcaaaatggctrtgtgccattttgtgtgccacagaccacatgcttcctaatgccacgcccctcagacttagaactctgcaggccaacccaggactccctgaggccctcaagataaagttcagatgacccaaccagtcacaagtcctgtgcagtccactcctcctgtgactcgatcccaggcagcctgagatgctcacgtctctccccgacccattactctctcctggccttagctccagctatatactccaggaagccttacttgacacccacccatccaggctgggttggtggattctctgtgcttgccccacacagacttcctctctggggatcactgttattcctatcctgcaagctttggggaggcagggccaagtctgcccaaatcccatggtgaacctgggcctagtatccccctggagcttttcctggctgggaactcctggtggggcctgcctggcaccaccctacctgcc

SEQ ID NO: 47742 - DNA, 952 bp, Homo sapiens
gattctggaaaaacctttaaaaggacaaaatcagccatactgctccttcatctatttgcttttttctctttttcctggattaactgtggatacaagagctggaactttagaagccatcttataaatgtgtgacataaaagccagggataaaagatggcagagctgccttgatccttgatggcaccccaaagaattggcctctgctgtctatctatggccttcttcctactgagtaaaataaatatctgcaagttaacttattgttagcagggatttcttcactttttttcatgcttatagagacacatattccttggccaataagttttttctctatatcctgaagttgccaagaacrgtaacagccaaaattcatagtctggagctgtagcaattcaggagatagaataagtgttaaacattcagaaaaaaaaagaattttttattcaatcttcattctccaatattcagtaccctgcctagacagagtaggcaataaaaaatgtttgctgactgatgctacttattatatattttaaagaaaataatttggaataacacatttaaaacatgtattatgatttatagaaggtttagtagcaaatttgaattaaatgtataacaatatttattgaataactaacatttactaaattcttactatgatctaggctctatgctaaatacttaatgtattttttaaaattctcacagcagttctctaacctaagagttattattagagaagttcagagatatttaagtaacttagccaaggtcacacagccaggtggtaccagagccaggattcaaggccaagtttacttctctccaaatctatgctcctaaccactatgtattactaaaatattctgaatctgatttcctaaaagaaacatgacttttgataccaaaaaaaaataaataaactcctttgtggcagaacagtaag

SEQ ID NO: 47743 - DNA, 952 bp, Homo sapiens
gattctggaaaaacctttaaaaggacaaaatcagccatactgctccttcatctatttgcttttttctctttttcctggattaactgtggatacaagagctggaactttagaagccatcttataaatgtgtgacataaaagccagggataaaagatggcagagctgccttgatccttgatggcaccccaaagaattggcctctgctgtctatctatggccttcttcctactgagtaaaataaatatctgcaagttaacttattgttagcagggatttcttcactttttttcatgcttatagagacacatattccttggccaataagttttttctctatatcctgaagttgccaagaacagtaacagccaaaattcatagtctggagctgtagcaattcaggagatagaataagtgttaaacattcagaaaaaaaaagaattttttattcaatcttcattctccaatattcagtaccctgcctagacagagtaggcaataaaaaatgtttgctgactgatgctacttattatatattttaaagaaaataatttggaataacacatttaaaacatgtattatgatttatagaaggtttagtagcaaatttgaattaaatgtataacaatatttattgaataactaacatttactaaattcttactatgatctaggctctatgctaaatacttaatgtattttttaaaattctcacagcagttctctaacctaagagttattattagagaagttcagagatatttaagtaacttagccaaggtcacacagccaggtggtaccagagccaggattcaaggccaagtttacttctctccaaatctatgctcctaaccactatgtattactaaaatattctgaatctgatttcctaaaagaaacatgacttttgataccaaaaaaaaawaaataaactcctttgtggcagaacagtaag

SEQ ID NO: 47744 - DNA, 561 bp, Homo sapiens
tctttactggctttaaatattatgtattcagatctatggactttttccttcatatttctctgctgcttatatttagaaagattttttttccacttctgattaatgaaaatatccacctgtattttctcccagctgtctttggtattaatagctttttatatttatttttaatatatcttgatatttggtttcatatgttttttccaaattttccaattaatgccaatcctaccctctactgatttgaagtggcacttatatcttacacaaaattatttcatcttttttcaggcctttcatacttttccattgatcttagaagtatattgttatatatttttaccctattaaagaccttaaaattgttatacctacttgtgatattctccttcatttttattattaaatatatttctaagtgcttaatgaatttattgtacttttggataaaaaatttcattttgttccatttccttttcaacctttaaactatttcttcaataaaatgtgaatcttcatggaccatgaatatttttagtttttctaagayttattattttc

SEQ ID NO: 47745 - DNA, 598 bp, Homo sapiens
atatttactagaatataaggctttgtgaataaaattgaacactgttggacacattcaaggcaggcctggctttgtggtgacatagccttctttttcttgaacatacaaatatagcttaagttaaatgaataaatctcacarggagtaaaataaacttagatgtttaaagaaggtagataatgagaaacaaagggtatgctcatgatctcccaagtcgcaatagttgtaagtatggatgggctgtgaaactgagccaacatctggtgaggtagtcataggctctggtaagttgaaaataaatgaacatggaaagaaaaatacagtaaacatgacaaagttgtcaatgcaaacatgtaatcaataaatggtcatatttaaaaatataacagcccctagaaaagagagttgatgtcttttataatattttttatttgtaaaagtaatactttcttggtttgaaaaaaattatagaaatatatgaagcaaaaagtacatgttctcatccctctgcctctgtgcctcaatcatttccccaaggtaggtatttttttggtgtgtacccttctagatattttctgcaaaattttctattatgcat

SEQ ID NO: 47746 - DNA, 598 bp, Homo sapiens
atatttactagaatataaggctttgtgaataaaattgaacactgttggacacattcaaggcaggcctggctttgtggtgacatagccttctttttcttgaacatacaaatatagcttaagttaaatgaataaatctcacaaggagtaaaataaacttagatgtttaaagaaggtagataatgagaaacaaagggtatgctcatgatctcccaagkcgcaatagttgtaagtatggatgggctgtgaaactgagccaacatctggtgaggtagtcataggctctggtaagttgaaaataaatgaacatggaaagaaaaatacagtaaacatgacaaagttgtcaatgcaaacatgtaatcaataaatggtcatatttaaaaatataacagcccctagaaaagagagttgatgtcttttataatattttttatttgtaaaagtaatactttcttggtttgaaaaaaattatagaaatatatgaagcaaaaagtacatgttctcatccctctgcctctgtgcctcaatcatttccccaaggtaggtatttttttggtgtgtacccttctagatattttctgcaaaattttctattatgcat

SEQ ID NO: 47747 - DNA, 618 bp, Homo sapiens
tatccacttctttttgtaagacttgatctgcatggagggtttgttttgaataaaaacctagggagggtgtctagcacctgggatgcagagatggataagtagaaaagcacaagccataaaagcaacagcactgagttagttctcatttggtcccataagccccctgacctttataggagttagaaccaaaagtttagggagatattttcaagagtggttttatgatacttgctattcaaatagtgcagtttctagagctgatgtgatgcccagtgacacaagttagagagcatgtcttctcctcaactgtcctgcaagcttctatgtagcctttgcactccaaccagaaggatcagtgatggcattcaaaggttgagtagtcccatggagggccctggcagccactgaaaaggtgggactatttttcaagtgtcctgcagacatcaatgaagaacctagaacagaaaacatgaatgaacaattcatgagcacatttgagcaacacttaagacttccaygtggctttcatttttctctgaggagatgactgggtttataacttgattaatggggaaatgggaggaaggaatacagtttcccagttactgaaactcatgc

SEQ ID NO: 47748 - DNA, 508 bp, Homo sapiens
cacagtgaatgcttatttagctttcatctatatctccactcatgttcattattttctattatttttcctggttcttcctttcataaagtgaacatgttatttttcctcaaagaaactgaaaaagaagctctgtttcattaggcattaattcccttttttttgttgttgttgagacagggtctcactctgcatgctggagtgcaatggcatgatcatgcttcactgcagcctcaacctcctgggctcaggtgatccctcccacctcagcttcccaagtagctgggactacaggtgtgtgccaccacacctggctaaatttttttgtatttttttatagagacggggtctcgctatgttgcccasgctggtcttgagctcctgggctcaagtgatccattctccttggcctcccaaaatgctggggttacaggcatgagccactgcgcctcgccagtttactttttgatgtgataaacagttctgttttggggcttagttattcccacaa

SEQ ID NO: 47749 - DNA, 633 bp, Homo sapiens
tgcatgggctcattgtcaatgtctttcatagttaccttagagtatgaaacaatctgtggtttgatttatccagataattacattggttctgcatttgacatatcagaggactaaaagttgtggttctgctgcagaccaaatgccctttggaaagtgacttttctccccatatgaactgaatagtggcarttcagcctcaaccacagctgaatgtgacccctctgctctcccactagctagcaagttcaaacttagcctctgggcctcataaatccaggcatgtatcagttcatctccaaacacttggtatgtctgccccatcaattaaaaagcacaaggcaagtgagccactagaaagttcaagcatgattaggcagctaccgtgcattttcaaatccactttcaacatctccattattttaactaagacctctagttattagtcttattaaaagagaagaaagaagaagaaaaagaagacacaaacttgctttccagacaggttaatacaagcccttcctcagtgttctattcttgatttaaggaacattctcagagtgagagaagagttttgtgttgtatggaaaatttgactcaacccaaaaacccagccaacaccacaaagtggattgg

SEQ ID NO: 47750 - DNA, 481 bp, Homo sapiens
tcggtcattggtcccgttggtgacagttaggtctggaattcagttttcccatctcactgtcttgagtagaaggaaaaggcccagtgttctatgtcatttggatgttggtgtcttcccttctgctggtaaggattatctaaacctttggaggaagcactaggggaagggtagtgtcaaaggcaagtagattttatacagtaaaagtactatttgattttttttcttgttttaatatttgtttttttttccccttccgtttgttttatgtwgaaaattccccatgatgatacctctacctactcagctactcaagccaaaaaccaaaagccatcaccccatccactagatcaccaactcttaaccactctgctgcctaaatagctctcaggtcctgcttccctttccattctcaccaacactaccttcatgcagcccttgttatctcccactgaaatactgcagtaatctttttattggtctt

SEQ ID NO: 47751 - DNA, 606 bp, Homo sapiens
tgagactgtctttgcatcttccagctctggtggccatccctgttccttagctgtggccagatcactctagtgtctgcctctgcggccatgttgcccctcctcttctctgtatcttctcctctttgtatctccatgtatcctccctctgcctgtctcctaagaatccgtgtcattcattgcatttagggcccgcctggataatccaggayaagcacctcctttcaagattctgaagcacatttgcaaaaactttttccaaataatgtaacattcacaggttctgggaattaggatgcaaacatatttttttggggggccactgtccagcccactacactcagtgaatgctacccatgatgatgatgatgatgaccatgatgccactgccaataccaacacaaagcagtaaaaagtacgggcgagtctagcaggagtgtagggcatggacagcagtggcaccacagaggagcctaggctctggccttgtgtccagaattggtgggttcttggtctcactgacttcaagaatgaagccgcggaccctcatggtgagtgttacagttcttaaagttggcatgtcctgagtttgttccttctgacgttcgg

SEQ ID NO: 47752 - DNA, 1142 bp, Homo sapiens
agtacctgtttaccccttgtcatcatctggtatcatctggtacttttgtctttccacaatcaataaattaaataatgacatcttactgtagttttaatctgtttctttgattagtagtaagcttgagcattttttcatagtttgggggaccatttgcatttcttatttttttcttttttagagacagggtctcaccttgccactcaggctggagtgcaatggcaagatcacggctcactgcagccttgccctcctgggctcaagccatccttcctcctcagcctcctgagtacctgggactacaggtggatgccaccccacccagctaattaaaaaaaaaaaaaaaaaaaaaaaaacgtgtaaaggtgaggtcttgctatgttaccaggatggtctaraactcttgggtttcaagcaatcctcccaccttggcctcttaaatttctttactattaacttttttctccatattttcctattggagtgttagctgatttttattaatctgtgagagttctttcagcttaatgtctattccctctttgttctggttttgtagacattgtatcctagtgtactgttcaactttgactacgttttatggggttctttcctaggggcaacagttaatatacagaagattgcattgattttgtgtagccaaatttatccacactttccttttggcttctgagcttcaatataatgcttagaaaacccatttccattccagagtcatatacatattcactcacattttcttttaacaatttttatgattttttaatacttaaattctggatccacccagaatatattttgatgtatgaaatgaagtaggaaaggcaatgatcatgctagaactaaacagctgtgctttgaaataaagctttgtggtagggcgcagtagctcatgctagtaatctcagcactttgggaggctgaggtgggtggatcccttgaggccagaagtttgagaccagcctgggcaacacggtaaaacctgtctctacaaaaaaaaaaaaaaaaaaaaaaaaaaaactaaaaaattagccaggtggggtgcatatgcctattgtcctgactatttgggaggctgagataggaggatcgcttgagcctgagaggtcaaggctgcagtg

SEQ ID NO: 47753 - DNA, 631 bp, Homo sapiens
tatctaatcaaattaaaagtgtgtatttgggacaataaatgtattatggcgcctgcagtytacacacacacacgcacacacacacacacacacactctctctctctctctctctccctcatgtacatatacactgctttcagtttatttttttgcaaccatgtgttcagattctcctttattttctttattttatattggcacctcagagcactgaaaatcgcctaatgtatccggggacatatatttatatcaatcaagtcagaggggtgttgctgtgagaatggaaatagtgaactccaaatctggaatgcttgaatattcagagctctttctagtagattaatctcacagtttctgaggttggctcactacttcaaggtcaagtagccagtcagaaatggtgaatagatagaaatgggccttcagattcttagtactgaaagccattagctatattacattgactgattaaaatgtcctgtaaaactgaaagatggcaattcatgtattttagccctatatgagactctccaaattattgcatgtctttatatttacaaaatacaatatagccagtagcataagtaatacctgaaatggagtttattacaatttcatgaaatgcatag

SEQ ID NO: 47754 - DNA, 580 bp, Homo sapiens
aattttttacaatctgtaaaattggttgttgaagtaactcccatatatagaacatttatactattttattatttaattctaatcctgccaaaaataatggtaaaacagaaattctataatttaatgcattattggaatgttgctgatgaagtacacaaacagtggtgatgttccaaaaatacatatgaaataaagtcacatgtttccatggaaagaggaattacatcgtaaagcttcttgtcatttgttgagcctcagcacaagtttgaagacatactatgtaatttttaataataaaggattgtttatcactatcttgatttcaatttggtattaaatcttacagaaacataaaggaggaatactatagccaattaaaccaaagccaatctaaaatatactcttttaacctaggtttaaatatttatacccatttaaaagatgaagagctttttggtctctagcattattaatattaattgtcaccaaacatcatcattcttaggaaaaaatgaaagccatcaaagatagttraaagaatgctattttcttgacaatggtaccataaaagaatattagg

SEQ ID NO: 47755 - DNA, 803 bp, Homo sapiens
ttgtatatagatgctagcaactaactaatcctgcagaagacagcagaagaataataaagataactttggctaccattgtttcagtgtcttttccctgttctcaaactgggggaaagacatacactttggtgctggcagcattgaatcactaacaatgaagacaaagcatgatgcaacttcctggagggaccatttgactcaaagattattttgaacagtatgttttatttcaaagaggtattaaaagaggtatattacaaaagagaattttaaaattagcatgatttttaaaatttcatttatttattcaacaaatatttactgagcatttgtacaaagccttggtgttcctatcatggacagaatcaaatggaccctgatctcaggaaatttagaacctgatragggaggcagaggaattcgttgcaaaagctgggatgagtgctctgaagaaaataccacagttcttaaagagcctcgcacaaaggcaagggaagcatgagctgagatctgaaggatgagaaggagttgagtaggtaaaaggctggagaggtggtgctggtgggagatgcagatggggcagtatgagtccaaagccttgatgtgggcagggattaggaagaaggccagtgacaccaaagctcacagggtaagggagaaagtagtggatcaggctggagatgttgctggggccagacagtgcaaggacttgtgagcatgttagaattgcagaaaaaaatgaaactaagttctggcttgagggcactttgcaggtaactgtctgatccttccagaggaaatag

SEQ ID NO: 47756 - DNA, 582 bp, Homo sapiens
acattcatgattcaagtaaggtcttttaataaaaactgttgatttattactcagcttttgtctccttgctcactctcaccttctacctagcctttactttttttttaagtcaatctatccttatcagctcagtccaagtctccactaagggaaaccccattttctttgccataattcaggaagccaagctcatgcctatctgaacataaaattttcctggccaccagatgtttaggaatgggcacatgcttctgcatgagtcagtaaacttcaagggaatgtttactggaggattctgccartgacgatccctcaccattaggagagaattacgggaacgaatgggttctctctatctgtgtattgttgcatatagctatcaggctcagatctgcaagccctcttaccactggttgaaaaacagaggcaataggccaagtagagcaaatcaagacactacagagaaataaaatcagaacacttattcaatctcatctgattccaaccccatccctgaatttttttcaactatataaacctgtaatttccctttatttttaaacttagtttgagttgggtttc

SEQ ID NO: 47757 - DNA, 582 bp, Homo sapiens
acattcatgattcaagtaaggtcttttaataaaaactgttgatttattactcagcttttgtctccttgctcactctcaccttctacctagcctttactttttttttaagtcaatctatccttatcagctcagtccaagtctccactaagggaaaccccattttctttgccataattcaggaagccaagctcatgcctatctgaacataaaattttcctggccaccagatgtttaggaatgggcacatgcttctgcatgagtcagtaaacttcaagggaatgtttactggaggattctgccagtgacgatccctcaccattaggagagaattackggaacgaatgggttctctctatctgtgtattgttgcatatagctatcaggctcagatctgcaagccctcttaccactggttgaaaaacagaggcaataggccaagtagagcaaatcaagacactacagagaaataaaatcagaacacttattcaatctcatctgattccaaccccatccctgaatttttttcaactatataaacctgtaatttccctttatttttaaacttagtttgagttgggtttc

SEQ ID NO: 47758 - DNA, 597 bp, Homo sapiens
ttgactatactatgcagaattgcacagtaaaaccagatgggaaaaattgggttggggcacagcattcaaaaacttcatcagtgagatgtttaaaaagggtagaaacctaatacaaatcatagcatggttttacatacattaagtggttaagaaatgcatatatagtaaaataaacatctcatttcaccctggaaawgacctgaagtttggtttggaagtggatgtctgaaggaatgtagtttgtgagttactgggaaggatggaagcagtgtcatctgagatgggagggaatcttgcaggcccaggtgtggatgagtgtggctcataacttgcacaatgaactgaggttgctggtagatgtttgcatgtgtatgtgtgcgcccatgtgcacagatgcttgtattttgcatattgctcaatgtctcagcccagctggttacagctttctttgtttacctactgtttctcgcagatgaaatcatgtataagcaaatgcaaaatgttatgctcagattgttccctaatatatcagttacactggaacaaattcacatcttccaaacaagcatcactgcagaaccaactgtgcagtgttgc

SEQ ID NO: 47759 - DNA, 597 bp, Homo sapiens
ttgactatactatgcagaattgcacagtaaaaccagatgggaaaaattgggttggggcacagcattcaaaaacttcatcagtgagatgtttaaaaagggtagaaacctaatacaaatcatagcatggttttacatacattaagtggttaagaaatgcatatatagtaaaataaacatctcatttcaccctggaaaagacctgaagtttggtttggaagtggatgtctgaaggaatgtagtttgtgagttactgggaaggatggaagcagtgtcatctgagatgggagggaatcttgcaggcccaggtgtggatgagtgtggctcataacttgcacaatgaactgaggttgctggtagatgtttgcatgtgtatgtgtgcgcccatgtgcacagatgcttgtattttgcatattgctcaatgtctcagcccagctggttacagctttctktgtttacctactgtttctcgcagatgaaatcatgtataagcaaatgcaaaatgttatgctcagattgttccctaatatatcagttacactggaacaaattcacatcttccaaacaagcatcactgcagaaccaactgtgcagtgttgc

SEQ ID NO: 47760 - DNA, 590 bp, Homo sapiens
ggaggctacagacagatacagcacaatcagatcctcattttccaggcaagtgctgccagcagcattatcactgcatcaaactgtacgaaatcacggcactttctgagcctttgtttcttcacttggaaaaaatgaaaccaatgaactcgatgccctcatagatccgcataggcataaaaattctgcccttctaagattatacatctgcctattgtacaagttactccaccttccaccaaaagcaacagataaaaatctcaagagctcatcagaagaatggcatcgggggcaaatccatgaagctaaacataaacaagatatggtttcggaacagacttgtttcattttttctttttcttctttttccttttgagacagggtctcattctgttgcccaggttggagtgcagtggcgcgatcacagctcacctcagccttgacctcccaggctcaggtgatcctcacacatcagcctcccaagtagctgggactacaggcacacgccaccacacccagcctattttttgtagatatsatatcttgccatgttgcccaggctggtcttgaactcgtgggctccagccatcctc

SEQ ID NO: 47761 - DNA, 416 bp, Homo sapiens
  misc_feature (1)...(416): n = A,T,C or G
ccctttccgctcggtactctccmttccccctctccccttttccacttgccttccccacacccctcccgccgctgggccacgtgctgagcctatgatcgtcccaggggccggccctgcgcgtccagctgcctgcagtgcccgtggctaacagaggagggcccggcctgttcgggcccgcgcccgtgaccttcccatnagcgcggtgcgcgtcttcgtggcaatcgcgagaagagacgcgcgctgctgtacaagaggcacaacctggcccaggtgcgctgagggtcgccccggccacacccttggtctcccgctgggggtcgctgcagacgcgccaataaaaacgcacagccgggcgagaagtcttccgtctcgttgcattattttcttttggggaggagagggagtgagggctctgt

SEQ ID NO: 47762 - DNA, 416 bp, Homo sapiens
  misc_feature (1)...(416): n = A,T,C or G
ccctttccgctcggtactctccattccccctctccccttttccacttgccttccccacacccctcccgccgmtgggccacgtgctgagcctatgatcgtcccaggggccggccctgcgcgtccagctgcctgcagtgcccgtggctaacagaggagggcccggcctgttcgggcccgcgcccgtgaccttcccatnagcgcggtgcgcgtcttcgtggcaatcgcgagaagagacgcgcgctgctgtacaagaggcacaacctggcccaggtgcgctgagggtcgccccggccacacccttggtctcccgctgggggtcgctgcagacgcgccaataaaaacgcacagccgggcgagaagtcttccgtctcgttgcattattttcttttggggaggagagggagtgagggctctgt

SEQ ID NO: 47763 - DNA, 1144 bp, Homo sapiens
gcaaacctggcaaatggcgttcaagcccacggtcggggtgctagggtcactgttgctcctgggttggctcaaaataagtctcttgattttcccctcagaacttgcacctccttcagttttccccatgtctgtcgatggcagctccattctttcatggaatggagaccaaaaaccttggagtcagccttgagtctctttccttcacacatatatccattctatcaggaaatctattggtttcatcttcaaaacacacccagaccctgaccacttcttacggctgacgtcgccactccctggtctatcatctctcacctggccttcacaatcgcctcatgactggtttttctgtgtctccctgttgtctccatggcagctaatgtacactttttaaaatttaactcagaccttggcactctgttgctcaaaaccatttccagtggcttctcatttcacttaaaaatccaaaagtcggccaggtacagtggctcacccccataatcccagcactttgggaggccaagacaagcagatcacttgagcccagaagttcaagacaagcctaggcaacatgacaaaaccccgactctacaaagtaccaaaagatcagctgggtatggttttgcacgcttgtaggcccaactacacgggaggctggggyagaaggatagcctcagcctgggaggtcaaggctgtagtgagccatgtttgtaccactgcaccacagcctaagcaacagagtgagacactgtcttaaaaaaaaatggtcatttgccacgtgcagtgcccagtgctgcatcccggggtgctatctctcagcagggtctgggtcagcatctggtgcgaagtggggtggatacctgagcacaggggtcgcagctgactggcagtcactgggagccctccaagaggccacttgggctcagaaatcaggggaccacatgggctgaagactggaggctctttctcaggtggttctggccttgtcatcccccagggactcttgctccatcctggagaatacctgatttgggacatcagatccccctggtgagggagggctcagaactagatctaatctgatttcagtagtatgacatttcttggatcccagtgtttgtgcagcaatttcatacttgcttca

SEQ ID NO: 47764 - DNA, 1961 bp, Homo sapiens
catccagtacaataaatgcttttattaaccataaatttgagactgctttagggatttgaagtgttgggtttcatgctgaaaaaatgtaatgttatccacagaccatcagtgagtaacaaaaacagaggcacaggttatgctactttgatcaaattatggcaaaaaattgtcttttgcatttaaaatagtagttgcattcagggcatatcttcaaggagcaccacaataatttaatcatatgttttggagagtttcatggaaattcatcctgagtgcaaatttatagaaccagcagcttctgttaaacagataggaagctcaaaagtgttatgaggctaagagggctgagaaatcaaaatactaagatgggacccctaaatcagggtttctcagtctcagcgctatttacattttaggccaggtaattttttgtcatggaggactgacttgtgcatttcaagatgtttagcaacatccctgagcccttcccgttgactgccaggagcagcctaccccagctgtgacaaccaaaaatgtctccagaaattccccaaatcaaggttaaggctgcaagtaagctgtgatcacaccactgcactcaagcctggttgatagagaccctgtctcaaaacaaacaaacaaacaaaaaagaaatcccccaaattcccccaatcaaaaaccactgctctcaatcaaagtctaggcttgtttagcaaatgctgcctatgtttgcttcatccgaaggaaatgtcagagcctggggagctgcgcagcctcagtactgtgcccccagtgcctccttctacacaaaaatggttaaccctgagtgatttctgaaatcaaaagcaccttgcactccctcttccacaaaactaaaggtagcatagccatagaaacgagaactctctcggctgtgaccagagcaaacgagaccaagcaaaggcaagctgccccccgcccccsaccaaagcataccctcacccgacctttgtgtccagcatgcattccagcccaggagctccggcccgctgggcagaggctgcacaccattcctgccagcatctaaatcgctgctttctggcctttcactgtcaggccacagaggggactgtggacttggtgccagaaaagaaaatgaaaagcaaagttgaatctctgcggaccattctctggatgctgaatgtcccactatacatctcggcatgacatttcatggcagcaggggaggaggcccagtcctgaaagctgaacaaacgcccggcacacaggcctgcctgcgccctcgtagtctctctggacttatgaataaaagatggaggttttgtctctgttgtttccctggtaccctgtaagaataacaacttgttgctttttgacattttaacttactttgaaaaatgaccaatattaactttacatgtcttggcccttaaatctggagtggggtaaaatgaaagaaacaaaagccatgtaattaggtagaagataataattcaagttaaactaatgaaactgtctgtaacggactctaataaaataatgtaggtaacatgcaatcacagaactaaaaggctagaaactgacttggaggatacgtttttagtaaagtagcctttactggaaataaagttcaatgttttcttagcacaaaggaaagaaatggctgaattttggtgtgaggaagcagtcaaccgtaaacctgccccggccaaacacaggtctttaataggaactcattccccgtctctgagggcgacatctataactgcaacaagcccatgtgaatagcaaaagccttgagcattattgagaaacagcactcctcattttgagacagtgtggttgatttcaaataatctttaaggaaaaagtttattacaggatagcacaaatgacatcctgcatttccttagactctcaataaagtaaaagggaaggcttaatgtgaaacactgcatttt

SEQ ID NO: 47765 - DNA, 584 bp, Homo sapiens
tgcattttcctcattatgttctttttttcttttttctttctttctttttttttttttttgagacagtctctctctgaagcccaggctggagtgcaatggcacaatctaggctcattgcaacctctgcctcctgggttcaagcaatcctcctgcctcagmctcccaagtagctgggattacaggcatgtaccaccacgcatggctaatttttgtatttttagtaaagacggggtttcaccatgttgtccaggctggtctcgaactcttgacctcaggtgatccatgcacctcagcctctcaaagtgctgggattacaggtgtgagtcactgcacccagcctttcctcattatgttctaaagatgatggtttagtaactataactatataagtgttaagtaaggtttataggaggccattgttttgggatagcctcctgccctaggccccagcagcccaaagcagaatgaagtcacttatgctaagtgccacgtaatcaaaccaaactttgaaatgggccagttttctaaaacacggggattccagtcaacctaagtcagcataataaggaagtcccctctgtttt

SEQ ID NO: 47766 - DNA, 593 bp, Homo sapiens
cttttaatatctaatataacccaagtgctatgtaaatagttgttatattgtattgcttagagaataatgacaagggaaaaaagtctgtacatagtagaggcacaacttttccccccaaatattttcaatctgcaattggttgaatctatggatgcagaacccatggatatggagcgctgactatatatacctaggagtgaaattgctgggtcgtgtgatacttcgtgtttaaacttttggggaactgcaagacttttttccaaagtggctgcatcattttattttcccaccagcagtgtacaaaggttcacacttttctgtaatgtcaccratgcttttcattatctttttaattattgcctttctagtttgtgtgaagtggtgtcagaagggatagatttttttttgtttggttggtttttttagagatggggtcttgctgtgctgttgaggctgtagtgcagtgcagtggctattcacaggcatgatcatagtgtactgcagcttcaaactggcctcaagcaatttccctcctcagcatctcaagtatgaaggaatagttttaatggtgatatttgtaattataattttag

SEQ ID NO: 47767 - DNA, 553 bp, Homo sapiens
ttaaggggactagtgattggcatgccagggactgggcaccaggaccctgcagcgtccctcccattatattacactgaagaaaaattaagttgattatcttttaagacttttcatattttaaagtgggatatctgaagatgggtgctcattaaagtccagcagttaagtatctaatggaggaactccaggtggctgacatcccattggaaaagcctccaaatgctgctcaaattgtgctctagagacagcatggcacctactcctcaaattaattatgacccatcccagctcatatttttggcatactttaagtcctcttaccatgtagccaaaacagtctaagatttacttattttggctttgttttgacaccgcaaatcaaggagaatggtgttggacagggwttacaaatgcaaatgcttccttgagccaggcagggaaatgaatgaagtgagccaagttggggagaatggggaagacaaacggaactagagagactgtgccctgttaaaggtggccacagggactcaataggcagcagattattaccatg

SEQ ID NO: 47768 - DNA, 592 bp, Homo sapiens
tgtgtatttctctgggcagaggaaataggagggagggggcggatgaacagacatattctttttgctgcaaaaggaagtatgctaccagcttccagaaaacaaaagcaattagcagatacaaatatgggaggtattatttataaatttagtgataacttgtttcatgcttgctcattaaaaaataagaaatggatctgaggggatgtaaagattataaaaaaaactttattctaaaataattttccttcacagaaacattattctaaattattagaagactagaaggagagaacaaatcaaaattttctcttttgatgatgatctgagttcyaacctatcttcttcaacgttctctggacaaaaaccttagaaagcagtgcagccgagtcataattcatgagtgaatattagttatgtatttgccctcaagcatattttccttgaaggtgagaatcctgagactataagaacattttgtcctgttaatggaatgaaagaatcaggataataaaaaatgaatatcatatctttacttttaattgcactaaataaggctttctaaagtttctgctcttgttctatataaataaac

SEQ ID NO: 47769 - DNA, 547 bp, Homo sapiens
cgaactaatgcaggaacagaaaaccaaacactgcatgttctcaattttaagtgggagttagacattgtatatacatggaaacaaagatgggaacaatagrtatggggactacttgagcagggaggcatgggctgaaaaactaccagtcacatattatgctcagtacgtgggtgatgggatcatttgtacactaaacctcagcaacacgcaatttactcatgtagcaaacctgcacatacaccccctgaacctaaaagttgagagaaaaaaaaattccacaagtaattttaagtatataaatgattcatgctcatttgtaataaaattaataatatactgacaagcgaaaagaaggaaaaaaaattggtaatcctgtttccctgagtaaccattgttagtgacttgttgtatatctttccacaattcctgtcaatatggttttgttttatttgaattcataattgtttgttatagaacatttcaaacatatacagaggtagaattctatgatgaatccttatgtatttgtcataaccaattatgtctc

SEQ ID NO: 47770 - DNA, 529 bp, Homo sapiens
gagtgcagtggtgtgatcttggctcactgcaacctccgcctcccgagttcaagcaattctcctgcctcagcctcccgaacagctgggactacaggcacatgctgccacgcctggctaattttttgtgttttagtagagatggggtttcactgtattgcccaggctggttgcgaactcctgagctcaggcaatccacctgcctcggcctcccaaagctctgggattacaggcatcagccactgtgcacggmtttttttttttttttttttttttttttttttttagtaaagacggggtttcaccatgttgcccaggctgcatttgtgtgtcttaacatatgtacacttagaaaaggtatagtaaaaatatagtagtataatctgaggggactgctgtcatgtatgcaatccatcactgactgaaatgtcattatgcagcacatgactatataacagttctatttaattactactagaaataaaaagtcagcatctctacctagagagacttccttgatcagctcagcagc

SEQ ID NO: 47771 - DNA, 1879 bp, Homo sapiens
agtttggagttcatattgtcagtgcctagcccccttttttaggaggcggggtctcactctgtcacccaggctggagtgcagtggctcaatcatagctcacagcagccttggactcctgagctcaagggatcctcctgcctcagcctctcaaagtgttgggattacaggcgtgagccactgcgcctggctgagggctgcattcttaggccctgcaggggtggaatgggcacagctcttgagagctctgcggccctgcagtgttttcaagctctagttcccagcatctgatgctggtgtggaaacgatgtcggggaagcataatgaggtgttatgtgaacccaaattgtgctttaaaccaaaacagccctggtcatttgggcttttgtgaatggggaggctttcgggggccctctggcctctctgcactgggaagcatgcagcagatggaagagaatttaatggggacacctgaatcactcaggcaagaaaatggattaaatatctgagctgatacctgtcccacatactgggatagagggaggccattctgatagtagtctcagggcgggtgttaaagggccatttgctcccygtgattgggctgatacacagtgtttggacctttggaccttagcacgtttggggtgagaagagcggtgacttaggctagataagtttgtagggagaatgagtgtggcacatccgtgtcctctgctgtgggggcctcactcctcagcgcaagagctgagccgctggaggggactgttcctctctttgcctcccttctcccttctgtttgctttatctttccttttattccttcttgctttagcctgctgcactgcaggaatgagcccagtgtggctgtctaccagcacaatgtttgctggatttgtatgctacttttattattatttatttgaggctttccttaaaattggcttgagggctgggcacagtgcccgtagttgccaggcatggtggatctcagcacttcgggaggccaaggtgggaggatcacttgggaccagcctaggcaacatagtgagacccaatctctacaaaataaataaataaataaataaaagctgggtgtgatggtgcatctggagtcccagctacttgggaggctgaggcgggaggatccctggagcttgtgtgttaggatttttcctatgaataactcctgcattccagcctgggtgacagaacaacaccctctctcaaaaacaaaaacaaaaaactttggcctgagcctaacaccgctatctagcctcttcgtaagcagaaacatctacaaaatcatgtttgatgtgctagttatatttttcctatgaatattaaatataggtaattattaaactgcattcatccatatgctctctaaaacctcccttaaaccccattggcctgcacagcatgccatgggaaatgctgcaggcgtgaaaagagcactgtaccaggagtctggagcgtgacttgggactgcatcctggcctctgatgtgctgggtgatgttgaactattcccgatcccccatgcctctttttcttctttgcatatcagaccatgtgagcaccagggtccctccaggctcacacgttttgagtgactgcaggatgccattcagtggtacctcgaggttactcagcccctctcacatcacctgcgccgtgaggaagctcaggactctgacctagacatgtgatctatgagctcaaaagattgaaaaacgttgcagctcaggaacattttgtcttcacgtgtgctgcttgtttttgtttgggtttcagctctcactgtttattagccaaggaagcagcctggtctagtgcaaagagtaagggctttggagctaggcaggaccttgaatagctcc

SEQ ID NO: 47772 - DNA, 632 bp, Homo sapiens
  misc_feature (1)...(632): n = A,T,C or G
ttttttcatgtttattttctttatcttactgcatagaaaatctgtgcatttgtcacgtctgccacatcgagtacaaaatattcctggttcataaggtcttctcgtcagtgttcctctacaaacaaaaaagcagaaaacatttagttagaataagcttccatttttacatgtaatttaaataatatasttactaatttttaatcaggttaaaaaggcgggttaagaaactggacttaaggaaatactttaattagagattcaatgtttcccttttgttctccccntaggaaacggtcttttctgaaacgaattcccatgccctagaaacaaagtattataattaaatataagaatcggttttaaagcttctttcattttagtttatagcaaaatgtatcctttaaaaatgaatgatgtagaccgggcgcggtgctcatgcccgtaatcccagcactttgggaggctgaggcaggcagatcacaatgtcaggagatcgagaccatcctggctaacacggtgaaaccctgtctctaccaaaaatacaaaaaattagccaggtgcggtggcaggtgcctgtagtcccagctactcgggaggctgaggcaggagaatggcgtgaacccaggaggcgg

SEQ ID NO: 47773 - DNA, 632 bp, Homo sapiens
  misc_feature (1)...(632): n = A,T,C or G
ttttttcatgtttattttctttatcttactgcatagaaaatctgtgcatttgtcacgtctgccacatcgagtacaaaatattcctggttcataaggtcttctcgtcagtgttcctctacaaacaaaaaagcagaaaacatttagttagaataagcttccatttttacatgtaatttaaataatatagttactaatttttaatcaggttaaaaaggcgggttaagaaactggacttaaggaaatactttaattagagattcaatgtttcccttttgttctccccntaggaaacrgtcttttctgaaacgaattcccatgccctagaaacaaagtattataattaaatataagaatcggttttaaagcttctttcattttagtttatagcaaaatgtatcctttaaaaatgaatgatgtagaccgggcgcggtgctcatgcccgtaatcccagcactttgggaggctgaggcaggcagatcacaatgtcaggagatcgagaccatcctggctaacacggtgaaaccctgtctctaccaaaaatacaaaaaattagccaggtgcggtggcaggtgcctgtagtcccagctactcgggaggctgaggcaggagaatggcgtgaacccaggaggcgg

SEQ ID NO: 47774 - DNA, 1288 bp, Homo sapiens
  misc_feature (1)...(1288): n = A,T,C or G
atatttatactttccccattttaacacaagtgctagctttattctaaacagtttctcaccacacatatatctttttacaactattaaaaggtctacaactatatgttatgtaaattgctttttcactttttattttaccataagcatttctcacgtttttacagagttttcataaatgtcatttgaaatgaccagatagcattatattgtgcatatttacaataatgtacttaaacagtagaagttgcttttgtactctgtaactctttcactcatctccttacactgctggactggaggtatgaccttttaatagttgtaaaaagatacatgtgtggtgagaaactctatagaaactgcagtgtaaggagatgagaaaggattaggttcagttagagttgcagaactacatagagaaagacatgattctgggagagctggagaatgcccattctttaggagcggttggttaggatagccagagttcatgattttcctctcaccgtcttccaatccagtccaatactaaattcagtgatggaaagccaattaagagggggttaaagggaaattgaagctcagattataatgtgatagattgtaactggaagnnnnnnnnnnnnnnnnnnnnnnnnnnnnnnnnnnnnnnnnnnnnnnnnnnnnnnnnnnnnnnnnnnnnnnnnnnnnnnnnnnnnnnnnnnnnnnnnnnnnacccaaacaccctccactaggccccacacttcactggaggtcaaatttcaacatgagatttagtggggacaaacaaaccatacccaaaccacagcaagaagggagatcagaggctgatcatcccaggtattgtgacctgctcggggaagaaaggtaaaagaaagtaagagtagcctaagacaaaatcatacctttgaaagtgaatttgatataaactctgctattaactgacactcgttatttataaataaactcattaaatataaggctatcttcatggtgcttggaatgtacccctacctcaggaaatgagcagtgcttcctacactgggtgctgcagggacaggaagaaaaaaatgatacaatgrtcttttcccatgtactcatctgaaatattgtgctttgccttatttttttaaattcctgggcttccgtagctgttactattgaacagaaagcccctctttccttgttatttctccttcctagcacagcaagttctaattcccacctccctttcagcattccaattctagaatattcttctacagttccctacatttacagctgttttttc

SEQ ID NO: 47775 - DNA, 1524 bp, Homo sapiens
gtttctcaccatgtcttctctctctcgttcatcttatttttctaaaattttttccagtttcagtggaccagattataatgttagtgattataacgctaattcaacatcttccacatccttatgtaacaatttcttccaatagatttatatatataaatatatgcatttatgtcattggatatatatattatgcatatttggcatgtatttttaataaaatgtagatatatgctatatacatatctgcatgctcatttcatcaatatctcatgtttagtctatccaattcttttctctcatatgttcatttaatgttgagttttagaatctcctccctcccaaaacaccgcctgtatccagtctgacttccttgcctttgccttatctacctggaaactatttgtgtttattgatcctaaattttttgaatatgtttgtcagttgggatcaccttttcctcctggcaatcttgtcattactgggtgatgcatgaaaaatcaacaatacagaaaataccaaaatgtctttcctggcttccctttacccgttggactttcttattcaaggcyactttccttctctgatgatcctcttgggtggaagagaaagtcacagtaagatcatggatgacagtgaacactgttgggtgtggtttcattttcagagctgggttgagagccttcccttgaatgaagaaccctccccagctggaaggtgatgctattgaaggctcagctgacaacatacatgggcatcaagtcattggccacattcatgcctcaagtgtcctaaaaccgaagatgatcaaaagaaaactgctgttcagcaagtggagactggcatgcagattccctggcctgcaagcttagagcaggaaggtaatcacatctatggctcttagctgcactcactccttattcctctctgtctatgatgacagctccttctcccactgcttttttcttctgtatttgttctctccagcagctgctgtcacctctgtctggtattacctctgtgtcccatgggctgccatggtgccaggtccttctgatccccatcccctgtttgctctctgaactctgctctgttcccactgctgttgtcctaagagtccctctcatggccacaggagagcccaacttccttgtccccctccaagtgcatggtgtgagctgctaaacacagggttctttgcctggaattgcacagcttgagtaatttgcctttcctttctgcatcccaaactccattgcccctttctgccaggagcattgctttaatacgtcatttacacacagatttttctcttgggacagcttttgagcaacacaactaagtcaaactgtaaccctcaccttgtacatgggaatgagaagtgttaaaactgagcactaagaactccaaatcaaaaactaaattagaacctgggtcacagacgagagttccctactagcctggagtcaggtgtgtcttcatctctagatgggcaaccttatgccagcgtggatgaagtttccaggg

SEQ ID NO: 47776 - DNA, 1524 bp, Homo sapiens
gtttctcaccatgtcttctctctctcgttcatcttatttttctaaaattttttccagtttcagtggaccagattataatgttagtgattataacgctaattcaacatcttccacatccttatgtaacaatttcttccaatagatttatatatataaatatatgcatttatgtcattggatatatatattatgcatatttggcatgtatttttaataaaatgtagatatatgctatatacatatctgcatgctcatttcatcaatatctcatgtttagtctatccaattcttttctctcatatgttcatttaatgttgagttttagaatctcctccctcccaaaacaccgcctgtatccagtctgacttccttgcctttgccttatctacctggaaactatttgtgtttattgatcctaaattttttgaatatgtttgtcagttgggatcaccttttcctcctggcaatcttgtcattactgggtgatgcatgaaaaatcaacaatacagaaaataccaaaatgtctttcctggcttccctttacccgttggactttcttattcaaggccrctttccttctctgatgatcctcttgggtggaagagaaagtcacagtaagatcatggatgacagtgaacactgttgggtgtggtttcattttcagagctgggttgagagccttcccttgaatgaagaaccctccccagctggaaggtgatgctattgaaggctcagctgacaacatacatgggcatcaagtcattggccacattcatgcctcaagtgtcctaaaaccgaagatgatcaaaagaaaactgctgttcagcaagtggagactggcatgcagattccctggcctgcaagcttagagcaggaaggtaatcacatctatggctcttagctgcactcactccttattcctctctgtctatgatgacagctccttctcccactgcttttttcttctgtatttgttctctccagcagctgctgtcacctctgtctggtattacctctgtgtcccatgggctgccatggtgccaggtccttctgatccccatcccctgtttgctctctgaactctgctctgttcccactgctgttgtcctaagagtccctctcatggccacaggagagcccaacttccttgtccccctccaagtgcatggtgtgagctgctaaacacagggttctttgcctggaattgcacagcttgagtaatttgcctttcctttctgcatcccaaactccattgcccctttctgccaggagcattgctttaatacgtcatttacacacagatttttctcttgggacagcttttgagcaacacaactaagtcaaactgtaaccctcaccttgtacatgggaatgagaagtgttaaaactgagcactaagaactccaaatcaaaaactaaattagaacctgggtcacagacgagagttccctactagcctggagtcaggtgtgtcttcatctctagatgggcaaccttatgccagcgtggatgaagtttccaggg

SEQ ID NO: 47777 - DNA, 657 bp, Homo sapiens
  misc_feature (1)...(657): n = A,T,C or G
gnnnnnnnnnnnnnnnnnnnnnnnnnnnnnnnnnnnnnnnnnnnnnnnnnnnnnnnnnnnnnnnnnnnnnnnnnnnnnnnnnnnnnnnnnnnnnnnnnnnngtgtcctggttggaatgcctctgaggattggcttttggtgagcaggtgctccttgtttattgggcagaagaataatgagaaccttactctttttctcctcctgggatcaatttctcatgttggaaaaagcaagttactccacttcatttatagacctgtagttgcagctttaccttgggggaaaacactgatgcttggctgagactgaatactgaaacagcgattctgaaatcttctgtcaaaatctctctctctctgctctatgggatgctctaccctaggtcatrctgtctctgatttgggggttctcctgtatgtatgtacatacctcatatctgtctgcgggttgcagtttcagcaacttaattctgttttctttctactttttggacagcttcctgtttcaggtacaccagtggtacccataaaggtttcctagtggccattgattatctcttgtgtttctgttttgttttgttttttttttccttgagatagagtctctcttttgcccaggattcagtgcagaggtgtgctctcggctcactgcaacctt

SEQ ID NO: 47778 - DNA, 538 bp, Homo sapiens
tggtatttatggtaatttcattacaaaccacattttcatcttttaatttctttcctatttataattatacagctataattaaaaggtattacaatgacacgmtatcctcactaaaagcctggcctgccagacttattacattcaagatatttctccagctttatttcttttctctcattttggaagaaggggaggggagggaaggaaggcagtggagactttggtcattataacctcaaatcttttcatcaacttctctttgttccttcaaaaaaaaataggatttttccaaacagtcccccaactaaatgaaatgttttgatgtaatagtttccatgtaagcttctcaccacatctgaagtgatgctcacacagactcactaagaccatgcaaaaaacttcaaggatggctgagacctggattaaattgtcttccagggcgagtgccagcagcctctgcccccatggctcaaagggtctcacaggcttaacaccaaggctgaggcacctcttacctttctctttcagaacatagaag

SEQ ID NO: 47779 - DNA, 986 bp, Homo sapiens
ttatctttgagataatttgaaataatgcccatgcactctcctgagcattcacaagcctgaataattttcatcttcagagtaatctgccatattatttacattttatttgcccattttgtatgttacaaaagatagcaagcataaatcttatataaatgaaggtgctatgacataccactcatttagtttttgagaatataattacatctaaaaatgaaagtgattatgtatttttttaattctccacatttaaggcaatttcaaattctaaagcaaaagggcagaattatataataagccaaaatgtacgtaattaatatagtagcttttatgctgtaccccacgcactatagatgctaactataaaacctataattttcccattctacatttcataaattcaaggaaagacagattgtagggatagaatgcaaagtgagttctgatatcagtctaattaacgtgtgttgttatttgaagaaataaaaaatacataaactaaattatcttaaatgatttttgttggctgtatattctagctagcaaacctcatctctgcaactaagtagctcagtgactttgaacaaattacatgacctttccgggtttaaaaagaaatttgagacattattgggccatcgacccatcatatattcttcaagatgctgtataaaagtgtgcctgggtatggtctcaaacatatctcattgtatagcatatgaaatgaaaacaaaacaaaacaaaaagaaaacctctaaaatgaggtgcttatagcagtccacagacaactccagccacattccatctgaagatcagagacaaatcataccaggtggcatctgcttccgttaaactacacatgtagcttggtaagtgcttattattggcagattttactaatattaatcccakatttgcaatatgaaaagcctctgacacctcctgtgtcttttgaaagctggtttcttcttaatgttatgtttact

SEQ ID NO: 47780 - DNA, 562 bp, Homo sapiens
caatgtttatgagtctatgtctggatacttggaatacaattccaacttcttttctaggttttcacagctttgaagaagctccatcctgtgtccctgggcctcattccctacatcttctaatctccttctctttgttcacttccttgagccatagtaacctcgttttgtttattgaatgcaatatatcagcctcagagccttttcctgactgctcttggtctgcagttctctccctgtgatgcatctgcagattttatcttcccattcttcagaccagggctcagaagtcactttctctgagaggcattgctgtgrggcgatattcaaaattgtccaccctcttcatcacattacttcactttcttgttctcttaatgtcaacctctgaaattatcttttgacatgtgtgtttaattgattttcacttttgttgctcttgctctggacggcaatctcagtgagtactttgttcatcactgtatccctggtagctccgacaatgcctttcaaataggaaatgcttaagtaatatatgctcaatgaattgatacatgagatgcac

SEQ ID NO: 47781 - DNA, 562 bp, Homo sapiens
caatgtttatgagtctatgtctggatacttggaatacaattccaacttcttttctaggttttcacagctttgaagaagctccatcctgtgtccctgggcctcattccctacatcttctaatctccttctctttgttcacttccttgagccatagtaacctcgttttgtttattgaatgcaatatatcagcctcagagccttttcctgactgctcttggtctgcagttctctccctgtgatgcatctgcagattttatcttcccattcttcagaccagggctcagaagtcactttctctgagaggcattgctgtggggcgatattcaaaattgtccaccctcttcatcacattacttcactttcttgttctcttaatgtcaacctctgaaattatcttttgacatgtgtgtttaattgattttcacttttgttgctcttgctctggacggcaatctcagtgagtactttgttcatcactgtatccctggtagctccgacaatgccttwcaaataggaaatgcttaagtaatatatgctcaatgaattgatacatgagatgcac

SEQ ID NO: 47782 - DNA, 451 bp, Homo sapiens
tttgcctggatgatcttccaggctaccatgtggatctctctcatacagcagagggagagttgtacagcaatgagggcttcagaactgtgtctgacccatgctgattgctcagtgcccctgagcacaagtttttaaacattttgaatctcacccataatatttctcatcttgcagagacagagagcattgtggctatataatgcaggtaaagtacctagtgtmacgaataacatgcggaaatgataaatatcataagttgtattactgcctgtggtagtctgaataatggtcctcaaaagatatccaagtcgtaatttccataacctgtgaatatgtaaccttatatgtcaaaaggaactttgcagatgtggttaatttaaggatcttgagatggggggattttccttgatgatccaggcaggccctaaatgtaattataaaggggcctttt

SEQ ID NO: 47783 - DNA, 540 bp, Homo sapiens
tttttgctataaacagatgagtacaataatttataggtagctttgtgagtgggtattttgtttccagctatacagaagttgcataatagctacccactcaggtattttagattggcatggtagtaactgtttaataataagactgctactacataatagcatatttgtgcatcttttcgacactacacatgaatgacctttatgaataaaatagtgctacctaattctatatattttggctatatgtttcctaaaagtgataatctttggagatggacagatcttacataggttaagatacaggataagtttaaaaatacaaattaaaatggagtctaattaatagtcgttcctgaaaaaatataagcctttcccatgaggacattttctgtcaagaggtaagtgtgggtcagctcatttggaggctgagggggcatctgrtttcttcataatattatataaaatttgtgagtggctaagctacctcattgtttcttctgtggataagggcctgctgccttgaattctagtcagcctgga

SEQ ID NO: 47784 - DNA, 641 bp, Homo sapiens
catgtctagctacatgagaataatgaaagaggtgcttgcccctcaatttggagtcaccaaaaatgtgatgggtgcaaatgctgggatgtggtggggtgatcagatacctggagtgactttattaagattaaaaaaaaacctcttggccgggcatggtggcttacgcctgtaatcaatcccagcactttgggaggccgaggtgggcggatcacctgaggtcgggagttaagagaccagcctgaccaacacggagaaaccccatctctactaaaaatacaaaattagccgggtgtggtggtgcatacctgtaatctcagctacttgggaggctgaggcaggagaatcgcttgaacccgagaggcggaggttgtggtgagccgagatcgtgccattgcactccagcctgggcaacaagagtgaaactccatctcaaaaaataaataaataaataaatwaaataaataaataaatataaaaattctttatgattatttgtaaaaacagagtctaggttcagagcattttaaatggatttttcacttaaattaagcctctggtaagacatttggaagtcacgtagcatgtggggcaattctttgttttattatggagaatgggtcatttagtatcctaggccctga

SEQ ID NO: 47785 - DNA, 1274 bp, Homo sapiens
ttccaaggtccacctcagaagcacttctgacatgctggctgggtttggcttttcttttttttaacaatatattttcccacatctttgagttttcaaaagtagacccatgtaggactcccttttcagatgcctccttcttaccaaaacactctcctttgtgtgtacatgtctggtgtaagtgcacatgtgtctgtgtgtgcgcatgcttcagctctattcccagagctgggcaagcagggctgaggccatgacaactctggttcacccctgaggttcccttgttatgaagacagcttccgtagagagtcctctgagggcccactgtgcctggggacttcctggacatactcatgaaacagcgcacaagaaagctttcaaattctaccaagtccccattgggtttaagaatgaggccgggcgcgatggctcacgcctgtaattccagcactttgggaggccgaggcgggtggatcatgaggtcaggagatcaagaccatcatggctaacacggtgaaaccccatctctacaaaaaacacaaaaaaaaattagccgggcgcagtggcgggcgcctgtagtcccagctactcaggaggctgaggcaggagaacggcgtgaacccaggaagcggagcttgcagtgagccaagatagtgccactgcagtccagcctgggcgaaagagcgagactccgtctcaaaaaaaaaaaaaaaaaaaaaaaaaatgaatggctgataaccggggatagccttgccattccactccctgaraaatcctgtttccccttaaattcttgccaggccactcgagagtggaggcatggcccgaaggcctggcggacagcagcagcagctgttggggtgatgccgcaggacaatgatcacggccactgctccatgaagtcctgggcaggctgcttgacactctggccttcccagctgcacagtatcaaaccaaatttggatccatctctagccactgtatacaatcctggcttttctttctcacctctgttttccttttgccccaatttcttctggtatctattgaatcctgtggcattgcatgtgttttataagccaactcaaatcctttctagtaatcacttggcaaacccttgccgggtggggtgtgagaggagcagcctcagcacaaggggctctcagcccagaggaccagtagcccaaaggaatccctgtcatttctctgggagcagacttgaagcatactacagccagggccagcggcgtcagcaagacaggaggggccatgaggag

SEQ ID NO: 47786 - DNA, 2271 bp, Homo sapiens
cagctccaactggggaggggaagaggagggtcattcctagctgaagtttgaagggtgccaatcacgggcctctcttccagccaggttaagaagcagtgggcagaaatgcaggagagtgggcactaaacagaagccagcatgcaaagacccagggaagaactcacttgtcatgggaaagagcaagtgccaaggtcatgaggtggcatggagctgggcgtaatacaggaagcggaaggccttgggggctgaacttgggtgaagccagggcagagcggacgtgacggaagctggtgtggacacccagcagggccttgcaggctttggagggcttccagaggcccctcagaggttataggcaggggagcaaatggaaactgtaccatcgcccagcaagttctggcagacaggcctccagggctataaggcaggttgggaagcattgtgtggtaggccgatcctctcagccccctgagcgcctggcccaccaatgcttgctcctggtggagtggccccttctaaggaatccttctttgggcaccttgtggtgctgatgggcactggggctcggcggcaacaagccccaactgctaacttgagaatgaagagcaaatatttgactttttttcacccttttctccctcctctgctgtcattttatacagccctgtttagactggatgctggttaatgggcgacctttgccctttggctaaaagctgtgaccaggaaatcccacctcccattaatgcgggttttgttcaggatcccaggaacgcctagctcacagcttctgctctgcaaacgcattgtctgccaggcttagaaaaagaaaatggaaaagaaaaacaaacaaagaaaaagaaaaaaaaaaaaaaagaaaaaaaacaaccttccactgttgaattaaaacagcaaactccaggcccaaagtaggtttcagtctctattaagataacaaaaggtcctaaatgccaggcctgggcgcaaactgtgcagacaagcgggtggccggagaaggaggggggtcaaggaagagagggaaactcaattgacggttacttttttttcagagttatttccggtggggtctgcccccacccctcaacaaattttgttgctctgagcattccaggcataaaaagtgaggccgtggagggcccttgagaccagcgtcatgcacagtgacatggcacagtgacatggcaacccagaggcaccttgatcttgactattctaatgcaatgcttttcgttcctggctccacatgggtgcccgtgtgttccaatcacatggccacagtctctctcttcctttcttattttctctctcctttgttgatgttgaatatgattatttaaaaggctttatccttttttctgctaagccactctggcccagagccatctctttcaccctaaaaattcgaactcttggcaaacagggctttctgacccattgtccactgggcttagcttgtccacctcttgtgacttacttgagagcatcagtgattgtgcaggctagggagccttccttatggctcccacctggcgtctcttccgcagcacccaggatagctcatggctaaaagcacatgctccaaaaatgtttggtcatgggaggatcaagtattaatatatgttagttattatttatgtcatgttaggcataatggctaatgattgtttctaagctagataggtgtatggaataaaaaattaaaaatagacaacatttattgactgctatttgtgtgttaatgacttaactcttaaaagacccttatcttgaccaggcgcggtggctcacacctgtaatcccagcactttgggaggccragccaggtggatcaccaggtcaggagttcgagaccagcctgaccaacatggtgaaaccccgtctctactaaaaatacaaaaattagccgggtgtggtggtgcacacatgtagtcccagctactcaggaggctgagtcaggagaatcacttgaacccgggaggtggaggttgcagtgagtggagatccggccactgcactccagcctggtgacagagcaagactccatctcaaaacaaacaaacaaacaaacaaacaaacaacacccttatctcaaatctcaagattatactagggtttttgcaagttcctaaagattatgaaaataaaaaccaaatcaattagaacaaaaaccaaaaacaacccatttctttttttttttcttttttggagagacaaaaaaaattcatttaatttatatacattttattatat

SEQ ID NO: 47787 - DNA, 686 bp, Homo sapiens
tgcatctcttagctccttttgaagagcagaccatgtcacttcctgggttaaggaaggaaggctccctgatggcctttgagtgactgactggcacagcttggggtgggccttcagtgggttagtctttgataggcctttgtttcccattttggtcttccctggagggcagcccaccttgcccacttaggctcttggacagttttctttttttttttttgttgaggtgaagtctcactctattgcccaggctggagggagtgcagtggtatgatcacagcttattgcagccttgacctcctgagctcaagtgatcctcctgccttagcytcctgagtagctaggaccacaggtgggggccaccatgcccagctgatttcttaatttttctgtggagtcgaggtcttgctattttgcccaggctggtcttggaactcttggcctcaagcagttttcctgctttcctccccaaatgctaggattataggtgatgagccaccctgcccagcctgcttggccagattctgtactctttaggcagaccaaaaactgaatcctgtcatcactctgaaaagttgtgggacctcaagaaagtcactctttcatgagtttctttagctgtgaaatagtcacagattctaagctgtcttttgaacctgtgtcaagagagagttgtgaggatgatgtga

SEQ ID NO: 47788 - DNA, 645 bp, Homo sapiens
tgactgcagtttctcttttggctaactccttgcctttccctgtgattgaagcagtggaggttgataattcattttgttctgccattattgatttggtggctctggtccaaaatttgaaaatttctctccaggttgttcttgcccttggtttttacaaagacattgcataaaatgcaaggtgtaggtcagaaatagaaacatcagtgctactttagggtatgagggtccactttcaattgtgaaagaggcttattgttaattacagagatttccaagggcatcagacaattctcatgtggtggctgggaaaaatcctccttacaaatgctttctaaactgagaatggatttgaaagaccatgtctgccccagctcagaaattattccctcataaaggacttgtgtaaaggttttcaagatacctttatgtgaaagataaactatattaagggcccaagagcttctgctcaccacgttttttactgaggtcttcctttcttgattcttataaatgtcagtttcttaaagtcaccacccccctaggatttaagattctgaatccgtaagtggatgctwctctgacattttttctttagattctaggtaccttggtggttgttaagtggccagtggagttttttcttga

SEQ ID NO: 47789 - DNA, 632 bp, Homo sapiens
tgcatatcacatctgattttaacatctcattcttcactgccgatgacttcgacaaggcctagtgtggaagaccataatggtgcattrtggggtatagtgggcttggtagctaagagcatgggttctagaattaggtatatctgtattcaaatctgcattctgccattattatctgtgacctttgaacaattccctctacctctctaagcaactcttcccatcacaaagtgctgataaagcataaagaagaaaacactctcattatagagttgcaatatttaacacaatgactgttcctagctcttagtagtagctattattttgattatgaggataataacataaaacacttttgcctggcacatagtaagcactggatgaattatacgtattactgtaatatataatataaatatgaatatatatatatatatatattttttttctgagtttggtgagtttgattgcagattccatgaagcagggaccagacttgcctgatttgtcttttggtccttattgcctagttcagtctgacatataatgggtactcagtaattatttgttatgagtcagtaaacgtgtgtatttttccatgtaaccatcaaaactgtgagatcactgtctgtttt

SEQ ID NO: 47790 - DNA, 537 bp, Homo sapiens
catagggggatcaatctgattatgtaaataatgcataaatcccaaacgtgcaaggtaaactttcatcagcctcagtaactcaggttgagctttaggcttgagatgtgaagagaaagctgatttctttgactaaacacatttggttattttttttgaattgcagttgagggaggcagagtgacatggtgcaggctaagaagagcactgaacggggtgtctggagccctgcatcctactcctggcctacccctttgtgatcttagataagccctttacttttccaggcttccactttccttacctgattcagaagggccaccaagccccagttttcctacctcctcaggatatgatgaaaatagaatgagacaatggatgtagagcaaaagctactcagggtgtgatagcaccctgccaagtgtrcgttaccagtctgcaggaggatgattgcagaaagtaagagtaagtgtttagaaacttttatagcaatttaatattgtggtgacatccaagtttgtgatccagggacatgcttca

SEQ ID NO: 47791 - DNA, 574 bp, Homo sapiens
aaaattgttcacgtataaaatgaacagatgaaccttaaagtagttggtgttaatggtgttgtgggtagaaaattttataatactttaattctgatttagtaacaaaggagtatttttacacaaaaggaaaaccctacaaaccagcaagtcttcttggaaagataagaaaaacttatgccaggtgtggtggttcacgcctgtaatcccagcactttgggaggctgagacgggtggatcacttgacatcaggagttcaagaccagcctgaccaacacagagaaactccgtctctactaaaaatgcaaaattagctgggtgtggtggygcgcacctgtaatcccaggactcaggaagactgaggcagaagaatcgcttgaactcgggaggccgaggttgcagtgagccaagatcgtgccatgcactccagcctgggcaacaagagcgaaactccatctcaaaaaataaaaagaaaaagaaaagaaaaacttacattataatgattataatgaagataaaaaacttcctcagaattccaatagaaaaaatgaatcatttagaattcaacttttactaa

SEQ ID NO: 47792 - DNA, 1345 bp, Homo sapiens
tcacatggatcgtaatagacaacttcatcttgtttttctaaaaatgtattaatgattgtttaaaacatattttattattttaaaaaatgcattgaatttttttaaatgtaagaaaaataaagatcacttgtaatcccaccactgagaagcactattaacatatatgaaaaatatgtgtatatgtaatatacatgcacacatgtgtatatacatgactatatacatgtatgtaagtagcatgtgtgtatatmcatgtagtgtatgcatgtatacatacatgtatatagacatatgtgtgtatatatatatatacacacacacacacatactacttacatagctacacatatcaatggagttctaaaagaacattttccatgggatggaaatacatttttaggccaggcgcaggggctcacgcctgtaatcccagcactttgggaggccaaggcaggcggaacacctgaggtcaggagttcaagaccagcctggccaacacggcaaaaccccgtctctactaaaaatacaaaaattagttaggcacagtggcgcatgcctataatccgagctacctggcaggctgaggcaggagaacagcatgaacctgggaggcagaggttgcagtgagccaagatcgtgccactgcactccagcctgggcaacagagcaagactccatctccaaaaataaaaaaaaatttaaaaagataaattttaatggcagcatagtattctctaatttaagcagtccatgttgttaggctgttccaatgttccactattattcatttcactgtgatgaacatccctgtataaatctttgtgtacactttttatcacttccttagcagataaatatttaaggatcttgatacccattgacaaattgccctccagaaaggcaacttatattctaccagcaatatattattaagatgtcttagtcatatataatcttgattacatattgattttttttaaagccatgcttactgtaacaaattcaaaccctccagaagtacataaaacagtgaaattgtcttgctccttccccaaaccttctgagtcattctcagaggaaaaacattatgaacaatctggcatgcatccttccagattaacttctttttttaatgtaatttttttcctaaatatgtaaaatgcttataacctgaaactactgcaaaaaattctgaatactcaggattaaactaaaagttcaggatctatgtgaagaaatttattaaacttggaggaactttaggaaaaaagatttaaataaatggagagagacataccatgttcttgggtaggaagattcaaaattgcaaagaccactattctcc

SEQ ID NO: 47793 - DNA, 626 bp, Homo sapiens
cagcctgctgggctgagtggtaggatccagcccagtggtccaagcagtactcaggcagaaggcaccaacaccacagaggttttggctggcaaggcaacatcctaaggatcctgtgtcataggtacatgaaaaaggtgggcaggaaattttcrtaatatctttgacttcaaaggtataacctctgtatatctttcaaattacaaatgggaaccattcaaaagtgttttactaagggaaataatttgattttaatcagtaaatttgattaagaaaaaaggttgaatacaaggaagactgagtgctatgccttcatttataacacattgttgagtaaaagtagaatcaggatgaggaaagtcatcctaccactgtccagagacacaggaggtaggaataaattaaaatgaggcagtgggggcagggaggttgggttattcaagcttgtagtaaatatttactgagagttgactcttaacaggtcgtctcagatgaggccatgtgttatttggaagtaagaagggccttaactaagaaactgaagaactaaaatttaagaaaaataaatagtgatagtgcttgagtccttgacaataaaagtggaccaaatatgcaagaaaaagttcaaa

SEQ ID NO: 47794 - DNA, 542 bp, Homo sapiens
gatagatatagatagatgacgatgatagagatagatagatatagacagagacagatagatgatagacagataaatataaacagatagatacaaatagataataaattgattgatagatgacagattgatagatatagacagatgtcagatacattagagagagagtgagagaggaaaatgtgggagacacagagggtgggagtataaaagtgagtgagagaaggagtcagaagaaaagtgaaagaaaacaaaagaacaacaacaaaagaaacaaaacaaaaaggactcatctaaccaacttttccattttatatcatgaggacttgaggcccaaagaaatggtgtgatttgcccagggtcataaggtaggtaagggaagaaaataacagrcagcctcctccactgtcttcctggagatcaaatagtcttggaggaagcatgtgaccatgaaaattagctagaagaggacaagttactcacctgctacccctctccgtgtgcatggaaagcaacatctccctcctgcactggacactctcaga

SEQ ID NO: 47795 - DNA, 501 bp, Homo sapiens
tgagcaatgtggacagggtgggctgggggataactcatatcacracataaccaactaatttttaaaaatcactttttcacctcaggaccagagattctattactcacccccaagacaaaactgaagaaatcctggcccctcttaattgtttacatgaatgtgatgggccaaattctgatgagataagtgagtgaggctggctccatctcgcatgtggctaaggcaagactgatgcatttattacccatcttgttacgtggaaaatattctccgtgatatacctgttccacccttcagctctggctgagtatagacaggtagaggtgcactcaaagccacttccttccataagaccaggcgtatgagctcagaaggactcctcacagaaaacaagggaggtgggcagaagaaactcgggtcaccaggaaggtgtcggtgtcaagctacacttactttgaccttttgccctaaagagaatgctctcttagcaacctttccaaa

SEQ ID NO: 47796 - DNA, 530 bp, Homo sapiens
gcagcaaaccaccatggcacatgtatacctatgtaacgaacctgcatgttctccgtatgtatcccagaactttaagtaaaataaataaataaacaatgatagagatgcaacttcatctaattataaagatgtttattgcggtgttgtttatcataaaaagttgaaacttcctaagtacctaacaacacaaggttaagaaaacattggtaaatccatatattaaaaaatagaattgatgtggaaagatgttcaagrtaatggtgaaataaaaaagtagattgcaaaacagtaggcacagtaggatcctattttggtaaaaaagacatatgtctgtgttagctgtgtacacataagaaatgactagaaggtatgtagagtgggtccctgtgggtgatgagattacaagtaatttggaaattcttctttttggttctctatatgctctgcaaataactagaggtagttatcactggtacctgttaagtgctgattatgtctccccaaattcaaatgctggagttcaggttatg

SEQ ID NO: 47797 - DNA, 530 bp, Homo sapiens
gcagcaaaccaccatggcacatgtatacctatgtaacgaacctgcatgttctccgtatgtatcccagaactttaagtaaaataaataaataaacaatgatagagatgcaacttcatctaattataaagatgtttattgcggtgttgtttatcataaaaagttgaaacttcctaagtacctaacaacacaaggttaagaaaacattggtaaatccatatattaaaaaatagaattgatgtggaaagatgttcaagataatggtgaaataaaaaagtagattgcaaaacagtaggcacagtaggatcctattttggtaaaaaagacatatgtctgtgttagctgtgtacacataagaaatgactagaaggtatgtagagtgggtccctgtgggtgatgagattacaagtaatttggaaattcttctttttggttctctatatgctctgcaaataactagaggtagttatcactggtacctgttaagtgctgattatgtctccccaaattcaaatgctggagttcaggwtatg

SEQ ID NO: 47798 - DNA, 539 bp, Homo sapiens
attattttagccctagatttgaattaagatctaccacttactagctctgtaaccttggccaatatatttatcctcagtttccccatgtataaaatgaaggtaatagtcccatttcattaaattgtcatgacttaactcatataaaatgcttattatggggctagaatcataggtgacctttaataagtagttattaattaaagatcatgggaacacaatctgtttctgttatcctggtatctggaaaatcacataaataatcaatagatagaaagtcatatctgataaaaaagagttgctattcttatggaacattttattcaagcttggctaagtattcttccttctttcatcactgtgtctaccacattaggtactaaaatactcatgtcttccagcatcagtttctttccttyaaccagtgctggataaacatgaatacattcctaagctttaactctacttttacaaaatttatattattacaaatttcttcatgaaaggaatactgtatgccctcaatttgtagatgccatcta

SEQ ID NO: 47799 - DNA, 610 bp, Homo sapiens
ccgggcagctccgcattccgccagtctgggcagctggagacaaggcaagagccccagctggagggatgagcgccccagggctcagatctgtccgatcacctcctgtgggtccgatgcagcgggtgcctgcccctctcccagcctcactcccccacgccagggaaccgatacctgcaccggcgtcatgtacgggaagcccagctcccgcagcgcgcccagcacctgcgggtgcagcggcacaggcagcgactcccaggagccctctgtcacatgctccatggcgcgctccttcgccgcgtcggtcgccgctgctcgaacgcgccttgtgcacccccaacgagcacttccgcttccsgcagctccagcggccggccgggaacttcgctggagcagcagagttccggagcgcggcgaaggctcccacgccgcgggagggaggaaaggcgtccgcgggacggtggaggcaggcggcggggcaggcctggggagttacacccgctccgcacagcgccctgggctccgggcgcctctccgcaccgggcaggagttttggcgggagggattctggcccggccctcccactttctctgcccctcggaggcaggtggca

SEQ ID NO: 47800 - DNA, 552 bp, Homo sapiens
tctttccttatactctaactatagtcttgataaagtactcaatattccctctacatggaatagtctatttgcccagtacacaaacacaaacacamactaatacacacatacatgcacacaccattgcctttcttctagctaatttctacatatcttttaagtcttagcttatatgttatttcttccaggaaacttactgaaacatccccaagaccatattaggtgccctctctaattccctgaacaataacaatatgggtcactctgtacagtaattacctgttcatccgtttgctttgttcgttaaacgctaagttccttttggcagggaatagctttgccttcattattgtttcattcttaggatttagcataatttctgccataaagtatataggtgcttgatataaatctgttaaaggaacgtatacattttgcaatacagaaagcaatttttttcgtcattattccaatgtgtgttcttttccaaaatatattttctagagtaaaacgagttctaattatttcaaagagcagttaatttggatatgc

SEQ ID NO: 47801 - DNA, 552 bp, Homo sapiens
tctttccttatactctaactatagtcttgataaagtactcaatattccctctacatggaatagtctatttgcccagtacacaaacacaaacacacactaatacacacatacatgcacacaccattgccttycttctagctaatttctacatatcttttaagtcttagcttatatgttatttcttccaggaaacttactgaaacatccccaagaccatattaggtgccctctctaattccctgaacaataacaatatgggtcactctgtacagtaattacctgttcatccgtttgctttgttcgttaaacgctaagttccttttggcagggaatagctttgccttcattattgtttcattcttaggatttagcataatttctgccataaagtatataggtgcttgatataaatctgttaaaggaacgtatacattttgcaatacagaaagcaatttttttcgtcattattccaatgtgtgttcttttccaaaatatattttctagagtaaaacgagttctaattatttcaaagagcagttaatttggatatgc

SEQ ID NO: 47802 - DNA, 552 bp, Homo sapiens
tctttccttatactctaactatagtcttgataaagtactcaatattccctctacatggaatagtctatttgcccagtacacaaacacaaacacacactaatacacacatacatgcacacaccattgcctttcttctagctaatttctacatatcttttaagtcttagcttatatgttatttcttccaggaaacttactgaaacatccccaagaccatattaggtgccctctctaattccctgaacaataacaatatgggtcactctgtacagtaattacctgttcatccgtttgctttgttcgttaaackctaagttccttttggcagggaatagctttgccttcattattgtttcattcttaggatttagcataatttctgccataaagtatataggtgcttgatataaatctgttaaaggaacgtatacattttgcaatacagaaagcaatttttttcgtcattattccaatgtgtgttcttttccaaaatatattttctagagtaaaacgagttctaattatttcaaagagcagttaatttggatatgc

SEQ ID NO: 47803 - DNA, 552 bp, Homo sapiens
tctttccttatactctaactatagtcttgataaagtactcaatattccctctacatggaatagtctatttgcccagtacacaaacacaaacacacactaatacacacatacatgcacacaccattgcctttcttctagctaatttctacatatcttttaagtcttagcttatatgttatttcttccaggaaacttactgaaacatccccaagaccatattaggtgccctctctaattccctgaacaataacaatatgggtcactctgtacagtaattacctgttcatccgtttgctttgttcgttaaacgctaagttccttttggcagggaatagctttgccttcattattgtttcattcttaggatttagcataatttctgccataaagtatataggtgcttgatataaatctgttaaaggaacgtatacattttgcaatacagaaagcaatttttttcrtcattattccaatgtgtgttcttttccaaaatatattttctagagtaaaacgagttctaattatttcaaagagcagttaatttggatatgc

SEQ ID NO: 47804 - DNA, 647 bp, Homo sapiens
tatgccagtactacagatatgatggtgagcaaaacaaactgggcctagtccgcaaggggcttacactcagggagagggcagtacagcaaccagtcagagtcaagtgtggaccaggactgggataggactggggtccacacacagccactaggaagagaatttcacacaggaacacaggtacaaatgaaatgcttgtatcactgtagctccaaggagcctcagcagcaaatgcaaatgcaacgctcttcacacaggccctgggagatcttagacctaagcagctggacacacagcgtataagaaaagttagagaaagaaaagaggcatatagagactgaaggcaaccacaaagctggatgcccaggtktggccagcagaactacccacaggcctcctgcaagagacggcagaccgtccaggacttgaaagctagtgttttagaaagagtagaaatttcactctactctgtaatccttgccaatatcatctaaaagtaaaaggatgctaaactaaaatctccttaaaactgacatttaaattcaagtgcagttggggaccaaaggaggaccaagggtaacaggaacactgcacagaagagaacaagttagaaagcaaagatgccatgacgtgacagtaaccacagagac

SEQ ID NO: 47805 - DNA, 540 bp, Homo sapiens
  misc_feature (1)...(540): n = A,T,C or G
attagctaggcatgggagtgcatgcctgtaatcccanctactctggaggctgaggcaggagaatcatttgaacccgggaggcagaggttgcggtgagctaagatcgcaccattgcactccagcctgagcaacaagagcgaaactccatctcaaaaaaaaaagcactttttaagtcacctcgacttctttaggcaaaggcctgtctctgtagcagctcagagaggagtgtccaaatgccatgcaatgaaatggcagcatcgtttcttttctgcagcttcttgggcagatctttaaatgggcaaagtgaccaacaaggtgggtgggcaggtgagaggatgtgcttgctgcctctccagaacctrgtctccatcctggtgtctacattttcccctttccctgcttgctctacacaggagtacttttctcaccgggtacttgtttggtgacctggagtgtgaggcagtgaatttcatgctgctttcagggcccagtagacaggcagttcagtagaggccaagaggtaaactggcagccaggtac

SEQ ID NO: 47806 - DNA, 866 bp, Homo sapiens
gcatgagttcctatatgatgaactgcaacctaacttagcaggcaaactaaccaaaagcctgacttaggagcatttttaaacaaatagccgaagctcagccaatcacagcagctgagcatcagtaaatcacaggtgacccatggatcaagggtcaagctgtaactgatcaagtagcctcagcacctcttctgttttctgtccccataatgaatgctgtctgaccacatgcaggtttctctgaacctgttctgttctggggactgccccatcctcgaatcgttctttgctcagttaatctctgctaaactgaatttgtcaaacatttttcttctgacaacccccatcttgcaggtaagagaaatcaaagaatgaggtgttcagtggctttttgaaggtcacagcaagcactggtagggcccagactcctgcccagcagtctctgtactgcaaagggacagacagcagggcagagaggtgaagtgccccccctcggcccccctcctggaacaggctcttcacacacatgcctcagaggcaacactgcccaaagggacatttgcagcccakccgctgctgagctgacgccaacccccaccttgcttttttcctgctggaactcgatctgaatgctggtcagcttggcccgcagctcctcgttggccatctgcaccgcgtccgtctccatctcgggcttctcgcccttgctccggcctttcttcgacatgcttccccttgggtcagagtgctgagatcctgcggtccacacctgttcacgcacgccagccagcaggcgtggctaccagctccaccgtgctaaccagtcgcgcaggactcagctcgccctccgaggaaaccaccatcacttg

SEQ ID NO: 47807 - DNA, 866 bp, Homo sapiens
gcatgagttcctatatgatgaactgcaacctaacttagcaggcaaactaaccaaaagcctgacttaggagcatttttaaacaaatagccgaagctcagccaatcacagcagctgagcatcagtaaatcacaggtgacccatggatcaagggtcaagctgtaactgatcaagtagcctcagcacctcttctgttttctgtccccataatgaatgctgtctgaccacatgcaggtttctctgaacctgttctgttctggggactgccccatcctcgaatcgttctttgctcagttaatctctgctaaactgaatttgtcaaacatttttcttctgacaacccccatcttgcaggtaagagaaatcaaagaatgaggtgttcagtggctttttgaaggtcacagcaagcactggtagggcccagactcctgcccagcagtctctgtactgcaaagggacagacagcagggcagagaggtgaagtgccccccctcggcccccctcctggaacaggctcttcacacacatgcctcagaggcaacactgcccaaagggacatttgcagcccagmcgctgctgagctgacgccaacccccaccttgcttttttcctgctggaactcgatctgaatgctggtcagcttggcccgcagctcctcgttggccatctgcaccgcgtccgtctccatctcgggcttctcgcccttgctccggcctttcttcgacatgcttccccttgggtcagagtgctgagatcctgcggtccacacctgttcacgcacgccagccagcaggcgtggctaccagctccaccgtgctaaccagtcgcgcaggactcagctcgccctccgaggaaaccaccatcacttg

SEQ ID NO: 47808 - DNA, 866 bp, Homo sapiens
gcatgagttcctatatgatgaactgcaacctaacttagcaggcaaactaaccaaaagcctgacttaggagcatttttaaacaaatagccgaagctcagccaatcacagcagctgagcatcagtaaatcacaggtgacccatggatcaagggtcaagctgtaactgatcaagtagcctcagcacctcttctgttttctgtccccataatgaatgctgtctgaccacatgcaggtttctctgaacctgttctgttctggggactgccccatcctcgaatcgttctttgctcagttaatctctgctaaactgaatttgtcaaacatttttcttctgacaacccccatcttgcaggtaagagaaatcaaagaatgaggtgttcagtggctttttgaaggtcacagcaagcactggtagggcccagactcctgcccagcagtctctgtactgcaaagggacagacagcagggcagagaggtgaagtgccccccctcggcccccctcctggaacaggctcttcacacacatgcctcagaggcaacactgcccaaagggacatttgcagcccagcmgctgctgagctgacgccaacccccaccttgcttttttcctgctggaactcgatctgaatgctggtcagcttggcccgcagctcctcgttggccatctgcaccgcgtccgtctccatctcgggcttctcgcccttgctccggcctttcttcgacatgcttccccttgggtcagagtgctgagatcctgcggtccacacctgttcacgcacgccagccagcaggcgtggctaccagctccaccgtgctaaccagtcgcgcaggactcagctcgccctccgaggaaaccaccatcacttg

SEQ ID NO: 47809 - DNA, 620 bp, Homo sapiens
attgttctttcacctaagtactcttatagcccaatgggggaggtaggcattaaataattaattacacaaacatgtcagttgcaccagaagattgttcgatgcaatttattaaattgttaccagggcatggaagaagggagatggtgaggaatagatactggatttatcttatagatgatgagactattacaaaattagatactagtcatggttgcacaattctgcatatgctaaaaatccttgaattgtacactttagtgaagtcaattttatgtcaattatacctcaaaatagtaagtattttttaaaatatgcctctttgtgcctcaaagtcctccctccagtgacatttctaaagcttagaagaatatttaacgtcatttctatggcctctttggaccccaattttaaggaaatatttctccatcctcagctgctaccattctgtgctttattaactgtgttcaattacagaccaccttgctgttctwaattgccacacttattcttgcctagtgccttcacccttgctattcctcttcctgggaagttagtaacctgaataatttgatagttcactctcttttttacattgaaatctctgtttgaatacaaaatat

SEQ ID NO: 47810 - DNA, 617 bp, Homo sapiens
caccaatgggatagtactaggagatggggccattgagaggtgattaggtcatgaggatggagccctcatgaatgggcttagtgtccttataaaagaggccctactgagccgccttatctcttccaccatgtgaagacacaggagaaggtgtcatctaagaaccaggaaacagcccytcaccagacaccaaacctaaaggtgccttcatcttagacttccttgcctgcagaactgtgagaaattgctgttgttttataagctatggtattttgttatggcagcccgaatggtctaaagtaaatactatgtaccaggaaatatgtgacgcattgtagccttttaaaactcttaatgcttctgataatcctatgaagtacataccattgttatcttaaagccattagtcatgaaaaaataacttgggaaacaatttccacaggagtgttaaatgttacactagccacggttgaagaaaggaggaataaatcacaagatttatctgagaatattacacaacagaaatacacatagaaaataaaaatgaaagaatgtagaagaaaaaatatataacacaagaaacaaattaagagacatggaaagaaaacagagagtttaat

SEQ ID NO: 47811 - DNA, 583 bp, Homo sapiens
tgctataaaactggaaaatgtatataaaataacaatttctggtcattggaaaatagttgacatagaatgtgcaaaacctatacatggaaaactacaaatcatctgaagagatattatagaaaacccaatgtaaagaaggtgtatactatgttcatggaattaaaaactctaaattggttaagatgtcaaatctctgtgaattacttcatagatttaacataattcccataaagccttaacasacttctttcccaaattaacaagctaattacaaaaatttaaatgaatgattagtcaaattcaaatgaatagtcaaataaatctataaaaaggaggagctagatgaataataccaccaccagagtttaatctactataaagttacattaatcaagacattgcagtaagaatctatgaatattttttttgacagcaaaagagaatagagttgagaaatagacctatatttctggtcatttggtttgtaacaaagttgccaaggcaaatctataggaaaaaaatattattttaaaatagtaatagaaaaactatccatgggtggtggtggtggtaggggttgaag

SEQ ID NO: 47812 - DNA, 1886 bp, Homo sapiens
ataggacttcaaatcaggttttctggttccaaccctagtgactatctatgtggtagaatatcaaaattcctgcgcagacacaagttacactatctacctcctagatgtctagaattccactagattccttcttttggctaaaatcttccactgctcattaaaaagcaaccctctagtaggatttggtgatagcttaggccaaatctatttcaacaaaccatttctgcagtaaagaatttgggagcagaaagggatactgagggcggagcagagcatccttgttatgagaaaggtcaggaaaaaaaaaaaaaaaagggaaaacatggaccatcagaaaaagaatcatatcttctctcaattttacccagtactgcctacctgtgacctttctctctagccgggttatctggctactaaagacagtgcagcatttattctctagatgggaaaactgtaattttctaatattttccatcatttcaaatatgtgcatttatatacaagtcactataaacacattaaaaacttacttaaaaaaggctgaaagaaaagaaaaacccttctgaaagaaaagcaaatatcaaaaaacgaaccatcctccccaatcctttaagggctttgtgaatcaaagttattagaccaattgaaaaacaccttgcaaatataacaggagcatctggttttactaatatacttttatctcaaatataaagatttttttttctgaaatatttatctaaaatactaattttttttttttggttagaacttcttatgaagcttttaaaagcaattattcagggctcaaaacataagtaaaaaaaaaaattggacaataggttccactgttgatttctggccaaatatttgctaatgtctatgccacagaagccrtgttatttaaaacatttggatttgattgaaattcactttagtaaatttggcgaattaacatacaactagaggtttgtcaggaatgtcaataaatgattctatggtgtctggcttcctaggacaaactttaaatcgctatagctaaagtatttttttaagttagtttaggcattttagttccttgctacgattgatgaccttgatacagagtgtcttaaataaaaataccaaatactgacagaagaaatgtacgtaggaacacagtgatgattctattattattcttgttccttagacctacacatgctacttcaagcgcttacatgagaatattctagtatttagcggaaaaaaagtgagagagacagaaacaaaaaagctgcaagataaaccaagatgcatatgttattgaaaataaatcacacatccacaaaagcaacagcctcaataacaagaaatcattgtcttggtgacagaaaatacagtgctggtgactgggtgtgggaagatggaggggaggaacatttttaaagtctttatgctattatcttaaaatatgtttttaaaatggaaagaaacagagattctctaaacttttgagtaaaaaaaagaaaagtagtctaccctttcaatctttaatttccagtccaggagtgctgattttaacacgtctgcttggatctcacttactcaaaacgtaagtctcctggctaaatgcactgaacagtatcagtaatatggctggttttatggtaggtaggcttgagggatagaagctctaattaagcaaattaatcacagattttgtgagagggcttcaaattctattttgagctttgaataatggtaaacaactacgtaagggcaatattactggggtggatttgtctttctattaaaagcacaaaatgagttcacctgctatgggggccaaacaacagtttttttgtagtaggtcttccagggtttcatgtacaagaaaaactttagca

SEQ ID NO: 47813 - DNA, 614 bp, Homo sapiens
tgtccttataagaaaataaaattcagacacagaaaggagaatgctatgtgaaaactgaataagagaataggrtaatgcatatacaagtcagcaacaccaaggattgctggtaagtacaagaaactaggagagaggcatgaaacagattatttttcagagcctccagaaggaaccaaccctgccaacaacttttagatatgtagcctccagactgggagagaataaatttctgttttagccaatttgtgatatttgttatagcatccacaggaaactaatacaaaacacacgtgtgcatatatgaggaagccagattttcatgaaggaacatcagattgcagttttgcagtgcaaacctggattcaaatattgcccccatgattacttgcagtgttattctgaacacttattctctctgacatccattttctcctgtgaaacttcagtaattgcattgtgaagaataaatacaataacatgtaatgaccagaacctgccacatgataacagcactacaaataataaaggtagtaacacttaacattagagctgaggttgcatgcagcacactcgatagcaccaaacagtctttcctaaagtaaatcaacagcttg

SEQ ID NO: 47814 - DNA, 614 bp, Homo sapiens
tgtccttataagaaaataaaattcagacacagaaaggagaatgctatgtgaaaactgaataagagaatagggtaatgcatatacaagtcagcaacaccaaggattgctggtaagtacaagaaactasgagagaggcatgaaacagattatttttcagagcctccagaaggaaccaaccctgccaacaacttttagatatgtagcctccagactgggagagaataaatttctgttttagccaatttgtgatatttgttatagcatccacaggaaactaatacaaaacacacgtgtgcatatatgaggaagccagattttcatgaaggaacatcagattgcagttttgcagtgcaaacctggattcaaatattgcccccatgattacttgcagtgttattctgaacacttattctctctgacatccattttctcctgtgaaacttcagtaattgcattgtgaagaataaatacaataacatgtaatgaccagaacctgccacatgataacagcactacaaataataaaggtagtaacacttaacattagagctgaggttgcatgcagcacactcgatagcaccaaacagtctttcctaaagtaaatcaacagcttg

SEQ ID NO: 47815 - DNA, 614 bp, Homo sapiens
tgtccttataagaaaataaaattcagacacagaaaggagaatgctatgtgaaaactgaataagagaatagggtaatgcatatacaagtcagcaacaccaaggattgctggtaagtacaagaaactaggagagaggcatgaaacagattatttttcagagcctccagaaggaaccaaccctgccaacaacttttagatatgtagcctccagactgggagagaataaatttctgttttagccaatttgtgatatttgttatagcatccacaggaaactaatacaaaacacacgtgtgcatatatgaggaagccagattttcatgaaggaacatcagattgcagttttgcagtgcaaacctggaytcaaatattgcccccatgattacttgcagtgttattctgaacacttattctctctgacatccattttctcctgtgaaacttcagtaattgcattgtgaagaataaatacaataacatgtaatgaccagaacctgccacatgataacagcactacaaataataaaggtagtaacacttaacattagagctgaggttgcatgcagcacactcgatagcaccaaacagtctttcctaaagtaaatcaacagcttg

SEQ ID NO: 47816 - DNA, 614 bp, Homo sapiens
tgtccttataagaaaataaaattcagacacagaaaggagaatgctatgtgaaaactgaataagagaatagggtaatgcatatacaagtcagcaacaccaaggattgctggtaagtacaagaaactaggagagaggcatgaaacagattatttttcagagcctccagaaggaaccaaccctgccaacaacttttagatatgtagcctccagactgggagagaataaatttctgttttagccaatttgtgatatttgttatagcatccacaggaaactaatacaaaacacacgtgtgcatatatgaggaagccagattttcatgaaggaacatcagattgcagttttgcagtgcaaacctggattcaaatattgcccccatgattacttgcagtgwtattctgaacacttattctctctgacatccattttctcctgtgaaacttcagtaattgcattgtgaagaataaatacaataacatgtaatgaccagaacctgccacatgataacagcactacaaataataaaggtagtaacacttaacattagagctgaggttgcatgcagcacactcgatagcaccaaacagtctttcctaaagtaaatcaacagcttg

SEQ ID NO: 47817 - DNA, 614 bp, Homo sapiens
tgtccttataagaaaataaaattcagacacagaaaggagaatgctatgtgaaaactgaataagagaatagggtaatgcatatacaagtcagcaacaccaaggattgctggtaagtacaagaaactaggagagaggcatgaaacagattatttttcagagcctccagaaggaaccaaccctgccaacaacttttagatatgtagcctccagactgggagagaataaatttctgttttagccaatttgtgatatttgttatagcatccacaggaaactaatacaaaacacacgtgtgcatatatgaggaagccagattttcatgaaggaacatcagattgcagttttgcagtgcaaacctggattcaaatattgcccccatgattacttgcagtgttattctgaacacttattctctctgacatccattttctcctgtgaaacttcagtaattgcattrtgaagaataaatacaataacatgtaatgaccagaacctgccacatgataacagcactacaaataataaaggtagtaacacttaacattagagctgaggttgcatgcagcacactcgatagcaccaaacagtctttcctaaagtaaatcaacagcttg

SEQ ID NO: 47818 - DNA, 1396 bp, Homo sapiens
tttttttcaacaataggctttatttttttaagagcagttttagattcacagcaaaattggggtggaaggtacagagatttcctacataccacttgcctcccatatgcagagcctccctaactatcaacaccatgcaccagagtggtacaattgttctagtaatagatcctgacacatcatcatcacccaatgtatattaagtgaacactaatgtaaactgtgtacattctacaggttttgagaaatgcataatgacatgttcccatcattatagtatcatacagracagtttcactgccctagagatcctgtgcgctctgcccattcagccctttttcttcacccccctggccaccgctggtctttttactgtctccataattttaccttctcctgaatatcatatagttgaaatcatacactatgtagccttttcagattggtttttttacttaataataatcttaaaatctttagcttttaaaatattaagtagtgttgaaatacgttaagaaatatgaatatattaatatagaaatacaaaagcattaagtaatgtaaaataggatttcttgcccaagctgcaggcccactttattttggcctccaccgtaccactaaacatttccctattcatggaatcagtgatgagactaaggtcagggatggaacgaggattggtggtccaccgaggggcaagacaggcacaagatcccatattatacaggataagctgcttatgctgccatggtaacccatccccaaatttcggtggctcgaaacagaaatggtttatttgccactcaagctacatgtccactgattgcagtaactcaagggccagaaatgtagagcagccaccagctagaatctggctgttccctgtgtttgagggaaaaagagcttttgcagggtctggcactctcgatgaaaggtcctggtccagagtggcacacatggctcctcacagctcacagccactggtcatgtggcctgttccaccacacaggggctaacaagtacaatcctacccagaaagcatggggaactggagatatttctaagcagcactagtgaataagtttgtaaatcaaaatgtacacatgacatcaaaatagctgtaaaatatgagggtcagcattttttaaatattatgtgctgtcatcacttcttgagcaatctaattcagactcttaccttcctttaatgttcatcttaaataatgcaaaatgatatatgttgagatatatgttttcttaagtcagaaaaattttaagaaccaacgtcatagaacagttttgccacattttaggtatggaagaggtttcaggtactatatagttcaatccagctacttttagctattgtatacatttatatgtaagtatgtatgtac

SEQ ID NO: 47819 - DNA, 611 bp, Homo sapiens
catttgggacaggaattcataccacctttgtgagtaaaaaccttcaagccaaacattattttaaagtggtcccaggttggtaattcccttagacacttgtaaaaagcaaatcacctgtagcagcatgctctctagacccaagactaagamagttcctccagaattccaaggaatttgaatttgcagtttaagacatcacttaactgcaaaaataataaaatggcaaaaattggcaaaataataaaatgaagattcagataatgaattagaagactcaaaacataaaataaggttgttcagtatgtttctagaaataaaagaaggtattgaaagtatgagtaggaagtaagagactaccaacaataattcagtaggccagttaaacaataaaagagagagataaagatacaattagtgaattgaaagatggacacaaagaaattacccaaaatgcaacactgacagaaaaaaggttacaggaaatgcaaatgagactaagggatgtggaggatagaataaaccaaaagtctagcacatgcctactcagatttccagaaataaaaaatagagaaaatggttcagaggcaataactaaagaaataatgatggaa

SEQ ID NO: 47820 - DNA, 1271 bp, Homo sapiens
cccagagcaattctatgagctcagaggtttttaaacttaaacttaaactaagagggtcctctatgccgtttaatggttgatctcttaagaaataattacaagatacatggtccagcgttttgcttcaagcatgttttaacaataatgcacactgttagaaagctgttggtacctcactggagtcctgcagattacttcattgattctgctgaggaggtttttgtttctctgtttttccaggaggcaggaggttaatgtttcatagagtaatccctttactcttttgtgtggcaaccaagagagctagcaaaacctttgacaatattctctacattggggaaatatttagctttaatgtttaatattaattagctggtaatgaattcatatgtgtgacccagaatgtttttggctatgactgttctgctgaaacagacactggtgttccacaccttttccttactttggattcttggacaaaatgttatatcacttaaatgctgttttcaacaagatggccagctactatttttggaagaatctttgaatcaatgatgatccaagtaaccctggcactttagaataattttttggttgcccaaaactttaatagatttatttcttagattgttcattcatgcattcatttattcactaaatatatcataaattcctactatgagcatgtgtttgtatttgtgtaccaggtaccatggaggaccagagaataataaggatgagagtagagttgaggttggaggaggcaagatatcggaggcagaaccatcaagaagtttacaacttagttctaaaaatccaagctattgttgkaaagagttaatccttaaagaggcaaattcaattttttccttaaaaatacatagtttccaagcataaatgcaaaaaacataaagtttatgtatatgtagcaatcatctgggactcaccatgaaatgatctgataaaaacatcaaaatagtaaattttatctacaccactttctattgcccttcattattaatgttctagaaagagctctttatacagttgttttccaccaagttgctgcatatattttttctaacaaaacataacaatttctacttttcgaacagatataagtcttgttttgtaaatgtagttaagataggaattcagtgatttaaatttacactaataatgaataattaatgcagactggtctgactaaatacttctcagaaacatatctgtgtaaaaatttggccattgccatttactagcactgtgta

SEQ ID NO: 47821 - DNA, 593 bp, Homo sapiens
cccagtaagatggaatacctctagaaaagaaactaggcagggacctgatggtaaaggataaaaacacattccaacaggaattctacttttagggagagtatgagttattaagaaggatgtggaaggcacattttggctatgaaagctggtccgtggactcctctgccagtctcacatcagacaggatgcaaccatccccactccattccttcgacaacttcccagagcacattcaatcagtgtcccttaaattgaggacaatactatatttgggtttaatactgtgaggacagtcatttagttttcctgtggcaggatgataaatttcctgggaaccaaataaggattctcattgcattcttctgcttgatactatgaatgcagaagaataaagaagagggtgtgacaaatcatattttccaaaggtcgggtgtggggaggttccctaacrtttaaaagcaaccagttgttagcaaagtgatctttagaacagtattagcaagaatgtttgctctacatccactatagatattctctcctgcttagctaggcatgtaagtactgtgagcataatgtaaatactcagaacagaa

SEQ ID NO: 47822 - DNA, 575 bp, Homo sapiens
tggtgacacttagctcattaaatctttgaaattattaattttaagaatgtatataaaatgcttagcaaaatgtattacacagtaagcactccacaaatggtttctattattattatgtataacatgtttatagctattaatgatatttaaaataccaataatagtgtaattactacaatgcctactagtaatgaataataaatrttaattataattaattgttttctcaataaattttttattaatgagtaataagaggataatggaatgtcataatacattctatactacagtaaaatcaactagtcaaaacatagcacaaaatacatttaatgtaaaataatttagttaaaatttgcataccatgtgattgtggaaaatgtctaaaaggttaactttaataatctagaaaagttttatgtttcttatagttctgatctttagttattttccaatgacagaagttggagattaatcatttttcttctactcctaatgttttctcaattggaagattaaagagatgtcaacgaagtatcacctgattatttatcaagtgattgttacagagactg

SEQ ID NO: 47823 - DNA, 575 bp, Homo sapiens
tggtgacacttagctcattaaatctttgaaattattaattttaagaatgtatataaaatgcttagcaaaatgtattacacagtaagcactccacaaatggtttctattattattatgtataacatgtttatagctattaatgatatttaaaataccaataatagtgtaattactacaatgcctactagtaatgaataataaatattaattataattaattgttttctcaataaattttttattratgagtaataagaggataatggaatgtcataatacattctatactacagtaaaatcaactagtcaaaacatagcacaaaatacatttaatgtaaaataatttagttaaaatttgcataccatgtgattgtggaaaatgtctaaaaggttaactttaataatctagaaaagttttatgtttcttatagttctgatctttagttattttccaatgacagaagttggagattaatcatttttcttctactcctaatgttttctcaattggaagattaaagagatgtcaacgaagtatcacctgattatttatcaagtgattgttacagagactg

SEQ ID NO: 47824 - DNA, 531 bp, Homo sapiens
aattcctatcatcatctgcatttcatagactttttcaggaaacgaggctcagagaaggaagcacatctcccagggtcacacagcctggaagtgaaggagcagagatttaaacgcaggtattcgtgactaagcccacactcttattaaccatgacacacagtgactccaggtgtgtgtactcgtggatatgggagagatcatcaaaggcaaccctgggagggccgttccatttatgaaggtgagggtggggcagattctgactgttcaacacaaatggttttgcagtgtcttctaactgttgcctttggtactctaattaggaaaggaaaagttccttagcatccatagcccgatactgggtctgtccatcaaactatcttcttaggagatggcctcttctttgctggttaaactcaatttccccaaaagggcatctaaatagacactatgggacaaaagtattccacrgctgaagaatttttggaaatgcattaaggttaaatgtgatgattcctgcagagcatactgaca

SEQ ID NO: 47825 - DNA, 601 bp, Homo sapiens
ctgaatggtgagtgcttcaagaacagttaacatatagaatacatttatatcttcagatcctataatgttttgaatttgtaaaatggagttgaataagagagaagttgtggtggagcatggtatatgcttaccacatggttgtatatgtcaaatttttccaacttgtaactcacgtaactatataatattcaatacactttctcaaattacttgtatctccaggcaattatttgccccactggaccttgtgccctcagtggagaatcacgttacaagagagccttagtaacagggcctgggcttggaggggtatcccctgaacccattccaccccagtcacctcggaaaccagcagatcctctggaaagacagaagttatcattataaccaaaaagagcatctcattaaatcttctaactctttaaaaactgagcaatctgtyacaactaaccctaagtgatcagggaagtaaccattcctcttcagcatcagcaacagttccttggttttaagcaatccaaactgactctggatatttcagccataatccatgtaaacccaggaaggacagaaatcagcatagcccaagggatcactgtca

SEQ ID NO: 47826 - DNA, 607 bp, Homo sapiens
caatcttctgcaaatttartaaaacacaggttaaactaaaatgtatctagaaatataaatatggattgtttttcctcattcagaaatttatagtcccagcatcagtagtgcattaatgttaaacattccccttaaaccactaactgaatattgatgatctgtacctcttacttaaaaatccatgtgtagatataatttatataaaaatacaaaataccttcagatatgatagccagagatatgcattatatcacttaaaggaatatgagatgtcttggccgggcgcagtggttcatgtctttaatcccagcaccttgggaggctgaggtgggtggatcacttgagttcaggaactcaagaccagcctggtcaacatggtgaaactcagtctctactaaaaataccaaaaaaaaaaaaaaaaaaaaaaaaattagctgggcttgctgatgggtgcctgtaatcccagctactcaggaggctgaggcaggagaatcacttgaacctgggaggcgaaggttgtggtgagctgagatcgtgccattgcactccagcctgggcaacaagagcgaaactccgtctcaaaaaaaaaaaaaagatgtctgaaaac

SEQ ID NO: 47827 - DNA, 607 bp, Homo sapiens
caatcttctgcaaatttagtaaaacacaggttaaactaaaatgtatctagaaatataaatatggattgtttttcctcattcagaaatttatagtcccagcatcagtagtgcattaatgttaaacattccccttaaaccactaactgaatattgatgatctgtacctcttacttaaaaatccatgtgtagatataatttatataaaaatacaaaataccttcagatatgatagccagagatatgcattatatcacttaaaggaatatgagatgtcttggccrggcgcagtggttcatgtctttaatcccagcaccttgggaggctgaggtgggtggatcacttgagttcaggaactcaagaccagcctggtcaacatggtgaaactcagtctctactaaaaataccaaaaaaaaaaaaaaaaaaaaaaaaattagctgggcttgctgatgggtgcctgtaatcccagctactcaggaggctgaggcaggagaatcacttgaacctgggaggcgaaggttgtggtgagctgagatcgtgccattgcactccagcctgggcaacaagagcgaaactccgtctcaaaaaaaaaaaaaagatgtctgaaaac

SEQ ID NO: 47828 - DNA, 607 bp, Homo sapiens
caatcttctgcaaatttagtaaaacacaggttaaactaaaatgtatctagaaatataaatatggattgtttttcctcattcagaaatttatagtcccagcatcagtagtgcattaatgttaaacattccccttaaaccactaactgaatattgatgatctgtacctcttacttaaaaatccatgtgtagatataatttatataaaaatacaaaataccttcagatatgatagccagagatatgcattatatcacttaaaggaatatgagatgtcttggccgggygcagtggttcatgtctttaatcccagcaccttgggaggctgaggtgggtggatcacttgagttcaggaactcaagaccagcctggtcaacatggtgaaactcagtctctactaaaaataccaaaaaaaaaaaaaaaaaaaaaaaaattagctgggcttgctgatgggtgcctgtaatcccagctactcaggaggctgaggcaggagaatcacttgaacctgggaggcgaaggttgtggtgagctgagatcgtgccattgcactccagcctgggcaacaagagcgaaactccgtctcaaaaaaaaaaaaaagatgtctgaaaac

SEQ ID NO: 47829 - DNA, 608 bp, Homo sapiens
ttccaaatctttaagaaaaactgccttgaatttcttagtttgaatgatgggaaatatttttgccacatcatgaaagaaataataaaatcctctggagggccttggctgcctcacctggtctctgttccatcattcttggatggtagcttgggattcattttctatatgtcttgaaaaatatttgcctatgctttagcctgagtggcaatagtccccccaaatcatgtcaaacccagatcctttgtcaattaaaggatcacctcgatcacaatactttccttattcattgtaggtagaagtcgtctttccttgacctcttctaatctgtggctcaccttcacttataatacttcttgcacattatctttcatacctattttggtgtgttccctattttctttactacatatctttcttaagagtggggtctatatcttaagtgcactgtcacataaatgtgaacattcaacatagtcttgttttcctggaatgcatttctaattgaaggtgggggtagagaaaataaaaaatgaagaarcaaataaaataataagataaacatattaacactgtaatcattcttaaaagatataaaacagtcatgttgt

SEQ ID NO: 47830 - DNA, 606 bp, Homo sapiens
catttcctttctgatatacattctaactatacttatttcatgtttgaatgacctcgtattctccttcctgacattttgtttctgaaacgtgggctcattatagcatcctgcccgtcttctttgaccattgctgtctcttcaaattgaagtgcgtagtcatagcaaacccagtaagaggtctagctagggaacaattttctaatttaagattgtcactgcatatggtttagttttcccatggttttctgattgaggttgttacaagggtattataaaagagggaagaggaaagcttttccccaaaagtgatatcatgaagtatataaacttgacctacaatgtgaaaatttagtgtattttcttcaatataaaatgctacttggcacagtggatgtttcccagtgtcattttgctatagaatagttgcctatttgtcagaaactwtttgtcagttttctcagtatctgcaggtggtaagtatgcttcagaattcaggcaaggaaaattgtgtgctcacagggattcgtgcaagtgcttgacaaaaaatatgatcttatttctgaattcttccacagcttcaatgtgcataatcagggtatttgctag

SEQ ID NO: 47831 - DNA, 611 bp, Homo sapiens
cattatctccttcaatctttacattctgaatagtaggtgctattatgatccccatcttcaagttaaggaaacttagtcactctctcaagttgtacagctaaaacacatgataaagttgaaatattaacaaataatttgtctcccacacctgtaccttcaatttttgttactcaatttgtggcctatggaaaccagtccctctatcctcatacccccataactcaatcagggagataaattgaaatgaaaaaaaaawatataaaactgagctagtgtcaagtattttgaatctaaagaaagaggttggtgttgtggttattctaatttaaggcagcctcaggaaggccttaataaaataatacataggcttattttatttttgcttattgtctaaaaggaatacaaagtaatattcaaattagcaggagaaatttttgctcaatcaagagtagattattatattaattccatgaaaaaataatgctcaacatgagagggtttatatgcctgttgggaaagctagtgacaaaatcgacaaaatcagctgtggttcttgttagggggaaggaagaactgaaatgaggacatacaccttcactctctgaaagaat

SEQ ID NO: 47832 - DNA, 599 bp, Homo sapiens
ttatatagcagcacaattcgtaattacaaaaatgtggaaccaacccaaatgcccatcaatcaacgagtggataaagaaactgtgatatatatatatctaatatatatatctatatatgagatrtatgatacatataaatatgtgtgtgtgtatatatatatagtctcacttatgccctttcttgattttattgcaaatgttttaggagaaagaggaaatataattgtgttattttttcattattctattatcaaatatttattgaacacttatgaatccggcatatctaacaccagcaactaggaactgctctcaaggtgtgcactaggagtcggaagatagggtcatgtttgccctctatagtttttaaaatgttaaggaaataaaaattagttgacacattaaaatatagggagactaaaatattttagaaaagatttgaaggatacatggaataaatatttaaagtcaagtttagcagaggcatttttgcctctatttttagatgtactttttctcaaagttgttcacatgttgtgagctcctcattgcccaagggagtcagacactatatttttcagtgtcatcctgtgattttt

SEQ ID NO: 47833 - DNA, 599 bp, Homo sapiens
ttatatagcagcacaattcgtaattacaaaaatgtggaaccaacccaaatgcccatcaatcaacgagtggataaagaaactgtgatatatatatatctaatatatatatctatatatgagatgtatgatacatataaatatgtgtgtgtgtatatatatatagtctcacttatgccctttcttgattttattgcaaatgttttaggagaaagaggaaatataattgtgttattttttcattattctattatcaaatatttattgaacacttatgaatcyggcatatctaacaccagcaactaggaactgctctcaaggtgtgcactaggagtcggaagatagggtcatgtttgccctctatagtttttaaaatgttaaggaaataaaaattagttgacacattaaaatatagggagactaaaatattttagaaaagatttgaaggatacatggaataaatatttaaagtcaagtttagcagaggcatttttgcctctatttttagatgtactttttctcaaagttgttcacatgttgtgagctcctcattgcccaagggagtcagacactatatttttcagtgtcatcctgtgattttt

SEQ ID NO: 47834 - DNA, 627 bp, Homo sapiens
tgggcacatgtggtccactgattattctacttttgcagaaattccataataaaaagttgtaaagaaatattttttgaaggcgttggttcatcagttatcacttttgttctttaccttccacataatcacaaaactcaagaaaacgcttactaaaagaatagggaaaaccaaaaatatttgtcaatggttgtcctcattaaaggcaacatttcaaataaatgagcaaacaaaagtaaaacaagaccaggtgcggtggctcacgcctgtaatctcagcactttgggaggccaaggcgggtggatcacatgaggccagaagttcaagaccagcccggccaacatggcaaaaccccgtctctactaaaagtacaaaaattagctgagtgtggtggcaggcgcctgtagtccgagctactcaggtgactgaggcacgacaatccttgaacccaggaaagggaggstgcagtaagccgagattgcaccactgcactccagcctgagcaacagagcgagaccctgtctcaaaaaaaggaaaagaaatatctaagattgccaatgaggggaggtaaacagtcaaaatgttacccaaacaagagacaggtttacaaggctgagctgctcatggtcc

SEQ ID NO: 47835 - DNA, 577 bp, Homo sapiens
tggccaacatggcaaaaccccgtctctactaaaaatacaaaaattagctgggtgtggtggcagatgcctgtaatcccagctactcgggaagctgaggcaggataatcacttgaacccgggaggcggaggttgcagtgagctgagatgacaccactgcactccagcctgggcgacaagagtgagactccgtctcaaaaaaacaaaaaaaagagaagagacaggattgagccccatgtgtgagagccaaggatagaggagatggcggcctcaaggctgccatgcagtgggcaacagtgygctgtgactgtgtggatccaggggacggaatcttccacccccagctacgctggaccatgccatccgaagccagggagaattcggccccggcaacctggcagagggcagctgtctcctgctgatgacggacagccacagagtacaccccacccaccctgtgggcgcgcatggccagcggcagcagctctgtcagatttcatatccgcagtcctccattgcgttgcactcgtgactcaatgttcaaaagctttcggccagcttcattctgccctctctggga

SEQ ID NO: 47836 - DNA, 611 bp, Homo sapiens
gcacaggttgtccactcgcaaatgttttcgtgtcacctgacactcaccttctcttctcgccagtcttgcaggccacaccttactcctaccacatcttgccctaggttttccttttcttgcactgaaagttctcctaacttatgccatcctactggggaaaaaaataagtttctttttctccctgctacataactacattacaacacttaataatcccattcaggtccaaaatgcacatctttctctttgcaaatagttactatactttctttaaacattcttattacttattttgagaatgtttctattttctcagttttagcatttcatgagtctttgacagytgggtctcagagagaggccagttaggaattggacaatcgtcttaagcaggctctgggtttcctgtacttttctgtgcagtgcctgtgctgattaaactatgacctgcagtttttctttttacggagttcatagtggtcatttgaaatatgatgtggcattcagaaaaattactctttctcctgcagtttctgtgaatatattttacactgcagcaattgtcatacaaggcatatagggatttattccacaatttatctacaatctga

SEQ ID NO: 47837 - DNA, 577 bp, Homo sapiens
ttttatacgaatttgaatttggtggatttaaaatagtgaaataaaaacataagcctcactatatggcaaaacttgaaataatgtgaaatcccactttatatttattcctaaatgaaaacgcatcttgagtgggtatcatacactaatcactaatgggacgtggagaattttttttaaaaggagaagtccaggatgattcccacaattctaatttggatgacaagtgatgacaccatttaccaagaaagcccaggaatacagaggggtggggagtagtcccataagagaggtggggaagtaacggcttcaagctgaacaygctagggggtagatgctatgaaatattccagtggagttacccagcaggcattgttaaatgacctgggtcttacaagagagtgatggctggagatacacagatttggcaatcgtgagtaaacagcatataactataacctaaagcatgtatttgaaatcacccagggagtgaagatggaatgagaagaacagagaaacaatgacagagtccttacaaacaccatgatacaagaaggcaatggggatatgttatcctaaa

SEQ ID NO: 47838 - DNA, 637 bp, Homo sapiens
gcatgagattatttagggaataaatgaagagagcaatttctgggttgaagggtatatgtatgttcaacattacrggataatgccaaaatattttccaaaatggctgtgccaatgctcacatccaccagcagtgatgaacatttcaattactccacatctctgcaacacttagcactgtcactctggtggggcatgtgtttcttttccttctatgttttccttaaatattaatatattattttcctcaaaatacacagcgatgatcgctggcttcctttaaaatggcagaattaattattgagcacctttctcttaagtttatgttgccctacagaggaaaaagaaaaggacagatgattgcagtgatggaaagcctgggtgcacgtccaggatcagcttggctgtcgtcaacggtcgcagattgcagggatggcaagcctgggtgcacgtccaggatcagcttggctattgtcaatggtcacagcccgttccctctgctttttcaggtctaggatctaataaaatgacatcaggtcacaattttaaaaaacacagtaatgtgataaaatgttggccagctgtaagataggtaggaaaagggaacaaggtggagcatttattcccagaaacagaattt

SEQ ID NO: 47839 - DNA, 470 bp, Homo sapiens
agcccacatttaccgatctcacacctccccactccacctgaagcttcaagctgcttctaaacagcgaggatatcaaccccagagctctcaaagcgaagtcttgactaactcaaactttgcctttcctttgagaagttagaagcccttcctcaatgaacagaatttgtctttatagtgtatttgtgaaacggaatgtgatgatgcatratccccattttatagttgagaaagtcaagtcgtcaacaagccgagtcactcttgggagtcttggattttacccaatgctctgtctccactaggcgatgctgtcttgtcacatgttcaaatctagtgcctcaaaagaaaacacacttaaaagaagaaagcaccgaggcagaggaaacatcgggaggtgttctggaatacagcatgatacgttttaagcagattaggaggattctctgctaatgaggggaattccaggcgtgccc

SEQ ID NO: 47840 - DNA, 578 bp, Homo sapiens
aaagcacagaacacagggctttctaaaggctacagttctctaaaagttgaattgaatggcatcccatatttaaatgctcactgctacattaagaaattaagaaataaycattttcattttagagaagtaagtgcaaccctaagacattaatttgctaattattcttcctcatggagataaaatcttataatttatcttatctcatatgctacatagacatttccaactttcatatattattaaccttaacctctgtgatattcaggtaacattgaaatagaaaaatgcaacaatgtcacacacaaacctttctacataatatggtgaaaggaatgaaatataatgagttacttttacttggaaaaacataatgttactctgctttgaatcaagggtgttaacatttttagtgttagcaataatttgttttctttcaatcatacaattattacatttattttccttagtaaaatggaaaaacatcccaattgccaaatactaatgacgcattcttagggtctctatgtgtaatcttattaggtttctgttttcaactggaaagtttatgaagccagtat

SEQ ID NO: 47841 - DNA, 626 bp, Homo sapiens
tttttctgtcttctcttgaagacaatcatatgtgaaaattgctttattctaaatgttacctgaagtttataaaacccacatgttgctgccgcaccccacctaatcttgccttactttgtctcgtaggtagaactcctgatacccctagcttctacctctgaaaaccctttgctctaaaataatgatttcttaatcacagctttgttatttataatgggaaaaataatagcatgtcagtatacattatgaatactattgatttcagtatgccaaattgattattcttgtttgcacgtctcagttatgcaaaggattgttasaccccagaattggaataaagagaaatgggtccgctgaaatttccccttttcctttctttccagtgtagcttatctcccacaaaaatctagccaaatttcatgcctgccagaatgtgtggttacagtggtggcaggctgtgatttcaaataagcaaaatgtgttaacaacttaagttagctgtcagctatgtgtgtctgaaccaggaacctaatgaaaacggcttatatctctatcctactgtgatgagcatcttgagtcatcctcttcctccatcagtaattcccttttcctgtttccttctccta

SEQ ID NO: 47842 - DNA, 589 bp, Homo sapiens
atatttaggagataacagtgcattaagggtttttttttttatataatacatacatatcacccctttgcagtgatagcatagaagagtaagtatggccttaggtacaacacgttttttaaaaaccctaaaacaatgaactttgttatatttgtgactatttttgaggattatggggacctaaactgctatgttttatacaaaatattacttgtacttgaatccttcaagcctctgttggtctaactgccatttcactgcctttctctactccctaggaagacatcatcatagagttttggatttgtaatttccatagaattcttccttcattgtatagtttctgctgcataaatttactcaaaagcacatcaagttgcaygtcttattttccaactatttttttcttttcttttacctttagcagagaaaacagcatcattttagaggcatagagaacaagtagcagttgcttcaccaggaatgaggcagcacacataggtaaatgtcatccctttccattcttaagagtccattatgttcgtaagagcaaaagagtagtgcagaaggccaaaattctaagtactaaagt

SEQ ID NO: 47843 - DNA, 532 bp, Homo sapiens
gaaagaggagaaaagagccagtaccagtgcagggataggaactcagtcatgtgtggaatggagatttctggctatgtcctggaggatattgtatactgggagcaactgacgaaatccccttacagtttatatttcagttctgccagcaaaagtcattatatacawggaaaacagggtagttctgtgaatgtataagcgtaagaactatttaacaatgctgcttataaagtattaaggggcatagtattttggtttacatatctatctgggtttgtcttcttttattaaaggtaacctccttgagagcaagaacagaccttctattttccttgcaatttcctacaaccacttaggagagtatgttctgcctacaaggaccacccagttgttgttaaaaggctgctgtgaacatttcaaagatacgtcaatgccttttgtgatattgaatcactggctttctctaaggtagactgacatagaaacccttccataatattatttacagaacagatttggggatagtaactaccca

SEQ ID NO: 47844 - DNA, 610 bp, Homo sapiens
atgctataccttggattgccaacttgccctcactgaagccagtttctctggttagaatagttgcccaaacccatgcctaatactctagtaaacaaggttctacctgggcttaggttaacttttgctcctttgggccctgtgttctaccagcattccatttatctgaaactctccctcaccttaagaacttatctgttctttaatgatttactgctgcttcctgggctcgaaagaacccagttcaggagtttctgttttagtttgagatcttataggcctgtctcatcaggttggtgtcagcccagctaggattaggcagaattgggtgggggctgtagtgcacttttggcacagcatgtacctgtctgactaattctctgtcttttctttcctgttgcaattcatgggtcttagcatcttctgaatggtgtttagtaggtcatcctgttgatttcctgctagggagtagcatactctggctctgtaccactggccaagggacttaaggatagatgaagggctgcagttttgttaaatggaacaatatgaagagatggcattgttwaaaaaaaaaaaaaaaggcttggcagcagggcccatttgaatggtt

SEQ ID NO: 47845 - DNA, 595 bp, Homo sapiens
  misc_feature (1)...(595): n = A,T,C or G
tnnnnnnnnnnnnnnnnnnnnnnnnnnnnnnnnnnnnnnnnnnnnnnnnnnnnnnnnnnnnnnnnnnnnnnnnnnnnnnnnnnnnnnnnnnnnnnnnnnnncccctgttggctctgtgctgtgccgtcagacattctcttctgtgaattgtttgctgtccctatcccagagtgaggctggctaggctgttatgctcatcarcttagccaggactgaccccgactcaaccactgccccgctatgggcttttcacaattgatgtgatgatgtcatgctctcctgggcgggtactaagcagcgagcagcaagggatggaaattcatgatgaatgggtctgttcttctctttctactcgtgaggctcctcgtctctcctccccgcttgtgggtggtgtgttgggaggcatgaggcatggaatttggcatgacttcactgcactcacacctggtgcctcgtggctttgaggaaatttgtggggtcctctgacagagcaggcacctctgttctggcttcctgtggttgttgccttgggggtggccatggcacttctctgtggccatggtggactatccttaaaaaacaccatgctgccctt

SEQ ID NO: 47846 - DNA, 595 bp, Homo sapiens
  misc_feature (1)...(595): n = A,T,C or G
tnnnnnnnnnnnnnnnnnnnnnnnnnnnnnnnnnnnnnnnnnnnnnnnnnnnnnnnnnnnnnnnnnnnnnnnnnnnnnnnnnnnnnnnnnnnnnnnnnnnncccctgttggctctgtgctgtgccgtcagacattctcttctgtgaattgtttgctgtccctatcccagagtgaggctggctaggctgttatgctcatcagcttagccaggactgaccccgactcaaccactgccccgctatgggcttttcacaattgatgtgatgatgtcatgctctcctgggcgggtactaagcagcgagcagcaagggatggaaattcatgatgaatgggtctgttcttctctttctactcgtgaggctcctcgtctctcctccccrcttgtgggtggtgtgttgggaggcatgaggcatggaatttggcatgacttcactgcactcacacctggtgcctcgtggctttgaggaaatttgtggggtcctctgacagagcaggcacctctgttctggcttcctgtggttgttgccttgggggtggccatggcacttctctgtggccatggtggactatccttaaaaaacaccatgctgccctt

SEQ ID NO: 47847 - DNA, 543 bp, Homo sapiens
tatcaccatttaactaagctcccaattatcttcaattattctgtcttctccaaattccaacattttcttcacaaggtaaacagaaatgttaaatggtttatgataaaaataaataattttgcatttttttcacatctctgttggtggaataaatgttaaaatcactccagagacagggtaatgctctggggttttaaatttggagaggagtggaaactctagtttatttcatttggctcttccttaatagatttaactccttggatcagaaagtgaatatggtgatttttccagtttctaaaatatatttattccaattgtccactcaagaaaatagtcccagtatgtatttccttactcaataaagttctactgagatatacatgggcaaacatatttgtaacctgaaacccataagctaccaccatgataatggtgccattccacattctattcctgaatrtaacatggaaatgtgtacgattattcctgatgaattgagattagcttactttaccaagtatacagttacctggtaaatgg

SEQ ID NO: 47848 - DNA, 580 bp, Homo sapiens
tgagacattttggcagggcagttcagctaactttaagtcgtatttgaaggcctagcaaataatatttaggattgatggctgtgcatatgctgacttaaattacaatttgtagctaggtgttctttaaaaaaatgtgtttacttttgatacttttgtgacattttgtttttctttttttgagaaggagttttgcttttggtgcccaggctggagtgcaatggtagaatctcgatcttggctcamtgcaacctctgcctcccaagttcaagcaattctcctgcctcagcctcccaagtagctgagattacaggcatgcaccaccacgcctggctaattttgtatttttagtagagacggggtttctccacgttggtcaggctggtctcaaactcccgacctcaggcgatccgtctgcctcagcctaccaaggtgctgggcctacaagcgtgagccaccatgcctggcctgagattttgtttttcttaatgacacctgtagcctactgtgtgtctacttgtcctatccttatatgaaattattaactctgtagagataggtattgagcgtattccctctgcag

SEQ ID NO: 47849 - DNA, 580 bp, Homo sapiens
tgagacattttggcagggcagttcagctaactttaagtcgtatttgaaggcctagcaaataatatttaggattgatggctgtgcatatgctgacttaaattacaatttgtagctaggtgttctttaaaaaaatgtgtttacttttgatacttttgtgacattttgtttttctttttttgagaaggagttttgcttttggtgcccaggctggagtgcaatggtagaatctcgatcttggctcaatgcaacctctgcctcccaagttcaagcaattctcctgcctcagcctcccaagtagctgagattacaggcatgcaccaccacgcctggctaattttgtatttttagtagagacggggtttctccacgttggtcaggctggtctcaaactcccgacctcaggcgatccgtctgcctcagcctmccaaggtgctgggcctacaagcgtgagccaccatgcctggcctgagattttgtttttcttaatgacacctgtagcctactgtgtgtctacttgtcctatccttatatgaaattattaactctgtagagataggtattgagcgtattccctctgcag

SEQ ID NO: 47850 - DNA, 580 bp, Homo sapiens
tgagacattttggcagggcagttcagctaactttaagtcgtatttgaaggcctagcaaataatatttaggattgatggctgtgcatatgctgacttaaattacaatttgtagctaggtgttctttaaaaaaatgtgtttacttttgatacttttgtgacattttgtttttctttttttgagaaggagttttgcttttggtgcccaggctggagtgcaatggtagaatctcgatcttggctcaatgcaacctctgcctcccaagttcaagcaattctcctgcctcagcctcccaagtagctgagattacaggcatgcaccaccacgcctggctaattttgtatttttagtagagacggggtttctccacgttggtcaggctggtctcaaactcccgacctcaggcgatccgtctgcctcagcctaccaaggtgctgggcctacaagcgtgagccaccatgcctggcctgagattttgtttttcttaatgacacctgtagcctactgtgtgtctacttgtcctatccttatatgaaattattaactctgtagagataggtattgagcktattccctctgcag

SEQ ID NO: 47851 - DNA, 642 bp, Homo sapiens
accaactggaggtgaaatcatctctgtgttgtagaggaaactaagctaccctggggaggagagctcttggggtgccctcccccatctcaccaacctgccccaccaccctagtcttctttgggggaggagtaagaaaaggartttttaaaaattgaaatagctctctctatacttttgtcttctgaggagggggaattttctttcccttcatggaaaagttagacatttggtaagtttttctgatagtacccagaacagaaagaaataagtacatttatagttggccctctatattcgtgggttctgattttgcagattcaattagtcatagatggaaaatattcagaacaaaaaggatgatgtgtctgtactgaacatgcacagacatttttttcttgtaattatttcctaaacaatataatacaacaactacttacatataaatttactgtgtattaggtgttataagtaatccagaaatgacttaaattatacaggaggatgtgtgcaaatatatttatatcagaaacttgagtaatcacagattttggtatccacaggggtcttggaaccaatccccacaggtaccaaaacacagctgtattcaaaagttggctcagctaagggacataaaagcatgca

SEQ ID NO: 47852 - DNA, 642 bp, Homo sapiens
accaactggaggtgaaatcatctctgtgttgtagaggaaactaagctaccctggggaggagagctcttggggtgccctcccccatctcaccaacctgccccaccaccctagtcttctttgggggaggagtaagaaaaggagtttttaaaaattgaaatagctctctctatacttttgtcttctgaggagggggaattttctttcccttcatggaaaagttagacatttggtaagtttttctgatagtacccagaacagaaagaaataagtacatttatagttggccctctatattcgtgggttctgattttgcagattcarttagtcatagatggaaaatattcagaacaaaaaggatgatgtgtctgtactgaacatgcacagacatttttttcttgtaattatttcctaaacaatataatacaacaactacttacatataaatttactgtgtattaggtgttataagtaatccagaaatgacttaaattatacaggaggatgtgtgcaaatatatttatatcagaaacttgagtaatcacagattttggtatccacaggggtcttggaaccaatccccacaggtaccaaaacacagctgtattcaaaagttggctcagctaagggacataaaagcatgca

SEQ ID NO: 47853 - DNA, 642 bp, Homo sapiens
accaactggaggtgaaatcatctctgtgttgtagaggaaactaagctaccctggggaggagagctcttggggtgccctcccccatctcaccaacctgccccaccaccctagtcttctttgggggaggagtaagaaaaggagtttttaaaaattgaaatagctctctctatacttttgtcttctgaggagggggaattttctttcccttcatggaaaagttagacatttggtaagtttttctgatagtacccagaacagaaagaaataagtacatttatagttggccctctatattcgtgggttctgattttgcagattcaattagtcatrgatggaaaatattcagaacaaaaaggatgatgtgtctgtactgaacatgcacagacatttttttcttgtaattatttcctaaacaatataatacaacaactacttacatataaatttactgtgtattaggtgttataagtaatccagaaatgacttaaattatacaggaggatgtgtgcaaatatatttatatcagaaacttgagtaatcacagattttggtatccacaggggtcttggaaccaatccccacaggtaccaaaacacagctgtattcaaaagttggctcagctaagggacataaaagcatgca

SEQ ID NO: 47854 - DNA, 642 bp, Homo sapiens
accaactggaggtgaaatcatctctgtgttgtagaggaaactaagctaccctggggaggagagctcttggggtgccctcccccatctcaccaacctgccccaccaccctagtcttctttgggggaggagtaagaaaaggagtttttaaaaattgaaatagctctctctatacttttgtcttctgaggagggggaattttctttcccttcatggaaaagttagacatttggtaagtttttctgatagtacccagaacagaaagaaataagtacatttatagttggccctctatattcgtgggttctgattttgcagattcaattagtcatagatggaaaatattcagaacaaaaaggatgatgtgtctgtactgaacatgcacagacatttttttcttgtaattatttcctaaacaatataatacaacaactacttacatatraatttactgtgtattaggtgttataagtaatccagaaatgacttaaattatacaggaggatgtgtgcaaatatatttatatcagaaacttgagtaatcacagattttggtatccacaggggtcttggaaccaatccccacaggtaccaaaacacagctgtattcaaaagttggctcagctaagggacataaaagcatgca

SEQ ID NO: 47855 - DNA, 604 bp, Homo sapiens
gaggaacagctatatgactctctcatgtacatgagtttgaagcaccttcctatttattctctggcactattaggtgtgcttggggggaaatggttgaaagtgaagcataaagtcaagagtagaaaatactggaaatgctcaacagagtgggactatcttctctagagaaaacatcctgtcctgcacagagatctggaccagcaaggacataatcacagctgtggacagagtggcaacaaattgtgcaggtcctattttcaacagtggcaccctgtggcagacagaagtaaaggcaggcaaatggtgaggaacgatcttatttttcatctttctctactttgattttaaaagtaggactgggctttttgaccaagaagagacaaggagaggaaagccaagtgccctgctaattagatagggaggtaactcaagtggttttggtaagtattgcaaaaagaggacatcgtatttcctactctgtactatggtgcatacggrtttcatctgttctctcagcagtcacaaaaccagattgttaaactcagtgccaatgatttcaagacatttctctcaaagaatccttctgccttttggacatggcgcc

SEQ ID NO: 47856 - DNA, 1791 bp, Homo sapiens
  misc_feature (1)...(1791): n = A,T,C or G
tttagtttgactacattatcctttaaatattaattatgaaatgactagtgtttaaaaagaaccacaaaatccaagttagaagatcatgtggttcagaagacccaaatgcagcctcattaggtaacagctttgggtatatcgcatatactaggttggctaacactaccagcaatgaggggcacaaagaagtgaatgtctggatttacagtcaacactctcccatcttctgtccccatccccctcaaccctatacgtaccctgatctgaagatactaacatctgtatatcactccacaattcacatatgcattttttytattttacaagaaaatagagttttttttttttttttgagacggagtttcgctcttgttgccgaggctggagtgcagtggcaggatctcagctcactgcaacctctgcctcccaggttcgagagattctcctgcctcagcctcctgagtagctaggattataggtgcccaccacacctggctaattttttttctatatttttagtagagacggtgtttcccatgttggccaggctggtcttgaactcttgacctcaggtgatccacctgcctcggcctcccaaagggctaggattacaggcatgagccaccgcagctggctgaataattttctgtaacttatttactctgcctagtctcacctcttaatgacaatctagtctcatttcaaagatctctgtcccagtatttgatggtttggaaatatttcctaaaggctaagctaaaaatcaggctttaaacacatttcttcttgtcagggcctcantagagactcagaataagtactatcattggnatattatttgnataagactcttccactataagactgtttttcagatctatttttcagtccttaattctctcttttaaagctctttttaaaactagctccttaattaggaaatcaatgccttgaatcaaatcttaagttgaccaaattctacttaagactgtttaggaatcctatcttattaaggaagttttccatgatcagaggactgggttagatgtcgctatagcactgatagcacagttttttgtttacttttctatctttcccactggactgtaagtttctctagggtaggagctgtgtttttcactgctttgtccctgggtctagcatagtatctagcatagtatctgttaagcactcaatgaacttttctgaatcaatgaatgaatgaactaatggggttaactcagcactactagtctttagattttctgtgctgaacaatatgaataatcaatgattttatacttaattttggtgtaatgtttttgtacagcactaaccttgatcatgttttggatgtgttgtttggatttttctcagcacattcaaagggtgggagatatagcccataagctaaatttaagttcaccttaatttaataataaatcttcacataaatacaataaaattaagatgatggtaacaggatatattcttatctagacagtaatagaaccaggctcttataaatatttgatgttttggaaaatcactcagtagtttaaacagtgctattctgtgtgcatcttcaataattagttgaatgcctcatacattccaagcactgtcctaggcactgaagacacagtaggaaacaaaatagacataggacttctcttccatgagcgtatactgtaatggggaaggtagggaatcaaatagctggatgcaatagaatagagtggccactgtctctggactcaaaccagggcaccaatcctggctcctttgcat

SEQ ID NO: 47857 - DNA, 1791 bp, Homo sapiens
  misc_feature (1)...(1791): n = A,T,C or G
tttagtttgactacattatcctttaaatattaattatgaaatgactagtgtttaaaaagaaccacaaaatccaagttagaagatcatgtggttcagaagacccaaatgcagcctcattaggtaacagctttgggtatatcgcatatactaggttggctaacactaccagcaatgaggggcacaaagaagtgaatgtctggatttacagtcaacactctcccatcttctgtccccatccccctcaaccctatacgtaccctgatctgaagatactaacatctgtatatcactccacaattcacatatgcattttttctattttacaagaaaatagagttttttttttttttttgagacggagtttcgctcttgttgccgaggctggagtgcagtggcaggatctcagctcactgcaacctctgcctcccaggttcragagattctcctgcctcagcctcctgagtagctaggattataggtgcccaccacacctggctaattttttttctatatttttagtagagacggtgtttcccatgttggccaggctggtcttgaactcttgacctcaggtgatccacctgcctcggcctcccaaagggctaggattacaggcatgagccaccgcagctggctgaataattttctgtaacttatttactctgcctagtctcacctcttaatgacaatctagtctcatttcaaagatctctgtcccagtatttgatggtttggaaatatttcctaaaggctaagctaaaaatcaggctttaaacacatttcttcttgtcagggcctcantagagactcagaataagtactatcattggnatattatttgnataagactcttccactataagactgtttttcagatctatttttcagtccttaattctctcttttaaagctctttttaaaactagctccttaattaggaaatcaatgccttgaatcaaatcttaagttgaccaaattctacttaagactgtttaggaatcctatcttattaaggaagttttccatgatcagaggactgggttagatgtcgctatagcactgatagcacagttttttgtttacttttctatctttcccactggactgtaagtttctctagggtaggagctgtgtttttcactgctttgtccctgggtctagcatagtatctagcatagtatctgttaagcactcaatgaacttttctgaatcaatgaatgaatgaactaatggggttaactcagcactactagtctttagattttctgtgctgaacaatatgaataatcaatgattttatacttaattttggtgtaatgtttttgtacagcactaaccttgatcatgttttggatgtgttgtttggatttttctcagcacattcaaagggtgggagatatagcccataagctaaatttaagttcaccttaatttaataataaatcttcacataaatacaataaaattaagatgatggtaacaggatatattcttatctagacagtaatagaaccaggctcttataaatatttgatgttttggaaaatcactcagtagtttaaacagtgctattctgtgtgcatcttcaataattagttgaatgcctcatacattccaagcactgtcctaggcactgaagacacagtaggaaacaaaatagacataggacttctcttccatgagcgtatactgtaatggggaaggtagggaatcaaatagctggatgcaatagaatagagtggccactgtctctggactcaaaccagggcaccaatcctggctcctttgcat

SEQ ID NO: 47858 - DNA, 1299 bp, Homo sapiens
cagaactatagagaaaagaaaacataatttttttttttttttttttgagatggagtcttgctctgtcgccgaggctggagtgcagtggcacaattttggctcactgcaacctctgcctcccaggttcaagttattctcctgccttagcctcccaggtagctgagattacaggtgcccaccaccacacccagctaattttttgcatttttagtagaaacagggtttcgccatgttggccaggctggtctcaaactcctgatctcaagtgatcctccctccttggcttcaaaaagtgctggaattacagacataagccaccacacccagcccagaataatattttttaaagaaacattttgtgtatttatttctttatttttattttattttattttatttatttattattattattttttttttgagactgagtctcactctgtcacctaggctggaatgcaacgacatgattgtagctcaatacagcctcgacatcttgggcttaagcaatcctttcacctcagcctcctgagtagctgagacgacaagtgtgtgccaccacagttggctaatttttttttttttttttttttgtagggacaggggcttcactctgttgtccaggctggtcttgaactcttgggctcaagtgatcctcctgccccaacctctcaaagtgctaggattacatgcatgagccaccgcagccagctctaaagaaacattttggatcaagactcatattattcacaagaactatccctctctccagcacattttcacaattttctccaaattccagtcttctttcctgctatttcccatcttccattgcaagacaaggatgagaaaagcctggtggaatcagtgaccttctccccaatttggagatattttcctcagatttggcagctagtgatttctgccccacccactcccactcttgttcatacatctgaasgatgcaggattttcctacatctctggaccaaagggattgcttggctccaccctcatggcctataaggacaccaaaataatgtgaatgccacattttatgtaaaggaaagataaaacttactatataacattaagggagggcaagttataactagatagcccagtcttctagataagtaagggcacaagggagcttctctggtctgggcctgactccttaagaacaaagggagagacagtctcactggcacagaattggcagtgtttgttcagtgaattaattttaacactaaaattccaattgattgtttcccttaagtctgcccaacagaaaaatgt

SEQ ID NO: 47859 - DNA, 1299 bp, Homo sapiens
cagaactatagagaaaagaaaacataatttttttttttttttttttgagatggagtcttgctctgtcgccgaggctggagtgcagtggcacaattttggctcactgcaacctctgcctcccaggttcaagttattctcctgccttagcctcccaggtagctgagattacaggtgcccaccaccacacccagctaattttttgcatttttagtagaaacagggtttcgccatgttggccaggctggtctcaaactcctgatctcaagtgatcctccctccttggcttcaaaaagtgctggaattacagacataagccaccacacccagcccagaataatattttttaaagaaacattttgtgtatttatttctttatttttattttattttattttatttatttattattattattttttttttgagactgagtctcactctgtcacctaggctggaatgcaacgacatgattgtagctcaatacagcctcgacatcttgggcttaagcaatcctttcacctcagcctcctgagtagctgagacgacaagtgtgtgccaccacagttggctaatttttttttttttttttttttgtagggacaggggcttcactctgttgtccaggctggtcttgaactcttgggctcaagtgatcctcctgccccaacctctcaaagtgctaggattacatgcatgagccaccgcagccagctctaaagaaacattttggatcaagactcatattattcacaagaactatccctctctccagcacattttcacaattttctccaaattccagtcttctttcctgctatttcccatcttccattgcaagacaaggatgagaaaagcctggtggaatcagtgaccttctccccaatttggagatattttcctcagatttggcagctagtgatttctgccccacccactcccactcttgttcatacatctgaacgatgcaggattttcctacatctctggaccaaagggattgcttggctccaccctcatggcctataaggacaccaaaataatgtgaatgccacattttatgtaaaggaaagataaaacttactatataacattaaggragggcaagttataactagatagcccagtcttctagataagtaagggcacaagggagcttctctggtctgggcctgactccttaagaacaaagggagagacagtctcactggcacagaattggcagtgtttgttcagtgaattaattttaacactaaaattccaattgattgtttcccttaagtctgcccaacagaaaaatgt

SEQ ID NO: 47860 - DNA, 1158 bp, Homo sapiens
cggttgcaactggagtggattgatagcatctgcatgcctttgtatcaggtactttgatttgggagggcctacatgttctgactgaatcagaaaaggaaaagtgtgtatttctcaaaagcactcatttgaggagacatttccagggtatgcacattgcggagagctctggctgcagtttgtctttcttggatttctgactgtgccctggctgggaagagttggttctaggaggctgcagacctgcgttctccactttctaggatataatctccatgggcctcyactccctcatctgtaaaccagggatactaatattttatttactatctctcaaactgtgtcccatagaacatgaacatccagccatcatctaatagctatctgttcaaaaaaagctcacaggcccaagaaacgtttaaacttgatcagctcaatttctcaaacatatttgaccatggaaattttttttttttacaaattttctttattaatataatgtgggaatgaggattccatgaaacatggtgttcggctctgaccccatggtctgatacagggggttttgtgacgcaccttccagcttcaaaatctgcctgtctctgagatgcatgagacaaatcccaaccagtgaattctgagcgagatgtgctaatgtttccagctctgctacttggtgtgtaggcctctccttctgaaaggagaaaagtgtcgctttgaatggttcacactgcactttttgagtgcggatcagggctggcatcagttaacactaacagtttattgtacattggcttttaattctacttctaagcatttgctttcatttgtaaaaacctggcaagttctttacccacaacctagctcagtcagactgagctgctttcctaacttcaaagtgagaaacatgcagggaaagcaaaagctctttagttcctcaccctatgtaaccccattaaaaacgcagtattgttttttaaggacctcacaaccatcaagttcaagatcatctaccactttgttttcagcacttttaggaactgctgagccctgtcacagaactctgaaaacaaacaaacttagaatactgtcttgaagatggatatgtaatttttgataactataacaaaaataaattcatttttgttttatattagccat

SEQ ID NO: 47861 - DNA, 545 bp, Homo sapiens
ggaatctgaaaaatataaaatattgttttatatttgtatgctttatatttatataagtgatagcgtattttaatctcattcattttttgatttwcttattcttcactatgttttcttgatttatgcctattttcctatgtgtcattttgctctgatcatagtattccatagtacacatttattctactttatttccctagcaaagtgcacctaaattgcttccaacttccttctatcacaaataatgctgtgataaacataatgacacacaactcctttggtatctctgcacatatttctctggacatatactgaggagaaggattgctgtgtcttaggcgatgcacattccataccacagttcacactgccagactaaaagggctctgttgctcttcatgcctgccacgatgcacaagattcctatttctccataatctcacaaacatttggtgatatttctagtttttgtcaaagtgatgtatataaagtggtgcctcatgttttaatttgcatccacataaaaatcagtgtggttgatcatc

SEQ ID NO: 47862 - DNA, 693 bp, Homo sapiens
gcagattatggaccataatgagtcaatatttttaaaggcctattcacctgtgctccaggatatattttttaaacatctatttttatattataaaagtaatatattttcaatacaacaatctttgaagacttagaaaagtacatagaaagcaacagaaaataaaccatctcttattagctcttcgaccttggagacttaaactttctgtacatcttggttttcttatctgtgaaatgtgctaatccgtagcacttaaccttattgggttgttaagaggattgatgagttaatatttgcagagagcttagagcagtgcatagtacacagttaatgctatatcgctgttaaagaaagtaaattgcactactgaaacataatcactcttaacaatttagggtatattcttccagggttttgttatatagacataaatgtgtataaaaatagaattttattatatgctgtataatgttagcagctttatatttcactaacattgtgccaggaaatcattttgaaagagaattaamcaatgaaaagaaagcatgcatcatatttatttccgctgaagtctctaaggcttcattcatactccaaactttttgtggatttttactgtggtcaggacctgcactaagctctatgcaggacagatgccctgaccatttcaccgggtttagagacaatgtcaat

SEQ ID NO: 47863 - DNA, 625 bp, Homo sapiens
tcaaccccataaatatatggctgtgttcttaaagaaatgagactggcagaaatctcataccctcgttctaatgttccctgtaggtgcttcttttaaaacacggttggtagctctgttagcaaacgaccccaccagcaagcccaagtcagtaggaagaagcctgccaattgtgtcattatatttttccgtaagtaattcaagtttgtggaagaaacaagacacttttggtatgttgcaaagggcagccaaagaatgaaaactctgtrgccgagcaaacatattacattattctgctgcaacatgtataaagcttctgcaggagattgtttgtatagttgtatatcctgttaaagcagaacttaatgaaagtgttcaactttaacatctctttataagtataacagagtcatgtgcttccatcatcatgccttggacaggtcgggtacatgcaaaggatcacagaaaattgatgagccacatagtcagtagtggcaaggatacgagaagttcattgttggcagttttgttgattacatacgtcttctggttgtgcttacattagagtatttctctttctcttagatgtttgaaaacattcagttaggaatgtttctaagaaaattga

SEQ ID NO: 47864 - DNA, 558 bp, Homo sapiens
gaagagacagcagacaagagaatagttaggaagctcttctgattcttcattcaactttcatttgactttcagagtcaaggagaggttttttgtgaataaaattatatttaattrtatataaattaagcactgaatttaaaactccttaaaacagttagcaaattattgatgcagggtagtatagtggttctgttagctgaattagctcttgtatatagttcaattaaactaattattttctcatcctattttcagataagaaagatgttaaatgcaaaaccagaggatgtccatgttcaatcaccactgtccaaattcagaagctcagaacgctggactctccctttgcaggtggtaaataaaattaatttattttaagtatacagttttatttggtatgtttaaaatattgtaataaaactgaatgtttattttctgatatgtcccttttttggttttcttgtgttatttaattgcagattttagttcatttttggcatgttgaaatgatactttgaggttaggctcttcgtttaaaactatgtatatataattatg

SEQ ID NO: 47865 - DNA, 558 bp, Homo sapiens
gaagagacagcagacaagagaatagttaggaagctcttctgattcttcattcaactttcatttgactttcagagtcaaggagaggttttttgtgaataaaattatatttaattgyatataaattaagcactgaatttaaaactccttaaaacagttagcaaattattgatgcagggtagtatagtggttctgttagctgaattagctcttgtatatagttcaattaaactaattattttctcatcctattttcagataagaaagatgttaaatgcaaaaccagaggatgtccatgttcaatcaccactgtccaaattcagaagctcagaacgctggactctccctttgcaggtggtaaataaaattaatttattttaagtatacagttttatttggtatgtttaaaatattgtaataaaactgaatgtttattttctgatatgtcccttttttggttttcttgtgttatttaattgcagattttagttcatttttggcatgttgaaatgatactttgaggttaggctcttcgtttaaaactatgtatatataattatg

SEQ ID NO: 47866 - DNA, 558 bp, Homo sapiens
gaagagacagcagacaagagaatagttaggaagctcttctgattcttcattcaactttcatttgactttcagagtcaaggagaggttttttgtgaataaaattatatttaattgtatataaattaagcactgaatttaaaactccttaaaacagttagcaaattattgatgcagggtartatagtggttctgttagctgaattagctcttgtatatagttcaattaaactaattattttctcatcctattttcagataagaaagatgttaaatgcaaaaccagaggatgtccatgttcaatcaccactgtccaaattcagaagctcagaacgctggactctccctttgcaggtggtaaataaaattaatttattttaagtatacagttttatttggtatgtttaaaatattgtaataaaactgaatgtttattttctgatatgtcccttttttggttttcttgtgttatttaattgcagattttagttcatttttggcatgttgaaatgatactttgaggttaggctcttcgtttaaaactatgtatatataattatg

SEQ ID NO: 47867 - DNA, 590 bp, Homo sapiens
tcctcaattttgaaagttaaaagcacaatatgagaattaaagtcaatgtttatttctggatgatgggactgcaattaatgtttatctttccagtctcttttctgtgcatacttgtatacatttacacacgtagttttcactattgagatcacactgataatagtgcactttatttaatggcaattttgtcatgagatattttctgtgacattaaatacttcttcacaatagttttgggaatattgattgattacttacttrttatgtgttgtgcattgtggaaagcactttacatggcctaatttatttccacaaccaccctaggaggttgttactgcatttgtgcagtaagtcattggacttttagaagtgtaggagttcatcagagtataccgaatctcaaccctaccagacccagcataataataagaaatattttatagcgcattcattttttactttctggaatgaaatagatacttaatgtacccatctacatacataatttaaaagtatatataaagccctaataaaatataaaggagaaataagtggaaaccaagtcatttataataacatacctttaagta

SEQ ID NO: 47868 - DNA, 2811 bp, Homo sapiens
  misc_feature (1)...(2811): n = A,T,C or G
ttacattaaagcatctttaagtaacttgtccaggttttcttctttaaatacagtactcattttataagtagattattgtagttaaatgagatcataaatgcctagttgttggtaagtaataaatactcaaagaatagtagttattcttaatagtatgatcataggtcaaaagaaattcttaatgactcacttagacaataactagcttcgaaataaaaacattttagttaacaggcttctaaattcaactccaaagatcagtccaaatggatagtactccaataaagttttaatacatatagttgaaaatttgtatccctttctttcttccatggaatatctacaagactttttcactaatttctacagtaagcagtgttctaagttggccctcaataacctcacctccttgagttcccaaccatgtgcagctacccttccccttgagaacaggctgcaactagtggcttgcttctaaccannnnnnnnnnnnnnnnnnnnnnnnnnnnnnnnnnnnnnnnnnnnnnnnnnnnnnnnnnnnnnnnnnnnnnnnnnnnnnnnnnnnnnnnnnnnnnnnnnnngggaggatggctagtgctgcgatctgagagatgtggcggggaggagcggatgggtatgtgtcgtccgctaggggacggtgaaacgcgcggggggccctaggcctaggagaggcgacgtgcccgtgccgcgtgcgctgttctactcgagagagacattctctggcgagagtcgtctgcttgtatactctctccgagcaggacttgctgattctacgaagacaagtgctgcacctacaacatctcgggtgggcttatctactatgatggccatcggtccgtacatagcgaggtgagtgtgtctctgccagtcataaatactgtgcgtgtgagtgcgggcgcggagacagagagagagagagaaaattatattaccgaattaagaaacatggagggaagagctctcaaacatattacgcaggatagactatttcaaacatttataaaggttccaattcttgctcttcatgtcctaaatgaactttctattacattcactggttttgtttttgtatctgctcatttcaagtcagaggtgagttggcagtggcaataaataattatacatacatttccactgccaaacattccacctagctatccaaggttatattyacctctctttaagttggaagatagtcaacaagccaactaatataaacagcttcctaagcagggtgatatatgcattgagaaagaccacagaagtcagatgggtgctggtcagacctcaaccttcccagttcatctgctataactattaaattttttaactgagccataggctgtgtctgagtatttacttgttttagattattttattcaaccccaaatagaagtttaaatatggtctcatgatccatgtaacaatatttatataaaaactggggagttaaataaaaccactgagtatattttgactgcacaattttaataaaatctcatgtttcaaaatagagagtttttttttgttgtttgatgaacaccagacattagcgcactgttcatatgcccttctttgaaaactagctcattggagaggagattgaccatttacgatctctccttttctttctccaggtctgtctcctgtcaattgactgtcttaaatatgaactcaaactacagagtaccgacaataatggataggtctgcaattcttcactttctgacatcttattgagagaaaaaatagaatcaggatcatattttttttattttttctttttatataatagtgttccagattcattcaacttctggactctaacatcgcattagtaaaggtattttctgtaaatattcacagcattccctccattgcctacttattctgagaatgaattggggtatgtggtttggtctctttagttcaataagtggtcatcatgtcaatatcaatcatatttaaaaataaccgaaatattagggtatatttagcctagggttagtgtattcatgtaggataatctcaatcatattttagtcatatttcttaatagttactctcacttatatattatataaataaaataacattatttctgaacttgtttggtgtcatttggtgaaaggatagcactaagaaatttatgttatacttggtaaagtattaatttctttagaaagcatttgtcttaattatcctatactacctcctttgtctcttgactatgaaatcatctcactttcttggagttcaagtttaatttgctttttagttttaacaaaaatattttaatacactatattaatgaaattgccttataactgttttattcatgaaataatttctaaaggttttatatcagaatgttgtaaatttttttcaatgtctattgagtaaataaggcttgctcaagatatcaatggtataacctgtaatagtctgcttaggctgctgtaataaaatgtcatagcctgagtggcttaaacaacagaaatgtatttcttgccattctagatggtggaagtccaagatcaggtgctagtatgactaggtctggtgagggctatttttctgacttgcagatgtttgccttctggctatgcactcacatgggtctttcctaggtgcatgatcaagccaagagaaatcactatctttctttgtctcttcttgtaaggccaccaattccatcagatgagaactccgccctgtgatctcatttaaccttaattacctcctaaagcctccaaatgcagttacaatatgggttagggcttcactgtg

SEQ ID NO: 47869 - DNA, 640 bp, Homo sapiens
acctgtgtctgcaaactgcaaggaattccaaagttgatggcacgtgtctgttgccaaagattgtaaaagtttacattaagaaatctatttgttctgtgcctttaaataaagcgggtaatacagtgcatgttttgtcttatgctgcttacatgttaataagattatggtggatgtcatattgcactgaaacatcacatttgctttattatgaatgctggcagtgcagaaacatcacattataatcacttcaaaaaagaaatatattctgcatattttcatgtgtgtttataattccactaaacctcagcagaatcaaactcagtagggacaagaatgacagaaggtttaatgttccagagactgctaaaatcttggtgcattgatatatagcagaatggttartatgtataaggttacttgtggccagtgacctcaaagcatatcttctggccttatcgaatttccatgagaaaaagtaactactggcatgtaaattttccacaaataatttggaggttttttaaacggttaattttatttttaactgtgaaagcctgaagtgtttataaacatatgagaggtaataatttgtatcatccaggtatcttaacaatggagcaaactccattttaaataaatg

SEQ ID NO: 47870 - DNA, 551 bp, Homo sapiens
gttgtccagataccggcctcaggtaggagggcaaagccgaccctacattgtcctggttctcttggggcctctggtgagaactgacttctttttcctggtgggcacctagggggtcggacgagctccctcacacgccatcttggtctgggcagtttagacctgagttgttccaggctagatgaaactctacatgaaaacttccagagttggacagagtcaaattctacttcaccttccattcaccatcatcatccctagaaccaatctccctctgggacctcaaaggatggggtgtccaggctctagggcaggattcctgggttcctggccaaaccatatccaacagtgcccagtcccaccccctctcccttgggtcctcccaggtggcccctgcytgcctgagacccatgggcacctttggggctggagctgaccagtttatcccgtccagctccttataagccttgcacttctgacatcaataatttatggggatatcgggatgcaggggggctggcagagtgataggtagggggtaccagaggcaaatc

SEQ ID NO: 47871 - DNA, 534 bp, Homo sapiens
taaagatgtgcatgtgtttctgtcacctctatcatgtctatcacctcttgtcatgtctcttgaagtgtagtgcttcttaaactttccctctatgtaggttgaaaaatccaggasaccatagatacactttaatgttaaatgagcacgagatggcacgatttttagttgctatcttcttagctagttatttttcattccactgtaacagaggtgttttcaggtatacctaagtgcaagaatgataactactttgtctataaaatttgaagtgtacttgtctataaaattttaagctttattttaattaagaaaagagcagctatgaggagcttggctggggctgcattcagaaccttgctgcagttattgtgaactgttgtggacgcttacatgaactctgtaagtcttgctttgttgtccataaaatggggatggccacagtagaactggcgccaaggtatttgttaaaattaaaggggccatttaaataaaaagcacagtgtaatgcctggcaaattattactatggaaagca

SEQ ID NO: 47872 - DNA, 534 bp, Homo sapiens
taaagatgtgcatgtgtttctgtcacctctatcatgtctatcacctcttgtcatgtctcttgaagtgtagtgcttcttaaactttccctctatgtaggttgaaaaatccaggagaccatagatacactttaatgttaaatgagcacgagatggcacgatttttagttgctatcttcttagctagttatttttcattccactgtaacagagrtgttttcaggtatacctaagtgcaagaatgataactactttgtctataaaatttgaagtgtacttgtctataaaattttaagctttattttaattaagaaaagagcagctatgaggagcttggctggggctgcattcagaaccttgctgcagttattgtgaactgttgtggacgcttacatgaactctgtaagtcttgctttgttgtccataaaatggggatggccacagtagaactggcgccaaggtatttgttaaaattaaaggggccatttaaataaaaagcacagtgtaatgcctggcaaattattactatggaaagca

SEQ ID NO: 47873 - DNA, 584 bp, Homo sapiens
tttaattcagcctctgatagtcaggctgttgccaagcccagctctgaaagtcttcccctctaggaaagagagatggatttttgctttactcaagaatatagatctaaaaaaaacaaacacttctgcatctcaaagcaagctctacctcctgagctacacatattgatcagcattttattgtcaattttcttttatttgaactggagaaaaatataatctaattatgttcttactgatagttgggaatcagtcacactaaatccaattctctgggttctcatgattaaggtgtttaatttgggggacaacaaagcaaaagcattggtcgtgttttaayataattggtacagaatatatctaaggggttcaagtatcactgtagcaagaagctcattctgcagtaaaaggtggttctaccactagcattgagttagggtggttcatggctgtaccgttttatcaatgtctcttcaagagtccatggaatgtggaaggggaaagactgaaatagtccaagtcttggctaagctcctataaaggggtgttaggagctgataaaataacctggtctttacagacatccc

SEQ ID NO: 47874 - DNA, 570 bp, Homo sapiens
tgcaaagcttatatatcatagaatagcactgcttgatagcactgttttcataataaagtgtgttgagtatcaccattgaatcttacccagaaayatcagcttttggtcctttgcctataagaacagttttttgcagatcgaatattcacgaatatatgtatctcatatggtggttcaactccatgttttactcatatttgatttataatattaatagatttacttaggataatatgagcgaaacaaggggttgaaccgccatatgagaaattggggcatgaaccagagaagaatcctgaggagtagttttcaagacctaagtcaggttattgagggatacaataaacttttgttttcttgaagtgtttaaagtagaaagaatttttgtcatttttttaaacttcaaagactttttaaggtagcttttgaattaatgatcaatttttctttttgggggaaatataattttctttctcttcaaatatctcagtgtttctattaattttcacagaatttcaaaatgaatcagcattcaggaagtcattaggcatttttactaagtatatgaaa

SEQ ID NO: 47875 - DNA, 561 bp, Homo sapiens
ggcatcaattttcatttacatagtgattccttcatccatattgccactctagaacattttgctgggcccattaaatgtcctggtggacagtgaccagcacatagtagaaatgtaataaattattattgaatgaatgatgtctctagatcctagccattatatccctgcatcaagcttggcatattgaaaatcaacttattctttctgcctcctgtcccccattccaaccagacttccttttcctcctgcatttcctataaaggaaaaacggtcccttagcaacccagccactgaagccagtaatcwagccacatctaattggtcaccaagttcagcatcttccatctctggaatgccatttgtatcccatcttcctcttcaggtcatacttcaacacagatactccccatttctgaataacagcaaaaaccttgcaactcttgatttaagggccttcagtttatccttcacacatctgcaaaagtgagaatttgatgccatgacttatcaggtcttatcaggttaaatccggatattatttggctgtgtccccacccaaat

SEQ ID NO: 47876 - DNA, 626 bp, Homo sapiens
tacaaatgcttaaaataggccgggcgcagtggctcacgcttgtaataccagcactttgggaggctgaggtgggggggatcacgtggtcagaagatcgagaccatcctggctaaagtggtgaaaacctgtctctactaaaaatacaaaaaaattagccaggcacggtggtgggcacctgtagtcccagctacttgggaggctgaggcaggagaattgcttgaactctggaggcagaggttgcggtgagctgaggtcctgccactgcactctagcctgggtgaccatgcgactccgtctcaaaaaaaaaaaaatgcttaaaatagtatctaacacttagtaatactgagtaaatgcaaaccgtttttatgaattttctggtctacctaactatagrtcaccagcttttgaaatggcatggctgcagagatccactaatgggtactcaatactggataattactggccaacgcaattggattatcttcattgatgaccttaaattaaaataataataataataagagtaacaacacgagataaacaaagacactaagagaaggcagtggactccttgtgttagatttttatttctgtgaacaaactaccaccattttagaggcttataa

SEQ ID NO: 47877 - DNA, 626 bp, Homo sapiens
tacaaatgcttaaaataggccgggcgcagtggctcacgcttgtaataccagcactttgggaggctgaggtgggggggatcacgtggtcagaagatcgagaccatcctggctaaagtggtgaaaacctgtctctactaaaaatacaaaaaaattagccaggcacggtggtgggcacctgtagtcccagctacttgggaggctgaggcaggagaattgcttgaactctggaggcagaggttgcggtgagctgaggtcctgccactgcactctagcctgggtgaccatgcgactccgtctcaaaaaaaaaaaaatgcttaaaatagtatctaacacttagtaatactgagtaaatgcaaaccgtttttatgaattttctggtctacctaactatagatcaccagcttttgaaatggcatggctgcagagatccactaatgggtactcaatactggataattacyggccaacgcaattggattatcttcattgatgaccttaaattaaaataataataataataagagtaacaacacgagataaacaaagacactaagagaaggcagtggactccttgtgttagatttttatttctgtgaacaaactaccaccattttagaggcttataa

SEQ ID NO: 47878 - DNA, 666 bp, Homo sapiens
gctaggagcctctaaacccagagggttcattcccaacaagggacaggttagttctctaaccctaattgctgggagaccttgtgcaagtcagttcccctctctgggcctcagtagcctgggagcagaagattctaatcttcctgcagttccagacctctacagaacgactctggtttatatccataaatgtgtagcaaggaacacccgccttgagcccatgggctccccaattccagacatcaggattgggactgatgaggactgtcttcacctgtgtggtgtggcgagacgatgtcttttttcttccagattttatttcataacaaaatgactaaaatgaagctatcagaatgaggaaacaaaagagttakagtatttcagaggaagtagtaaatatattaacaaataaatatgtctcacatagggagaacttttctaaaagatggagatatccagcatataatttctaaaacatagaaaaatatttgggaattgatttgtgaaaaaaaattgccgaggaagttatttgtcagaactagaaatgaatatatcagtatgttctagtcttccagttttatgcctttgagctgacaattggttgttgctttactgaccaaagacctttggaaatttttggaacatcaagatcgccaagttttgattttg

SEQ ID NO: 47879 - DNA, 583 bp, Homo sapiens
agacatttattttctcacagttctagaggttgaaaagttcaagatcaaggcctgatggggttccatttttggttaaggctctagatccctaattacatctaaaaggctccatgtgcaattatcatcacatctgggattagggcttcaacatatgaattgtagtggacacaaatattcagtccataacagctgccaagtaggcaataaaacaacatctgccatttattcrtggggtgattcggtagtctcagcttgggtagcaacctgggaattatgttggttgcaagagacacgaaagatatgcttacgataatcttagtaatggtgaaatcacatgtcactagtcacccagacctgagagccagacgttccccccacatgctccctcagagatctccagagcttgagattcctgattaatgggctctgtccacaaaaggtgtccttgatcatctcagacattatggggcaggccgagtatgggtagggcgttgcttctgtcataacaagacttggtttatttcaaataatctaaaatctgtgaagatatattagagcctattggcaggttcctgagtacccc

SEQ ID NO: 47880 - DNA, 583 bp, Homo sapiens
agacatttattttctcacagttctagaggttgaaaagttcaagatcaaggcctgatggggttccatttttggttaaggctctagatccctaattacatctaaaaggctccatgtgcaattatcatcacatctgggattagggcttcaacatatgaattgtagtggacacaaatattcagtccataacagctgccaagtaggcaataaaacaacatctgccatttattcgtggggtgattcggtagtctcagcttgggtagcaacctgggaattatgttggttgcaagagacacgaaagatatgcttacgataatcttagtaatggtgaaatcacatgtcactagtcacccagacctgagagccagacgttccccccacatgctccctcagagatctccagagcttgagattcctgattaatgggctctgtccacaaaaggtgtccttgatcatctcagacattatggggcaggccgagtatgggtagggcrttgcttctgtcataacaagacttggtttatttcaaataatctaaaatctgtgaagatatattagagcctattggcaggttcctgagtacccc

SEQ ID NO: 47881 - DNA, 557 bp, Homo sapiens
aggaagccaggagtccatgagaaatctctcaatgtgtgagtattgtgaattaattcatagtttaaaaaacatggtgagggtgaaatttatggcttaggaaatacatcccaataaagggataaagtaattcatttttaaaagtaactgataaaaaaaaaaaaggccaggtgcagtggctcacacctggaatcccagcactttgggtgaaggaggcaggcagatcacttgaggctggtcaggagttcaagaccagcctggctaacatggagaaacactgtctctactaaaaatatgaaaattagccgggtgtggtggcgcatgcctgtagtcccagctrctcaggaggctgaggcaggagaatcgcttgaacctgggaggcggaggctgcagtaaggcgagatcgcgccactgcactccagcctgggcaacagcgtgagaccgtgtctcaaaaaaataaaaaataaaaataaaaactttgttgagccagaccaaacccacgtgcaggccacattcagccagtggcagccatcagaggccccagagttagggcagaggtg

SEQ ID NO: 47882 - DNA, 529 bp, Homo sapiens
aggctgagagatcagggaggggggcagtttgaaaggggaaagatgaagaatagtttctagcatgtagagagataatatcactgtgttttttttttcttagaatatcttttcaaccaaaaaagggacattctgttcactgaataaaggggtaaataaatgaataaaatcagctttttttttcctacacagctgcagtggtaaaacaaaatgcacttacaaaaaaaaaaaaaaaaagaaaagaaagaaaaagaaaaagataaacaagaagtcccaggtccaaatcctactaagcagggtcacccgtcagcaggctgctgcagccacctaggtgatggcagacaagtggtgtggacgagkgtgatagcagcggagatgaagagaagcttgagaaatggaacttacttgagattaggaagtttgtgcttgggaaatccacaaattatctccctggactgaagctacatggaaaacaaaatcaaaaccagagaccatgtccaagtttaccacaaatgattactttgataggatc

SEQ ID NO: 47883 - DNA, 578 bp, Homo sapiens
ggggaatagatgtacagcatctttaagcaggacagtttcattttccccaattgttttgctacttgggtcttcaggtgctgtaacctaagttttctcttcaaatgttcttacagattgtgctcttctcagagcctccatctgactcgagagaatatgcttgtcagttacctgctaaaaccctactgaaacaaaactttagaactgkagacaaagtgttgtttatatgtctcccaaatgccttctcaaaggatgtcttattgccacctactttcacattgtcatatgtatctaacagaaaagaatcggcccattcatggtactggatatataacggagtgaaatatatgcttctctctaggaaagccacaatagaaagattgccctatcttctggaaatttcaaagcaaaaggtgcaaatggatggcataggccaacattcaatgagtacctattttgaacctgcattgtaccagcttttaaatataaaaattcagagatgtggaacatattgtatcccaaaagttgagaaatgacctaacattaaacaagataaatcagaactgatatggcaaaattaa

SEQ ID NO: 47884 - DNA, 595 bp, Homo sapiens
tagtggaagctaataaaacagtgcaccttattcatcttctttttttttttttaacaagtgtgaactacaccataatatgacaaggttattcatgccttagttacttttcagaggaatttattttcaaatgaaaactacatcacagtgtctattaagttttgaaattttataatgtatgccttgcagtttgctattggacttataacaggccctaacctagccatgtggaaaagacaattatgaacacaacattaaaaatgaggtttcaggatatctgatctctggaaaaacttaaagtgccctacatgatgaaaactaatacagctgcattctaacttaccttctcactcagtgtccttgaaaatattaatgctactataataatacaataacagtagaaataaattttttwaaaaaatgcaacgtttgttcaattcaaaaggtattttgaattgaattataaaatgggttcaaatttttaaaaaattgaattacgaaatgagtaaaatcacagagggaaggtgactgttgaacaatctttcctgcatttctcatattatccatctaaattcctttaccttagaggggtgcctat

SEQ ID NO: 47885 - DNA, 548 bp, Homo sapiens
taagggacaggttactgtatccagttcctaaggtacttccccagggtcagcagtggcttcccaggatgaagtcagcagtttgtcccgggctctctgagcggtgctttcccacagatcagtgatgctgttggaaaaggacgacttacggatgcagaggtggaaggggggtaccagcagctgaaccctcaatcaggtccaggcagatgtattcccgatagaacaggctgtcaccactgaccagctcagacttagaaatgtgcctgtctaggttttcagagcaacccctttcatcacyatctgtgaggaggattcgaactgaaagaagccagaaacagcagtagcagcgtctccactgggatgctccattcataggggagccagagccgcatccattcatggtggggtcagggagtcctttgcgggcattggttctcgtttctcagcaagctgcacttcccggggggctgcatggctgcatcgttcagaatgaggatgtctattaagaagccgtcgccagagctattattagcacagccatcccttggaaa

SEQ ID NO: 47886 - DNA, 563 bp, Homo sapiens
tcatctgtattgccagtatcatgacccaatttgggtgttccttaaaacccagtcctgagttattgcgataccttcttaacacatttccttagttcaaagtctacacaatccctgcagtaatttgttttgtatccaccactaggctaatcctgttatagcattggctgctgccaccagactacttcccacctcctactatgtcttctygaaaatatccccagtcaatgttaagatagaacacagactttagattctgtattcaaggccctctaaaaactgttttaacattccagttgcccaacacaaaccatattattagtcagatctatctctatatgggcatcctcatgtatggtatttataatcatgcttgtcctcatcttccggccaacctagaaaattctcttatcctccttcctatcctacacttttttatttcacatctcatcttctaaataaagcttctgataaccattccaggttacgatgatctcaccaagccctaatttctcacttcctttattttctgaattaagcaaaccacctaaatgtaaacataaatg

SEQ ID NO: 47887 - DNA, 1719 bp, Homo sapiens
tgcccatgtatttgagaattctctctccctggcatgaagcctgtccgtggtttcccctcagttagatgttcacgttaaagctatttaatgtcctatctgatggcctgtgtagcttcctttcttgccatttcccttcttggtcaacagtaacatgaccctgtgttccttaaacatgccagagtttgccattcttttaccatcatctagaatgctatttcctacctgcttcacaaactgtgtggcttaaacagcataaatttaatgtctcgcagttttagagcctagaagtccaaaatcaaggagtcatctgggttggttctgcaggctttgaggaaggatcttttccaggctcctctccttggcttttcgatggccattatcttcctgagtcttcaccattgtcttctctttatgcatctctctgtatctatatttattttcattttctttttttttttttaatagacagggtctcactctgtcacccaggatgaagtgcaggtgtgatcatggttcactgtagcctcacactcataggctcaggtgatcctctgatctcagcctcccaggttgctggcactacaggcgaggcacgatgtctggctaattttttgaaaagtttttgtagagatggggtctcaccgtgttgctcaggctgctcttaaacacctggcctcaagtgatcatcccacctcagccttccaaagtgctaggattatasgcatgagctgttacacagcacccacagtttctctttttataaggacaccagttatgttggattagggcccaccctaatgacctcattttaacttgattgcctctgtaaaacctatatctccaaataaggtcatgtcctgaggtactgagtgttaagacttcaacatgttattgaaccaacaattcaatgcgtaatatttaagtgaaattcaatttattttataaaacccaactaaaatacaacctgttttaaggctctattttgctccccccatcctgcttcagagttatccctaaaaactgtatgaatcactgcaacttgcataattctatagttgcttttagcttagactgtaattgatttatttgcaaactaatatttgcctctctattagaccatgcacaatttgagactagaaagtattatatttatctcagtatcctcagaacttagcataaaataagattgcaattatataatcattaccatgaacaccaaaaagctttatgaaaatttatattattttacttattaaatatgtaagatagtataagttttccacctctctcttttttaacttttattttaggtttggggtacatgtgtacatgtgcaggtttgttatacaggtaaactgcatgtcacggggggtctggtgtatagattattttgttaccctggtatttaataatgagcatagtacttgataagtagttttctgatcctccccctcctcccactcttcagcctcaagtaggtcctagtgtctgttgttcccttttttgggtccatgcagtctttgtttttctgtttgtgtgttaatttcctaagaacgatggcctccagttccatccatgttgttgcaaaggacatgatctttttcttttttatggctgcttagtattccatgatgtatatgtaccacatattctttatccagtttactgttattgggcatctaggttgattccatgtctttgttattgtaaacagtgttg

SEQ ID NO: 47888 - DNA, 627 bp, Homo sapiens
gggaggatcacttgagcctgggaagtcgaggctgcagagagccaagattgcaccactgcactccagcctgattcaaaaaaaaaaaagaaaaaatattaggcagtttatctatttaatctgtggtgtgcggagaccaggaactatcagatttatcattatttgagcaaatggttttattggatcacaatcaaagattttacaatcttatgtaaggacagatgtgacttagtattacttgcagatattaattcgatcatcatgtggctccataactctctggtatgtggctgctggtatggactgacctttgaatgatgactagcaggacctagagtagttacagctctcggttccaggatatcttgctcaaatccatgctccacctccattgtctgtgcttgaagtgggtcatttgcttattgtcagcatcagggcaacattcttttgcatcttttayctgcaagcattggatttgggggctttgttttttgccaatatctccaatttcaaaaggactccaaaaaggcttagaaactgttaaatggcagatgctgtggaaacttttactctgatgactgctttccaactggttttctaaagaaaagtaaagttagaggcttagtgact

SEQ ID NO: 47889 - DNA, 627 bp, Homo sapiens
gggaggatcacttgagcctgggaagtcgaggctgcagagagccaagattgcaccactgcactccagcctgattcaaaaaaaaaaaagaaaaaatattaggcagtttatctatttaatctgtggtgtgcggagaccaggaactatcagatttatcattatttgagcaaatggttttattggatcacaatcaaagattttacaatcttatgtaaggacagatgtgacttagtattacttgcagatattaattcgatcatcatgtggctccataactctctggtatgtggctgctggtatggactgacctttgaatgatgactagcaggacctagagtagttacagctctcggttccaggatatcttgctcaaatccatgctccacctccattgtctgtgcttgaagtgggtcatttgcttattgtcagcatcagggcaacattcttttgcatcttttacctgcaagcattggatttgggggctttgttttttgccaatayctccaatttcaaaaggactccaaaaaggcttagaaactgttaaatggcagatgctgtggaaacttttactctgatgactgctttccaactggttttctaaagaaaagtaaagttagaggcttagtgact

SEQ ID NO: 47890 - DNA, 627 bp, Homo sapiens
gggaggatcacttgagcctgggaagtcgaggctgcagagagccaagattgcaccactgcactccagcctgattcaaaaaaaaaaaagaaaaaatattaggcagtttatctatttaatctgtggtgtgcggagaccaggaactatcagatttatcattatttgagcaaatggttttattggatcacaatcaaagattttacaatcttatgtaaggacagatgtgacttagtattacttgcagatattaattcgatcatcatgtggctccataactctctggtatgtggctgctggtatggactgacctttgaatgatgactagcaggacctagagtagttacagctctcggttccaggatatcttgctcaaatccatgctccacctccattgtctgtgcttgaagtgggtcatttgcttattgtcagcatcagggcaacattcttttgcatcttttacctgcaagcattggatttgggggctttgttttttgccaatatctccaatttcaaaaggactccaaaaaggcttagaaactgttaaatggcagatgctgtggaaacttttactctgatgactgctttccaactggttttctaaagaaaagtaaasttagaggcttagtgact

SEQ ID NO: 47891 - DNA, 1081 bp, Homo sapiens
  misc_feature (1)...(1081): n = A,T,C or G
ttattcttgaaataatcttttgtttcttagaaaatgtcagacacattctcaaaatttggtttttaaataattattaaagatgtttgtgtcaattaaaaatctaatttccatttgaatacattcctattatgtggatttgaaggttaactatagctacaaaaacagcagtgggccaataatttgaggaaggaagttaatttcagtattctagacttaacagaaaaggtgggcgtaagaagaagatttgaaagaatgtacttagtagatgctgattaagatgccattttcagcatagggtgaagcctggaagtataaggagtggcagaggggaaaaaaaggtacctgtcaggatggacgtcttgtggcattcgggactgtgcgtgggatgaacttgagctagaaatgtagacagttcaaagccagcagattaatgcaagtttagaaccttgggttataattttgtgagatattttcagactagaagggagattttaaaatgagctgacatgaataaggtctcggaacagtaaaagatttaagtatagagatttcaaagtgctgtaagaaggaccagagacattttactgagccaaacaatgacattctgaaagagaataaaatgaaatcataattcatttttggaatctcactgcaaaaagtgttagcaaaaaagttgagaaggctgtagaggaaaaaggaaatctaaatcattttcatgactggaaaaactttttaatatagaatwaaagaagagaaactatagtaaaaatgtgaacagtaaatggaaagttttcagaagacaatatagaacagatgatatctttagaagaaaaacctctagatatttgttaaaataggtaaaaataattcctaatgatagcaaaagtcaatgttcattgaatgctcagtgtgtatgtattgcatactgtactatgtgcttagaatacattaactcattttgtccttttttttttttttttnnnnnnnnnnnnnnnnnnnnnnnnnnnnnnnnnnnnnnnnnnnnnnnnnnnnnnnnnnnnnnnnnnnnnnnnnnnnnnnnnnnnnnnnnnnnnnnnnnnna

SEQ ID NO: 47892 - DNA, 643 bp, Homo sapiens
cctgaagtatgaaagccctgtctagggccatttcctttgtcctccttaaattccttgttctgcagatccaagttccactttcctcggggacctgtccccagtttaatcagagagcatctgctgctagccatgctccaatttcacaacyggaatcttccccataaccatcccctgcatgggaagggtgaccaaaggagcaggggcaggtgtggccatgctggatctggcctgagccaaggaaggacataaccttggagcaggggcaaggaggctgggagctggagacctgccatcagctcagccagcactcgaggggagaaatggcagatttattcagccgcaggaagcacccaggaccaaaatcaatactgagccttggggctgtatttctgcttttcattggcttatgcacaactataataactccttgttttaacatagttcttatttctacgagccccacatgttttattttcagtttaatggatcctcaaacctgtgctactggtagtcagaagcagacataactatcaccattttatgctgaggctaggggagcccagaaaggcagataaattggtgaaggtcacagagagagaaagaaagatggacctacttgcagaaagttctaggtgtactccct

SEQ ID NO: 47893 - DNA, 517 bp, Homo sapiens
taatgtttcttaaatatgtgaacytatgagctcagaatctccttgtgctcataagttcgtacccagctataaacaaaacagttaaaaataataaaatatggctagaagggttaaaatcaaattaataaattaattttaatttcaggttgggttttgttgaaatgacatcaccacttataacttattttctacttgttataggaaagtttatttcttaatttgactagactttcctactatgtagtgtgtgtttgcttaaatctctcagtcctatttttgtatttgaaatattggtttaaaaaattctattggccatattgtaaagtaacttgtcataacatataatttaggtatttggtctgcctctgtttgacatcatttgtataatgtacctattaagtttactaatacttttctcattacttactgaaatttggtgacaatagtaacaggctgtcctcctgtataaatatatattaattaaaaataataggccaggtgcagtggctcatgcctg

SEQ ID NO: 47894 - DNA, 517 bp, Homo sapiens
taatgtttcttaaatatgtgaacctatgagctcagaatctccttgtgctcataagttcgtacccagctataaacaaaacagttaaaaataatraaatatggctagaagggttaaaatcaaattaataaattaattttaatttcaggttgggttttgttgaaatgacatcaccacttataacttattttctacttgttataggaaagtttatttcttaatttgactagactttcctactatgtagtgtgtgtttgcttaaatctctcagtcctatttttgtatttgaaatattggtttaaaaaattctattggccatattgtaaagtaacttgtcataacatataatttaggtatttggtctgcctctgtttgacatcatttgtataatgtacctattaagtttactaatacttttctcattacttactgaaatttggtgacaatagtaacaggctgtcctcctgtataaatatatattaattaaaaataataggccaggtgcagtggctcatgcctg

SEQ ID NO: 47895 - DNA, 517 bp, Homo sapiens
taatgtttcttaaatatgtgaacctatgagctcagaatctccttgtgctcataagttcgtacccagctataaacaaaacagttaaaaataataaaatatggctagaagggttaaaatcaaattaataaattaattttaatttcaggttgggttttgtygaaatgacatcaccacttataacttattttctacttgttataggaaagtttatttcttaatttgactagactttcctactatgtagtgtgtgtttgcttaaatctctcagtcctatttttgtatttgaaatattggtttaaaaaattctattggccatattgtaaagtaacttgtcataacatataatttaggtatttggtctgcctctgtttgacatcatttgtataatgtacctattaagtttactaatacttttctcattacttactgaaatttggtgacaatagtaacaggctgtcctcctgtataaatatatattaattaaaaataataggccaggtgcagtggctcatgcctg

SEQ ID NO: 47896 - DNA, 591 bp, Homo sapiens
cattttcctccttacaaggcaggaccttgtacaattcacgtatccactctgaacaacatgctcacttgctctcttgtcttattgtctttccactatactcttctaacagaatatgggcatggattaatccagttatcaatctctttggctccctcaggagagttggaggcaatgttgggttgatttcaggctgggactcaagtatgtctgaatcttcctttactgttgatcccttccccaacccctgcacagaaacagccacagcagaatgggagtcaaaaatatcttttgttagtaagcaaatacttggtgacttccactaaagggctccttgttaaaagcttaaagaagaagatttgaacatggaagctaagaggggaagttaatgttggggttaccgtctcctcagggatgccgaagcagtggcctccaccaggcttcttggtcaacactctaacttactaaaagaaaacaaagagagttactattgcaggatcttctgcaggatatacctwgtctacatggattgcttgttgcaaataaaagtggaatatatagatttacaggatgctcctggctgtagaacagaag

SEQ ID NO: 47897 - DNA, 1424 bp, Homo sapiens
tcccattggggattagggtttcaatatggtgcattttggagggacatgattagtagtggttaggccttcaacatacaaattttgggaaactttgctatttagtcattagcaagggatgagggccacaagctaaaaatcatctctatttttaaaagatttctctgcttaagaataattccaggatcaaagcagaaaccaggacagaagccaagagatcaatcaggaggatgtggctatgatccagatgacatatgtcatgcatgagggtgaagaaagcaaaggcaggaaaatctgatccaatttgacaaatgtttgaggtcattcaagagacttgccaatgaattgtataagggggagataagagaaagaagagttcaaagtttccaaagtcttctgccaaaacacttctcaggggtggtggtgawtccagtgaaggctttccagatggtttgggatgggttaacttggaagccctaatcatttatctgagctgagaagttgaggatacagttacatgcacgaatctgaagtagcgaaaagatgtcaaagccagagatgggaatttaggattttgagtggatgtgtcaagtcctggggctgagtgagatcccctggagagagaaggaagcttatgtttgagccctagttcagcccagcatttagaagaacccctttgggaagaggagaagaacgagcaaaggctaaatgtgactccctgttttagaagaatctccttcagaagaagaatcaataaagcaaaggctgaactcaactttgtcttcttttctcccccagacataatttatgttcttttattgggagtttgtttcccactcaacctttcaggttagagctctgaagtcacgtttgatttttccctcaacatcaaagagacacaacagtttgcttctgtggtgactgtttttttgtttgtttttgtatttttgttttttgtttttgtgtgtgtgtttgtgttattttaatttgtttgcttgtttgagacaatgtctcactctgtcacctgggctggagtgcagtggcacaatctcagctcactgcaacctccacctcctgggcttaagtgatcctcccacctcagctcccctagtagctaggactacaggcacacaccaccactcctggctattttttctatttttaatagagatgggggtctcatcatgttgcccaggctggtcttgaattccagagctcaagtgatctgcctgtcttgacctctcaaagtgctgggattacaggtgtgagccatggtgtccagcctcactggtgactttgaatgccttctcacttcttccttcccactccatgctccaggttcaaagactccattaccaccatccatcccatgccagagtctccaggcttccatcttcagtgccatcccttctcatccatcctatgca

SEQ ID NO: 47898 - DNA, 1424 bp, Homo sapiens
tcccattggggattagggtttcaatatggtgcattttggagggacatgattagtagtggttaggccttcaacatacaaattttgggaaactttgctatttagtcattagcaagggatgagggccacaagctaaaaatcatctctatttttaaaagatttctctgcttaagaataattccaggatcaaagcagaaaccaggacagaagccaagagatcaatcaggaggatgtggctatgatccagatgacatatgtcatgcatgagggtgaagaaagcaaaggcaggaaaatctgatccaatttgacaaatgtttgaggtcattcaagagacttgccaatgaattgtataagggggagataagagaaagaagagttcaaagtttccaaagtcttctgccaaaacacttctcaggggtggtggtgattccagtgaaggctttccagatggtttgggatgggttaacttggaagccctaatcatttatctgagctgagaagttgaggatacagttacatgcacgaatctgaagtascgaaaagatgtcaaagccagagatgggaatttaggattttgagtggatgtgtcaagtcctggggctgagtgagatcccctggagagagaaggaagcttatgtttgagccctagttcagcccagcatttagaagaacccctttgggaagaggagaagaacgagcaaaggctaaatgtgactccctgttttagaagaatctccttcagaagaagaatcaataaagcaaaggctgaactcaactttgtcttcttttctcccccagacataatttatgttcttttattgggagtttgtttcccactcaacctttcaggttagagctctgaagtcacgtttgatttttccctcaacatcaaagagacacaacagtttgcttctgtggtgactgtttttttgtttgtttttgtatttttgttttttgtttttgtgtgtgtgtttgtgttattttaatttgtttgcttgtttgagacaatgtctcactctgtcacctgggctggagtgcagtggcacaatctcagctcactgcaacctccacctcctgggcttaagtgatcctcccacctcagctcccctagtagctaggactacaggcacacaccaccactcctggctattttttctatttttaatagagatgggggtctcatcatgttgcccaggctggtcttgaattccagagctcaagtgatctgcctgtcttgacctctcaaagtgctgggattacaggtgtgagccatggtgtccagcctcactggtgactttgaatgccttctcacttcttccttcccactccatgctccaggttcaaagactccattaccaccatccatcccatgccagagtctccaggcttccatcttcagtgccatcccttctcatccatcctatgca

SEQ ID NO: 47899 - DNA, 1424 bp, Homo sapiens
tcccattggggattagggtttcaatatggtgcattttggagggacatgattagtagtggttaggccttcaacatacaaattttgggaaactttgctatttagtcattagcaagggatgagggccacaagctaaaaatcatctctatttttaaaagatttctctgcttaagaataattccaggatcaaagcagaaaccaggacagaagccaagagatcaatcaggaggatgtggctatgatccagatgacatatgtcatgcatgagggtgaagaaagcaaaggcaggaaaatctgatccaatttgacaaatgtttgaggtcattcaagagacttgccaatgaattgtataagggggagataagagaaagaagagttcaaagtttccaaagtcttctgccaaaacacttctcaggggtggtggtgattccagtgaaggctttccagatggtttgggatgggttaacttggaagccctaatcatttatctgagctgagaagttgaggatacagttacatgcacgaatctgaagtagmgaaaagatgtcaaagccagagatgggaatttaggattttgagtggatgtgtcaagtcctggggctgagtgagatcccctggagagagaaggaagcttatgtttgagccctagttcagcccagcatttagaagaacccctttgggaagaggagaagaacgagcaaaggctaaatgtgactccctgttttagaagaatctccttcagaagaagaatcaataaagcaaaggctgaactcaactttgtcttcttttctcccccagacataatttatgttcttttattgggagtttgtttcccactcaacctttcaggttagagctctgaagtcacgtttgatttttccctcaacatcaaagagacacaacagtttgcttctgtggtgactgtttttttgtttgtttttgtatttttgttttttgtttttgtgtgtgtgtttgtgttattttaatttgtttgcttgtttgagacaatgtctcactctgtcacctgggctggagtgcagtggcacaatctcagctcactgcaacctccacctcctgggcttaagtgatcctcccacctcagctcccctagtagctaggactacaggcacacaccaccactcctggctattttttctatttttaatagagatgggggtctcatcatgttgcccaggctggtcttgaattccagagctcaagtgatctgcctgtcttgacctctcaaagtgctgggattacaggtgtgagccatggtgtccagcctcactggtgactttgaatgccttctcacttcttccttcccactccatgctccaggttcaaagactccattaccaccatccatcccatgccagagtctccaggcttccatcttcagtgccatcccttctcatccatcctatgca

SEQ ID NO: 47900 - DNA, 607 bp, Homo sapiens
actgggtattcaattaatttttttcatctttcttagtttagattgtcagtgttttaatgacagtcagcatgtctgtttcacctttgttgtcaccacagggtctagcacaggtggggtggaatagtgggaacctaaaaattctttgttggctgggtgtggtggctcacgcctgtaatcccagcactttggaaggcrgaggcgggcggatcacctgaggtcaggagtttgagaccagcctggccaacatgatgaaaccccatctctactaaaaatacaaaaattagccgggtatggtggtgcatgcttgtaatcccagctacttgggtggctgaggcatgagaatcacttgaacccaggaggcggagggtgccatgagtggagattgagccactgcactccaacctgggtgacctatggagaccccatctcaaaaaaaaaaaaaaaaaaaaaaaaagaaaaaaaaattctttgttaggtctcagctctccaccctggatctaccactaactgccactgcccatagtccagtgccaaagagaagaaaaaaacaggcaaacaaaaaattctacagagaatgagactgacatattctgcaagatctgactat

SEQ ID NO: 47901 - DNA, 631 bp, Homo sapiens
gaagttaaattgtcatcttcatgtaaggctgtaagaaggtctaaatgaggatggacccagactggacaagtgatatttacatgtgctgatattaaacacgacaccatgaggacttggagcaatgctgacactcaaaggcatttccttccttttgttattaaatttagaatgggaaaatagaagaaaaacttttaccctgttaaccgtaggcttatgaatgaatgttgtccattgtgttcygaacaactattctaaaagtaggcccatatatgaaggtctgcaaatggaggacaaaagaatcaacttctattattaatctctgtggggcaagatatatctttgattttaagaaatgggggtgtggactcaagcattaggctgacattataatgcaactcatttctccctctggtgtcacccttctctctgggcctaatttcagggaggtctggatgtgcttcagatttttgcccaatggggaaaaagtgtattgtcctgtatacaggtgggttgggtgctagataacagtaactgcagctcctcataaggataactttgcacctgagttcacatgcatccatcaggtaatgtagccttcttatttcacccctgtttataacttgcattctca

SEQ ID NO: 47902 - DNA, 488 bp, Homo sapiens
acacacacacacacacacacacacacacacacgcaagcactattcatatttaaagcacattctgttctatgacttcatttgtctagcacaaaataaaackatctcagcatatgtcaagtaccaattttttcgtatggccaattataggtattttattttttaaagattagagtgttcttgaagctctttatttttgtcaatgaactaaacattggcaaatatgtagggtttcccacataagaacattattaacatcaaaatagaaagctggtggtagtaataatgattgggaacacagagtctctactcaacgttctagttctgccataccataactttgtgatctcaggaaatctctctccatgttatcatctctatgtatagttctgtcatttttcaataagtgctttttgcttaattatgaagtactagttactataaccattattttgagtttcatgtaaatcaagaacacatggactccactt

SEQ ID NO: 47903 - DNA, 488 bp, Homo sapiens
acacacacacacacacacacacacacacacacgcaagcactattcatatttaaagcacattctgttctatgacttcatttgtctagcacaaaataaaactatctcagcatatgtcaagtaccaattttttcgtatggccaattataggtattttattttttaaagattagagtgttcttgaagctctttatttttgtcaatgaactaaacattggcaaatatgtagggtttcccacataagaacattattaacatcaaaatagaaagctggtggtagyaataatgattgggaacacagagtctctactcaacgttctagttctgccataccataactttgtgatctcaggaaatctctctccatgttatcatctctatgtatagttctgtcatttttcaataagtgctttttgcttaattatgaagtactagttactataaccattattttgagtttcatgtaaatcaagaacacatggactccactt

SEQ ID NO: 47904 - DNA, 488 bp, Homo sapiens
acacacacacacacacacacacacacacacacgcaagcactattcatatttaaagcacattctgttctatgacttcatttgtctagcacaaaataaaactatctcagcatatgtcaagtaccaattttttcgtatggccaattataggtattttattttttaaagattagagtgttcttgaagctctttatttttgtcaatgaactaaacattggcaaatatgtagggtttcccacataagaacattattaacatcaaaatagaaagctggtggtagtaataatgattgrgaacacagagtctctactcaacgttctagttctgccataccataactttgtgatctcaggaaatctctctccatgttatcatctctatgtatagttctgtcatttttcaataagtgctttttgcttaattatgaagtactagttactataaccattattttgagtttcatgtaaatcaagaacacatggactccactt

SEQ ID NO: 47905 - DNA, 488 bp, Homo sapiens
acacacacacacacacacacacacacacacacgcaagcactattcatatttaaagcacattctgttctatgacttcatttgtctagcacaaaataaaactatctcagcatatgtcaagtaccaattttttcgtatggccaattataggtattttattttttaaagattagagtgttcttgaagctctttatttttgtcaatgaactaaacattggcaaatatgtagggtttcccacataagaacattattaacatcaaaatagaaagctggtggtagtaataatgattgggaacacagagtctctactcaacgttctagttctgccataccataactttgtgatctcaggaaatctctctccatgttatcatctctatgtatagttctgtcatttttcaataagtgcttttkgcttaattatgaagtactagttactataaccattattttgagtttcatgtaaatcaagaacacatggactccactt

SEQ ID NO: 47906 - DNA, 570 bp, Homo sapiens
atgtaaattgtgggtagacacaaatgttcagaccacagcacaaagtgacagtgccttctatttccctgagattatgtatgccatgcacactgtggtcatgttctgtattcttcacatggctattctaatgatcatattctccactattatactatactttcctcaaatctcacacatatcttgcaatgggaaatgaaccttatagtgggaaagtctacaaggccttctttctcctgcacatttagctatcgaaatgattccctcatctcaatctttctgagccatttttctcaagacactctatcgttgtttttttaatattcatggtaagaaaatagttagcatttctgtctttaaagttatycccaagagatccaaaataaattaaaatgagggctctgtttatgggcaatcaattgggcccatgtactgtttgggttccccagcctcatatccttctaggcctggccctatcttaacataaatatttattctcccttaaaagtaccagacctcaccactatgcaatatatctgtgtaacaaaattgcacttgcaccccttaaattta

SEQ ID NO: 47907 - DNA, 567 bp, Homo sapiens
  misc_feature (1)...(567): n = A,T,C or G
gcaaagtaagcaagtgtttataaaaacattaactgaccttggggagagtatctttgtattgacactgtttgaaagcatcaccaaaataatctgcagcctgattagccaatttagctatgatggcatctttcattttatctggaatacaatatgaccattataattaaaataaatatgagctaatctgacatgtctcagtataaacactgaggtcacaagtttgtacacgcatctgaaaacatctttcttgatgaaatcacattttctgcacaaaatttagaacagacaaaatagattagtggttgccagcagygggggaaaggggagtgaggagtgactgctaatgggtacatggcttctttctgggatngatggtaatgttctaaaataagatagtgggtaatcaaaactctatgaatatactaaaaatcttatgttgtatacttagaaagggtgaacttgagtgtatataaattctatctcaatataagctgttattttaaaagaaaaaagtattccaattcctatttcttccacatgatgacttatctcttattttcagtttca

SEQ ID NO: 47908 - DNA, 623 bp, Homo sapiens
aaatacgcactcagacccatgtacttcatgaaacatacaagcccagagctagaccatgccatctgttttatgaggaaaaaaaataaattcacatgatttacttactttagctctgccagaaatcatcagcatctacttgcacaactaaagacaagaagacaaggcagatggaggctaaacaccgaatactgcctaattttgatgtatatttttgggtcaaacctcttataatttactatttccaagagggaaaataagcttatataatggcactgaatcattggcttccagttatgggaagcaaaggaaattaacctcaaggggaaaaaaatgctacaaatataaataatatagtttctgtttacgaagcagtttttcatgtactgccatttctttctttttttaaagaagatatgtttacaaaataggtgaccaactaaggtaggtgtgtgtgaagagaggcagtgagagagaggggatcctgaaattcttttcagtaaaggaaaaagataattttagggatgtttttaaaaatatataacttgatgaattttttatagcaygagtattatttaggtgctgtcctagaccagtgtggcgtataggctatagaagattggtcc

SEQ ID NO: 47909 - DNA, 584 bp, Homo sapiens
gggagggccttggcagtggaccaagatgcataaaagccagttccagcggggctgtgcacactgtcgttcaggtcgcatcctgtacaagtgggcctagtggaggggcacaagcggggactcatccaacccaggcttctctcctcaagccccatgcctagaggaataggagggcttttccatttggtttattgggtgggaacacttyccaatttgccacaaagcactgtaagtggtggcagttgttcttgggtgcaagaaccgtcggggagaggcagctgggtttccacagggggtgtaggcaactgataatgaacctcccacccacaccctaggccaacagatcacagaaccccttcagcccaggtgccttgcagccacacccactacccaccccacttctccacacatgatagcctttctccctgggtataggggaagggggtctgggccggagcaagcagccttaatcctgtgccccctgaccactgtcctggccccaggtgtgaaagcctggtggacatttattcccagctacagcaggaggtaggggcggctggtggggagcttgagcccaagacccgggc

SEQ ID NO: 47910 - DNA, 584 bp, Homo sapiens
gggagggccttggcagtggaccaagatgcataaaagccagttccagcggggctgtgcacactgtcgttcaggtcgcatcctgtacaagtgggcctagtggaggggcacaagcggggactcatccaacccaggcttctctcctcaagccccatgcctagaggaataggagggcttttccatttggtttattgggtgggaacacttcccaatttgccacaaagcactgtaagtggtggcagttgttcytgggtgcaagaaccgtcggggagaggcagctgggtttccacagggggtgtaggcaactgataatgaacctcccacccacaccctaggccaacagatcacagaaccccttcagcccaggtgccttgcagccacacccactacccaccccacttctccacacatgatagcctttctccctgggtataggggaagggggtctgggccggagcaagcagccttaatcctgtgccccctgaccactgtcctggccccaggtgtgaaagcctggtggacatttattcccagctacagcaggaggtaggggcggctggtggggagcttgagcccaagacccgggc

SEQ ID NO: 47911 - DNA, 584 bp, Homo sapiens
gggagggccttggcagtggaccaagatgcataaaagccagttccagcggggctgtgcacactgtcgttcaggtcgcatcctgtacaagtgggcctagtggaggggcacaagcggggactcatccaacccaggcttctctcctcaagccccatgcctagaggaataggagggcttttccatttggtttattgggtgggaacacttcccaatttgccacaaagcactgtaagtggtggcagttgttcttgggtgcaagarccgtcggggagaggcagctgggtttccacagggggtgtaggcaactgataatgaacctcccacccacaccctaggccaacagatcacagaaccccttcagcccaggtgccttgcagccacacccactacccaccccacttctccacacatgatagcctttctccctgggtataggggaagggggtctgggccggagcaagcagccttaatcctgtgccccctgaccactgtcctggccccaggtgtgaaagcctggtggacatttattcccagctacagcaggaggtaggggcggctggtggggagcttgagcccaagacccgggc

SEQ ID NO: 47912 - DNA, 584 bp, Homo sapiens
gggagggccttggcagtggaccaagatgcataaaagccagttccagcggggctgtgcacactgtcgttcaggtcgcatcctgtacaagtgggcctagtggaggggcacaagcggggactcatccaacccaggcttctctcctcaagccccatgcctagaggaataggagggcttttccatttggtttattgggtgggaacacttcccaatttgccacaaagcactgtaagtggtggcagttgttcttgggtgcaagaaccgtcggggagaggcagctgggtttccacagggggtgtaggcaactgakaatgaacctcccacccacaccctaggccaacagatcacagaaccccttcagcccaggtgccttgcagccacacccactacccaccccacttctccacacatgatagcctttctccctgggtataggggaagggggtctgggccggagcaagcagccttaatcctgtgccccctgaccactgtcctggccccaggtgtgaaagcctggtggacatttattcccagctacagcaggaggtaggggcggctggtggggagcttgagcccaagacccgggc

SEQ ID NO: 47913 - DNA, 584 bp, Homo sapiens
gggagggccttggcagtggaccaagatgcataaaagccagttccagcggggctgtgcacactgtcgttcaggtcgcatcctgtacaagtgggcctagtggaggggcacaagcggggactcatccaacccaggcttctctcctcaagccccatgcctagaggaataggagggcttttccatttggtttattgggtgggaacacttcccaatttgccacaaagcactgtaagtggtggcagttgttcttgggtgcaagaaccgtcggggagaggcagctgggtttccacagggggtgtaggcaactgataatgaacctcccacccasaccctaggccaacagatcacagaaccccttcagcccaggtgccttgcagccacacccactacccaccccacttctccacacatgatagcctttctccctgggtataggggaagggggtctgggccggagcaagcagccttaatcctgtgccccctgaccactgtcctggccccaggtgtgaaagcctggtggacatttattcccagctacagcaggaggtaggggcggctggtggggagcttgagcccaagacccgggc

SEQ ID NO: 47914 - DNA, 1059 bp, Homo sapiens
gcctggggctctcccacagggggctttcgtgagccaggcagcgagggccgcccccgcgctgcagcccagccaggccgcgacggcagagggggtctcccaacctgccccggcgcgcggggatttcgcctacgccgccccggctcctccggacggggcgctctcccaccctcaggctcctcggtggcctccgcacccgggcaaaagccgggaggaccgggacccgcagcgcgacggcctgccgggcccctgcgcggtggcacagcctgggcccgctcaagcggggccgcagggccaaggggtgcttgcgccacccacgtcccaggggagtccgtggtggggctggggccgggtccccaggtcgccggggcggcgtgggaaccccaagccggggcaagcttccacctccccagcccgcgcccccggacgcctccgcctccgcgcggcaggggcagatgcaaggcatcccggcgccctcccaggcgctccaggagccggcgccctggtctgcactcccctgcggcctgctgctggatgagctcctggcgagcccggagtttctgcagcaggcgcaacctctcctagaaacggaggccccgggggagctggaggcctcggaagaggccgcctcgctggaagcacccctcagcgaggaagaataccgggctctgctggaggagctttaggacgcggggttgggacggggtcgggtggttcggggcagggcggtggcctctctttcgcggggaacacctggctggctacggaggggcgtgtctccgccccgccccctccaccgggctgaccggcctgggattcctgccttctaggyctaggcccggtgagagactccacaccgcggagaactgccattctttcctgggcatcccggggatcccagagccggcccaggtaccagcaggtgggccgcctactgcgcacgcgcgggtttgcgggcagccgcctgggctgtgggagcagcccgggcagagctctcctgcctctccaccagcccaccccgccgcctgaccgccccctccccaccccccaccccccaccccc

SEQ ID NO: 47915 - DNA, 1059 bp, Homo sapiens
gcctggggctctcccacagggggctttcgtgagccaggcagcgagggccgcccccgcgctgcagcccagccaggccgcgacggcagagggggtctcccaacctgccccggcgcgcggggatttcgcctacgccgccccggctcctccggacggggcgctctcccaccctcaggctcctcggtggcctccgcacccgggcaaaagccgggaggaccgggacccgcagcgcgacggcctgccgggcccctgcgcggtggcacagcctgggcccgctcaagcggggccgcagggccaaggggtgcttgcgccacccacgtcccaggggagtccgtggtggggctggggccgggtccccaggtcgccggggcggcgtgggaaccccaagccggggcaagcttccacctccccagcccgcgcccccggacgcctccgcctccgcgcggcaggggcagatgcaaggcatcccggcgccctcccaggcgctccaggagccggcgccctggtctgcactcccctgcggcctgctgctggatgagctcctggcgagcccggagtttctgcagcaggcgcaacctctcctagaaacggaggccccgggggagctggaggcctcggaagaggccgcctcgctggaagcacccctcagcgaggaagaataccgggctctgctggaggagctttaggacgcggggttgggacggggtcgggtggttcggggcagggcggtggcctctctttcgcggggaacacctggctggctacggaggggcgtgtctccgccccgccccctccaccgggctgaccggcctgggattcctgccttctaggtctaggcccggtgagagactccacacmgcggagaactgccattctttcctgggcatcccggggatcccagagccggcccaggtaccagcaggtgggccgcctactgcgcacgcgcgggtttgcgggcagccgcctgggctgtgggagcagcccgggcagagctctcctgcctctccaccagcccaccccgccgcctgaccgccccctccccaccccccaccccccaccccc

SEQ ID NO: 47916 - DNA, 541 bp, Homo sapiens
tcacacaattggcagtgtcagaatttgaactcagaagacaccaaagtcactacacaacacgatatcctacacccttgatctgaggacccaaaatctagtgtcacatggtccagaaatacctggatgaatctcttgcggggcatcgagaagaaactggggatgtatacattttggaaaacgggacatgtcaacaaatctgaaggacgatgatatacaatagaagtgagaattttgttgttgctgcttcaaagggcaaaagtaggctgcaaatgtgaaagccacaggaaggcagattatgcttccctagaaggaaacactatgcagctgtgtattgttaacaaaggaatgggttgcactgagatcttccccaacacagaagtacatttctgcataactctgtacttcttagtatgctgtttcttcatcctggagtattgagtgaactcctattcrtccttcaggactcagcacaaatgccattcgtccatgcacccatccatccaaaagtattcattgaatgctatatgccaggaaatatatt

SEQ ID NO: 47917 - DNA, 541 bp, Homo sapiens
tcacacaattggcagtgtcagaatttgaactcagaagacaccaaagtcactacacaacacgatatcctacacccttgatctgaggacccaaaatctagtgtcacatggtccagaaatacctggatgaatctcttgcggggcatcgagaagaaactggggatgtatacattttggaaaacgggacatgtcaacaaatctgaaggacgatgatatacaatagaagtgagaattttgttgttgctgcttcaaagggcaaaagtaggctgcaaatgtgaaagccacaggaaggcagattatgcttccctagaaggaaacactatgcagctgtgtattgttaacaaaggaatgggttgcactgagatcttccccaacacagaagtacatttctgcataactctgtacttcttagtatgctgtttcttcatcctggagtattgagtgaactcctattcatccttcaggactcagcacaaatgccattcgtccatgcacccatycatccaaaagtattcattgaatgctatatgccaggaaatatatt

SEQ ID NO: 47918 - DNA, 2232 bp, Homo sapiens
ttacaacaaaatgtgatggatcagagtagcaattcatgcacagacatttatggaacatagtctggacatcatcaggctggcattggttgttcagtggtgaacaaaacaaaatgggccagaccaccttggagctcagagtctagcaaagtcattgtgaagagagcatagtattaacatgcttaacaatggatggtgttattataaagaaggccttgctgggcatggtggctcatacctgtaatcccagcactttgggaggccaagacaggaggatcacttgagaccaagagtttgaaaccagtctgggcaacatattgagactgtatctctaccaaaaacaaaaacaaaaacaaaaacaaaagccaggcatggtggtgtgggcctgtagtcctagctgcttgggaggctgaggccggagaattgcttaagcccatgtgggcaaggctgcagtaagtcacaattgtgccactgcactccagcctgggtgacagagcaaggccctgtatctcgcggggacggcggggggggaaggccttgtcaagaacagatgccagaaaaagggggctaggagatcatttatgaacaattctatttaaatatcgttcaagggagaggacactgtgagcaacaactttggtgattaccatcccattgctaaggacaatctgattatggaaaaaggggacttcaacccatcttggtgatcttggcgtaatcattaaacatgatgattatgtacaaccttctgattataatttggcgtcccagccaggtctgcctacaagcacagaatgagttgaccgtgcttaactgaatttcagacatgcaaggcaattattctcctgtgatcctggcattgtgtttttatgcagcagcctcataaacttggatagtatgagactgctcttgggagaagaaactgctgttggtaggctggtcaaccatggtcgatcaccaaggtgataccatcctagggatcttggggatatttaaccaattggaactcccttggaacctcccccaaatcaaaccacaatgacactcaaccagcatttccccagggtgctaataaggaggtgtatgagaggcttgtcaggtgctcaatggagtctagacattttctatctttgacatttctcagtgtagtgaacccattgagaagatagatgaggcattgctagcatgattgattcttgcttggcttctagggaccactgtttcctttttttttttttttttttttgcggggggtgggggtagcatggggggataragtcttgctctgttgcccaggctggagtgcagtggcatgatctcggctcactgcaacctccgcctcccaggttcaagtgattttcctgtctccgtctcctgagtagctgggattacaggtgccaaccaccacgcccagctaatttttgtagttttagtagagacggtttcaccatgttggccaggctggtctcaaactcctgacctcaggtgatccattcccctcggtctcccaaagtgctggaattacaggcatgacccattgcgcccggccccactgtttcctttctaatcgagtgagaaaatggtcagtatttctgtcaacaaaattcatgaggctctttgtacgcacagacttcaggcctttctctcaacaatcgccaaagctggagcatcacatggaggaacactggggtttgaaaaacaggaatgttccagaatcttctcagagtattacattttccaacatgtccatcccatatttgtaccaacaaacagagctggtcccactgccctcatcctttgtctaccatgttaggctgaggaagttgcatgcagagcagaggtgaagactaagagaagaagatacaagaaacctgctgagtaggggagagggaaatggtacctctgccagttatgctggaaaagctaaatgaaacccaaatcttgatggaggtgttagggttttcagtctttcaagagaagctcaggacacaggctttttggcttaaggaccccaaatttcctgggcaccacaaaagtagtaacggcagtcctccaggtgaatcagtgtcaagagctagactgtaatcacttgccttttgttgcattacaagccactcttgaaacacttagtggattgaaacaacaacttcttatttctcaatgattctttggcttgactgggcactctttctgctggtcttccctgggcagttcttctgctggttctgcctgggc

SEQ ID NO: 47919 - DNA, 1567 bp, Homo sapiens
tgttgatctgtgaccttacccccaaccctgtgctctctgaaacatgtgctgtatccactcagggttgaatggattaagagcggtgcaagatgtgctttgttaaacagatgcttgaaggcagcatgctccttaagagtcatcaccactccctaatctcaagtacccagggacacaaacactgcgcaaggccgcagggtcctctgcctaggaaaaccagagacctttgttcacttgtttatctgctgaccttccctccactattgtcctgtgaccctgccaaatccccctctgcgagaaacacccaagaatgatcaataaaaacaaacaaacaaacaaacaaacaaacaaactcctgagttcaagcaatccacccgccttggcctcccaaagtgctgggattacaggcgtgagccactgcgcccagcctcatcatctttctaagcctcagtttccccacctgtaaaatggagctgatcatagtatcttcttcataaggttattttgcatattgaatgggataacatgtgcaaagaagttcccccagtgcctggaaggcagtgatcctgcagcaaatgttatccacgattaggattcttgttgtcccacatgaatttgctgggtgctacagattctgtctggctcccaaagctcagaattcattctggcctcccacgggtggaggcagggtttgggggaggtttgtaactctaaagatggcacgtcttgaactgaaagctggcgctgtcaagcttcttcacaatcagtaagaacggctttcttcccccttttccctaaatataaacccaactgccaatcgctttaaagtcttcatgtctgcagcaggagcaacccacgagtccaaaggtgaggcagctggcagagggctgttgttagtgggatccacccagcccagcccagctccaaggagacacacttcatgggactggatgtgggcaactcagcatttcttccttatgattcttaattgctcctgaaaacagtaaccccaaagttacgagccccagtgtgtactataacagtctcttaaagtactgggtttcagggctgggcacagtggctcacttgtgtaatcccagcactttgggaggccaaggcaggaggatcacttgaggtcaggagttccagaccagcctggccaacatagtgaaacaccatctctagtaaaaatactaaaattagccgggcatggtggsgcatgcctgtaatcccagctacttgggaggctgaggcaggagaattgcttgaaccaggaggcggaggttgtagtgagccgagattgcaccactgcactccagcctgggcaacagagcgagactccatcgcaaaaaaaaaaaaaaaaaaaaaaaagtattgggttttagaagacggcttgctggaagcaaacatctttgtccttccctctcccttgaagcaagcaaaggaaagccacacacaggttgtccttattacatagcaacattatccctaggccagaagtcgaagtaggctctggagccgaaaggcttaagttcagatcctagccctgccgctttccatctgtgtgacc

SEQ ID NO: 47920 - DNA, 1567 bp, Homo sapiens
tgttgatctgtgaccttacccccaaccctgtgctctctgaaacatgtgctgtatccactcagggttgaatggattaagagcggtgcaagatgtgctttgttaaacagatgcttgaaggcagcatgctccttaagagtcatcaccactccctaatctcaagtacccagggacacaaacactgcgcaaggccgcagggtcctctgcctaggaaaaccagagacctttgttcacttgtttatctgctgaccttccctccactattgtcctgtgaccctgccaaatccccctctgcgagaaacacccaagaatgatcaataaaaacaaacaaacaaacaaacaaacaaacaaactcctgagttcaagcaatccacccgccttggcctcccaaagtgctgggattacaggcgtgagccactgcgcccagcctcatcatctttctaagcctcagtttccccacctgtaaaatggagctgatcatagtatcttcttcataaggttattttgcatattgaatgggataacatgtgcaaagaagttcccccagtgcctggaaggcagtgatcctgcagcaaatgttatccacgattaggattcttgttgtcccacatgaatttgctgggtgctacagattctgtctggctcccaaagctcagaattcattctggcctcccacgggtggaggcagggtttgggggaggtttgtaactctaaagatggcacgtcttgaactgaaagctggcgctgtcaagcttcttcacaatcagtaagaacggctttcttcccccttttccctaaatataaacccaactgccaatcgctttaaagtcttcatgtctgcagcaggagcaacccacgagtccaaaggtgaggcagctggcagagggctgttgttagtgggatccacccagcccagcccagctccaaggagacacacttcatgggactggatgtgggcaactcagcatttcttccttatgattcttaattgctcctgaaaacagtaaccccaaagttacgagccccagtgtgtactataacagtctcttaaagtactgggtttcagggctgggcacagtggctcacttgtgtaatcccagcactttgggaggccaaggcaggaggatcacttgaggtcaggagttccagaccagcctggccaacatagtgaaacaccatctctagtaaaaatactaaaattagccgggcatggtggcgcatgcctgtaatcccagctacttgggaggctgaggcaggagaattgcttgaaccagraggcggaggttgtagtgagccgagattgcaccactgcactccagcctgggcaacagagcgagactccatcgcaaaaaaaaaaaaaaaaaaaaaaaagtattgggttttagaagacggcttgctggaagcaaacatctttgtccttccctctcccttgaagcaagcaaaggaaagccacacacaggttgtccttattacatagcaacattatccctaggccagaagtcgaagtaggctctggagccgaaaggcttaagttcagatcctagccctgccgctttccatctgtgtgacc

SEQ ID NO: 47921 - DNA, 577 bp, Homo sapiens
ggatttgatgcaatacagaagataaaacccaacagaaaagctcacttcgggcatgtgatcctgggtatcaggtgttacattatatagtattttacagaggaagtagctcagcaaatttaactggcctcagagtctgtggttcagttggtttgcacagggtaaaagctggtgagtgggttatacaccatcacaaaggatgcccattcttcgcagtgactgcagatgcgtgcggacggagagcacaaggatctcactatcatttctccctgctaactcctagaaagctttccactttcttggayacgttatttaaagtgtatagtttgttttttaaacttgtgtcagaaacacttaccaccatattgcttcactgtactattccaagtcagctcctctgtagccgacctctatatggtgcttggtaaagctattcaatgaaatttagtaccgggaggaaattaggcagcaaaagctccaccttttttttggtggcatattcttcaagtaaattcttaactgtctttgctaaatgcaaagctacatggggttagattatataaatatgacaaatagaaca

SEQ ID NO: 47922 - DNA, 531 bp, Homo sapiens
tgtagcatcattttggaggattctgagccattacctgagcataggtgagccaaagtttgccagaagcttaggaagaactttggcctaccacttcctaaagagcatagctgtggatcccaggctaaacacaggctttaatatagctcactacaacctcaaattcckgggctcaagcaattctcccacctcagcctcccaagtagttggtactacaggcacgtgccaccatacctggctgattttatctttacttttttgtagagacagagtctcactatgttgcccaggctggtcatgaactcctagcctcaagcaatcctctcttctcagcctcccaaagtgctgggattacaggcgtgagccaccactcctgaccttgtaacattttttaaatgactgaatccattatgtttaaaggctgtgcgtgcagatgtgcacaggtagaataactttcccccattcattccatgtgtcttacgtccttttattagtcctagatggtacctggtgatgtccagcaattgacagctc

SEQ ID NO: 47923 - DNA, 582 bp, Homo sapiens
tcaggtgatctggacacaggaaggcgaggccttgtccgtatgttcaaaatagtttttaatcataagctttatatacaaattgctgtacagtcatcttaataaagtgaaatagtgagtgaaaagtacaaaacacaaagcccccacgttccccttggtgaagtatcaaaggatcactcacagcccagaagccccaaattagtgacaaggtaagtggacaagtctgtgaaacaggctaaggcaagtgctgtaaactggctattagaggcgaacaggctccactgcagaccagaagcctgagttcctactgcccaaactggttctgtggaagaattaaatgaaatgaatattgatgggccagaaccttctagtagacctgcgaactcataaaaatggtatatattatgctaaaaatagtttagcagtagtgtagctcagtctctcccacccccaattaagtatkgacaatacacaaattctaaaacatgaagctgtttaaagcattaataaactgtgaacatattgcactagataagtgaacactcctgtttctccaaatacatgagtgagttgcatttcccagca

SEQ ID NO: 47924 - DNA, 1264 bp, Homo sapiens
tttttggccttaatagctaggtaatgttgatgcaggtggttgtggttctcagctccatgggtatttagcccgtgtatctcccactactatcttcctttttcacctcttctctgtagttatatccctgtttttaattcaccttgtggttatattcagcaacttgaaatagctttcatcactctgccttttttattctagcagttttggcccttgactgtcactctgtaagatgagttattaagacctctacttttctacttttcttccccctttcttcctgccaatttctgtcagctgggctgtgtgccaaggtgtaaaacatttgcgttatgcttttaaccataattacattttctgagctgtcactaatgattgagtcaacaacttgaaaataacaagttgtatttacatgaatgtaataagaatgatacatttctacaaacatttgactgtgtgttgagcacacatttaagttctctctgcatattaattgatttcaacctaatactagacactattattagctcaatttcacaaatgaggaaactggggcacagagaggtttagtatcttgcccccagtggtttgctgcctactcttttaaaataccatgccttcattctctaccctagaacaggcaccctcattctgccatgcctccaatttgttcatttcacagggatttttcttaccctgagccatcccagaggctgttctcagtgttttttgaacttcttctcccaactttacctcaacagttcctacttaccatgctgatatcagctaatatcagttcctcagagagatcttctctaacagggtatcagaagtttcttcttcttcttctyctttttttttttttttttttgacagagtctcgctctgttatccaggctggagtgcaatggcacaatctcggcgcactgcaacctcctgggttcaagtgattctcctgcctcagcctcccaagtagctgggattataggcgcccaccaccacacccaactaatttttgtatctttagtagggacggtgtttcaccatgttggtcaggctggtcttgaactcgaggcaggtgatccacccatcttggaccaaagtgctgggattataggcgtgagccactgcgcccagtcagaggttcttctattgtctctctcatagcttccattatgttatttcctggaagtcagcgtaatttgcaaatacataatcctttttgtgtgtatcagtatactgcctctttttccttcttgacaatgag

SEQ ID NO: 47925 - DNA, 1264 bp, Homo sapiens
tttttggccttaatagctaggtaatgttgatgcaggtggttgtggttctcagctccatgggtatttagcccgtgtatctcccactactatcttcctttttcacctcttctctgtagttatatccctgtttttaattcaccttgtggttatattcagcaacttgaaatagctttcatcactctgccttttttattctagcagttttggcccttgactgtcactctgtaagatgagttattaagacctctacttttctacttttcttccccctttcttcctgccaatttctgtcagctgggctgtgtgccaaggtgtaaaacatttgcgttatgcttttaaccataattacattttctgagctgtcactaatgattgagtcaacaacttgaaaataacaagttgtatttacatgaatgtaataagaatgatacatttctacaaacatttgactgtgtgttgagcacacatttaagttctctctgcatattaattgatttcaacctaatactagacactattattagctcaatttcacaaatgaggaaactggggcacagagaggtttagtatcttgcccccagtggtttgctgcctactcttttaaaataccatgccttcattctctaccctagaacaggcaccctcattctgccatgcctccaatttgttcatttcacagggatttttcttaccctgagccatcccagaggctgttctcagtgttttttgaacttcttctcccaactttacctcaacagttcctacttaccatgctgatatcagctaatatcagttcctcagagagatcttctctaacagggtatcagaagtttcttcttcttcttcttytttttttttttttttttttgacagagtctcgctctgttatccaggctggagtgcaatggcacaatctcggcgcactgcaacctcctgggttcaagtgattctcctgcctcagcctcccaagtagctgggattataggcgcccaccaccacacccaactaatttttgtatctttagtagggacggtgtttcaccatgttggtcaggctggtcttgaactcgaggcaggtgatccacccatcttggaccaaagtgctgggattataggcgtgagccactgcgcccagtcagaggttcttctattgtctctctcatagcttccattatgttatttcctggaagtcagcgtaatttgcaaatacataatcctttttgtgtgtatcagtatactgcctctttttccttcttgacaatgag

SEQ ID NO: 47926 - DNA, 1941 bp, Homo sapiens
tggtatcaaggtgttgcccgaaggtttcagcaccatgtggtcaattgtccatgcatctttatgccaatctatcatccccgctgctgggtcccagagccattcaagttggtctgaggcattcagggcttgccatctcccagtgggcacaaggcagctcccctgcaagaacacttcccagctttgatgacctaaccctccttgctggggtgcagataaaggacacggcaggtgcactacctctgtaaccctcactcaaatatgccagtctgtgggctcatatgccttgacctccaaagcacagacatgccagctgggcataagctgggacccctttggaggggagccagaagcattcagagccatcagcaaagcagagtctgcctctctgcagggagctgtctgtggagctccctgtgtgccctgatggtaggattcaatcgctccacagaaacctggaattctccctgttgtcctgaactgtgagaagccaagtcctgtgttttagatacaataccatctgaattctgctctcactgctggcccatgttctgtggcttcagccgagtaattcmactctccagggctctttgtcatccatctgtgagagccagtccgggcagagaaggagaggagcagggcaagctgagaatgcagcccatgatgccgccccgattatggtgtttcctcactggacacgtggatgaagcgtgctcgggttttgacatctcataaagaatgagctgacagaattgggtttgattcagtcattttgaaaataagcgaagttgctttttgatatcctttttgtcgaaaatgacaaatagcttgcctttgtgtatacctgcctcgtttctcagtccggatatatctgtttcttaggaagtggggggaccagcaggaggggaggaacatggctgtctcatggccccagcagccagagaaagcccccaggtaggtgctggctgtgacatcaggtccccgtgcactaaaatagtggggagcaaggagcatgggtagggcacatgcccagtctgcccctggtgaaatgacagagaagagcccttcctagttaggcattcaaatcacgactggatcccccaatacacaaaggcgtggttgatgtttccatgccagatcctagcacggaaagctgttcacccaataagcgtccacccacgcccccacttctggcctgttccactgatgaaggtgcccgtatatgtatctgtctgcccatagtggggtttctttgcctgcttttattttaccagtggctacatttcatcatccagcttcatttcccatagaagttctgaatgttgtctggttttcctcgaaactatgaatcacactgtgcacgccctacctctctctagcattgtaagaaaagcactcctctgtgcaggacacaatcctgtctactgcccctgagagccctggttcatctcgtccctccattccagttccttctagaaggtaaaagttggaaagtgacctgagcccagtgcgggacaatatggcagtgctcttcaaggcctccgctggaacatcttgtgtctcccaagctggatgctgtgcctggtcattggagaaagtaaaggcaaagcctcaggacagcttccagacaccagtctcttcatcgggacgaggtcagctgctggctcccaggttgggtccagctcttcatcatttactattagacccacacagtgttttaaatatttcagtgaattgtgcatatttaagaaatgtgagattttacagaaagatttgcatttctggcttttctaaaaaaaaaaaaaaatcaaagtgtcttgcaatgctggcaaccagcccaacgtggcaatcagtgcctgcattagcttcctccttagtgccgccaggctggctcctgcagccctgggagcctcaacatcactaaatacctataacacaatagcc

SEQ ID NO: 47927 - DNA, 594 bp, Homo sapiens
agaatggattatcactgggtgaccgaagctcattgccataggggcactctgagaaatggtacagaattacatgcagagttatccctcagaaggaggaagggagctggggtaattgtaccccagcttttgccagttatctgttgagaaactcagggaagtgtgttaatgtccccagggcccttgtgatatggtgttttgcagcttgtggggaagctttcaggcaaagacatacagatattggaagctaaaagtcccagggaactgataaggctcaggggatgtgagaccaacaacaactgccacattcctttatgtccataacacaaaataaagagcagaaatgtcacagagcctgcaaagggatggagatttgtttcgtcaagaagggaaagaagcactttcataytttttatttagctctcaaatggggtactttctaaagctgtgtgatttatgtatgtattatagccagttgtttccctgcacactgcttacattcatgttatattctggcagaaaaaatctgattttaattgctctaaaaatacatgttcttatctgcaggatttgtattgaggcttactgagagcagct

SEQ ID NO: 47928 - DNA, 594 bp, Homo sapiens
agaatggattatcactgggtgaccgaagctcattgccataggggcactctgagaaatggtacagaattacatgcagagttatccctcagaaggaggaagggagctggggtaattgtaccccagcttttgccagttatctgttgagaaactcagggaagtgtgttaatgtccccagggcccttgtgatatggtgttttgcagcttgtggggaagctttcaggcaaagacatacagatattggaagctaaaagtcccagggaactgataaggctcaggggatgtgagaccaacaacaactgccacattcctttatgtccataacacaaaataaagagcagaaatgtcacagagcctgcaaagggatggagatttgtttcgtcaagaagggaaagaagcactttcatattttttatttagctctcaaatggggtactttctaaagctgtgtgatttatgtatgtattatagccagttgtttccctgcacactgcttacattcatrttatattctggcagaaaaaatctgattttaattgctctaaaaatacatgttcttatctgcaggatttgtattgaggcttactgagagcagct

SEQ ID NO: 47929 - DNA, 650 bp, Homo sapiens
tgcatatttaaaagtgtttggaatataacaagcatgacacttcttttaagtctcttctgttttatctaaaattaatgtgaatttctcattctgtttcagaaacatcagtgcttgttttaatataaaacatttttcttccatgttctttgagtaaagttgatgctactagatacattgtttttgatcttgacctgcttgagaaacacgtacaggttgaatataccttctccgaagtgcttatgactagaaagtgttttggattttgggtttctttttttcttttttttttttcggattttggcatatttgcactatacttaccagttgagcattcctaattttttaatctgaaattcaraatgcttcagtgagcgtttcctttttttttttttttgagacggagtcttgctttgtcgcccaggctggggtgcagtggcgcgcccaggctggagtgcagtggcacgatctcagctcactgcaagctccacctcccaggttcatgccattctcttgcctcagcctccctaggagctgggactgcaggcgcccgctaccatgcctggctaattttttgtgtgtgtgtttttagtagagacggggtttcactgtgttggccaggatgggctcgatctcctgacctcgtgatccac

SEQ ID NO: 47930 - DNA, 650 bp, Homo sapiens
tgcatatttaaaagtgtttggaatataacaagcatgacacttcttttaagtctcttctgttttatctaaaattaatgtgaatttctcattctgtttcagaaacatcagtgcttgttttaatataaaacatttttcttccatgttctttgagtaaagttgatgctactagatacattgtttttgatcttgacctgcttgagaaacacgtacaggttgaatataccttctccgaagtgcttatgactagaaagtgttttggattttgggtttctttttttcttttttttttttcggattttggcatatttgcactatacttaccagttgagcattcctaattttttaatctgaaattcagaatgcttcagtgagcgtttcctttttttttttttttgagacggagtcttgctttgtcgcccaggctggggtgcagtggcgcgcccaggctggagtgcagtggcrcgatctcagctcactgcaagctccacctcccaggttcatgccattctcttgcctcagcctccctaggagctgggactgcaggcgcccgctaccatgcctggctaattttttgtgtgtgtgtttttagtagagacggggtttcactgtgttggccaggatgggctcgatctcctgacctcgtgatccac

SEQ ID NO: 47931 - DNA, 552 bp, Homo sapiens
gggcctgttgaaggatgagggatgagggaagggaactgagaggacgggtcaataggtgcagcaaaccaccatggcaygcatgtacctatgtaacacacctgcacattctgcacatgtatcctgggttgttgttgttgttgttttttttaagaagaaattaaaagaaaaaagaagaataccaaagaaggcctacagaggaagtctagaggatgtggagaggtcaaaggaaactttggggactgtgctaagttggaagctaagagggtgtttcagggagaaacagtcaacaatgtaggaggtttctcagagtaagatgaacacccaaaagtgccttctggaattggcaatgtgaaggtcattcacagttggtccaggggtttgaatgagtgtggggagcaggcatcgactagagtagctggacagtgaggaaggcaaggtcatggagaacttgagcgtagatggctattctgaaaagtgtggctatgaaaaaggggaacagaggaaaggggcgggtgagaggcttgtttttgtacaggggtatgttaaagttgg

SEQ ID NO: 47932 - DNA, 552 bp, Homo sapiens
gggcctgttgaaggatgagggatgagggaagggaactgagaggacgggtcaataggtgcagcaaaccaccatggcatgcatgtacctatgtaacacacctgcacattctgcacatgtatcctgggttgttgttgttgttkttttttttaagaagaaattaaaagaaaaaagaagaataccaaagaaggcctacagaggaagtctagaggatgtggagaggtcaaaggaaactttggggactgtgctaagttggaagctaagagggtgtttcagggagaaacagtcaacaatgtaggaggtttctcagagtaagatgaacacccaaaagtgccttctggaattggcaatgtgaaggtcattcacagttggtccaggggtttgaatgagtgtggggagcaggcatcgactagagtagctggacagtgaggaaggcaaggtcatggagaacttgagcgtagatggctattctgaaaagtgtggctatgaaaaaggggaacagaggaaaggggcgggtgagaggcttgtttttgtacaggggtatgttaaagttgg

SEQ ID NO: 47933 - DNA, 552 bp, Homo sapiens
gggcctgttgaaggatgagggatgagggaagggaactgagaggacgggtcaataggtgcagcaaaccaccatggcatgcatgtacctatgtaacacacctgcacattctgcacatgtatcctgggttgttgttgttgttgttttttttaagaagaaattaaaagaaaaaagaagaataccaaagaaggcctacagaggaagtctagaggatgtggagaggtcaaaggaaactttggggactgtgctaagttggaagctaagagggtgtttcagggagaaacagtcaacaatgtaggaggtttctcagagtaagatgaacacccaaaagtgccttctggaattggcaatgtgaaggtcattcacagttggtccaggggtttgaatgagtgtggggagcaggcatcgactagagtagctggacagtgaggaaggcaaggtcatggagaacttgagcgtagatrgctattctgaaaagtgtggctatgaaaaaggggaacagaggaaaggggcgggtgagaggcttgtttttgtacaggggtatgttaaagttgg

SEQ ID NO: 47934 - DNA, 551 bp, Homo sapiens
caaagaagaaatcgaagtggatatatgaaaatatcctgaaagataatgaaaatactacacatccaaactgatgaggtacaactaaagccatgcttactgaccattataaccctgataccaaaacctgtcaaaaggaaaactgcaggccagtttcactaacgacgatgtaagggaaaaaccacaattcaaaaattgaattaaatttaaaatttgtatcagaaattaaaagttggtttaatatttgaaaattttattcaatgcaattcaccacattgataacataaaggagaataattatttgataacataaaggagaataatgatatgaatacctcaattgatacagaaaaagcatttgataaaatttaacatccattcatgataaactcaaataaaaaaatgaatttctagtaacaggtatccacagaaaacccactgcaaacatcatacttaatggcaaaatgtttaaggtyttttccctcttagatcaggaacatgctacttctattcatcatactggaggtctcaggcagcagagtaaggcaagatat

SEQ ID NO: 47935 - DNA, 667 bp, Homo sapiens
ttgtatgcttggacgacatcctggggaagaggctgcaatgaccaccaggctctgtggggtgatggatttcctgtaccccaagatgcacacacacacacacacacacacacacacayacacacacacacacacaaacaaacctacacacacagccctcacaattactcttcgatcccagcccaccagggcaaggaggctctacccctctcaccaagggctcaccaggtacagctactgacagctaccatggggacagctccttccccaccctttacccagtggctaggtcaggttggagtcctagtaaaccagcgactcattttctcccctgctcactcccattcctgcaacaaacactaggccaggcgtgatgtgtggtgcttttaggggacgtgaccacaagagacatgaccccagccctcagtggtacatagataaacctaattaactctaatatgatgcagtcaatgtcactttgggcattaaggaggaagtgcagctacacaatcctgggcaaggtgctcaacttctctctgtgcctcagtttccttacctgtataatggtaatacaaatagtacctacttcatagagttgttgtgttaaataaggtattatgtgtagacttagtacctggcacatggtgttagcagttgctatattgcctat

SEQ ID NO: 47936 - DNA, 667 bp, Homo sapiens
ttgtatgcttggacgacatcctggggaagaggctgcaatgaccaccaggctctgtggggtgatggatttcctgtaccccaagatgcacacacacacacacacacacacacacacacacacacacacacacacaaacaaacctacacacacagccctcacaattactcttcgatcccagcccaccagggcaaggaggctctacccctctcaccaagggctcaccaggtacagctacygacagctaccatggggacagctccttccccaccctttacccagtggctaggtcaggttggagtcctagtaaaccagcgactcattttctcccctgctcactcccattcctgcaacaaacactaggccaggcgtgatgtgtggtgcttttaggggacgtgaccacaagagacatgaccccagccctcagtggtacatagataaacctaattaactctaatatgatgcagtcaatgtcactttgggcattaaggaggaagtgcagctacacaatcctgggcaaggtgctcaacttctctctgtgcctcagtttccttacctgtataatggtaatacaaatagtacctacttcatagagttgttgtgttaaataaggtattatgtgtagacttagtacctggcacatggtgttagcagttgctatattgcctat

SEQ ID NO: 47937 - DNA, 667 bp, Homo sapiens
ttgtatgcttggacgacatcctggggaagaggctgcaatgaccaccaggctctgtggggtgatggatttcctgtaccccaagatgcacacacacacacacacacacacacacacacacacacacacacacacaaacaaacctacacacacagccctcacaattactcttcgatcccagcccaccagggcaaggaggctctacccctctcaccaagggctcaccaggtacagctactgacagctaccatggggacagctccttccccaccctttacccagtggctaggtcaggttggagtcctagtaaaccagcgactcattttctcccctgctcactcccattcctgcaacaaacactaggccaggcrtgatgtgtggtgcttttaggggacgtgaccacaagagacatgaccccagccctcagtggtacatagataaacctaattaactctaatatgatgcagtcaatgtcactttgggcattaaggaggaagtgcagctacacaatcctgggcaaggtgctcaacttctctctgtgcctcagtttccttacctgtataatggtaatacaaatagtacctacttcatagagttgttgtgttaaataaggtattatgtgtagacttagtacctggcacatggtgttagcagttgctatattgcctat

SEQ ID NO: 47938 - DNA, 518 bp, Homo sapiens
tgtgaccaggtagcaacagctatctaatgtggccttactgagtaggcagagttaggttcttaagaatagttcctctattttcatgagcagttcttatttatatcaaagcctgcaggctaaatccaggctgcagatgtgtttggttgggccccatacagtgttaactccattgtgtgtgtgtgttttaactttaaattgaatgtcaacgtttgaaaaatggagagatttcmttttaaaaggaagacttctggaaaaatcagaaaatcctataaaactgggctggatctgagcagcagctgccccttcaagcatttgctggtacacctgccaggccctctatttgaacttgtggcactgcctttacactatgccttggatatttagttccagggacacattcagggattcgccgggggcatctgggctcactcccgtcctgccacttcccagatctaaggccttgggagaggactgataacgtatttaagcctcagctttctcattggaaaaatggggat

SEQ ID NO: 47939 - DNA, 602 bp, Homo sapiens
ttgcaagcacaaaaatactaaccttcaaattcaactgagactttccagtgtaaattctggaggtgacgacgaagcttatggctattacaagctctgaatttttccttagggcacaatggacaagcctgtctgttgccttaaaaagaaaaaagaatcaataaacaacagaatattctagttattaatgcctggattcaactacaaagaggttaatgggggctccccctcctacttcttaaagtctttcttaactttagggagaagtcattattcttgacccaggagacagttaacagtaattgttgyagcacatgatcagtgattgttttttcaccctaaaatttccctctctgtagctagtggatgcatttgtcgttactgggaacaaaggttgaagaagtgataaactgtatgacatccttccggccaaattttctgccactgagagcatcactctgtattttggacagctgaaaggacagcagttacactcccaaaaggacagggattggacaaagagcaaaagtatgtgctgtggtattcctctactaaactggcaacaacaaaaacagttaacatgtggagttagaaaaatggaagaa

SEQ ID NO: 47940 - DNA, 551 bp, Homo sapiens
accaccacttagaaaacatgcaggcacattcagaagcacaataatatgggccattaattctcaacagtctatttctgatggaatggagtacaaaactcaattggtatttatgtatgggggaaaacatccgtaaatttagtcgaytctttcctaaactactactcagcctcaaaatcttttcggaggcaagctgctagcgggggaaaagaaaactgaaatgagaaaaactcatctccttgtggctgtcgaagcagaaaagctagttgacagtaatggtttagaaatgttggcagctaggatctactaccgtaaacaggttgcctcggttactatgtcacatttgaaagaacttagttaaccatggcagactggactgcgggaaactaccaaattatgtgtaacttcctatttttgtaccttaaaaagactcccttttaagaaaaagcccttaacctcattatttccttctatctgcagcattcctgctctccgcatatccctcaccgtgacatcctcgaggcttatgaagatgccgtctcccattctgtaac

SEQ ID NO: 47941 - DNA, 614 bp, Homo sapiens
tgcattatatggtttttcattccagcattcaatgatttcaagtgtctcacacacagagttgattattcatagtgctcatacaaccaacagatggcagaattggccatgttgttattctatgatgactacaaatctagatctatatcaagcaggatagtttttttttttttttagacaagatctcactctgtcacttaggctggagtgcagtggcgccatcatgcctcactgcagatttgacctcctgggctcaagcaatcctcccacctcagcctcctgaayacatgccaccacacccagctaatttttttaatttttttgtagagatgaggtctcactatgctgcccaggcttgtctttaactcctagcctaagtaatcctttcattttgacttcccagaatgctggaattataggcatgagccaccttgtcaggccagatttttttcttaaaattgttgtggccgagtgcagtggtacatgcctattgttctagctattcatgaggctaaggtgggagaatcacatgagtccaggtgtttgaggccagcctgggcaatatggcaagacctcgactctaaaaatgtataataataataaagatggttgcgtat

SEQ ID NO: 47942 - DNA, 563 bp, Homo sapiens
gtgaataaggccgaaaaggcctctttcccattttgcagatgaagaaactaaggcccagacaggttaaatgattgaccaagtttccagaactagtaaatattggaacaccaataaaaatgtaggtcttctgactcctgtcccagtgtgagatccgttcctctcaccacctctgcatataagcaaagaaccatgtgctggaagagacttgagtgatcatggagtctacagatctcatttttaattttcagaaactaagatccagaatgggggcattccttaaccaaggtcacccaattatccaataacagaactggccccagaaatcagactctcaatatttgccactctttcaaaaaaaaaaaaagaagaagaagaagaagaaatttgtaagcaaaatcatcatcattaaaaagcatttgagggaaacattttgccagttgctttggaatcatgaaagaggaagcttcaggatgaagcatcrttggttcctgagttctatcctcaacctgcacagtatttaccaaaagattttgtttcaataataaatttgttcataagtcatt

SEQ ID NO: 47943 - DNA, 523 bp, Homo sapiens
ataaatattctcaaccctgtttatgtcacatgtgctatatttttaattaggtaattgtacttatttattaaaagttaaatctgaatgcaaaaagagaaagttcaacgataattgatttatcagcacccactgaaatgaacatgttttcaataaaagtaagtcactaggaaaaactgttatcaagtcagttataagtgaagaatttgtcaaaacagggcaaaaattaaaattaggaaaaaataaaatctwcataatttctacattatcttgttccactttaaagaaagataagctggaaataataaatgaagcttcaagcttgtgatttatgcaaaaagacagagagagaaagagacggtgggagggggggtgcaagagagagaacttcaatcatggccaacaaaaaatagtatttttatctcagttgactcattgaagtttggatgctgtattttatctctaggaaaaaaagcatatatttgtgtgcacagtaatgttcttgaataaagaggaacaccaacca

SEQ ID NO: 47944 - DNA, 567 bp, Homo sapiens
ttgaatttttatattgttttgttatacaratatgcagatgagccaatatattaattattttggattgtaaattttctgcaacttgcttttttatgcaagattttttaaagcatgtatattgatatttgcagcagtggtttactcatttacaaagatctgtaatatcccaatgttaggacattcaaattttaagatagtattctgttaatagctatgaagttattttcccaggttttgttcttatgaaatattatactatgaatggtcttgcacccaacaccttgtggaagagtttcttttttttttaatttcattattattatactttaagttttagggtacatgtgcacaatgtgcaggtttgttacatatgtatacatgtgccatgttggtgtactgcacccattaactcgtcatttagcattaggtatatctcctaatgctatccctcccccctccccccaccacacaacaggccccagcgtgtgatgttctccttcctgtgtccatgtgttctcactgttcaattcctacctatgagtgagaacatgcagtgtttggtttttt

SEQ ID NO: 47945 - DNA, 568 bp, Homo sapiens
cagggataatcattatatctcatagtggcaataagtaagataatgtgcatagcttcacaaaatgctgggcacacagcacttaaataactattattctgcatttcaacatacctctcatatttctcaatagctgagtttaggaattattttatcttagctgctaaagtgtatatatgatccatttgactttttacgaccatatttacatttttaaaaaatgttcttcctaacgtagtatatggtcaactgaagagatgtgaagaaaagcttaacaacccttcaatggttatttcagagtgtttctcatagtctctctgagtctatagagaaataccgggaagtaaggggataaaagagggagcaatattttgctaataagtattgacatccctagcaaggaatacaagggattaagttatcattgatatcactgctgaagatgtaaactttattttatttacataatacaaaataaattttaaaatctgtgctttaaaagtgttaaaataaaaacatttttataagagaagtcaaaatttacctgagaaggtggcaaaagaggrggcta

SEQ ID NO: 47946 - DNA, 984 bp, Homo sapiens
cacattggagctggtcttcttggaatgcttgctcttagaatccacctgccaggtaaagaagctctacctagccaatgtggagagaaagagctcacagcctccagctatcccccccaagattcttgagatataagtgaagccatcttggacgttccaattcatgccactatctgacaacaaatacatgaggggcctcaaatgagaccagtagaagaactgagcccctatcaacctacagaattatgggcaggtaaaatagtggttgtttaaatccactacatttgttatatagcaatagataatcaaaaccttgggttcacacacacacacacacacacacacacacacacgcacttaagtcagtttaatgtttgagcatgaaatgatttttcatatctgagaagttggtgtttttggacttgggttcaggctactttatcaggaratacttttatttacttcctaaatttagttcagactcaagatggagcattgcatttggggtatgtccatttcattaagaaaaaggtagtgaaagaactacctgttttcccattagggcacagtcccttcccattaggtcccctcaatccagaagaggccatgaggggaggtgactgagaaaggatgtttatttctgcagcttgcatgcatggagaacctggaagaatttataaatccatcatttcaagtcattaggcgatatgttggtcagtccaggagactctgttctcattaattcaggggagatttacttgtgtcaccctcattagtatttatgggatttatccacatcaatcggtagtgcattaacagggaaataactaaacctcctagggtttgttggcgctaataaaatgagctggaagttccagaaatcaccatgatcagaagtattctaaatcagggctgtaattgatcctttcaaagtaccctcaggatgtttttctgttcgcttcacttccagtggcatttgcatattag

SEQ ID NO: 47947 - DNA, 1291 bp, Homo sapiens
tgtttttacaagaagagaagataaattcttttgagatattccagggacccttttggacactcccaaagttggtttgaggtcaaaaagacctatatggcatggccagttctaggggtaaggttgtgtccatgccagtgtgtggcatatggcgatgttcagctagcatgagtctgaattaattaccacacataggagccagagtaaagtgttcccaggccatctacccccaaccaatgtccccacttattactgcaacctcttacatcttctataacatgctccaaaaagtacgcacaacagtaatcccccaaatgccaaataccacattatttcacgttgaacagtcttgttagtgcatgagttcgtgtgcagcacacgtggtattgtacacaaattatatttcccttctacactgtaatgaacatggagtgtgatgtaaataaccatggaatactgagttaaagctagaattttatctaaattagacctgagtttgtcgtgcccccaggtgcctgacagaactaaacagtgagaaccccagaaccctttccaatggggaacgtcagaggcaccacagccacggaccctccactctctcctgcactcattgcaccttgactgtcttccttggtgcttgcagacgtttgtcatagtggatttttttaatcagatcgtgaattttgggcaaactttctacagttcgtgggagtaaatgtttgaatggtttgagttcagaccgtgagacagatctgcattttccattctgaagaggttacacatgagctagcagatgggatcgaatttcaattatacggaaacaaggtagaaaagaagggacctcaggcaaamgagtaaaagcaagtttgcaacttagagtttacagtggctggtcacaggagtatctgaccctggaattcccaaacttctccgcaccttagaattacctgaggaatatttttaaaatgccaaagcccaggccacacccggaccaattaaattaggcgcactggggtggaatccggcatctgcatttctgaagctccctagatgatcccagcatgcagaggagtctgagaatgactagtctaatttcatttccacaatatgcttgtgaagcggtcgccactatcccctgtgattcccttaaggttccccccagtgaatttgtggcatcaggagcccagcccagcactccttccactgcacgtgccgctgtcctggaggacaggaagcagagccagggtgctgcgtacgtggctcttcagagggctcttcagtgtgcctccaaggg

SEQ ID NO: 47948 - DNA, 546 bp, Homo sapiens
gcttttgcccatacttctaaggttcactatgtgagacctctagaaagtttcctattgattttagcttctaaaaatctcttgaacctctgtacttatcacttactctccactgctactattgacaactctcccctgcaccattttaatagcccctaatatggtttggctatgccccacccaaatctcatcttgaattataatccccataatccctaggtgtcataggagggacccagtgggaggtaaytgaatcatgggggcggcttcccccattgtgtaattgtgatagtgagtgagtcattacaagatctgatggtttcataagcatctggcatttcctctgcttgctggcattcattctctctcctgccatcctctgaagaggtgccttccaccatgattgtaagtttcctgagctctccccagccatgtggaattgtgagtctttatactgtgagttataaagaaaaacctcttttctttatacattaccaagtctcaagtatttcatcataacagcatgagaatggactaatacaactcctc

SEQ ID NO: 47949 - DNA, 546 bp, Homo sapiens
gcttttgcccatacttctaaggttcactatgtgagacctctagaaagtttcctattgattttagcttctaaaaatctcttgaacctctgtacttatcacttactctccactgctactattgacaactctcccctgcaccattttaatagcccctaatatggtttggctatgccccacccaaatctcatcttgaattataatccccataatccctaggtgtcataggagggacccagtgggaggtaactgaatcatgggggcggcttcccccattgtgtaattgtgatagtgagtgagtcattacaagatctgatggtttcrtaagcatctggcatttcctctgcttgctggcattcattctctctcctgccatcctctgaagaggtgccttccaccatgattgtaagtttcctgagctctccccagccatgtggaattgtgagtctttatactgtgagttataaagaaaaacctcttttctttatacattaccaagtctcaagtatttcatcataacagcatgagaatggactaatacaactcctc

SEQ ID NO: 47950 - DNA, 582 bp, Homo sapiens
tgtcagatattgctttgagggtattacatgttccattcattgaggtaagcaatagtattattactgtgttacagatgaagaaactgagccacagagcagttcaaaaactacactaagatcatgcagctcctaaatggacggattgtttaaaatatatacaatgtagcactgggaatcattgatgatagcagccttatgaatagtcatgcagacctacacaargccataatcaatgctttgaaagttattaaggagaaggcctattaacataatggaccctattctagggcactatgtgggcattttctaaaagcacttcataatagactatctatcattcatgttccagtaacaatcatctctaacaccacagtggctaacaaaacgtttgtcttgctcatgttgaatcttggttgtggctctgctccaggtcttgcttaagctaggacccaggctgagagagcagcccctatatgaactatgccattctcacaaatgggaaaacaaagagagatggtggcaccatgtagtggctccgaaagcttcagctgagtagtggcacaggtcgtcaacacctgtgtt

SEQ ID NO: 47951 - DNA, 593 bp, Homo sapiens
tggtattaatgatgaaagtatcaattcaggactactcatggcagattacccacacttagtgactacgccacttagatcccttatagtgttctgaaagcttgacattttaactgtcgctcagaggaaaggcttttttttttttttctgttttgcactgtatgctcataagctagcatagtgtctagcatatagtacctaggtacctaataaatagttttgaacacataatgaaggttgagtagacacktgaaagtagcttgagtaagatataaatgaccaacctccagcaaaggagtttaaatagtattccgaaagttttatcagtgaaatgataaaagtgatactgtgaacatgcagatctagtaggaagaaagattacagtaggtaaagaagaaagaccaagaaatcattcagggatgaatgactattacagttgaccaagtcttatgagctagtagcaggtctagggcctaaagggtcatgcatttctgttctgtttcctaaatcaccaaactgttatgtctaacgtaattaaaaagcatgtctgttttaatgaaggtgatatctgattttttcctcattttctacattca

SEQ ID NO: 47952 - DNA, 550 bp, Homo sapiens
tacatgaaaactaaagaaaatactacttataamatgtgacacagcaataaatacaacagcaaggcaaagtgccccatattccaggcttaaaagtttaccttcaggttacagggtgcaatagtgaagagatggaccgtggagccctagggctttcactgccaccctggacacaatgtttgattacctgtcaaaatcatcatcttctagttcatctgcatttgcccagtcctcatcttcttccaaatcaaccatcattgctaacatctgaggaactaaagtaaacaattatttcatacccgaagactgtgactttatcttatccatatcactatttataaacaagaattttaagattttactttgcctgtaagagaacaagacaaaacaattatttgtctgtgcccccaaaacctggtttgttaaattttaaccttgttatatttgcttttatcgtttctttaaaaagcaacattcattaagtcaaaccctcctatgaaattcccaaatccgattacattctccccatcaccagaggtaagaagcaacatca

SEQ ID NO: 47953 - DNA, 954 bp, Homo sapiens
catgagtgataccaagtgaggaagagggactcctgattggaatccaagatgaagttaaactctaattcaaagaaacccacctgctagagggagagtgccactgtacatcatggaggtacacactttcccgaaaaactatgaacccggaaggaaatgctctgctcacatccttttgccaggatcctcttagctgcagagatgtctgtgaggttgtctctgccaggcacagacatgctgcttgactatccaagccctcagaggacctccatgctccttaaggaagagaaggcagtgtccctctccccactctactgctgtttatcccctggactctacttagtcttctagagtcttggttgaatttcatttcccattgagctatgtagtcccttgagctcaaattttttggtgggggaagaggagttagttattcctaattatcttgttttttctttgacctcttcatagaaaacccctacttttctgagattccaaaacaaaagctgtcatatacaccaaacctataggagccactggtcacaaaaatagggatatttagagtcagtcttagtttggattataagaacmacttttagtgagtgaaaactacttgggacacttagaagcagtgattatcggcaaaagaaaaactggatgtggtcagatacgtgctaagactttggaaaaacagatttcaaacaattcgggaaaaaagtctaaagtggacttgagaagggaatatccagagatttagtttcaaccctataatctcaaataaaatctatagaagaaagagataagatatcaaaagatttgcatttctctgatggccagtgatgatgagcattttttcatgtgttttttggctgcataaatgtcttcttttgagaagtgtctgttcatgtccttcgcccactttttgatggggttgtttgtttttttcttgtaaatttg

SEQ ID NO: 47954 - DNA, 638 bp, Homo sapiens
tgtaggaagtagaaaacgtctttattcccaagttctgcctcaaaaggacaggttcatttctggatcaccagtctatcttcaatgcccacgactgtgcgtggtgcatatgaggtgctcaataaatgttttcaaatgaattcacagtaatgcttatctgtgtagaaagtttggcttargcaatacaatcgattgactaacactttgacaaatattagtcaaactgtgaacaatgaccctgaaaacaaactatgaacaatgaccctgaaaaaatcatttcctatggccagagtcaaagagaaagtctattgtattcatttggccatactggaattttgagggcttggaagaggaaaatggaatatccaagtctctcaatgtcaatataccataatggttgagaacacagactttgtggccacaatgtttgggttctaattctatctctaccatttggtatgtatgtgatctttaaaaagttacttaaattttttttttttaaatctcagtttctccattcaaattggcatgataacattcctgcctttaagggtttatgtggtggttgagtgagttaatacaaataaaaaactcaaaacagtgcctggtattcagtaaacacaagaaaagtattagctgtt

SEQ ID NO: 47955 - DNA, 550 bp, Homo sapiens
ttggcaacaaacaagagagaaaatcctagtatttaaagaagataattattttataggtgtatttgcatggtatggagtcaaagtacacacagcaacacaggcataattacctattaaaatraatatattttatgattatctaataaagatacaacagcatgattatagttggtatgtcttgctgaattttgagaaaattttctcaataaaatttttgccataaaatatgaactttaatattttccaaggtctctgaggttttacttttaccgatatactcacttttctaaaatgagcttcagaattctactttatatttttatactcagttttaaaattctactctatatttaaaaatcagtcataaaaaaaggtgtcataaatttctcctattcaacaaggtattctattttagagcgcatttattatttttcaacctaagctgcatataaattctttaaatatgacctttgagagagaaatcaaagattttatcatttacagatgatacttctcatacgtgatgcttcttatagacgatgcctcaagt

SEQ ID NO: 47956 - DNA, 984 bp, Homo sapiens
tgggggagttctggtacattgaatttaatgtttgcccagtcgttctgctgcggtaataaagcaatcaattatggacttgaatgagttaccaataaaaactagttcactatttgtatgagtccagctcaccttttaaatgtggcaaaataatatgattttgaagctacctttaaaaatgatcagtttgagaaaaacaatcaatgaaaactattagtagaaaatagtattctttgggtgaagtgagataaattatgatgaagagattcttaaactggcagttgaagcagaacgaaatattacttttctttaatgtgaaactaactctttgaaggatggctttggatatagaagtgggtctgtgtctmcacataaaggatatagactatggagaacaactcaccattgtgtgtggtgctcttctttgtctctagacttgatatcttggttatttgctttttgatgggctgttggctctctgtataacacattgaggggagggaatagtgatatatgtgatttttgagaatgctaacaaaaaacctgatattggcatcttgtaattgcatctgttatttatttactttcagtttgattaataagcttaaacctggcgtcattaagaagatcaatagactgtctacaccaatagcaggattggtaagtagtaaattatcttcacaactaaatttatttgtctttgaaatgtaaagaggtgggcataggcagatttttgtatctgcaattaccactgaaattaggttatggtttttttgctgaagcaaagtgtgtttggtgatgtcctccttttatctgcagttcctttctctgtttcccttttgcctggaggcttttatttatttatttatttatttaataagaaaaactagatgtatatttaaatggcacaaatgatatagatgacatacttgtgttttagtggttactaatttctaaactaaattgctaattttaaaaatgaaaaat

SEQ ID NO: 47957 - DNA, 593 bp, Homo sapiens
gatctctttaactagtcagcctaaaacacagattctcatcctcaactagaatgctattcctattcacaaaaacctggggaacatgatcacattaatgcccaagagatttatagcaagaataagagcaaaagaaaatctatgtatttttgaagacatggacttccctagtggatatgttttcagattctaagagttagaggtaaaaataaatttttaaagtttatttttttaaagttactttattatttgtatctactttggtaaaattccaaaataagacagtgatttctactgttttggttaacttttgccttcctcatactctctgtgagtattctaaatttgagactgttggtgataaatcaatttcctgagaacactttagctaatattaaaacttaatatatatggttattatttttaaagtttacttttttcatgtttacattgtaaaaaataaatgactgaaatttaggtaacatgaggagagcaatattctgaaaaatgwggtgaagtaccaatttaatgtttagataaggaccaaaatttctttagaataacttttatttaaagacatatcaaatttaagacat

SEQ ID NO: 47958 - DNA, 555 bp, Homo sapiens
gctggccggctgctctgagcgcggagtccgccaagcccacggccacccagaactccaggtgacccgcaagtgcagtgcgcagccccgattcctgctggcgcctctctctccacacctccctgcaagctgagggagccagctcctgccttggccagcccagaaaggggctcccacagtgcagcggtgggctgaagggctcctcaagtgccgtcaaagtgggagcccaggcagaagaggcgccgagagcgagcgagggctgcaagggcggccagcatgctgtcacctctcagtaacatcttactagttccataattgattaattagttgaataagatctttgacacatgatcattttatattagagtctgaaaattatacctaaacagtatgtgatgttttgtttatcttttaaaggaaactatgttttgttttgtgtttattagtattggtggaattaataaattcagtcacatctaatgaattacaaggcagcattggctaatattagagagccaaggtgatctctataaaagtcctccatacactstccgaatc

SEQ ID NO: 47959 - DNA, 399 bp, Homo sapiens
ccaacctaatagaagaaatggcaaagccaaaaggcacaagaggcagagaggtaaagaattgggccaatagtttaggctacagaaagtgcactaaaataatgtgctctctacaaatcaatggcgtcttctgcattttacacattattcttaagagaaagtagtagctagaaaccctgattagccctgccagggaagcacagagcatgtattctctggtatcttcattttgctcagctyaatacctgtgagaatcatctaggttgcatgtatgagtagttcattcctgtcagtgttgagtagtattcttttgcataaacttgtaacttgtccattctcttgtaggtgggcatttggattttttccggtttgagaatcttatgaattaggctactgtgaaca

SEQ ID NO: 47960 - DNA, 399 bp, Homo sapiens
ccaacctaatagaagaaatggcaaagccaaaaggcacaagaggcagagaggtaaagaattgggccaatagtttaggctacagaaagtgcactaaaataatgtgctctctacaaatcaatggcgtcttctgcattttacacattattcttaagagaaagtagtagctagaaaccctgattagccctgccagggaagcacagagcatgtattctctggtatcttcattttgctcagcttaatacctgtgagaatcatctaggttgcatgtatgagtagttcattcctgtcagtgttgagtagtattcttttgcataaacttgtaacttgtccattctcttgtaggtgggcatttggattktttccggtttgagaatcttatgaattaggctactgtgaaca

SEQ ID NO: 47961 - DNA, 361 bp, Homo sapiens
tgcatataagcttcctctatagcttttcatggcatttcttagcactgaataatattccattgtctggatgtgctcactgatttattttccagaagtttttgattattaatgtgtacatttaccatttgtcttttttgaaagtgtgttggrttttctattgaaattgcatcaaattttagattaatgagaggagagctgaattttcaatgtatcaaggccactattcaggaacaatattatgtttttctatttattgagattttcttttatgctactttgttatattttaacattgtcctcatgcaagttttccaggcttcttgttatggatattcctggatatatatggatgttttaattt

SEQ ID NO: 47962 - DNA, 585 bp, Homo sapiens
agtgggggataggagagccttcccagaggacataacacatagggtcttagaggatgagtaagagctatctgggtgcagaggacattccaggaagaagtagcagtctgtgcaaagacacagaggcatgacatagcatgacacatatgggaacccctcaataggtgggcagggaggaagcgtatgtggtagagtaatgctttttgtaccaggctaaagagtttaatttaatatttaacctgaaaggctgagaaaccttttaagaagaggactgatataaataattaggcatttaaaaatgattattctggaaacaacttacaakaagctggactgaaatcaaggaaaccagttaggaagccattgctatcatccagttaagaagtgataagaatggagaggcagggataactttgaaaatgaagaaggtggcagagtttgcagaagttaatgacagatgtgagcagtgcatgaaaacaagtaattttggccaatccttggattgctgatataagaaactgaagaaaatatggtgtcatttactacatagtgtgtgttattggaggtaaagagttgggagggagatga

SEQ ID NO: 47963 - DNA, 553 bp, Homo sapiens
caacccctagtctaaactgacccctacctgagagcttctgcaactgctgttccctgtgtctggaatgttctttctctgatcttcccatgatgaatgccctttcatctttcagatctggagtcagttctaccctcagggaagctttccctgaccctccgtatcaaggtacctgcaccccagtatgtggtgtgtggccttcatagcctgtttatgctctttaattatttcattttcattattcgttatttcattcccttccctgtgttcctttttttctgtctctctgagaatgccagctccattggcagagaacatgtctgtcttgttcactgckgtgggcctggcccctagcaggctctcagtacgtgtttatgggatgggcacactagatgagatggaagaagatgtgccagtgatgtggagacagggagtgtgggagaggagcaggtagagctcagagacggtgcacttaggcctgtggtcattgggggtgacccaagtagccagcagctgcccagcgttttgtgtttctctcctgggtccctaggagtgg

SEQ ID NO: 47964 - DNA, 611 bp, Homo sapiens
ggtaatatgttacatatgttcattgtgttaaaacatagacaattttgaaaagtggaagacaaaaaagaaaaaaaatccatattttgaaatgtataaaaatttgtcaatattttgaaaagtaggaaaaggaaaaaattaccatattcctactaccacccactttaaatcttttgtttccttccttccttctttctttttttcttttcttttctattcttttctttcttttttttcttttttcytttttttttgagacagagtctcactctgttgcccaggctggagtgcagtggcacaatctcggctcactacaacctctgcctcctgggttcaagcaattctcctccatgcaccctccaccatgcccagctaattttttgtatttttagtagagacaggattttgccatgttggccaggctagtcttgaactcctgacctcaggtgatctacctgccttggcctcccaaagtgctgggattacaggcataagccaccgcccctggcgttttgtattatttctttccaatcttttgttctatgcatattttatatatttgagatcattctctctctctctctctctctctctctctctctctctctctatat

SEQ ID NO: 47965 - DNA, 550 bp, Homo sapiens
taatatatatgtatgtgtgtatacatatatatatagatatatctatctatctatatatagatagatagatagatatagatatatatatattttttatgagatggagtcttgctctgtcagccaggctggagtgcagtggcgcgatctcggctcactgcaagcaccgcctcctgggttcacgccattctcctgcctcagcctcccgagtagctgggactataggcacccaccaacacgcaaggcaattttttttttctttgtatttttagtagagacgggktttcaccaggttagccaggatggtctcaatctcctgaccttgtgattcgtctgtctcggcctcccaaagtgctgggattacagacgtgggccaccacgcacggcccctgataatattcttcaaggcctgagaataaagttattccaagtacaaagtttaacattttcttactatataatatcaaatgggggaagtgtgcacaattctatcataatcataaacaaattatcattattaggatcagaataacaaaaaagtaacaattctcct

SEQ ID NO: 47966 - DNA, 501 bp, Homo sapiens
tttttagtcttgcaagtttgaaaatggcattattctactttcacacattattgatactgtgaatgcatactaaattctagattgtcctcagaaaatttttcctttttttttttgagaggraatctcgctctatcccccaggctggagtgcaatggcgcattcttggctctctgcaaccctcgcctcccaggatcaagcgattctcctgcctcagcttccagtgtagctgggattacaggcgcatgccaccatgcccagctaatttttgtatttttggtagagacagggtttcaccatgttgtccaagctggtctcgaactcctgacctcaggtgatccacctgcctcagccttccaaagtgctaggattacaggcatgagtcactgtgcccagccaggaaattattcttattaattaaattttttaaataggttgtctatgaataaagtaaaaagtaggaaaagtttgcagtgaaaactgtaaaagtctctctttcatacc

SEQ ID NO: 47967 - DNA, 582 bp, Homo sapiens
tcaaaatyaggatttcagagacaattccttacccctactcattgcctaaatgaacagatcttaagtttgttgggggactctcaataactcaggggctatttgtaccaaatttacacctctaggaaaagtagaaggtgaggctccttgcttcaattttggcttattctccattgcattttatgtatttactaggcagatcagaatccttaacaaggtgtctcactgttctcaagcaggcaataccttcgcatttagagattcaggtgtgtggacagcatatgtaagctgccttcaaggccccaggtccccaatccttgaaagttcgtttctgtaactcagaaagtgtgtgtatgtgtgagattaaaaatgccctgatggttggctgaatgccttatgtcagtcacagtgtcctaaatcaatgtcaatcagatatcttatttctcactttgcagagtaagcaagcagttctaaaagtgtgatctgagaacccccggggtctctgagaacctttcaggaggcctatgaagtcaaaactacttcaatagaaacatgaacatgttgtttgcctttgctctctcattt

SEQ ID NO: 47968 - DNA, 571 bp, Homo sapiens
catgcagacagaacccttggcttcccactggttctgccttcaggatcctatctccttttctccctaggcatgtggctacatagctagagactgctcctggattccctgaagccggacgtggccccgtgcgtgttcaggattttggcaygtgagaagtggttcaggagacttccagaccactagcagcaaccataggttgcagtgtccaaatcttggctctttctccctcctggggcccgggcctggacctaggatgtgtgcactcagcctccagagaggaggcagccaccccaggggaaagcataacaagactgaaaggaaccagggcccctaagtggcagtgggcgagcagtaccatcttcctgcaggcatccaggtgacagaaagctttcaccactgtatttagagtaggtatggccccagctacctcaccgtaacacccagggcccacagggctctgctcttttcacccatccccacaccgccccttcctgggctcacacctgttctctggctccgtaggagcttcatcgtccctgggacaggttctcatcctgacctctccatcttc

SEQ ID NO: 47969 - DNA, 571 bp, Homo sapiens
catgcagacagaacccttggcttcccactggttctgccttcaggatcctatctccttttctccctaggcatgtggctacatagctagagactgctcctggattccctgaagccggacgtggccccgtgcgtgttcaggattttggcatgtgagaagtggttcaggagacttccagaccactagcagcaaccataggttgcagtgtccaaatcttggctctttctccctcctggggcccgggcctggacctaggatgtgtgcactcagcctccagagaggaggcagccaccccaggggaaagcataacaagactgaaaggaaccagggcccctaagtggcagtgggcgagcagtaccatcttcctgcaggcatccaggtgacagaaagctttcaccactgtatttagagtaggtatggccccagctacctcaccstaacacccagggcccacagggctctgctcttttcacccatccccacaccgccccttcctgggctcacacctgttctctggctccgtaggagcttcatcgtccctgggacaggttctcatcctgacctctccatcttc

SEQ ID NO: 47970 - DNA, 571 bp, Homo sapiens
catgcagacagaacccttggcttcccactggttctgccttcaggatcctatctccttttctccctaggcatgtggctacatagctagagactgctcctggattccctgaagccggacgtggccccgtgcgtgttcaggattttggcatgtgagaagtggttcaggagacttccagaccactagcagcaaccataggttgcagtgtccaaatcttggctctttctccctcctggggcccgggcctggacctaggatgtgtgcactcagcctccagagaggaggcagccaccccaggggaaagcataacaagactgaaaggaaccagggcccctaagtggcagtgggcgagcagtaccatcttcctgcaggcatccaggtgacagaaagctttcaccactgtatttagagtaggtatggccccagctacctcaccgtaacacccagggcccacagggctctgctcttttcacccatccccacaccgccccttcctgggctcacacctgttctctggctccgtaggagcttcatcrtccctgggacaggttctcatcctgacctctccatcttc

SEQ ID NO: 47971 - DNA, 572 bp, Homo sapiens
tgaagggcctatattagttattggctggattcctgaaaccaactccaagatgaatttatcaggaaggtcagtggacccctcacttgcataagcccctaaatttcttaaatttttatatactttagacaccrtaaaacctggacctaccactaaaccactggtcatatacttaggtctaactggcataaaaaatgatttgaatttccctcttgccttttcatcatcccaaataactgaagtctgcatcctaagcttggaattaaaactaaattcgaattttagtcatgcctttacaagctccatggctttaatatactatttaatttctctgagttcagttttctcatctgcaaaatgggaatatgaataactacccttcagcgttagtataagcttaaatgtgcataggagttcaataaattcagctccattattattagtacttagcacaacgataattctactcatttttcatgttcaaaatattatacataattgtcattttgttataaaccctcagagccccaataaataaggttaccctaatgtttcctctactttacttttccagt

SEQ ID NO: 47972 - DNA, 572 bp, Homo sapiens
tgaagggcctatattagttattggctggattcctgaaaccaactccaagatgaatttatcaggaaggtcagtggacccctcacttgcataagcccctaaatttcttaaatttttatatactttagacaccgtaaaacctggacctaccactaaaccactggtcatatacttaggtctaactggcataaaaaatgatttgaatttccctcttgccttttcatcatcccaaataactgaagtctgcatcctaagcttggaattaaaactaaattcgaattttagtcatgcctttacaagctccatggctttaatatactatttaatttctctgagttcagttttctcatctgcaaaatgggaatatgaataactacccttcagcgttagtataagcttaaatgtgcataggagttcaataaattcagctccattattattagtacttagcacaacgataattctactcatttttcatgttcaaaatattatacataattgtcattttgttataaacyctcagagccccaataaataaggttaccctaatgtttcctctactttacttttccagt

SEQ ID NO: 47973 - DNA, 590 bp, Homo sapiens
tgccaccatgcccggctaattttgtatttttagtagagacggggtttctccatgttggtcaggctggtcttgaatttctgacctcaggtgatccrcccgccttggcctcccaaagtgctgggattacaggtgtgacccaccgtgccaggcctctaatactttttaataaactctcactcccgctctaaaacttgtctcagtctctctgccttatgccccttggttgaatttcttctgaggaggcaagaattgaggttggggcaaccagtacagattcactgctgctaacagttgtagataatacaggtcaggagatcttattccattcacaggataggcctaagaactcacattttttgtatgtttttttgtgtatgttttcacactagagacatttcttgtggtccctaaatactttatgttcaaaggaaacattgcattttttctttaggtcgattttttaaaaatcaagataagaagcctacatatttaatttggagattcggttgtctttcagaaagtatatttagaaaaattacattgtagttatagtaaatgtagacatattttaaagtaaaacccttgacatt

SEQ ID NO: 47974 - DNA, 528 bp, Homo sapiens
gggttaagaaattatatagacaaatttgtccttcctctcttccaccctaccctaaaaaaaatatttccttaagaaagtcggccgggcatggtggctcatgcctgtaatcccagcactttgggaggctgaggcatgtggatcatgaggtcaggagttcaagaccagcctggccaagatggtgaaactccatctctactaaaaatacaaaaattagccaggcatggaggcacatgccrtaatcccagctactcaggaggctgaggcagagaattgcttaaacccgggaggcggaggttgcagtgagccgagatagcaccactgcactccagtctgggcgacagagcgagactctgtctcaaaaaggaaggaggggaggggagggaaggagaggggaagggaggggagaagaggggaggagaggaaggcaggctgcatctgaggtcagcaacatagaagctttgattggctggccagggaggcggactagatattagcagggcacatgctggtctcttgttggcctcccat

SEQ ID NO: 47975 - DNA, 1210 bp, Homo sapiens
tgtatgtttcctgaggcctcctcagccatgctgaactctgagtcaattaaaccttattcctttattattaacccaggctcgggccgttctttatagcagtgtgaaaataaaatgatacaacatatttagtttaagatgcttattaaagcttcaagtggatatgttgggttcagaatgagatacaagagtctgaatttcagaaaagaacttcaggtaagagaaatgagtctgagtgtcatcagaatgtaaatacctagtatttattgtctcaaagccattgggctgaatgacatcactgaaggagtaagtacagatccaagagagatcagaagctggagatatggggccctccaacactgagaggttgaaggtagagtcaggggcaagaagagaatccagagaatagtgccccggaacctaggtggagtaaggccttttacctacaaggcatgtcttccccttcatgatgacattctttgcggcacaaacctccaaaatccttcctgggctttcctgaagtgacaaggtagagcaaattagatactcgtgtttctaacccgccttttcttggactgaaggtaccacgtaagatggggactgggaacagaaccctcagctatatcgctgtggcaatcgggagaaacaatgtacagctgattggatatctggagaaaatcagaggaaatcccattataagggcaggtgttgtgctggaaaagcagccatgagttagaagtggccatctccctggaaggatggcaggtgatttgggctctgtagctaactatgccagggatgggtaggacactgtggatccaccagagtaggagggaatgtaagctggagtttgmgaagaggatgaagctggatatcttcctctgccctagacgtagggtgagaagtgtggagagaaagcagacactggggcggctgcaggagaagtcctgtcctcgaggaggaatcatgctgcagactgcgaaatgcacacgcaatttcaagataaatataggagccatcagataaatcgtcatttaaaaatagggaatttggtagattccctccaggctggcaacagcttgtgttcattctcccttgctcttagggtattttttattttgagtgcccactaagtccttgatagtcattattagattttcagaaaagcaatatgcactaagaatcattctaacttcagcgataaggagaccga

SEQ ID NO: 47976 - DNA, 1210 bp, Homo sapiens
tgtatgtttcctgaggcctcctcagccatgctgaactctgagtcaattaaaccttattcctttattattaacccaggctcgggccgttctttatagcagtgtgaaaataaaatgatacaacatatttagtttaagatgcttattaaagcttcaagtggatatgttgggttcagaatgagatacaagagtctgaatttcagaaaagaacttcaggtaagagaaatgagtctgagtgtcatcagaatgtaaatacctagtatttattgtctcaaagccattgggctgaatgacatcactgaaggagtaagtacagatccaagagagatcagaagctggagatatggggccctccaacactgagaggttgaaggtagagtcaggggcaagaagagaatccagagaatagtgccccggaacctaggtggagtaaggccttttacctacaaggcatgtcttccccttcatgatgacattctttgcggcacaaacctccaaaatccttcctgggctttcctgaagtgacaaggtagagcaaattagatactcgtgtttctaacccgccttttcttggactgaaggtaccacgtaagatggggactgggaacagaaccctcagctatatcgctgtggcaatcgggagaaacaatgtacagctgattggatatctggagaaaatcagaggaaatcccattataagggcaggtgttgtgctggaaaagcagccatgagttagaagtggccatctccctggaaggatggcaggtgatttgggctctgtagctaactatgccagggatgggtaggacactgtggatccaccagagtaggagggaatgtaagctggagtttgcgaagaggatgaagctggatatcttcctctgccctagacrtagggtgagaagtgtggagagaaagcagacactggggcggctgcaggagaagtcctgtcctcgaggaggaatcatgctgcagactgcgaaatgcacacgcaatttcaagataaatataggagccatcagataaatcgtcatttaaaaatagggaatttggtagattccctccaggctggcaacagcttgtgttcattctcccttgctcttagggtattttttattttgagtgcccactaagtccttgatagtcattattagattttcagaaaagcaatatgcactaagaatcattctaacttcagcgataaggagaccga

SEQ ID NO: 47977 - DNA, 1210 bp, Homo sapiens
tgtatgtttcctgaggcctcctcagccatgctgaactctgagtcaattaaaccttattcctttattattaacccaggctcgggccgttctttatagcagtgtgaaaataaaatgatacaacatatttagtttaagatgcttattaaagcttcaagtggatatgttgggttcagaatgagatacaagagtctgaatttcagaaaagaacttcaggtaagagaaatgagtctgagtgtcatcagaatgtaaatacctagtatttattgtctcaaagccattgggctgaatgacatcactgaaggagtaagtacagatccaagagagatcagaagctggagatatggggccctccaacactgagaggttgaaggtagagtcaggggcaagaagagaatccagagaatagtgccccggaacctaggtggagtaaggccttttacctacaaggcatgtcttccccttcatgatgacattctttgcggcacaaacctccaaaatccttcctgggctttcctgaagtgacaaggtagagcaaattagatactcgtgtttctaacccgccttttcttggactgaaggtaccacgtaagatggggactgggaacagaaccctcagctatatcgctgtggcaatcgggagaaacaatgtacagctgattggatatctggagaaaatcagaggaaatcccattataagggcaggtgttgtgctggaaaagcagccatgagttagaagtggccatctccctggaaggatggcaggtgatttgggctctgtagctaactatgccagggatgggtaggacactgtggatccaccagagtaggagggaatgtaagctggagtttgcgaagaggatgaagctggatatcttcctctgccctagacgtagggtgagargtgtggagagaaagcagacactggggcggctgcaggagaagtcctgtcctcgaggaggaatcatgctgcagactgcgaaatgcacacgcaatttcaagataaatataggagccatcagataaatcgtcatttaaaaatagggaatttggtagattccctccaggctggcaacagcttgtgttcattctcccttgctcttagggtattttttattttgagtgcccactaagtccttgatagtcattattagattttcagaaaagcaatatgcactaagaatcattctaacttcagcgataaggagaccga

SEQ ID NO: 47978 - DNA, 1210 bp, Homo sapiens
tgtatgtttcctgaggcctcctcagccatgctgaactctgagtcaattaaaccttattcctttattattaacccaggctcgggccgttctttatagcagtgtgaaaataaaatgatacaacatatttagtttaagatgcttattaaagcttcaagtggatatgttgggttcagaatgagatacaagagtctgaatttcagaaaagaacttcaggtaagagaaatgagtctgagtgtcatcagaatgtaaatacctagtatttattgtctcaaagccattgggctgaatgacatcactgaaggagtaagtacagatccaagagagatcagaagctggagatatggggccctccaacactgagaggttgaaggtagagtcaggggcaagaagagaatccagagaatagtgccccggaacctaggtggagtaaggccttttacctacaaggcatgtcttccccttcatgatgacattctttgcggcacaaacctccaaaatccttcctgggctttcctgaagtgacaaggtagagcaaattagatactcgtgtttctaacccgccttttcttggactgaaggtaccacgtaagatggggactgggaacagaaccctcagctatatcgctgtggcaatcgggagaaacaatgtacagctgattggatatctggagaaaatcagaggaaatcccattataagggcaggtgttgtgctggaaaagcagccatgagttagaagtggccatctccctggaaggatggcaggtgatttgggctctgtagctaactatgccagggatgggtaggacactgtggatccaccagagtaggagggaatgtaagctggagtttgcgaagaggatgaagctggatatcttcctctgccctagacgtagggtgagaagtgtggagagaaagcagacactggggcggctgcaggagaagtcctgtcctcgaggaggaatcatgctgcagactgcgaaatgcacacgcaatttcaagataaatataggagccatcagataaatcgtcatttaaaaatagggaatttggtagattccctccaggctgrcaacagcttgtgttcattctcccttgctcttagggtattttttattttgagtgcccactaagtccttgatagtcattattagattttcagaaaagcaatatgcactaagaatcattctaacttcagcgataaggagaccga

SEQ ID NO: 47979 - DNA, 553 bp, Homo sapiens
aaaagctttcactgttacatattttcttcaatgcattttattacatagtcataccatattatctgatttgcatcttaaatacctgttgtcttaatatgtttaagttaaattttattgtttcatttttaaaaatttaatgactgtgtaatattgttatataaaacatgccacaatttatgtaaccatttccttaacattagacatgtgttttctaatttcacctattatcaaaaatgtgcgggcacagacttggaaatacttgttaaaacttaaatctgcctgtctataactttatttctagtccccatgtgaaaatttcatttcacctctccatttcatgaatgagaaaaatatagtggtcayaaagataaagctttcctagcaacaagatcccaaattattctgtggagagatacatatatataaaatgtatatatcacttttatatatataatttatatgtatatattatatatataatttatatgtatatattatatatataatttatatgtatatattatatatataatttatatgtatatattatata

SEQ ID NO: 47980 - DNA, 553 bp, Homo sapiens
aaaagctttcactgttacatattttcttcaatgcattttattacatagtcataccatattatctgatttgcatcttaaatacctgttgtcttaatatgtttaagttaaattttattgtttcatttttaaaaatttaatgactgtgtaatattgttatataaaacatgccacaatttatgtaaccatttccttaacattagacatgtgttttctaatttcacctattatcaaaaatgtgcgggcacagacttggaaatacttgttaaaacttaaatctgcctgtctataactttatttctagtccccatgtgaaaatttcatttcacctctccatttcatgaatgagaaaaatatagtggtcacaaagataaagctttcctagcaacaagatcccaaattattctgtggagagatacatatatataaaatgtatatatcacttttatatatataatttatatgtatatattatatatataatttatatgtatatattatatatataatttatatgtatatattatatatatratttatatgtatatattatata

SEQ ID NO: 47981 - DNA, 324 bp, Homo sapiens
tttttwataaagacttattcaaaatgttaaaacccaaggtaacaatacttccggacttcagagcacagtgacatcattaacgcaaggttaggtcacaaagccctcagtgagtttcggtgtgattttaagtaattcaaggagctgctttattattctggttggtcactcagaatgctacacatgtaaagcaaagtggcaagttcccatagcaatgcctttttaccagaagcgtttaccgttatggctccctcatcttttcgtggtctgaattcttcctgattcagtcagactgcagctacgtattagccttaaattagaatttga

SEQ ID NO: 47982 - DNA, 574 bp, Homo sapiens
aaatagggtagccagaaaagcatggactttgaaattaagcagtcctgaatctgaattctgactgccagttatacattttatgggtttagccaagttatttaatacttcaaagcctctgttttcttacctgaaaacagtaatatttcctacctcatagaattattggctgcagttttataaatggtattatttgctgcaattttaactgtataaacatctcccttttatatataggtcccaaacgtggtatcttttcacaatgatgtattttatccgaattcttggaattactcatggtgtctttcaaaattaaagatctgtgaaacctgaagcagatatgaatattgtaagttgttagaaaataaatctggmttgctgaaataacagagaatgctacttttcaaatttggaattttaacttaatagatttacagtcaaacgtatacatctatatgttaatatttctcatctgctattctatagcttagtttctccttcagccttattctatctttgtaatgaaaaatgtgtaactatattcatactttcacatatttgaaatatatattcatat

SEQ ID NO: 47983 - DNA, 611 bp, Homo sapiens
atacatggatctgaaagcagaaaaagaaacaattaacaatcataatcttgcctttcatgagcaaataaaatgcatyctaatgagtagtttaggataaaataaaattataaaataatccaaatagttaatagttattaatttgtgctacatactgactttagcatttcaaaaatataataagttcagttgcacttccccaacgtcacagcagagatcatcaggtgaggtgataaacgtgaaccctggcagtctttctctagagcctgaactcttcttccctaaaacatgttgtgtccaccctagtgacttcatatcaaaaaggattatgctaacatgttccactggagtcatggttacttatcctcctttcccccatttgacaagccgtgactacaagcactccaaatgtactcacattttgctaatttaattctatgtttatatttttctcttatgcccacagtgtagaaaaagaactgtagaaaggtataatctttctaatagtcatctattaaaataaaactctctatatatacatacatacatacatacatacatacacctcaatatctgtcaattatctctctctctatcaccatcatctatccctg

SEQ ID NO: 47984 - DNA, 611 bp, Homo sapiens
atacatggatctgaaagcagaaaaagaaacaattaacaatcataatcttgcctttcatgagcaaataaaatgcatcctaatgagtagtttaggataaaataaaattataaaataatccaaatagttaatagttattaatttgtgctacatactgactttagcatttcamaaatataataagttcagttgcacttccccaacgtcacagcagagatcatcaggtgaggtgataaacgtgaaccctggcagtctttctctagagcctgaactcttcttccctaaaacatgttgtgtccaccctagtgacttcatatcaaaaaggattatgctaacatgttccactggagtcatggttacttatcctcctttcccccatttgacaagccgtgactacaagcactccaaatgtactcacattttgctaatttaattctatgtttatatttttctcttatgcccacagtgtagaaaaagaactgtagaaaggtataatctttctaatagtcatctattaaaataaaactctctatatatacatacatacatacatacatacatacacctcaatatctgtcaattatctctctctctatcaccatcatctatccctg

SEQ ID NO: 47985 - DNA, 499 bp, Homo sapiens
aagaggcactgggcacagctgatcgggaggctaggggttataggctttctggggcatgygtgtttcctcgacagcagctttaaagatgcccaacgctgggtgtcaactgcctgctgggtgtcagaagaaactcctgatgttttccttgttgcactgaagcctccataatggtatgagatggggattatgaacctcatctacagaggaggggaatgactcctgggcctcttgctccagggcacacaacgtgaaagggcagaagcagaactcaaaccctcaaatgagccttttaagtgcggtgtaaaggagcttcctttgtgaggagccagggatagaggctgccattcaggcctggcacccccgatggggcccaactggaggatgggacttgagcccctcaaggcctcgagaacactccggctcagcgtgtctcctcctgcaccccttaaatcacctggaccctgaggggtcatgtgtcaaagccccacagaatgcctcc

SEQ ID NO: 47986 - DNA, 546 bp, Homo sapiens
aacataataagggattatttcttcctcacacaaatattccaaggtagttgcaggtcagggcagtagggttagctctttccatagakccaaccaagggcatagactggtggaggccctgctattttcaacaagtggctttcaagatctttctgagccttaacggccagccagcaggaataaaacacagaggcacatgagacaaaaggtctttatggaccaagcctgagagtggtacctgtcactttgcctgctcacattggattaaatagaactcagtcacatgatggcacctaactgcaagggatgctgggacatgctgtctttagctgggtagccacttctctgtgaaggctttacaccatgattaaaagagcatcagtttttggtagatagctagacatacctctaccatgactgaattttagggaaacaatccagaaggaatacatgtaaatgaggtatattgtcctccaagattaaaagttgatattgtagaatcaatatctcaggtctgacctaaagacagatcattttttaaatgtcaac

SEQ ID NO: 47987 - DNA, 546 bp, Homo sapiens
aacataataagggattatttcttcctcacacaaatattccaaggtagttgcaggtcagggcagtagggttagctctttccatagagccaaccaagggcatagactggtggaggccctgctattttcaacaagtggctttcaagatctttctgagccttaacggccagccagcaggaataaaacacagaggcacatgagacaaaaggtctttatgsaccaagcctgagagtggtacctgtcactttgcctgctcacattggattaaatagaactcagtcacatgatggcacctaactgcaagggatgctgggacatgctgtctttagctgggtagccacttctctgtgaaggctttacaccatgattaaaagagcatcagtttttggtagatagctagacatacctctaccatgactgaattttagggaaacaatccagaaggaatacatgtaaatgaggtatattgtcctccaagattaaaagttgatattgtagaatcaatatctcaggtctgacctaaagacagatcattttttaaatgtcaac

SEQ ID NO: 47988 - DNA, 523 bp, Homo sapiens
tcaataaacagtagtaactgctaatatcatcatcatctcattcaatattattattgttatgacttctataatctcccagtcaataaaaacactgtagtcataatttaaatcaactgttcacttttacctctcatgatctatttgatcaaggtcctactggttcttctccttcttttcatgtcctccaagcttttyttaatttaagttttcattccaaaaaagtgcactttcagagacaagttataacctatttattaccttcaccttttctcatatctaagtattgcactagatggactcctactatctctccccttttcccttcaatatatcccacatctcaaagtcaaaataggctttctgaaatactttctcctactattcccttgctcaaattctttatttttaattcaggtttaagtttaaattcttctgtctccaagctagagttaaattttgtttactagtaagtactttcccaaagaaggacataagacttttattatttttgtgaaatgacatc

SEQ ID NO: 47989 - DNA, 615 bp, Homo sapiens
cttccgtaggatagcaagatatccgcaggatgtcaagggggctgggccagtaccccaagttagcagtagtgaaaaaagtggctgagccccaggatctagagcacatgaactctttcccacctcaaacccccattccaccctctaccccatgaggtcccaaaggagatgagcagagaacaagacctggcaaagagaggttgttaatggagctccgacctcaaaccctgatgtctcaccttagactcatttccaggagtggggccctgggtttcatattttaaaaagcatggcatattggcgtatgtctcccccgacccccaccaccactgccattggaatgcctaaggccagtggtgtgctgaagctggcttgtaccagctcgtgagagctgattgttaaacttttaagaactttgcaagctgattattaaacacagctattactgaaagctaaattatataagcttaggattcaataaattataccggaagcaaagataataaatacccaaagctyaccacttcctattcatttactattatctatgttcttgaggtttttacctctattgtatctttaatggtggaaatactatgtaataatggagagctatgc

SEQ ID NO: 47990 - DNA, 615 bp, Homo sapiens
cttccgtaggatagcaagatatccgcaggatgtcaagggggctgggccagtaccccaagttagcagtagtgaaaaaagtggctgagccccaggatctagagcacatgaactctttcccacctcaaacccccattccaccctctaccccatgaggtcccaaaggagatgagcagagaacaagacctggcaaagagaggttgttaatggagctccgacctcaaaccctgatgtctcaccttagactcatttccaggagtggggccctgggtttcatattttaaaaagcatggcatattggcgtatgtctcccccgacccccaccaccactgccattggaatgcctaaggccagtggtgtgctgaagctggcttgtaccagctcgtgagagctgattgttaaacttttaagaactttgcaagctgattattaaacacagctattactgaaagctaaattatataagcttaggattcaataaattataccggaagcaaagataataaatacccaaagctcaccacttcctattcatttactattatctatgttcttgaggtttttacctctattgtatctttaatggtggaaatactatgtaataatgsagagctatgc

SEQ ID NO: 47991 - DNA, 591 bp, Homo sapiens
gactgtccatctcagctccagactgttagcatcttgtaggcaaagtccataatattttgcacccgatgagcccaggcagccaataaataaataagcaacttagaaaatactggaataatttgtaatttacctttttattctatcctaaaaccaaattttgcctctaggtagtatataattatgtttgtattaattatatttaaataaaaagtaaaatcaaatacatttataacatttttagtgatgggtaagaacaataaataaatttttaattttccctacacatctcggggttttaaaatattaggttttttcttctccccatgaaaacacaaaggcaatggatttaaaaataaataattcgtccatttatattatctgggttactgctrtgataatacaaacagctaataaaatgttctttaatcatgtcctttaaaaaagaaaaattactattggcagtctttaaaagctatattgggaaaaattaattctgacaaagaaaaaataactaaaattcatcggattcaatgtatgaggaaaagagagtacattcttttgaaaacaacattgagggaaataggatatgat

SEQ ID NO: 47992 - DNA, 566 bp, Homo sapiens
aaagggaagcctagggaacttagaaatatttttcttccccccaccccccaatcaaagccaggcattcaagactcaacttttytttttctttctcctttcgagactgaatcttgctatgttgcccaagcttgtcttgaattcctgggctctagccatcctccagcctcagactcccaagtgcttgcagactataggtgcctgactgaatttttttatctttaacttttaatttagaaaatttcaaacatatacaaatgtaagaaagtagtataatgaatctccatggggccataaccagcttgaacaattatgaactcatggacagtcatatttcatctatacccctttttcctatgtcatcattttgaagcaaatcccagagcatcatatcattttatctgtaaatattttcagaaagcaagaaaactatcaactaccactagggttgtgtcaagaaggggacaattcaaataggctgtcactgaccaaagacgggctaatttgagcatcaaaaaaaaaaaaaaaaaagataatcgcaattgtttaaaacacatcaaacatgatta

SEQ ID NO: 47993 - DNA, 565 bp, Homo sapiens
catgggaggctgaggtggcaggatcgcttgaacctgggaggcggaggttgcagtgagctgagatcatgccactgtactttagcctgggtgacagagcgagactccatctcaaaaaaggaaaaaaaaaaaaaaggaaacagaatacaaggtcaggcatggtaactcacacctgtaatcccagcactttgggaggccaaggtgggaggattgyttgaggccaggagttcgaggccagcctggccaacatagtaagaccctgtatctacaataaaagaaaaagaaagaaaacagagtacaaagggtggagtctgggtctccagtcttgtttgtctgcttgtaggtcctgctattccaagtgtggaccatgtaccagctccatgggaatcaccagggagcttgttaaaaatgtaaaaatctcaggctttcccccagacctggtagatcacaacctgtatcttagcaagatcccccagttgacttgtagacacaggaaaatttgagatgtactgcctgagagcaccaaaacatgtcaaacacaaaatagacctgaaacaaaggaagaaaa

SEQ ID NO: 47994 - DNA, 605 bp, Homo sapiens
aggaggagatcatgtccagggtattttgctttagcagtgtggaaagttctgcatttcatttcacatggtggtaaatggagtgaggtattctgaaatcccttctacaagagagttagcccctgactacgttactgtatataaaccaaactttcttggggtctgtttcctgtttaactgttcctcatttttgtaatggaaaagaatgctcaatgcaaagactgcatcttgctttccattaggtgaggggctacaccttcatggagaaacacacagaagaacaacaaaaaggaattgtcagtatcaggtttggtgcctcactagttctgtgcagaccaaaaggctgtagtcatggtctggaatgctaagagggaatagtagatttacttgttgttttttstttctttcttttttccccactgttgttttcatgatttatcctctcttcccatgttatgtcatcacatttgataatcttcggagagcaatgagcttttgtatgtaacatcttttgaatatgtccatgaattccatttctgtgctgtccccagcactgctctgacttgctgtggtttgtcattaagtcactgaactgcttagtctgttac

SEQ ID NO: 47995 - DNA, 781 bp, Homo sapiens
aaagtctgtaccttgggggaaagtctggaaaagtgatataaagtgtttaaagtccaggaagacaatgttaagagaagcctgagagttgatagggaggagacaacagaacagcagttctatggacgatggtcagaggtcttgtaaagaaaaaagaaactagcaaaggcaggggcatgatggtatagctaatgccagcrtatcttccacaggaaaggacttaaaatatttgaggtatttatcacagtctggaggtacacacaactcagctgagataaaattccatacaaatgagaaaattgataatgtttgtgatttaagtaatctttttggcatttaagaaaggagaaatgagaaaactatgcttagaaaaactatgagaatcagatactcacattctgtttatttctaccagaacttgatgaatctgggacaaaagcctccaaatggaacagctggaatacaatatccatcacacacactgtggaagctggagctcccatagctttttatcccatgtattaataagtcttggggatgtaaaaagacaaaatttagttaggataatgtcatgtacttctatgtgggattatgaatccttaatgttattgtctgtactgatgtttgttggactaggaagaggcagctggctctctgtggttttcaaaagaagatatccacctcaccaggctatcacagtgagaaaaattttaaatgcataaatgaagatggatcattttcccagtcccattgcttctctttgtggtgctttttgccctgagat

SEQ ID NO: 47996 - DNA, 516 bp, Homo sapiens
attttaaaagcagctgttatcatggtgctcaaggacacaaaggaaaacatgttcataatgaatgaacagaaaacctcaaaagagaaataggaactacaaaagaaccaagtagagattgtacagtgtgaaactacaatgtctgaattaatatctgaaacaataagaatatgttaaaagttgtgagagaaaattactatcctcttagaaatttctcaaaaaaaggatgaaatcgtgatagtttattcaaacaaacacaaacttcacttctaagtgtgccatctagcttcataaggtatacttcaggaagaagcacacataaatagacacatatatatttatttatatatatatatatagaccmatataaatatttctgtatgtatgtgtgtgtgtgtatatatatatatataattttgtacggatactatattctcaataaaatgttttttaaaaactacatgttcatagcagaagttttgcagtgttaatggactatggtgctgggagaaaatggca

SEQ ID NO: 47997 - DNA, 580 bp, Homo sapiens
atagtatacctggtgggcacttactggtaattaaatctatatatagtagatcgagaccttgcatatatattgtgaccatttcagtgaatagtaagatgcgaagagatggacactggttcaatattcttggttactgctctaaacgctgatttagtttcacaatgtttatttaggcaccacagatcattaatattaagtgaacaaaatgaaatactgtaacaatctaaaactatgccagatttagtaactgagaaaaggtaagacgacgaaaatgtgctttgctgttcgaacaataacacccaacaaaacatgtttggtgaaattgagaatctggaaaggaagtcgagacccaaagaattaatactggttcaaaaggagaaatttcaatgctgagaatagctacaatcagatgctgacttctttaaagcaccccacrcccccacccaaagagatggccatataaggtagactttttttttttttttttttgagatggaggcttgctgtgtcgcccaggctggagtgcagtgacagatctcggctcactgcaacctccgcctcccaggttccagcgattttc

SEQ ID NO: 47998 - DNA, 580 bp, Homo sapiens
atagtatacctggtgggcacttactggtaattaaatctatatatagtagatcgagaccttgcatatatattgtgaccatttcagtgaatagtaagatgcgaagagatggacactggttcaatattcttggttactgctctaaacgctgatttagtttcacaatgtttatttaggcaccacagatcattaatattaagtgaacaaaatgaaatactgtaacaatctaaaactatgccagatttagtaactgagaaaaggtaagacgacgaaaatgtgctttgctgttcgaacaataacacccaacaaaacatgtttggtgaaattgagaatctggaaaggaagtcgagacccaaagaattaatactggttcaaaaggagaaatttcaatgctgagaatagctacaatcagatgctgacttctttaaagcaccccacacccccacccaaagagatggccatataaggtagacwttttttttttttttttttgagatggaggcttgctgtgtcgcccaggctggagtgcagtgacagatctcggctcactgcaacctccgcctcccaggttccagcgattttc

SEQ ID NO: 47999 - DNA, 522 bp, Homo sapiens
gggctatacatagcatgttttatcctgattctgagacattggtgggtggggtctctgtgattaaattaaccatagataattattttgtcttttaggaaattgtattgtaacattattagaggaacgcaggatgaaaactatttaaaaatctgccgtgttaagaaattaagtcagtttggactcatgagcacgtcaggaatatgatgcaaaagctctggcgggaaacagacacaccaacatcttaaaccacaaacaagagccctgtttatgttttgaaatggttccgaatgaactggtttttatgttaaaaggttcttttccaccccatgtttttaatctggtgatttttgtagccccatctgctgttcattagtggaagtgcctagttaaggattatgaaaggtctgaaatgttttttgttttttcttactcctagtagcattttggattttaactgctaagaggcacctagagaaatgagtcatcacgctttctgatgaccaaacyatcaaatttagacta

SEQ ID NO: 48000 - DNA, 1171 bp, Homo sapiens
cagtcttggtatcacctagtcgctgttttcaagtaacagaatatttggttctcaatggtaggtgactggaatacagcttactttctcccacccctacccccaatcctttctgcccccttatagtttaatttgcttgtaaattacttgggaatacatttgggagccattatagggaaatagaaggcagacatgatgaacagaatgcagggtgttttttattacttcacattgtgctcaacaattaggaggaattctagaagcccctcccagtggccaggaattggtcatagcatgaataaactcaatataggttgagtattccttacccaaaatgcttgataccagaagtgtttttggattttggattttttttttgaatatttgcattatatacttaccagttcagcatccctaatccaaaactgaaatctaaactgctccaatgaacatttcctttgagtgtcatattggcactcaaaaaggttccaattttggagcattttcaattttgggttttgggattagggatactcaaccagtggtaggtttgggatgatatcagcatgctaaggtcaaagagacctagctgggaagggtgggaggaacatggaattttcattctctgggcaccccttgaacagtcttactattagggccccaaatttgttctaagtgtgtgtgtgtgtgtgtgtgtgtgtgtgtgtgtgwgagagagagagagagagagagaattttctttcttcctttatattctaagttcctcaggacaaaattttgggtttctttgtattctccctgcagctcctcatgtagttctaagcaaataaaggaattcattaggtccttgatttcagaagcctcccagttctctatgtaggaggaatcttagggtggcaagataagttgagggacttttcttcaagcacatttcacaagtaagagaaaatgttgactgtgtatatctaagaatgggtggggctcaatgatgcccccctaagttactctttactattattgattgattgattgattgattgaagaagcaatgttttgattgattgaagaagtaatgtttccaatggctacagcagactggagcaaaagaacaaaatgaaagaaaatacattaggctttccatttcttctaattctggggcatctgatgaagcttt

SEQ ID NO: 48001 - DNA, 1350 bp, Homo sapiens
aggatgttaggctctatagcctgggtcaaatctcagggctaccactcactagctgaatgagctttagcaagttatctcaatgctctaagcctccattttctcataaataaagtatgagttgtagcattgttttgaaggttgagtaagrtgatgcatataccatgcttaccaaacttaaaataagcataaactgttgttgttatcatgattaaccaatgcctcttccttctggtttagtgtaaaaagtgtggcacactgaactgacactggaccaaagatcagatcacttaccctgaggccctggctctgtgaccctgggcaagtcatttattccagaactctggttgtctcatctgtaagctgggaggcatagacaacactacattaaagagcccttccacatgtgttctaagtgaatacatgctccacatttttactcataacattcttgtagatcactggaattgtactcatttatcataaaagttatataagatataggaaaaaaagtggacccatgaaacctggtcatgtggtcagagccaaagagaatccagtttgatgtaaagttattttactcaagtactctgtggcagggattctgctgaggtagagtatttgagcagagcaccttgagaccaatgtcacagaaaatattccagcaaataattaatggtgtgtgtatatatattgccagctaccctgctggagcccagcaatctctcagaggagattagtggtccttacccatgtgtccaaccatttcaatacttgcttttctcaatgatcattatcctgaaataaatccaaattaaattttatgaaccaggattgaaattatgtgccttcagtatcgagccttctaatagcagttatttttattgaagtattaaagcaattggcttgagtcatcttggaaacactgctttcatatttcaaatatggttaggaggctgtcagcacatattaccagggattggagatatttgcttattaaatgatttttaccaggaaaaactcattacaggaaacatcttgtttacaagggtgtcctgaggatagcaaatggaaagaaacatgttacattgaattatagaagtaaaataagttgattcagctaatagattcaatggaaatataagatattattttgcaagtcaaagacaactgcaatttaatttaactgacagatttctactgtaggatgtaaacattagatagaaatatttacttgaaactgtagcgaccattacatgttattttgacattctagtttaggcatctatatccagtgatttttcaaatgttattattattattattatttgttttgcccatacaaagagaaaa

SEQ ID NO: 48002 - DNA, 1350 bp, Homo sapiens
aggatgttaggctctatagcctgggtcaaatctcagggctaccactcactagctgaatgagctttagcaagttatctcaatgctctaagcctccattttctcataaataaagtatgagttgtagcattgttttgaaggttgagtaagatgatgcatataccatgcttaccaaacttaaaataagcataaactgttgttgttatcatgattaaccaatgcctcttccttctggtttagtgtaaaaagtgtggcacactgaactgacactggaccaaagatcagatcacttaccctgaggccctggctctrtgaccctgggcaagtcatttattccagaactctggttgtctcatctgtaagctgggaggcatagacaacactacattaaagagcccttccacatgtgttctaagtgaatacatgctccacatttttactcataacattcttgtagatcactggaattgtactcatttatcataaaagttatataagatataggaaaaaaagtggacccatgaaacctggtcatgtggtcagagccaaagagaatccagtttgatgtaaagttattttactcaagtactctgtggcagggattctgctgaggtagagtatttgagcagagcaccttgagaccaatgtcacagaaaatattccagcaaataattaatggtgtgtgtatatatattgccagctaccctgctggagcccagcaatctctcagaggagattagtggtccttacccatgtgtccaaccatttcaatacttgcttttctcaatgatcattatcctgaaataaatccaaattaaattttatgaaccaggattgaaattatgtgccttcagtatcgagccttctaatagcagttatttttattgaagtattaaagcaattggcttgagtcatcttggaaacactgctttcatatttcaaatatggttaggaggctgtcagcacatattaccagggattggagatatttgcttattaaatgatttttaccaggaaaaactcattacaggaaacatcttgtttacaagggtgtcctgaggatagcaaatggaaagaaacatgttacattgaattatagaagtaaaataagttgattcagctaatagattcaatggaaatataagatattattttgcaagtcaaagacaactgcaatttaatttaactgacagatttctactgtaggatgtaaacattagatagaaatatttacttgaaactgtagcgaccattacatgttattttgacattctagtttaggcatctatatccagtgatttttcaaatgttattattattattattatttgttttgcccatacaaagagaaaa

SEQ ID NO: 48003 - DNA, 608 bp, Homo sapiens
gcgaaggacatgaacagacacttcgcaaaagaagacatttatgcagccaaaaaacacatgaaaaaatgctcaccatcactggccatcagagaaatgcaaatcaaaaccacgatgagataccatctcacaccagttagaattggcaatcattaaaaagycaggaaacaacaggtgctggagaggatgtggagaaataggaacacttttatactgttggtgggacggtaaactagttcaaccattgtcgaagtcagtgtggcgattcctcagggatctagaactagaaataccatttgacccagccatcccattactaggtatatacccaaaggattataaatcatgctgctataaagacacatgcacacgtatgtttattgcggcactattcacaataccccattctttagacttttaaaatcaatacccactcttccccacgaacaagagaaagtaaaaacaactaacagtggatttctgtatcacgatgactcattttcaatagaacactaccataggtcaaatggatgaatgcataaataatgaatggattaatatcttttacataatcatgtgccacataacaacgtttacatcaataagagaca

SEQ ID NO: 48004 - DNA, 608 bp, Homo sapiens
gcgaaggacatgaacagacacttcgcaaaagaagacatttatgcagccaaaaaacacatgaaaaaatgctcaccatcactggccatcagagaaatgcaaatcaaaaccacgatgagataccatctcacaccagttagaattggcaatcattaaaaagtcaggaaacaacaggtgctggagaggatgtggagaaataggaacacttttatactgttggtgggacggtaaactagttcaaccattgtcgaagtcagtgtggcgattcctcagggatctagaactagaaataccatttgacccagccatcccattactrggtatatacccaaaggattataaatcatgctgctataaagacacatgcacacgtatgtttattgcggcactattcacaataccccattctttagacttttaaaatcaatacccactcttccccacgaacaagagaaagtaaaaacaactaacagtggatttctgtatcacgatgactcattttcaatagaacactaccataggtcaaatggatgaatgcataaataatgaatggattaatatcttttacataatcatgtgccacataacaacgtttacatcaataagagaca

SEQ ID NO: 48005 - DNA, 585 bp, Homo sapiens
tgtgtgagttagtaaatttcgttgactaccttcccacccccactccaaaaatgtctcctagaaaaagaacaatacactgtcccctgctatagccacaayagggattcgtggaggctacactatctactctgaactatgatattcagagaatgggctgaagagggaggcagactggctttaaattctcctcatttacctcttacgtgtggtcccctgtggcaagtaatcttacctctctaagcctcagtttcccccatgtgtaagaaaagaaaaataatagcacttaccctatcggtttcttctgatgactgaatgagatagcagccttggaatgatcatttgaaatattcagcaatgtgtttgtttttatcccccatgatgcctcattaaactgctcagaggcctctctcctcagcccaggccttgacagatagtcaccactgcaccacagcaaagcaatcatggtagaattgaggacaagcacactgaattatttgtagccaacatattgatatagccaatacagtggataaatggggcttgtcagatataatcagagcacaattttagtgattccccccactg

SEQ ID NO: 48006 - DNA, 831 bp, Homo sapiens
cacccccatcccatcccccaccaaaccccatcccagtggagggtaagtttctgaaattagaaaaacctacaatgccttgtcctgtaattctgggccagaagttctcagttggacaggttatgacattttgagtaggagaattctgtaaaactggccttgccaatgcattacaagacttttggtatccttgaccattgcgtcccccaacactaaatgccaaaatagttacacttactttttaatgctctcctctctacatgyccatttttcattgttaccaactgtatttccatttcctcagtctcactattaccttccttcataccttctttgaatgttttctttttcagacatttaataattcaaatgaataagaattagtgacattattattgggatcaataattgatgaactgtaacaatagtagggagataatttgaggtaaaataaacccttcatcttgtcaaataatataattcattgaactatacattaaaaaaatattatctgcaaggctttgttccaagagcagcacagagtgcaaagtgggaaattttggtgacttgaatttcagtggaaatgctgagcaactcctgtttctccctcctcttcctccgaataatctttaaaatgttctttttagtctagcttttctatctttcgccttgcttccccatgtgattgctcaagatgagagtgagaatctctcttaaaagtcatcttagacagtcatctctagttctgagtgaccagcactgctacaagctaatttatccccaattttacagtttgtatttgttaaaaacttgagtttctgtcattctgtttgg

SEQ ID NO: 48007 - DNA, 275 bp, Homo sapiens
tcataacagatataaacccaaaataygttttagggtggtctgattctgtcaatatatgttaatgctattactttatgaagtagtttcaaattgcctacaaaaggatttcccaaagtagatgtcacagttgggcagggtctctttgtacttcacactcaaaattccatgaggaaaaaaaatgagattatggcatgctacattatttcttggatagtcaaaaagcatgttagcatgttagatagaggctctgaaaagtactgcaggtaaaattaaaa

SEQ ID NO: 48008 - DNA, 1782 bp, Homo sapiens
acaattttttttgtttttgtttttttgttgttgttgtttttgagatggagtcttgctctttcactcaggctggagtgcagtggcgcgatctcagctcactgtgacctccgcctcccaggttcaagcaattgtcctgcctcagcctctcgagtagctgggattacaggggcacaacaccatgcacggctaatttttgtacttttagtagagacagggtttcaccatgttggccaggccggtctcgaactcctgacctcaagtgatccgcccacctcagcctcccagagtgctgggattacaggcgtgagccaccgtgtccagccctaaaaattcttagttttaasaggatttgaaagaacattaaaaagttggataaaacagacttagacactctaaaaagataagaaaattaagtgagatggttgggtataggtgtacaagatagaaacactaatatatggagagtggaactgtacattggcaaaagcattctaaataatttttttgtttataattttaccttttataaatgtattaggatgagttcctagtgggaaaattgctgtatgtaaaggtatatgcctttttaaagcttttgatgcatatcactaaatggccctaggattttcttagtgtccttaaatataaaattaatcctttttaaaaattaaaaacatttccactttttatcattttctctcttttttgacctttttattatagtaaatatacctaggataaaatttaccattttaataatttttagccatatggttcagtggcaataagtacattctcaatgttgttcaatcatcatcactatttcccaaacttttttgtcattctaaaaaatgtttaaataatatgtaacaaggccttaaaattcttcacatagccaggcggagtggctcatgcctataatcctagcactttgggaggctgaggtaggtggattacttgagtgcatgagttcaagaccagcccgggcaacatggcaaaaccacatctgtataaaaagtacaaaaattagctgggtgtggtggcatacgcctgtagtcccagatacctgggaggcttaggtaggaggatcaacttaacccaggaggcggaggttgcagtgagccaagattgcaccactgcattctagcctgagcaacagagcaagatgttgtctcaaggaaaaaaaaaaaaaaaaaaatattgttcacctaggttttcaagtgaaaaaaataaccccactaaagaataactagaaaatgcagacaaaagatagaaaagatgttctatgaattattgtctataatagcaaaatgcgggggggcgggcaggagaaacaacctaaatgttcatggggtaaggggggtagttaaaaaaattatggcacatccatagacacaaagcaacttgaggttagaaagaggggaatgtactatatatgtttacaatgcctcgctttggttaggagaactgtagattatttccattttctttatgtttttctatattttccttattttgtttaatgaataagtactgccttcataacttctaaaagtgttattttcagaaatggcattatgacaaaatctatgacttccctataattatcttaaattgaggggtaaaaaattgtccatctcttccttttgcctctgaccatcgtgtaatttttataaactttcagctaattaaacaagtatgactgaatttcatgcccatgtggatttttgaaacttctaggctcagcattttttttcactttaaaatgtctttacttgctca

SEQ ID NO: 48009 - DNA, 596 bp, Homo sapiens
gggactagaattaaaatttcattttactcatggtgaaaatgagattcatagaactggcccagctcacctacagccacacaagtgagaaaggggcagagctgggacaaaaaccctgtgttatcactcctagttcagtcttttttcccccactgggtcaaaggctatcaatgatgcagatamaaatgaactaagggccaggcgcagtggctcacgcctgtaatcccagcactttgggaggttggggtgggtggatcaattgagctcagcagttcaagaccagcttgagcaacatggtgaaaccccatctctacaaaaaattaaataattaggtgctgggtgtggtggcgtgtgcctgtagtcccagctacttgggaggctgaggtgggaggatcccttgggcctgggaggttgaggcagcagtgagccatgattgtgacactgcactccagcctgggtgagagagcaagaccttgtctcaaaaaaaaaaaaaaaaaaaaaaaaaggacatccatccctatccctgtacctcagtttttctatgttgggaaagatgaccctgactgtccttctattatagttctgatatttcagaggac

SEQ ID NO: 48010 - DNA, 596 bp, Homo sapiens
gggactagaattaaaatttcattttactcatggtgaaaatgagattcatagaactggcccagctcacctacagccacacaagtgagaaaggggcagagctgggacaaaaaccctgtgttatcactcctagttcagtcttttttcccccactgggtcaaaggctatcaatgatgcagataaaaatgaactaagggccaggcgcagtggctcacgcctgtaatcccagcactttgggaggttggggtgggtggatcamttgagctcagcagttcaagaccagcttgagcaacatggtgaaaccccatctctacaaaaaattaaataattaggtgctgggtgtggtggcgtgtgcctgtagtcccagctacttgggaggctgaggtgggaggatcccttgggcctgggaggttgaggcagcagtgagccatgattgtgacactgcactccagcctgggtgagagagcaagaccttgtctcaaaaaaaaaaaaaaaaaaaaaaaaaggacatccatccctatccctgtacctcagtttttctatgttgggaaagatgaccctgactgtccttctattatagttctgatatttcagaggac

SEQ ID NO: 48011 - DNA, 555 bp, Homo sapiens
ggctcgcacagagggaggcccagtggcggacggcgatggcccagcctttgctggattccgggctaggggtctggggaagaggggcatcgggccggaaatgagccccagttcgggctccacgagccctggagcccccaacgatgtttcctggctgagttaaagagcccgaccttggcccctcgcctggcgatgtcggcctccccctcccttgcccgcagcgtcttagctggagggcagctcgcagcgtgcctaggccaaccccttctgcgtctcttttcttttcctgtcactctctgttctcggcttctgctttctccttctcacagaatgccagagcgcccaggggcctggaggagcttccgcaccagccccttttctgggcctccaatttgccttcsccacagtctagtctccccccgttccatatttctttctgtttagactctgctcgtatttcctcgccgattgagccagcatgtgtctctgcctctaaatcttctccctcgtgtaacattaaacaaaccaaggtgtgttgagctggagaagtcctggcaa

SEQ ID NO: 48012 - DNA, 607 bp, Homo sapiens
cagatgacagcggacacctgtagggttagttgtgacatttctagggacccccagcctacattcactttcacctagacaagcctctgacactggsgtgtgtatttgtgtgtacacacagacacacacacactgtgtcctcaggttttatcctgtgggtgccgcaccagtggaggagagcacagtgggtggatgcatgtgcatagtctgggcattcagctctagggcctgtatgcgcacaggcctccctggcttaggtccccatgtgcctcccacaggcctgagaagtaggtagcaggatgtgtttatgtctgagaggagatagcagggacagtaggcctccatctgccctgaggcatgaatcaggtatggggggcctctttcactcactaggccactgtgtaactcccacacaaacactctcttggccctggcaagaagcccccttcccccatctctgtgccctctgagaacccccatctctcctccagcctcaaatacaagcctaagagcaaaaaggataaacttagaccccaagcccaggacaacttctggggcataactgtgtttccaaaattgtggctggagagaagtgagggcagagatctga

SEQ ID NO: 48013 - DNA, 553 bp, Homo sapiens
aataaaacagacaaaattccctgtcctcatggagcttatgatctagtggagaaagcagccaaaaaaaacctaaataaataattgwccaggtaagctctataggaaaacaaaaacaaaaggaaagagatgggcaatgggagagttgcagttttgggtaagatggtgaggaaacaccctacagagatccgattcaaaactacaccctgtcagagttttcatttccttccactccactcaaattgctaaaactacactggtgggaattatcaattaatcgatttgctgatcacctatgtcttgtgaagaaaaagaagttcagcaacttagacacatgcgtcctctgagaactgtccttgctgataaaggacggctacatcttcccgggcagtcagaaagcagggccagcaagggatgcacagatgtgagaacaccacatgtcccaggccactccatttaattgttatgcctaatgataatggggaagtcattggttgtcctgatttccagaaattggcatgtcccaatggccaccagatacttcagagagttctca

SEQ ID NO: 48014 - DNA, 553 bp, Homo sapiens
aataaaacagacaaaattccctgtcctcatggagcttatgatctagtggagaaagcagccaaaaaaaacctaaataaataattgtccaggtaagctctataggaaaacaaaaacaaaaggaaagagatgggcaatgggagagttgcagttttgggtaagatggtgaggaaacaccctacagagatccsattcaaaactacaccctgtcagagttttcatttccttccactccactcaaattgctaaaactacactggtgggaattatcaattaatcgatttgctgatcacctatgtcttgtgaagaaaaagaagttcagcaacttagacacatgcgtcctctgagaactgtccttgctgataaaggacggctacatcttcccgggcagtcagaaagcagggccagcaagggatgcacagatgtgagaacaccacatgtcccaggccactccatttaattgttatgcctaatgataatggggaagtcattggttgtcctgatttccagaaattggcatgtcccaatggccaccagatacttcagagagttctca

SEQ ID NO: 48015 - DNA, 533 bp, Homo sapiens
gctgagtcacctctggctcctagaagcctggctcagggtcagctcatttkaaaagcggctgccttttcttcttttctcttctcttctctttttttttctctctctctttcattcacattatagcttgagtcagaacttcattcctttttaaggctgaaggaccacattttgcttgtttgttcatgtgatcgatgatgatggacacttaggttgtttccactttttagctatcgtaaacactgttgctaatggaatatgggtgtacaaatatttcttcaagatcttgctttcaattcttttgggtatatacccagaagtggaactgctgcatcatatggtaatttctgtgtttaatttgttgaagaactgccatactgttttccaggttggctgttccatttttaaattttatttatttatttattgtttatttgtttatttttttgagacggagttttgctcttgttgtccaggctggagtgcagtggcgtgatcttggcttattgcaacctccgcctcccaggttcaagcca

SEQ ID NO: 48016 - DNA, 507 bp, Homo sapiens
  misc_feature (1)...(507): n = A,T,C or G
tttttgagacggagtctcactctgtcacccaggctggagtgcaatggcacaatcttggctcactgcaacctctgcctcccagactcaagyaattctcctgtctcagcctcccaagtagctggattataggcgcacaccaccatgcccaactaattnttgtatttttagtagagatgggttttcgccatgttagccaggctggtcttgaactcctgactcaggtgatccaccagtctcggcctcccaaaatgctgggattacaggtgtgagccaccgcgcccggccctaatttttgtatttttattagagacaggatttcaccatgttggccaggctggtctcgatctcctgacctcaagtaatccacctgcccggcctcccaaaatgctgggattacagttgtgagccgctgtgcctggccccagcaccttctttagacattggtgatatcactgagaatgacttcttaagccacagtcactataaagagtcaatcaccaaagacga

SEQ ID NO: 48017 - DNA, 1719 bp, Homo sapiens
ttcatgagcactttaaaataattaagtacagctgttcacataggcagttatcgatactaatttaaataagaaacagttttgcatgttacatcattatctgtaatcttctgaaaataacagggacaaaagcagtatcatccttgcctaatgtcatctgctagtgaggggatgcagacctaagtgactaagttgattccggctgagaatcaaaggaaaaggtccatagattcatccttgctttcaaagagtggcattgtgagaatgagtaagaggaaatatcacttagtattaacagatgataataagtagtgtttcctactaattgattatttaccatatgctagtcctatgctaagagtttagagatacgtgagagtcttgtgagtccggatcatcattctccccagtgttcagaggggaaggctcygcatggttgagtatcttgcccatagtcacagaaccagtatatgttgggacttggcctcagacccaggtctctccagcttcgcagcctgtgttcatcatatgatgtatcacttacaggaaactccaaaactgagctgaagtctttgacagttgcaggagtcagcatcctgctggagccgtggcctcacagtcctgtctgtgtccttgggagggctctgtggcagccccaggtcccacttgccaggagtcccttcttcacccatgggcatcctgagaacagaggaggctgagggggcagcagcagagggttaacagctcttcagcaggcactgggtccacatgctggagcccttttttgttgatttattgtgtttagacatcagatgcgaaggtttccatgagtcaccttcctcagtgaggaatcatgaaggaatgatcggtctggcctgcataaggccctactcttgccttggtgttcattcattcattaatcatatttttttatacatgattcatatttccccagtccaatacattttatttgtacatattcttttaaaaatcataattcttttgttcacacatatttacacttacatataatattgttttatatctttcattttgctttttactgattaactctgcataaatataattgtactagtcatactaaggtgataaagataatatgctaatttttaataatcaatagaaacattttaattacttcataaaatcatcaaggtatatgtcatggtaattatattattaatgctatatacttagaaataatacagtttcttcatataacacttataattaacaaagtgtcttaatcaaataatcttgttaacaggcattacagggagcagcttaacaatatctttcatttgtatagttccttagaattttcaagtcacctacagaaacatcttccaacaagctataattgggcagagcagttagtattatccccatgttactcataaagaagctgagattacaagcactaaaatttgtatccaatatcagcatagtctggcaattaaggaaacagaattagaactcagggactcacgggcactttcttaccccacacacagacagcttaaaataataacagcatattaaaataagaatctctcgtagtacatttgagtgtttgggaaactaataataagctgaagctgctgaagaatctatttcttttagacaggcttttctaacatctttgtgaggactaactgaattgatgtgtgaaattgcataggacagtggtggccctatgca

SEQ ID NO: 48018 - DNA, 1719 bp, Homo sapiens
ttcatgagcactttaaaataattaagtacagctgttcacataggcagttatcgatactaatttaaataagaaacagttttgcatgttacatcattatctgtaatcttctgaaaataacagggacaaaagcagtatcatccttgcctaatgtcatctgctagtgaggggatgcagacctaagtgactaagttgattccggctgagaatcaaaggaaaaggtccatagattcatccttgctttcaaagagtggcattgtgagaatgagtaagaggaaatatcacttagtattaacagatgataataagtagtgtttcctactaattgattatttaccatatgctagtcctatgctaagagtttagagatacgtgagagtcttgtgagtccggatcatcattctccccagtgttcagaggggaaggctctgcatggttgagtatcttgcccatagtcacagaaccagtatatgttgggacttggcctcagacccaggtctctccagcttcgcagcctgtgttcatcatatgatgtatcacttacaggaaactccaaaactgagctgaagtctttgacagtygcaggagtcagcatcctgctggagccgtggcctcacagtcctgtctgtgtccttgggagggctctgtggcagccccaggtcccacttgccaggagtcccttcttcacccatgggcatcctgagaacagaggaggctgagggggcagcagcagagggttaacagctcttcagcaggcactgggtccacatgctggagcccttttttgttgatttattgtgtttagacatcagatgcgaaggtttccatgagtcaccttcctcagtgaggaatcatgaaggaatgatcggtctggcctgcataaggccctactcttgccttggtgttcattcattcattaatcatatttttttatacatgattcatatttccccagtccaatacattttatttgtacatattcttttaaaaatcataattcttttgttcacacatatttacacttacatataatattgttttatatctttcattttgctttttactgattaactctgcataaatataattgtactagtcatactaaggtgataaagataatatgctaatttttaataatcaatagaaacattttaattacttcataaaatcatcaaggtatatgtcatggtaattatattattaatgctatatacttagaaataatacagtttcttcatataacacttataattaacaaagtgtcttaatcaaataatcttgttaacaggcattacagggagcagcttaacaatatctttcatttgtatagttccttagaattttcaagtcacctacagaaacatcttccaacaagctataattgggcagagcagttagtattatccccatgttactcataaagaagctgagattacaagcactaaaatttgtatccaatatcagcatagtctggcaattaaggaaacagaattagaactcagggactcacgggcactttcttaccccacacacagacagcttaaaataataacagcatattaaaataagaatctctcgtagtacatttgagtgtttgggaaactaataataagctgaagctgctgaagaatctatttcttttagacaggcttttctaacatctttgtgaggactaactgaattgatgtgtgaaattgcataggacagtggtggccctatgca

SEQ ID NO: 48019 - DNA, 1719 bp, Homo sapiens
ttcatgagcactttaaaataattaagtacagctgttcacataggcagttatcgatactaatttaaataagaaacagttttgcatgttacatcattatctgtaatcttctgaaaataacagggacaaaagcagtatcatccttgcctaatgtcatctgctagtgaggggatgcagacctaagtgactaagttgattccggctgagaatcaaaggaaaaggtccatagattcatccttgctttcaaagagtggcattgtgagaatgagtaagaggaaatatcacttagtattaacagatgataataagtagtgtttcctactaattgattatttaccatatgctagtcctatgctaagagtttagagatacgtgagagtcttgtgagtccggatcatcattctccccagtgttcagaggggaaggctctgcatggttgagtatcttgcccatagtcacagaaccagtatatgttgggacttggcctcagacccaggtctctccagcttcgcagcctgtgttcatcatatgatgtatcacttacaggaaactccaaaactgagctgaagtctttgacagttgcaggagtcagcatcctgctggagccgtggcctcacagtcctgtctgtgtccttgggagggctctgtggcagccccaggtcccacttgccaggagtcccttcttcacccatgggcatcctgagaacagaggaggctgagggggcagcagcagagggttaacagctcttcagcaggcactgggtccacatgctggagcccttttttgttgatttattgtgtttagacatcagatgcgaaggtttccatgagtcaccttcctcagtgaggaatcatgaaggaatgatcggtctggcctgcataaggccctactcttgccttggtgttcattcattcattaatcatatttttttatacatgattcatatttccccagtccaatacattttatttgtacatattcttttaaaaatcataattcttttgttcacacatatttacacttacatataatattgttttatatctttcattttgctttttactgattaactctgcataaatataattgtactagtcatactaaggtgataaagataatatgctaatttttaataatcaatagaaacattttaattacttcataaaatcatcaaggtatatgtcatggtaattatattattaatgctatatacttagaaataatacagtttcttcmtataacacttataattaacaaagtgtcttaatcaaataatcttgttaacaggcattacagggagcagcttaacaatatctttcatttgtatagttccttagaattttcaagtcacctacagaaacatcttccaacaagctataattgggcagagcagttagtattatccccatgttactcataaagaagctgagattacaagcactaaaatttgtatccaatatcagcatagtctggcaattaaggaaacagaattagaactcagggactcacgggcactttcttaccccacacacagacagcttaaaataataacagcatattaaaataagaatctctcgtagtacatttgagtgtttgggaaactaataataagctgaagctgctgaagaatctatttcttttagacaggcttttctaacatctttgtgaggactaactgaattgatgtgtgaaattgcataggacagtggtggccctatgca

SEQ ID NO: 48020 - DNA, 1719 bp, Homo sapiens
ttcatgagcactttaaaataattaagtacagctgttcacataggcagttatcgatactaatttaaataagaaacagttttgcatgttacatcattatctgtaatcttctgaaaataacagggacaaaagcagtatcatccttgcctaatgtcatctgctagtgaggggatgcagacctaagtgactaagttgattccggctgagaatcaaaggaaaaggtccatagattcatccttgctttcaaagagtggcattgtgagaatgagtaagaggaaatatcacttagtattaacagatgataataagtagtgtttcctactaattgattatttaccatatgctagtcctatgctaagagtttagagatacgtgagagtcttgtgagtccggatcatcattctccccagtgttcagaggggaaggctctgcatggttgagtatcttgcccatagtcacagaaccagtatatgttgggacttggcctcagacccaggtctctccagcttcgcagcctgtgttcatcatatgatgtatcacttacaggaaactccaaaactgagctgaagtctttgacagttgcaggagtcagcatcctgctggagccgtggcctcacagtcctgtctgtgtccttgggagggctctgtggcagccccaggtcccacttgccaggagtcccttcttcacccatgggcatcctgagaacagaggaggctgagggggcagcagcagagggttaacagctcttcagcaggcactgggtccacatgctggagcccttttttgttgatttattgtgtttagacatcagatgcgaaggtttccatgagtcaccttcctcagtgaggaatcatgaaggaatgatcggtctggcctgcataaggccctactcttgccttggtgttcattcattcattaatcatatttttttatacatgattcatatttccccagtccaatacattttatttgtacatattcttttaaaaatcataattcttttgttcacacatatttacacttacatataatattgttttatatctttcattttgctttttactgattaactctgcataaatataattgtactagtcatactaaggtgataaagataatatgctaatttttaataatcaatagaaacattttaattacttcataaaatcatcaaggtatatgtcatggtaattatattattaatgctatatacttagaaataatacagtttcttcatataacacttataattaacaaagtgtcttaatcaaataatcttgttaacaggcattacagggagcagcttaacaatatctttcatttgtatagttccttagaattttcaaktcacctacagaaacatcttccaacaagctataattgggcagagcagttagtattatccccatgttactcataaagaagctgagattacaagcactaaaatttgtatccaatatcagcatagtctggcaattaaggaaacagaattagaactcagggactcacgggcactttcttaccccacacacagacagcttaaaataataacagcatattaaaataagaatctctcgtagtacatttgagtgtttgggaaactaataataagctgaagctgctgaagaatctatttcttttagacaggcttttctaacatctttgtgaggactaactgaattgatgtgtgaaattgcataggacagtggtggccctatgca

SEQ ID NO: 48021 - DNA, 613 bp, Homo sapiens
atcaactcctgatgccaccagaaaatatattattgtcagttgtttccttcagtgaatggcttagaaatacaatgtgtgtctatgtgtgtgtggtgtggcatatggatgcacacattttcaatgtgctactgtatggcatatttatatttagaattgctttttaatatcttctttcctagaatctgaggtggtttattttgatggacaaagtgctctgctgtatacacttgataaaaaacctttaaaaccaataagagatgttatttctttgaaatttaaagccatgcagagcaatggaattctacttcacagagaaggacaacatggaaatcacattactctggaattaattaaargaaagcttgtcttttttcttaattcaggtaaaaaaatacttgaactttataccagtagttaaaaaaaatctgtttacatttgttggtactcagtcttttcacagttagataaaatgaccatataattcatcatctaaaccagaacacctttaagaaataaaaaatacacaagtgatagttactctgggacagtaagtgcaaagtagaactgcaatgaacaaatgtaaatgaaagtttaagagcattactaccagatg

SEQ ID NO: 48022 - DNA, 606 bp, Homo sapiens
aacatcaggggcccacggccattactactattattcctactgttatgtactagttttagactttagggtatcatgatgtttcaatgactcattactattgagcatttcatgtggcctatttggatgtatttcttattaaaaatgtttttcatttatttcayatataatattggtgtaagacacttataatttcaatctctagtaaaggtaagaaggctactgctcattattgcctgctccatatatttttaatatttaatgaatctctctttgaactttcttgggggtgtcttctaacacaacacctttatttatttatttatttttaattatactttaagttttagggtacaggtgcacaacgtgcaggtttgttacatatgtatacatgtgccatgttggtgtgctgcaaccattaactcgtcatttacattaggtatatctcctaatgctatccctcccccccaccatcccacaacaggccccggtgtgtgatgttccctttcctgtgtccatgtgttctcattgttcaattcccacctatgagtgagaacatgtggaacacaacacctttataattagtagagatgttgttaaatttgaaaa

SEQ ID NO: 48023 - DNA, 606 bp, Homo sapiens
aacatcaggggcccacggccattactactattattcctactgttatgtactagttttagactttagggtatcatgatgtttcaatgactcattactattgagcatttcatgtggcctatttggatgtatttcttattaaaaatgtttttcatttatttcacatataatattggtgtaagacacttataatttcaatctctagtaaaggtaagaaggctactgctcattattgcctgctccatatatttttaatatttaatgaatctctctttgaactttcttgggggtgtcttctaacacaacacctttatttatttatttatttttaattatactttaagttttagggtacaggtgcacaacgtgcaggtttgttacatatgtatacatgtgccatgttggtgtgctgcaaccattaactcgtcatttacattaggtatatctcctaatgctatccctcccccccaccatcccacaacaggccccggtgtgtgatgttccctttcctgtgtccatgtgttctcattgttcaattcccacctatgagtgagaacatgtggaacacaacacctttataattagyagagatgttgttaaatttgaaaa

SEQ ID NO: 48024 - DNA, 678 bp, Homo sapiens
ggctctggccttggggtctagtcaggaactccttgtgtgagcctgtgcatgttgggtgggttgggcccttccttcattggtgaagccttcagagaaggctacaacccagcgaagttcacgggccttggtttcccagctgggcaaggtggtgcccttttcttcactgccctgcacgaggtgcatgtcgctccctgccatccagcctgtgttagctttacctgcatctacagttttattccccctgtcgagtgtgagctctgtgcttcctattccagtatccctcttcatagaagctcttcctgaccctgaagtctgttggatcctcttgtcaaagatgctgayggaacccagacttttcccttcagagcacgtatctcaggtggtaattataaactgattgattgaagccattaagtcatcaatgcctgtccccttcactgttcttgttgctgttgtgtccccagtaattattttagttcccagcccatagtaggcatttacatcataatacatagtggtatttgggcgaatgaataaggaaccaggtctgattcatcttcgtatcctccaccggccaaggccttgcccagaatcaaacatctaataggaacttcataaatatttatggaaaaatggcacaaactcatgtgagttccagctctttcaggccagggtctt

SEQ ID NO: 48025 - DNA, 575 bp, Homo sapiens
agtttagtaaatatatttctggtgctgatagttttgatgtatagcttttctccttatgacccacatttaaagaaaaatcacctgtgtgggcaaaacaaaaaaatagtcaaataatttaaataaaggtagaagcataaggattttaaaataataaaagatttctgaattctgaaaataatcccatgatttgtgtaagtaattgatgtagatgaaaagccgaattcarctataaaaagcttttcgtctcaccttaaagcggtagattcttggccctgaatctttgtgggattgctataatttaccaagcaattgattatgatgtcacaaggaggagatggaccacaagggggaaaacttccccctactaattcatgcaaggccaatattttatacctgcttcaagaaaacattatttatattgtataagatgaggtttaaaatgcctgtctatattttttgaagggtctctttaaaagaaattatctattcataattgaaattctccaggcaaatcagttatcagcattttcaacagaacaggtaattaattggtttgaatttcaaattgaaggtca

SEQ ID NO: 48026 - DNA, 2444 bp, Homo sapiens
ttttttttttttttttttttttgagacggagtctcgctctgttgcccaggttggagtggaggtagtggcacaatctccattcactgcaagctccacctcccgggttcacaccattctcctgcctcagcctcccaagtagctgggactacaggcgcccaccaccacacccggctaattttttgtatttttagtagagacggggttttaccatgttagckaggatggtctcgatctcctgacctcatgatttgcccacctcggcctcccaaagtgatgggattacaggcgtgagccaccacgcccagccagaaatatttctatttttaaaaattcctttctggattgtgtataatcactgcctaattaatatgtttggtaaatctggtaagttcttacatcatatctgtatttacagagaccctttgctgaccacctcctgcctttatcccacccctgaatcagaaagtgagacctccagcagaagcctttttacctttgacagttctcccaggtcaggccgcacccagcccagtttgtccagcacacactcgtcaaactttgcctgctgtttgcgacagtgacgaaataactgctggccagtataatcaatgcaagtccaatattctgtaaaaggctctgcacagtgacgttttatctgcctggaaaagaaagctgggttaggggcatctctttgcaaaacaatgaaaaacagaaaagtgagaaaaaaataggtacagatctcaaatacatagccttgctttttgaaaggtatgtgagtacatattcttatctcacttacaagacaacttcaggatcctcaagttgagaacaagttagtaaacaaaaaagatttctgaggtagaaaacctaatttctttatatagtaagaagaaaagagtgtagcctaatgcacgcctattttactcagagaggaactccttacttggggcctatttattcttttctttagatccaattcctctaagggtatcagcttagcaaatttagaagaggaggaggcataattaaataatggacatgctgatagaagtcaaacgtgacagacaatggcaaaggaagagacagaattataaaaagcaaatacacaaactaacaagcagaagatcctgggatcattcagtataaagacaaactgtactccactcctcaaaagctcaaggtcctcattttatttacgcattgaacaaaaatagatattaatccttgctatcaagaacaaagttatattatatttggtattctctgctaagaagcagggtagcatataattcattctgtggccatcaaaaatggctagagaaaatttaacttctgtgtataaaaagaataagtttcagttttttgcaaaatcctccttatcttatcattcaaccctactagtatgcatgttcaagcaagaataaaatatcatcattttatgtaaaagccatacttgaggcagtgaaattcagaacacctctttctcccaatgaaataataattttattatttaagtgcttacctgtcatactccagaaatctagctacactctcacatgaatcttgtttaacatggatcaggaaggaaggatctcagagatggcttaaggaagtatacagtgaaaaatctgctttccaccctgcccaataagccactcagttgctctcctagaggtccaccaatgtcaccagcttcttaggtttcccttccgggtatactaagcataacctgcacccacataacttctactcaagaatcactttggtagaaagcaaccatttccaatgggagttttatattcctccaaaatgcagcagcagcagacgggctgcaagccactactctagtagcatggatccctgttctggaccctgttacccatacctaacaattatctactaatgcctacaaccagcaacttcagcagtgagaaattcctctatggattcaccttgggaatttgtgaaatccaaacattccccgcttaaaatgtactaccactggaccatggaaaaaatgctttgcaaaagttctcttagaaaataaaaattgtttaggctggatgctgtggctcatgcctgtaatcccagcaccttgggaggccaaggtaggcggatcacttgaggccaggagttcaagaccagcctggccaacatggcgaaaccccatctctactaaacatacaaaaattagccaggcaggtggcacacacccgtaatcccagctactcaggtggctgaggcacgagaatcgcttgaacccaggaggcagaggttgcagcgaacaaagatcacgccacagcactacagcctgggtgacagagtgagactctgtctcaaaaaaaaaagaaaaattgtttaaataaacacacacacagactcaatctcgctggcaatcaaatcaatgcaaattgaaacatccaaaaatatttgcacctcccaaa

SEQ ID NO: 48027 - DNA, 634 bp, Homo sapiens
atactaaatcaactgtacatggagttaaaatcaattgcggccaggtgcagtggctcacgcctgtaaccctagcattttgggaggcagaggtgggcagatcacctgaggtcaggagttcgagaccagcctggtcaacatgatgaaaycctgtctctactaaaaatacaaaaagttagctgagcgtggtggtgggcacctgtaatcacagctactcaggaggctgagacaagagaatcgcttgaacctggaaggtagaagttgcaatgagctgagatcgcaccactgcactccagcctgggcaacagagcgagacttcatctcaaaaaataaataaattgtattttgtgactctttgggaggaaattatgagctttgcgattatacagaacatgtttatcttctttggtgttgtatcgtttatacttaactcagggcttggcacgtatgtactgaaaaagtagatagttggatgaattgatggatagatagacagaaaagtaaaaaactcatcagggccaagaagtctagaaatactttaacacaaatgctctccaggatcccaccactgatatttctctctggagatcattacaatgacctcagactaagaattactgaaagactttcatatgca

SEQ ID NO: 48028 - DNA, 585 bp, Homo sapiens
ttcgatgaagaatatttgcctcttttcctccctttctgccttctaaaataagcaggcacaagctcctttgataaggtagaaatggtttggaaggaacaggtggacttagctctggataagtcaggggactagctgaaactagatacgggtgtcaaataaaagatttctggaacttgggcttaatcasggcctgcctgtgcagcctcagtgaaaacaaaatagtaggaatccaaagatgaagtagactagaggatcagcaagggctccaaagaaagagtatttggtgaatctatggtcaggctttagtggttcagagaagaatggcacagtatttcaatactcagaggagacagacaaatctggagagatggggacaaagcaaatctagatgtctatgtttctatggaagcaggtctctgaaggcttccctgattctagcaatatccacctattgagtatctagcacacatgagtgcagatgttgggtatcttgtcacattagtgcatcagtttaccagacatggatccactcagtcagcgaggctatggtctaagcttttacccatgaccctgccacatctcagg

SEQ ID NO: 48029 - DNA, 501 bp, Homo sapiens
ctcatttaatcttcatcacaaacccatgaaataggtactaatattatcatataggcccaaaggagtaaaagcatatgctcaagtcacaaaaccaagatttgacgtctggccccagagtccttattcttagcctctgcgcctccttccctgtctycccagggacactgctaattcagcgtctttaatggccgtatggccttcccaggagcatcctggattcgcctgtggaagtgcattcattctgccttcagtgtcctgctgctatggatatgcgtttacgtcgaagggcttgatttctgggagttggattgcatggaggggtggggttgggtccagggatgtttgcaatccttttccccaatgctgctgtagtcttggcatcccagcagctgtgtgtgaaggaggcacccctctcccaggatgcccccagaccacagggtgcagagaaccatctcagtgtttctgtcattcccctgctgcagtgaacttgagtatcttccc

SEQ ID NO: 48030 - DNA, 501 bp, Homo sapiens
ctcatttaatcttcatcacaaacccatgaaataggtactaatattatcatataggcccaaaggagtaaaagcatatgctcaagtcacaaaaccaagatttgacgtctggccccagagtccttattcttagcctctgcgcctccttccctgtctccccagggacactgctaattcagcgtctttaatggccgtatggccttcccaggagcatcctggattcgcctgtggaagtgcattcattctgccttcagtgtcctgctgctatggatatgcgtttacrtcgaagggcttgatttctgggagttggattgcatggaggggtggggttgggtccagggatgtttgcaatccttttccccaatgctgctgtagtcttggcatcccagcagctgtgtgtgaaggaggcacccctctcccaggatgcccccagaccacagggtgcagagaaccatctcagtgtttctgtcattcccctgctgcagtgaacttgagtatcttccc

SEQ ID NO: 48031 - DNA, 543 bp, Homo sapiens
ccctcctcggcctcccaaagtgctgggattacaggagtgagccaccatgccagccaaaaagaatatttcttaaacaagkttttgaaaaaccagtcaattcggtaatatgaggcagtggtccttcaatgagttttggagaactgccttttgtccaatcggcctttgaaggtgtggcagcttcccctacacctgaaagaggtcccaccccaggacacaggccctggccttgggcatggcaggccagtctcccccagacccacccactgacagcctcccagcaggagggaactcacactcctcacaacagcactttgtggtgtaaatacaaaaccccattttacagatgagaaaatggaggcttgaagaagtgaattgacttgcccagcgcctcatagtcaaaaagtaatcaaactggacttggcacacaggttgacaaaccccaaggccaggattctctccttgctcccccaacccttggatctcccacctgctggcgccagacctaattaggagctctgctggcccctgaggtgggttgggagg

SEQ ID NO: 48032 - DNA, 543 bp, Homo sapiens
ccctcctcggcctcccaaagtgctgggattacaggagtgagccaccatgccagccaaaaagaatatttcttaaacaagtttttgaaaaaccagtcaattcggtaatatgaggcagtggtccttcaatgagttttggagaactgccttttgtccaatcggcctttgaaggtgtggcagcttcccctacacctgaaagaggtcccaccccaggacacaggccctggccttgggcatggcaggccagtctcccccagacccacccactgrcagcctcccagcaggagggaactcacactcctcacaacagcactttgtggtgtaaatacaaaaccccattttacagatgagaaaatggaggcttgaagaagtgaattgacttgcccagcgcctcatagtcaaaaagtaatcaaactggacttggcacacaggttgacaaaccccaaggccaggattctctccttgctcccccaacccttggatctcccacctgctggcgccagacctaattaggagctctgctggcccctgaggtgggttgggagg

SEQ ID NO: 48033 - DNA, 602 bp, Homo sapiens
gagcacacaaaatttggagggacaaaattcagttcataccaacagagttttgcaaactataaattacagaatatatatagatgacagtatttctgtttttcacttattataggaatatcctccttaraaaattactgaaactaactacactataaaatgtaatacactatatacacaactttgtttttaatatatattctgatcaactaaatagactagatctgtttcaacaaagaaaaatagaaacaggtttctttaaatgtctctggcaatagtgctgctttatcattttagaaggatggtatttcccagttaatttttcccttaattattagctgagttatactcagtaattacaatgagttatatcatcagtagttcctgtctcttctggcttaagtgacactcatgtttcacattcaatgcatagtgtggattcacagtcatcatccttttttttttcttttactgagttgtgttacacagtagctcatgaaacagaaagtaatttgtttttaagtatagctagggaagatatgtgtcatagggtataagggagcaaaaacaaattgctacgcggtctctgctttggggctaacact

SEQ ID NO: 48034 - DNA, 561 bp, Homo sapiens
gcctgtaatcccagctactcgggaggctgaggcagaagaatcacttgaacctgggaggcggaggttgcagtgagccaagatcacgccattgcactctgcaccccagcctgggtgacagagtgagwctccatctcagaaagaaaaaaaaaagtatttatttctccttcacttttgaagactattttgtctaaggcattcatggtatcacactatgattctaatttgcattctcatgaatttgctattttcatttactatttcatcatggacatttttccatgttactacatgtaagtctaccgccctgaagaaataaaccaaaacgtaaattaacggtattgtatagatgtaccagaattttttaaacctggctcctctgaatggctatgttttctttattttttgttattacaagtaatggtgaaatcagtattcttaacatcatacatgtatttgcaccgatgttccccacacccatttgttgtcatttgactttgtcctggtacgtgcacagataaattttctttaaactttatgctatcaagttaatcaatcgtgtcc

SEQ ID NO: 48035 - DNA, 561 bp, Homo sapiens
gcctgtaatcccagctactcgggaggctgaggcagaagaatcacttgaacctgggaggcggaggttgcagtgagccaagatcacgccattgcactctgcaccccagcctgggtgacagagtgagtctccatctcagaaagaaaaaaaaaagtatttatttctccttcacttttgaagactattttgtctaaggcattcatggtatcrcactatgattctaatttgcattctcatgaatttgctattttcatttactatttcatcatggacatttttccatgttactacatgtaagtctaccgccctgaagaaataaaccaaaacgtaaattaacggtattgtatagatgtaccagaattttttaaacctggctcctctgaatggctatgttttctttattttttgttattacaagtaatggtgaaatcagtattcttaacatcatacatgtatttgcaccgatgttccccacacccatttgttgtcatttgactttgtcctggtacgtgcacagataaattttctttaaactttatgctatcaagttaatcaatcgtgtcc

SEQ ID NO: 48036 - DNA, 561 bp, Homo sapiens
gcctgtaatcccagctactcgggaggctgaggcagaagaatcacttgaacctgggaggcggaggttgcagtgagccaagatcacgccattgcactctgcaccccagcctgggtgacagagtgagtctccatctcagaaagaaaaaaaaaagtatttatttctccttcacttttgaagactattttgtctaaggcattcatggtatcacactatgattctaatttgcattctcatgaatttgctattttcatttactatttcatcatggacatttttccatgttactacatgtaagtctaccgccctgaagaaataaaccaaaacrtaaattaacggtattgtatagatgtaccagaattttttaaacctggctcctctgaatggctatgttttctttattttttgttattacaagtaatggtgaaatcagtattcttaacatcatacatgtatttgcaccgatgttccccacacccatttgttgtcatttgactttgtcctggtacgtgcacagataaattttctttaaactttatgctatcaagttaatcaatcgtgtcc

SEQ ID NO: 48037 - DNA, 581 bp, Homo sapiens
ctcctatcaaataatgatgttagtctcacccgctaccccttgaatcggaccccagcaggatgctacaatgatagccagtaccaagttctagaagctttcctgtcttgggcaatttcctgacttttaaaaatgtctttcttaggtggtttccatccaagcaaattgatgagaagcaaatgctgaataaaatgcagccccagagaagagtagaggagacaggaggtcttgagaagaaaatgcccactctcccaattcttctgcctcagccttgctagagctctgcatccagcccagcggcctcgccaccagctgcaagtccattcatttttggtggaagctccactcttccagcgccctggctggataccattccctctttcctgctgcaaaagccaaggtctcctccaggctgaggtgtgccagtgtaactgctctttcagatccagatgacaagattccccartgggatagggcctctctctccccaggcccttctatggcccaagatggcctggagaagtcacacacccacctcttcccaaggcagggtcctctgaactctggggactcctcctgtccat

SEQ ID NO: 48038 - DNA, 541 bp, Homo sapiens
gcatgatcctacttcaggatatttgccattgttactgcatctgcctggaaccttttctcccatataaacatagagattgctcttgcctgtccttcaagtctattcttaaatgtcccattctctgtgaagctttcctgcccaccctatttaaattacagacttcactcccaattccccatctactttaagagtcttcatttatcattccttgacaaactgtaaatayacatgttcacttttttatcgtctgtctccaaatactggaatgttaagttctgtaatgtcagatatttctgtttggttcactggtgtattcttaaagcatgttacatactaggtatactcaatgaatatttgttgaataaatatcacattgggcttattccagaaattcaagcttgtttcaatagttagagcaatctacaaatgtaattcattacattaactaattaaaggagctaaatcacatcaccaccacaataatgcagaaaaacacatttgatacaactcaacattcatgtctgcctaacaaacatctcat

SEQ ID NO: 48039 - DNA, 541 bp, Homo sapiens
gcatgatcctacttcaggatatttgccattgttactgcatctgcctggaaccttttctcccatataaacatagagattgctcttgcctgtccttcaagtctattcttaaatgtcccattctctgtgaagctttcctgcccaccctatttaaattacagacttcactcccaattccccatctactttaagagtcttcatttatcattccttgacaaactgtaaatacacatgttcacttttttatcgtctgtctccaaatactggaatgttaagttctgtaatgtcagatatttctgtttggttcactggtgtattcttaargcatgttacatactaggtatactcaatgaatatttgttgaataaatatcacattgggcttattccagaaattcaagcttgtttcaatagttagagcaatctacaaatgtaattcattacattaactaattaaaggagctaaatcacatcaccaccacaataatgcagaaaaacacatttgatacaactcaacattcatgtctgcctaacaaacatctcat

SEQ ID NO: 48040 - DNA, 541 bp, Homo sapiens
gcatgatcctacttcaggatatttgccattgttactgcatctgcctggaaccttttctcccatataaacatagagattgctcttgcctgtccttcaagtctattcttaaatgtcccattctctgtgaagctttcctgcccaccctatttaaattacagacttcactcccaattccccatctactttaagagtcttcatttatcattccttgacaaactgtaaatacacatgttcacttttttatcgtctgtctccaaatactggaatgttaagttctgtaatgtcagatatttctgtttggttcactggtgtattcttaaagcatgttacatactaggtatactcaatgaatatttgttgaataaatatcacattgggcttattccagaaattcaagcttgtttcaatagttagagcaatctacaaatgtaattcattacattaactaattaaaggagctaaatcacatcaccaccacaataatgcagaaaaacacatttgatacaactcaayattcatgtctgcctaacaaacatctcat

SEQ ID NO: 48041 - DNA, 541 bp, Homo sapiens
gcatgatcctacttcaggatatttgccattgttactgcatctgcctggaaccttttctcccatataaacatagagattgctcttgcctgtccttcaagtctattcttaaatgtcccattctctgtgaagctttcctgcccaccctatttaaattacagacttcactcccaattccccatctactttaagagtcttcatttatcattccttgacaaactgtaaatacacatgttcacttttttatcgtctgtctccaaatactggaatgttaagttctgtaatgtcagatatttctgtttggttcactggtgtattcttaaagcatgttacatactaggtatactcaatgaatatttgttgaataaatatcacattgggcttattccagaaattcaagcttgtttcaatagttagagcaatctacaaatgtaattcattacattaactaattaaaggagctaaatcacatcaccaccacaataatgcagaaaaacacatttgatacaactcaacattcatgyctgcctaacaaacatctcat

SEQ ID NO: 48042 - DNA, 541 bp, Homo sapiens
gcatgatcctacttcaggatatttgccattgttactgcatctgcctggaaccttttctcccatataaacatagagattgctcttgcctgtccttcaagtctattcttaaatgtcccattctctgtgaagctttcctgcccaccctatttaaattacagacttcactcccaattccccatctactttaagagtcttcatttatcattccttgacaaactgtaaatacacatgttcacttttttatcgtctgtctccaaatactggaatgttaagttctgtaatgtcagatatttctgtttggttcactggtgtattcttaaagcatgttacatactaggtatactcaatgaatatttgttgaataaatatcacattgggcttattccagaaattcaagcttgtttcaatagttagagcaatctacaaatgtaattcattacattaactaattaaaggagctaaatcacatcaccaccacaataatgcagaaaaacacatttgatacaactcaacattcatgtmtgcctaacaaacatctcat

SEQ ID NO: 48043 - DNA, 830 bp, Homo sapiens
tgcatcaatatccagtgaaatccaccattggttggtaaaaagtggtgtccttcagaaaaggatccttgacaatgactattgctatacagaatggggtttgggttcagggagaaagccatcagtttttccagagtcctagtgtggaaggtaacttcagaacagagcaaaaaaaacaaaaaaacaaaaacaaacaaacaaacaaaaacaaaaacaattgcagacttttgactaacatggtcaaacatggtagaaatagggaaaagctgtgagtctgtgggtatttgggtgccagtggcagcaaaaataatttcagtctccattggttggtgagtttcaggctgttaatataatcatacagtttggaactgagtatggctacacatgcaggtaaaagatctcaggaatcacagccgctcatggaatacaggacataattataactatttgtgtggggagttcaamtatgtctttgtaatttaggctggaatgtatatgccaacacatttgtatcttgaatatataaaaccatatttgtgtctgaatcagcaccatcaataaaaaataccatattttcaaaatgtttatctatttataaagttgctccattattctttgactataatcttggatttaaaaggaaatattcaccctctgcccctaccttaaccaattttgtctgatggaagtgtttagcttggagaaaggtggtcttgtactgacactgaaaacattgacccagatggtcatttatgtcgcacttctaacccgacactacaatttggggaagatttttggccaaatcattagaatgctgccctgtgagtcaatag

SEQ ID NO: 48044 - DNA, 618 bp, Homo sapiens
atcttattatattttaatatcatatagcatagtgtttattttctaaaagcttttcatagagtaaaaatgccatcaattaaaacagaaggcaaaaatcgatggaatactatcttagattgtttaagcaaaagcaatgaaaactagaattgtgtataaaactatcttccaagagagaaggcaatataaagacatttttggaaaaaaatgattttttttaacacccagaaaactctcgaaagaaagaaactgtcccttaataaaacgaatggaatggaaatcacttttcatagaaaataaggacattgataaataatatgggtaaatccaaactgtcactgactttgtaaaaaagggcaattaggggacttaaaaacaaaataaaaatgaaatctaagatacaaataacatggaatatgatgagaggggttagaaatcagagataaacattttgaagtccttcagkacttcaattcaggaggattacaaatatattaagtagagatcgcattaagttaaacatccatcttaaaaattgcaacaatctgtatgtgtgtgtgtaactttgtgcacaaatagtagaaactgttaaaatccaatgaaatgtttataaaactaagg

SEQ ID NO: 48045 - DNA, 550 bp, Homo sapiens
atgtgagcaaatgagacccctaaatataacacactctatttcctaatgtaggagaaaatgaacagtccggctagacatacacacaagcagctgaatgggaggctaagatttgaagcttgattctggggagactataactctaaaaccatatttagagcttactttatcaaataagatatttgagatttgctctttcctgatactcctatgttagcctttcaggatttttatataattttaaaaggagttacaataaaagctcatttaattccaaattaaatgctttatccaaattgttgctttaattagagtatctgtggaggtacacacacacacacaagaaaagaaaatacaaggaagagtaggagaaaaagaaaaaaggaaaagagaggaatggacagaracaaggacagcagagaatatgtttgactaactctggggccaggatccaggtttgatttaggagcattctgtgattacccactcaggtcttgccattggacacaaaggaatttcacatcttttcagggctgctctcggagggagctcc

SEQ ID NO: 48046 - DNA, 540 bp, Homo sapiens
aaatcccttgcagtgcatctgaaatatactgtgctagagaacttccaggtttgcacaattcacaatgtccataaatcaatataaaggaaataataactcaggttaaggacaattaatcttgaaatgaagatcaagcagggatttctcctgggactcattatgggcatgctttgttcaatgaatcactttctccacgacaccctgactgactgtagaaggaccaacgagttccattggactaattttaacactcttaagaattgaatgctaagaacatcctaataaccacccaaattttatttattctgtgggatacccaytttccctcacttgttgcaattctgtgggatacccactttccctcactcgttatcgtccttctttgttgtttctgtgcataaagctgatagtcattacgctattgattatttaagaaaacaacccatcttgagataatgttgctggctaacattcccggagttttctcgaaaggactttttctatcttttacttaattactttagagataagaacttccca

SEQ ID NO: 48047 - DNA, 621 bp, Homo sapiens
tatctataaaatataatgaaaactgaatatacccctaatttagttaataattccattattattcatcatagagttgtttcagtattttacatttaaacaaaactatgtttagcttcttcataattggamgtagttatgtaagacagactcctaacatgccattattgggtataaaaatgtatcgatggatttgtctcttttagggcttttgatatctatcaataaaattaattgcttttttaaaaagctacactgatctattttattattattactatttttttttttttaattgagacggagtcttgctctgtcgcccaggctggagtgcagtggcgcgatctgggctcactgcaaggtccgcctccttggttcatgccattctcctgcctcagcctccccagtagctgggactacaggtgcccgccaccacgcccggctaattttttgtatttttagtagagacggggtttcaccctattagccagaatggtctcgatctcctgaccttgtgatctgcctgccttggcctcccaaagtgctgggattacaggcgtgagccaccgtgcccggccttctttattattttaaaaatatttttaattttcataagtttagggg

SEQ ID NO: 48048 - DNA, 621 bp, Homo sapiens
tatctataaaatataatgaaaactgaatatacccctaatttagttaataattccattattattcatcatagagttgtttcagtattttacatttaaacaaaactatgtttagcttcttcataattggaagtagttatgtaagacagactcctaacatgccattattgggtataaaaatgtatcgatggatttgtctcttttagggcttttgatatctatcaataaaattaattgcttttttaaaaagctacactgatctattttattattattactatttttttttttttaattgagacggagtcttgctctgtcgcccaggctggagtgcagtggcrcgatctgggctcactgcaaggtccgcctccttggttcatgccattctcctgcctcagcctccccagtagctgggactacaggtgcccgccaccacgcccggctaattttttgtatttttagtagagacggggtttcaccctattagccagaatggtctcgatctcctgaccttgtgatctgcctgccttggcctcccaaagtgctgggattacaggcgtgagccaccgtgcccggccttctttattattttaaaaatatttttaattttcataagtttagggg

SEQ ID NO: 48049 - DNA, 560 bp, Homo sapiens
  misc_feature (1)...(560): n = A,T,C or G
taaaatagaattctggagttagagattctctatctttttcagatctgaaaccatgtctttctcaaaatctgggaatgtagacaaaccccgaaaggacacaataagagatgaataagggtaagaaaatccctttgtcttcctgggaagtagcaaatgctttgaggtgatcacagcacaaagagatcaaaatggagtctgtttctgaagctaagttattctatagttatgaaatatacagatactaacagcaatgtgtttcttstgtttataatacatgtnggaattatacttctattatatttcaggatcatggtatggatatcaagagagaaatagcactttttataatcttttcctcatgatttctttcttagtaaaagtaatgatggcacttactagtgagtatacatttattttttatatatttatttttgcttaaatatgcaaatatttaaatgcaaatatgcaaattttgcatatttaaacagcacaaataaataatcatggcatatatgattactttatcctgaagcagacctgatatccaccctcaatatttc

SEQ ID NO: 48050 - DNA, 546 bp, Homo sapiens
gcttaggaggctgaggcaggaggatcacttgagcccaggaatttgaggttacagtgagctatgatcatgccactggcctgggtgatagagagagaccctatctctaatgaataaataaatacataaatttcctgtcattgccaaatagggagacacacacatgcaagtgtattcttatcagcctgttaaattgtggttctaaagargaaaggaagggtgaggcttttagaaaaacctgtggtttacacacctgacatggagcccgactctttattacaatattccaaatttgagacagcataactataagtgtactgctattactactactattatgacttataataataattactactatgtaacactataatgtagtatatataataagatagtataaaatagtatcctattattaatagtaataattatattagcagtaatgatagtatttattgacagtactgatttttattttggctgggagtggtggctcacacctgtcatttcaacactttcagagggcaatgagggaggatttctgga

SEQ ID NO: 48051 - DNA, 1545 bp, Homo sapiens
gcctaatgaatctaatgggaataaaaatctatcctctctcaaggaccagttctctctctctaagttgggaaacaccattgctcagaaaatactgttcttccygtagaggcttcaaactgctgtggactgggagcactcttcaaggtgctctctcatgccatggccaatttgtgctcttttccatgaattagaagcaggatgttactttggacaatacccaataaaattgttcatttgattattgatgatttgtctgaaatattttgttgagctcttttgttgccacacactgaatcaggcacttggggcccactcagacactgctctgagggaaagccctggccgatgacggtaacaagggcagggggtgcatgggccatgggaggcaggccaggtgctcagggagaagccttctgatccccagtgaatcttgaagggcagttacaaattagccagcaaaagacgacgttctagttggaaaggtcaggatgatgaaagcctgcagggcgtgagaactcccagcctgtgtagaatccatctttgcatgttttctcgcggtgcatatggtttaatgattactatttcttcctaatcagagcagtgttaggtgacttctgttccaggtgggaatgggctttctctgcccttttgggagctttctcaccttaaagtatctgcaaaggctgtcacccagtatgtttctgagaaaccacattcctgacagctgacaccagtatggggatgagaaggcatcttgtttcccgctacttcctgtaacagggatcccaagagagcactgtgacttatgattcacttcagggtctttccattttttggaaatggaaagacctcctgctgaggccctgccaacagaggtgggaacaggggtgggtacccatgatctgggagaggtaaataggctgaactttgggggcacccagaatcttgaattgaaaggggctgaaatgagcagcttgccggcctcctacagatactggtgtctgaaaccaccatagaggtttagttgggtgcacatttgctgtggaggaataaggtcttagccagttggggctggtttatctttagggtggactgctgggcagcaggcatgggagaggcacaccccagttcagcctgttcctcagtacagcagcctgccttgttttccctcaaggcgggtctgcttatgttgacattgattctccttgcaaagtgacgcgtaggcagagcttcatttacaggtgattatcagtaagtcctgggtttccatgagatcattttgctttctcctgggaggtgaagcctctttcctaactcaggctgtctcagggttttgcagccctctgtcacaacgaactcatcagtggctatttccttacgaaggcttctgataggttcacatgccagagtttccaaccttcaccagcagctcagatttatgccccagtgagcgaatgtactcagtactagttccttcctatcagcttaggaaagtgtgtagttcaaggatttaaatcatttaaacaaacttaattgggaaaaaca

SEQ ID NO: 48052 - DNA, 613 bp, Homo sapiens
ccgattcccccttaagagagtctctttcagccccagctgagacggaaatgaggaaatgaacctgacatccactctatacatccctttgatgagagtcacccttcaggaggagagacctcattgaaatgtaatttttttcccattaatcatccgcccagacagctctcagttctccaattctcttaagcaaataacaacgaaaaaagaaatcttttcttcaacctctaagtgcagatttctataataaaaagcatggcattgaagcagttatctcctctcatctggttttccctttcataactcacaaaggtttctctctctctctctctctctctctcccccygcaaccccatctctctctctccccttgtcctcgccatcttcctttctttgaggccagatgcacgcatggaagagatagcatcatcgtaggccacgacaggtctccatggagtccaactttgaaaagccaagcaaccctggcttggccccaacccatacaatttccccgggtgcttactccatgaactcctgattcctcagcctcttaaagtggggataataacactaacagctcaggctttctgatggttggggactgccattgttgaat

SEQ ID NO: 48053 - DNA, 521 bp, Homo sapiens
ttgatctctgacatttacgcaacccaaaacacaggttagttttgtgttctcatcccaaacactacatgatgcctcactcaatgagaaaatatctaaaattatctcatttgaaacgcttaagaaaataagcattattgataaacatttgctaattaactttgaaagatgtcaagttctttgcctgttgatggtcttggaaatttcattattaaatawtttcattatgtaatggtcacattagttgacaatttagttgcgtaattttagtggattgtcatcaacttcctatgtaaagaagatcacccactgactattgactgatttttctaagttgagttgagaataaaagaaggaaactaccatatcctcacaggagtgaggaagctcactcagtgctagtcaaataaaatgttactgctgaagtgcagcctgttagctctggactcattactctgaatgatctctgaatcccattcagggtcattcttcccttgtcttgaagaatagtgtgtattttcagc

SEQ ID NO: 48054 - DNA, 554 bp, Homo sapiens
taactggacttgaaattctggcagctctcatgggctgctgaggaaacaaactmtttataaagatgtaatgaccagatgaatttcccaaagtgtgatctgctgctggctctgtgcctgctgcagggatgctgctagctttcaggttccagtcaaagtcctcatctttctcctgcttccaggaacaaagatcaaattcgaaatcacagcgcccactggaggtacctggaaaatatttccaaatatatgttacagaaaatggaaatttgcctactttaaaacatgcaattcaaaactgcagtgatcttgctgtatcatgtaatatttgaaaccttcataatgctatcctgatagcaacatataaagagactattttggtttgcgatacacacagctatttccgtggcttctgtaagttcatttctctacaaatctggtcccagtttcaaaactgataaactgttttagcattacacacatttccttctctaaatacctatttggtcaatataatttatttattctgtcttctcatctatgcttctcaggtcttggta

SEQ ID NO: 48055 - DNA, 554 bp, Homo sapiens
taactggacttgaaattctggcagctctcatgggctgctgaggaaacaaactctttataaagatgtaatgaccagatgaatttcccaaagtgtgatctgctgctggctctgtgcctgctgcagggatgctgctagctttcaggttccagtcaaagtcctcatctttctcctgcttccaggaacaaagatcaaattcgaaatcacagcgcccactggaggtacctggaaaatatttccaaatatatgttacagaaaatggaaatttgcctactttaaaacatgcaattcaaaactgcagtgatcttgctgtatcatgtaatatttgaaaccttcataatgctatcctgatagcaacatataaagagactattttggtttgygatacacacagctatttccgtggcttctgtaagttcatttctctacaaatctggtcccagtttcaaaactgataaactgttttagcattacacacatttccttctctaaatacctatttggtcaatataatttatttattctgtcttctcatctatgcttctcaggtcttggta

SEQ ID NO: 48056 - DNA, 604 bp, Homo sapiens
ttttgagggtaaataatttagaaaaactctatgtgcatcaaccttttgaaaattcataaggcatattatatatcaaacatttggaaaatatggattatctcatgagtgattcagagaggtccttcayatataatttttccttctctgtcaacgacctgattttataatctggaaaatattatcctaagacttgccacttaagacactgccacagagagaggagggaccactgctggtaattttggaaagacaatgaatgtggtcttagctcctgtcactcagctgcagtcaggacagctgatccttcccagaaagcctgccttaataacatcatgatacctgacctactttctaacataatttctcaaagaaaacaaaagctattctcagtccatgcttaataacatctctgaaaacacactggttgttttcaaagcaatgtgttactttcatgaaagcccacgttgggattagtatttatatatgactaaattatcttcatttagcccctccaaaagtacttggcactttctctaactctcaagaaatgcaaatgtttatttacatatctcttttactagacaagaagctccacaattattca

SEQ ID NO: 48057 - DNA, 506 bp, Homo sapiens
  misc_feature (1)...(506): n = A,T,C or G
ttgtgctggacacagggcaggcatgctgatccccatcagagaggattttcagagaccccacgaaacagggagacgtccagggcagcaagtatcccatgggggaaaagtgccacttagatttcgtgttggctgagcaggccactagatgaaagggaaaggcatccgatcattgagttcagacaagcccaggctggcttttcaggacaaactctaatctcatttgatgtgttcgattttttttttttttttttttttgagacaggttctcgctctgttgcccagctagagtgcagtggtgccatcacagctcactgcagccttgacctcctgggctcagatgattctcttgttcagcctcccaagcagctgggwctataggtgtgcaccatcatgcctagttttctttgtattttttgtagagatggggttttgccatattgcccagnctatgtcttcgatttttatgcaagattctgatgtacgtgggaaaagctctctaaaaccca

SEQ ID NO: 48058 - DNA, 506 bp, Homo sapiens
  misc_feature (1)...(506): n = A,T,C or G
ttgtgctggacacagggcaggcatgctgatccccatcagagaggattttcagagaccccacgaaacagggagacgtccagggcagcaagtatcccatgggggaaaagtgccacttagatttcgtgttggctgagcaggccactagatgaaagggaaaggcatccgatcattgagttcagacaagcccaggctggcttttcaggacaaactctaatctcatttgatgtgttcgattttttttttttttttttttttgagacaggttctcgctctgttgcccagctagagtgcagtggtgccatcacagctcactgcagccttgacctcctgggctcagatgattctcttgttcagcctcccaagcagctgggtctataggtgtgcaccatcatgcctagttttctttgtattttttgtagagatggggttttgccatattgcccagnctatgtcttcgatttttatgcaagattctgatgtacstgggaaaagctctctaaaaccca

SEQ ID NO: 48059 - DNA, 526 bp, Homo sapiens
gtggagttttggaactagtttaaacatcatcaaaaagaggaaattaaacaagaggctaattaagttcctttcacattgcttaatctgttgtgaattgggtgcctctttggagcctcctctgcccagcaattaaaggaactgggacagggggcacctggaggcactgtggcctcccccttcacagggcgctctgcacttaataaggcggcactgctcccagctgctgccccaggagcctgagcagcctgcgtcctcataggttacaagtcatgccagagagcttggggcggggggcggtgggggggcrgtggaagtgggagctctacctcatcttccctctgcctccctcctttctaggggctgcctcctagaaaatccttctgatggctaacctttatcattgatgcatctcaatacaggaaccaaagaggaacccctgtcctggagaacacaccttcaagaggggcttaggggccaacctctgagttctttatgtgagactttcattataccccacttcagagca

SEQ ID NO: 48060 - DNA, 550 bp, Homo sapiens
agagagggagggagggagagaagggactcaggccttaacctagaacccctgcatcagagtctcttggatggttcctgggaatcctcaggtgatwctgatggaggcaggcacaattctcccttgtgtgactaatttcccaaggcctcgcctttcaatcacagaactgattttatccattgtgaaaacctaatgcagaccccagcgcacgcctcctgctctccctcagctgggaggctgaccgaggtattttaggcatcccgccagagatggctgctaggttgcaaagacaagcagtgccctcctgggcacagccctatgccccccagtgggcactccctctctccttctcatcctatcttcagctttggcatgagtggctggcctgacacagcccacctcaccccagcagtggcgccccaggctgagcttcaacccaactcttgggtaagcagcagggaaactgaggagtatttcacagttagtctctgtcccctctcaaacaggcagtattttcaggagtccttcgtgacattgaggcctgtgggggaca

SEQ ID NO: 48061 - DNA, 550 bp, Homo sapiens
agagagggagggagggagagaagggactcaggccttaacctagaacccctgcatcagagtctcttggatggttcctgggaatcctcaggtgattctgatggaggcaggcacaattctcccttgtgtgactaatttcccaaggcctcgcctttcaatcacagaactgattttatccattgtgaaaacctaatgcagaccccagygcacgcctcctgctctccctcagctgggaggctgaccgaggtattttaggcatcccgccagagatggctgctaggttgcaaagacaagcagtgccctcctgggcacagccctatgccccccagtgggcactccctctctccttctcatcctatcttcagctttggcatgagtggctggcctgacacagcccacctcaccccagcagtggcgccccaggctgagcttcaacccaactcttgggtaagcagcagggaaactgaggagtatttcacagttagtctctgtcccctctcaaacaggcagtattttcaggagtccttcgtgacattgaggcctgtgggggaca

SEQ ID NO: 48062 - DNA, 606 bp, Homo sapiens
tggtgaaaatgatggtgaaccaggtgctgagatccatataaggaatgagaggaagccctctggggtttgtgggagacttcatggaggagtggtggatgccacaggctgcttattcaaagstggggagctttaagagagaaagaatggtctgaaatagcaaaggagtgaggaagacacttgccccacctagtggtaggagggatgtggaagagaaaattaatcctccacttgagaaggagctattctcagaagagagccatgtttcatgagagcaaaaaggggaagagaagatgttgaggatataggatattgtttctatccagtgtaacctgtttcaattacttcccaccatgctttgaaccttccagaccaaatcctttgccacctgcccgctacctctctacattccagccacactgtccttagcatgttccttggatatatcaagttctttccaaccctgggggctttgcacttgctgccatgttctttcctttcttgaaattgtacctcttccccaccccaaacccttaagtctcatgttgagtgtcatttccttaagaaatcttgctgaacaccctctttaaatcaggtgctgtgcttggt

SEQ ID NO: 48063 - DNA, 614 bp, Homo sapiens
agccttggggagtggacccggcgggaaggagcccaggaggggaactgagctgggggcgcagttcggggagatctcccttgtccttccagaagccttccctcctctgaaacccgctgcagtccacagtccctcaggtttggcccccgccccgcttaggctccatccaccagctcaccgtctcgcctagcccgggaccagccgaacagcaggaacagaagcgggaggcacagaagcaaagctgggatggcggctgctgccattggggaccaggagggctggggacaagagatttaatcaaggtggatcctggaagatgaaatcacctctgtgctgaaaggctggcttatatactgttagttactggggaatgtaccggggaatgagtcacctcgrttctgaaaagccagattttaatgctactgggcgtagtcactgggcgcgttccacctcttcgtttcattgtctggacgaaatccagtttccatgctagtgtcccttcccttcttcacccgctccggcagcttggtggcctcgtgcccgggccccactcctgccaggacacgattccttccacgacagactcatttaatcattatagcattttttattaatgg

SEQ ID NO: 48064 - DNA, 618 bp, Homo sapiens
tatttggctgaaattttaaaaatatttttttcactagacgttagagcaatcttagattttaaataaattgttaagtatcttgaacatgttatttatgatttaaaatatagctaagatttgctttacattgtggcaaatatttacattttagaaaacaaactttgtatttagtcaacataatttttaaaataactaggttgtggatacacataattttctgcagtaattgacgacagatgaaactacatttataggttcccttttatagttacggtaaaattcattttaaaaactttmtgtgtagaaataaattgtgccaagtaatatacatgtaacatttacatttttaagagctgaaaagtacaaagttctgtgtcatttaaattggcgagtgtctctcttcagtcaataggcttgatcatcatctgaactgctcttaaggagtatgacccgcctctgtattcggcccagaaaattccatcttggtgcttgcttctgtaatggcctcctctgtaccatactccatttaggttagaatgtgcacaggcattgtaccaccagcctcctttatgaaagtgggcgcagtttcctttgaggaaaaaatacagatataaatgt

SEQ ID NO: 48065 - DNA, 528 bp, Homo sapiens
ggatgaaggccagtgggaggggatctttgttttgcctttggatttttctgcttcatcattcttttcagtcttttcagcttctcttaactaacattgttttaaggttccgtttctttttttttgacatggagtctcactctgttgcccaggctggagtgcagtggcatgatcttgggtcattgcaacctcygtctcttgggttcaagcgattctcctgcctcagccttccaagtagctggacttacagacacctgccaccacgcctggctaatttttgtatttttagtagaggcgaggtttcaccatgttggccaggctggtcttgaactcttgacctcaggtgatctgcccacctccatgtcccaaagtgctgggattacaagcgtgagccactgcgcccggcccagtgttccttttcttcatctacttaaattgaataaaattaatgctatgttagaatcatatcatttgtaaattttaaagacttgatattttgtagcattatgataattgttttaatatatgagc

SEQ ID NO: 48066 - DNA, 605 bp, Homo sapiens
tccctaacagaaatacagttgacccttgaacaacatgagggtttggggtactgacactccatgcattcagaaatccacatctaacttttgactccccaaaacttaactactaatagcctgctattgaccaaaagccttaccataacatgaacagtcaacccatattttgtatgttatatgtactatatacaatattcttaaagtaagctaaagacaatgttattttaaaaatyataagttagaaaaaatatatttactattcattaaagggagtagataatcataaaggacttcatcttcatggtcttcacattgagtaggctgaggagggtgacaaaaaatagggaatggtcttgctgtctcaagggtggaagaggccgaaaaagtagaggaggtggaagaggaggcaggagaggcaggcacagtttggtgtaatttttattttttaaaaaatctgcttataattgggcccacacagttcaaacctgtgttgtacaaagttacaatatccctacttctattttcacatctagaataatttagttattttattttagatatgattctgtagtgtctatgatttctctaaataagaaagtagcccc

SEQ ID NO: 48067 - DNA, 585 bp, Homo sapiens
aacagcaactgctgtcacaggagcaggaaaagcatttgcaacatagagtgagttttcgttcacccctttttgctaatacaggttggcttgcataggcagcaaggagtgttcacgatctgtggatccaagaatttaaattaaaatgctcttgcggcaagaatctgtcatcctcatgacagacctccagaagagacccagttgtccctgtttacaaatggagaaggaatactttttatatttcagcctctcttagtggaaaaaattataaaacaatgcaaaattgagacagaatctcaatttttctctctttttactttggactctgtatgagtggctccccaaaatctctgtcaagaaattcccccctttttttaaagacagaatcttgctctgcgatcaaggctggagtgcagtggcacaatcatagctcactgcagcctcgacctcctaggctctagtgatccccccacctcagtctcctgagtagctaggrctacaggtgtgtgccaccacacccagctaatttttaaaaaagttttatttttgtagaaatggggatctcactatgttgcccaggctggtctc

SEQ ID NO: 48068 - DNA, 580 bp, Homo sapiens
tgctaggacttagataagctgaataagacactgccctgccctcccraaacttgccatccaacagtggtgttgagcagtggtgctcactctcaactagaagatgaaggattccatttcctttccagctctgccacagtgctgggaatacttgactgtaaggggagagctttctgtttacaagcattctatttcagcaaacaggggagtatcttataatcaaggcattataagtcctgcagatttaaacttaatctctcaattgctttatttttaatgccacaaatattattcagaaaaaatatatgaacccattaaaaatcagtgcaaggtctggatatataaagaggccacctggctgggtgcagtggctcaggcctgtaatcccagcactttaggatgccgaggcgagtggatcatgaggtcaggagtttgaggccagcctggccaacatggtgaaaccccatctctactaaagacacaaaaaattagccgggcgtggtggtgggcacctgtaaagaatcatttgaacctgagaggcggaggttgcagtgagccgagattgcgccattgcactctagcc

SEQ ID NO: 48069 - DNA, 578 bp, Homo sapiens
atttatccagactttttgatgtggctgaaatatgtcattactttttacaaattggaagtgaggaagagtagataagtgtaaagcggataagtctggcttgaaaagaaggataatagaggaaagcacaatacgtgggaaggtttttgtttgtttaagtgagaaatacaggtatcytttgatctgaacagtacctgtgcacactcaggaattgattatattcctacagattttcagagaagtcctttgttgtccttactttcctttatctgaaactttggagtcaaatagacgtacttaaccacatagactcagaaagttaggagtacttttacttgaacttgtttatacttgtggcaaaataaccaacagagagaatgaaaatacagaagctagagtgtatttctgaagggttaagagttaagatctagactataaatagagtaattcaccctggataagaggagggtcactaacctcacttacattagaaagaatatgatgggaataggtttaaatattaaaatatttttaggtgtgagagtgatattgaccaaatattctcaatgtattgtgcccca

SEQ ID NO: 48070 - DNA, 559 bp, Homo sapiens
gcaacctttccactctctccttgtacgtggtcccagcacagagcttcagattgctttatgatgattaaatctcctctttttgtcaggaaaaggccttgaaatgggcagaaagattactgagtttcctttcagtggatggctgggtattatctagcagaggcttcagggttgtctgatttcacaggggtctgtgtctttcatcgtttttgactgaactattttgtaactgtaaattatagaaaacacaaggttatggaaatgattcttgtccayagagatacaaacgagttttgtctggtagaaatgcaattgatttctaccccataaagaggctgtcagtcttgcacctcttagtaaatttatttcagcactcctgattgcttgtagatatgtctgttctttggattctctttcagccagttgtaatattttgctgtctgcatcatcaattaatgagttaagttaatttaaaaatcttggacacatgttcattatatatatatatatatacacgcgtatatttatgcatatatattcattatatattatatatgcatat

SEQ ID NO: 48071 - DNA, 554 bp, Homo sapiens
tgcatattaatgaactctatttttgtctcaactccatgaggtagttagatatatcagtactcyattttacatttagaaaattaaagcaccaggagattaatttgttcaaggttacacaaaaagtggaggatatgaaacctaaaccagtgcccttgatcactatgtctcactctctctccccacagcactgttaggagagtgaaacattgaaagaaattcaaaagtccacagtttgaagcctgagagagcacatattccagaaatcaacataccaccaagcaaatcattcaggacctacaccctggaaacactctttaccctgcctctccccagaagttgatcagaactgatcccatagtacctcacatccctgcgaaaatcagttgatgccagaagggaaaacctttccagttggccatgcctgggctcacatctctttatgacccattatacttattgatctgttccaatcctgagcttccactggatcctcccttcatgagccgtacactcccctataacttcaacatctttgaacatttctctacctcctt

SEQ ID NO: 48072 - DNA, 821 bp, Homo sapiens
agtatttgtgtgggtgatgcctcgggaagggggaaaaaggggaggaggaatggtgggcgggggtgggtaacgggatctgacatccaggggcagtgactcaggccctcagcaccatgacagtgtgtctgcatttagccaccggctcctgtttccctggcgagcggcaggctctgggccccccaccccgccccaccctctctccatctcacctcagtgctggtggcttcccagctgycctagaaacccctcagccaggctgggtgtcacaggccccgacacgggcaggaaactctgccagaggcaacaggccctgttgctccaggcaacagcctggcccgccgctgtgccctgtgccctgctctgcttccactccacataccaccagcaccgctaatacccctgtagaaggagctctccaggatgaagctccagactgggttgtagggggctcagacaaaagagaaactgcccgtcttcaagaaccttcaatctaatggggagacaggtgaaccctcgcccccgtgggaactgccagttggatagggaagaagggacacagcagagagtcacagcacacaggaagactatgtcacactgccaggtgctgtgggaggacaaagacagtcagtgctgggggcatctggactgggtgtgggcccatgtgagcaggagcagtcagagaggcctccctgggggaggaggcattggagctgatctgggacggaagggacggatttggagaggacagcagaggcccttaactgcaacctgggcagagcagagggcctggccgcctctcagaatggcctccaccctggccc

SEQ ID NO: 48073 - DNA, 821 bp, Homo sapiens
agtatttgtgtgggtgatgcctcgggaagggggaaaaaggggaggaggaatggtgggcgggggtgggtaacgggatctgacatccaggggcagtgactcaggccctcagcaccatgacagtgtgtctgcatttagccaccggctcctgtttccctggcgagcggcaggctctgggccccccaccccgccccaccctctctccatctcacctcagtgctggtggcttcccagctgccctagaaacccctcagccaggctgggtgtcacaggccccgacacsggcaggaaactctgccagaggcaacaggccctgttgctccaggcaacagcctggcccgccgctgtgccctgtgccctgctctgcttccactccacataccaccagcaccgctaatacccctgtagaaggagctctccaggatgaagctccagactgggttgtagggggctcagacaaaagagaaactgcccgtcttcaagaaccttcaatctaatggggagacaggtgaaccctcgcccccgtgggaactgccagttggatagggaagaagggacacagcagagagtcacagcacacaggaagactatgtcacactgccaggtgctgtgggaggacaaagacagtcagtgctgggggcatctggactgggtgtgggcccatgtgagcaggagcagtcagagaggcctccctgggggaggaggcattggagctgatctgggacggaagggacggatttggagaggacagcagaggcccttaactgcaacctgggcagagcagagggcctggccgcctctcagaatggcctccaccctggccc

SEQ ID NO: 48074 - DNA, 821 bp, Homo sapiens
agtatttgtgtgggtgatgcctcgggaagggggaaaaaggggaggaggaatggtgggcgggggtgggtaacgggatctgacatccaggggcagtgactcaggccctcagcaccatgacagtgtgtctgcatttagccaccggctcctgtttccctggcgagcggcaggctctgggccccccaccccgccccaccctctctccatctcacctcagtgctggtggcttcccagctgccctagaaacccctcagccaggctgggtgtcacaggccccgacacgggcaggaaactctgccagaggcaacaggccctgttgctccaggcaacagcctggcccgccgctgtgccctgtgccctgctctgcttccactccacataccaccagcaccgctaatacccctgtagaaggagctctccaggatgaagctccagactgggttgtagggggctcagacaaaagagaaactgcccgtcttcaagaaccttcaatctaatggggagacaggtgaaccctcgcccccgtgggaactgccagttggatagggaagaagggacacagcagagagtcacagcacacaggaagactatgtcacactgccaggtgctgtgggaggacaaagacagtcagtgctgggggcatctggactgggtgtgggcccatgtgagcaggagcagtcagagaggcctccctgggggaggaggcattggagctgatctgggacrgaagggacggatttggagaggacagcagaggcccttaactgcaacctgggcagagcagagggcctggccgcctctcagaatggcctccaccctggccc

SEQ ID NO: 48075 - DNA, 545 bp, Homo sapiens
aattagggctgatgtggaggcagtgggtttgggagggacctgcattgggtcctgcgccccctggctgccctcttctcagcctcctggkgcacacagggctggggggtgagggtggatgtggacatgcagtgccggctgtgggacagtagccagcagctgccccagaccagacactggggatccggatgttgacagggcagccagttctggtgctgtgcagagtcaacaggtcagggtggccaagatgaaggtgggctcgggttcatgcagagcggcaacccccatcccacctcccacaacacacaccttcaattttgatttgacttgcctggcatctaggggcaaagggtggcccagggtcccagattttaacaatcatccaagggccatcatgttattcagagagtggctttgtctgggtaggactggaggcaattgcccccaacatcttgccccaaagtggcatcagacacaactcttctgttctgtgcccaaaccattgccctggttcagcctcaggagctggaggagctttgggcagggga

SEQ ID NO: 48076 - DNA, 545 bp, Homo sapiens
aattagggctgatgtggaggcagtgggtttgggagggacctgcattgggtcctgcgccccctggctgccctcttctcagcctcctggggcacacagggctggggggtgagggtggatgtggacatgcagtgccggctgtgggacagtagccagcagctgccccagaccagacactggggatcsggatgttgacagggcagccagttctggtgctgtgcagagtcaacaggtcagggtggccaagatgaaggtgggctcgggttcatgcagagcggcaacccccatcccacctcccacaacacacaccttcaattttgatttgacttgcctggcatctaggggcaaagggtggcccagggtcccagattttaacaatcatccaagggccatcatgttattcagagagtggctttgtctgggtaggactggaggcaattgcccccaacatcttgccccaaagtggcatcagacacaactcttctgttctgtgcccaaaccattgccctggttcagcctcaggagctggaggagctttgggcagggga

SEQ ID NO: 48077 - DNA, 545 bp, Homo sapiens
aattagggctgatgtggaggcagtgggtttgggagggacctgcattgggtcctgcgccccctggctgccctcttctcagcctcctggggcacacagggctggggggtgagggtggatgtggacatgcagtgccggctgtgggacagtagccagcagctgccccagaccagacactggggatccggatgttgacagggcagccagttctggtgctgtgcagagtcaacaggtcagggtggccaagatgaaggtgggctcgggttcatgyagagcggcaacccccatcccacctcccacaacacacaccttcaattttgatttgacttgcctggcatctaggggcaaagggtggcccagggtcccagattttaacaatcatccaagggccatcatgttattcagagagtggctttgtctgggtaggactggaggcaattgcccccaacatcttgccccaaagtggcatcagacacaactcttctgttctgtgcccaaaccattgccctggttcagcctcaggagctggaggagctttgggcagggga

SEQ ID NO: 48078 - DNA, 590 bp, Homo sapiens
ggcctttttttggtatttttagtagagacggagtttcaccatgttggctaggctggtctcgaattcctgacctcaaggcctgccttggcctcccaaaatgctgagattacaggcatgagtcccagtaagatttttaaagggataccaaaataatcaacatttattttagaaggtgactttcttcaatgagatgtcaatgtctactttctgttatatagtgctatkgtttcttttttcttttttttctaagtgagggtctcactctatcacccaggctggagtacagtggcatgatctcgggtcactgcaaccttcacctcccaggttcaagcaattctttcacctcagcctccagggtagctggaactacaggtgtgcatgcctcgctaagttttgcatttttagcagttgttggccaggctggtgtactgtttcttttattgactgagatctatatttacacagcatgaaagtctcagttgcattaagtacattcgcattgttatgcaaccatcaccattatctagttccagaattttgccgtcaccctaatagagcttgtatatatgtccccaccaaatcttatgttg

SEQ ID NO: 48079 - DNA, 598 bp, Homo sapiens
gccctgtctttctgtccagctggaatacactcattaaataatagatgacaacagaagtaatgttagcaatatttcagtataaaccttaaagtaaaatagtaatttaaaaatctgtagtggataatgcaatatgtatattacagaatagtgtgttgggagcatatttgtttctacaacaaaaatgccaatgaaaacatgggttttatcatttgcagcattctaaagttagtccattagctgagttatgacactgaaggttagactagctcggaagggaattggccatttatytgtgtcccgaccacaggcaatctgcccttcctagatgatgggagaggaagaagctgtggcctgtggcctcaaggggtctcatttcagtgcctggtgtggctgcagcttttcagcctgctgggagggatggtgtttcatacccaggggcaggtcagcctgaggaacgctgtgtgccctcaccacatacactatcccattgcagcaaacccttgtaatgtttactttatagttttgttgatatgatctcaacaccatttccatgttttattctgacagggccttgccctgggttcagtgtctgtgtctg

SEQ ID NO: 48080 - DNA, 563 bp, Homo sapiens
attatttcaagagaagcatgagaaagctagaagcctgctagtgctggaaggagtgattcctcctccctcttctaccatgcttgaagctctgtctaatattttagctgttcctctaaagataaatgtcctagtaatgaagcatgcctttcaaattttattatttgaggtatttttgtaaatattcttcagcttctcttccatttcccttgtttcaattaaaaagctttaatgaaaaagtcttattaaaattcttattaaacaatggtttaataaattaatcatttatataattcttttagggtgcacttgaatttgaatataataaatgcttattaacagtaaaaatatatgagaataaaagcaagggtaaaatagtgtattttcagctccccatgtcttttctgtgtttaatatgcaggattgccacaacattttaagcttgatctccattattgagtgttttcttaatttcacaaacatgttcgctctgaaacaaatgaaactgtaattccttgtcagatgtagcattttracagtttcaaagatatttgtaattatgtaca

SEQ ID NO: 48081 - DNA, 541 bp, Homo sapiens
tcgagaccgtcctggctaacatggygaaaccccatctctactaaaaatacaaaaaaattagccgggcgttgtggcaggtgcctgtagtcccagttactcgggaggctgaggcaggagaatggcgtgaacccagaaggcagagcttgcagtgagctgagatcgcgccactgcactccagcctgggcgacagagccagacttcgtctcaaaaaaaacaaaacacaacaaaacaaaaaaaacactctaacaagctctatcctgcacagggtacccactacaatctcagctatcttccagtttttgtttttattctagctcttcagacatagtatttaattctctctgctgtttacttgatgtataatacaaacataaagcttattgggaacagatacagtgattgatttacaaatgttattgcgccattcagatataattgaatacagtcatttcagactataaattagtctaaattgagtagacaatcaaaattagacaacttaaattaaaacatgttgaaactttataaaaatttggcagaa

SEQ ID NO: 48082 - DNA, 554 bp, Homo sapiens
tgtggagttggtcatccataaggcaaggagctagatgataatatttctcatcatcttcatataaatagcttttggggcccaggagattagaaactttctcctttgacaactaagccttaaccactcagggcagactccaagtgaagtaggaaactacctgtatagtgggattagaggcatcaaaaggcttgcttcctccacacscccttccacccccacacacagaaaacgaaaacaaaatcatcctcctggtctgatggagaaattctattggaatcacgctctgtgttgttttcaggaggcttgatcaaaatgtaacacattacttcaacagcacccactgtttattcagttagtagggaatgggaaagaagatgggtaagttttaataaggggaaatttttgttcttaaatgttactgtgcatcagcattacctgaggtgtttgttaaaatgcagattcagaatagctgaatgcccaagaatctgcacttcttaagcatcacaggtgattctgctgcaagtggtctgcagaccaaactgagaaacattgtt

SEQ ID NO: 48083 - DNA, 584 bp, Homo sapiens
ttatttcctttggtaaaacaacagttatatttttattcttacaatttatacaactttattcatgcacacactaacaacaacagcaacaaaaatactagacttttttttataatcacacacctataaacttactcagaacaggatgtgatgatgaaatactattgggtatattaatacaataaaaatgctactgagagaaactcaattgttgagtctaagatttccattaaattttaagctttagggaggtggcagccagggggaagaaatacttatttaatcactgtgaagttcattcaataaatagctgagtgcctactatgtgccaagtccagcaataagctctgggagcataacattaaagggtaaaagactgtccttgtgaagatttcattttaataaaataaggcaagtcataaaatgggagccaaagaaatatatactgtgccagctggtgagtggcacactatacacaaatcaaggtaaggaaaataggwatttctatggttagggacaaattgctatgctgtattgggtagtcaaggaaagctgacatttgatcagaagcagaaaactttgtggct

SEQ ID NO: 48084 - DNA, 1111 bp, Homo sapiens
cttagctcttaaatttagtgcttcaataattttgccattttgtaaaaacagatatcttccatgcatctcaccaactgactgaaattatttattcctatatgattactttaattacaaacataatcatgaaaagcttttgaatgttcagatgcacagtctacttcctggatactttgcttttaccrcacgtccctttgtttctcagtgtttatttggcctttattataagcaaaaatatggaaatttttactcctgtggagacataggcttttcctcgttacctcttatttaaactttttatcacctatttgacaattttttaaagacaaattatatcaactattaattcttagaaaaatgcaaccacatttttaatccctaacctacaactgcattgtctgaatccttttgtgagatatgttctttttttagcctttaagatcatccagtaggcttcatggaaataaaagactaaaaggattattacttgaccatctttaatcagatgttgcttgagagtcctagaaaaaatatgccattattttaggaggttgaagaactgaataatttttaaagtcatatgggcagtcagagaagacaatcttttagatgtctctaccgaataatattaaccactagaaaaaaagcgaccacactgacaattttctttaaggactgagaggagattatttcaattaccatgttgccctgtccttgtcaactttttctaggatggcagagctaagaaatacccttaagatacattaaaggagaggtggttgaaaaagagaactaaaattgtctgcaggctaagaatgtctagtttaaaaaataaaacctgaaaaattctccaactattattttccccagctttgttcactacttagtttatactctgcatggaactgctttcttctttcaaaggataatgtccaataagttgtaaagaacaatttggaccatatttatgtgcaaatatttcattgatatcatcacttaatgattctaatatttcccatgtgtcagcttgtgcactttttgtgtagaattctgtgaccagaagataaaaatctactagcagatattttccttgtagggacatgggggagat

SEQ ID NO: 48085 - DNA, 1111 bp, Homo sapiens
cttagctcttaaatttagtgcttcaataattttgccattttgtaaaaacagatatcttccatgcatctcaccaactgactgaaattatttattcctatatgattactttaattacaaacataatcatgaaaagcttttgaatgttcagatgcacagtctacttcctggatactttgcttttaccgcacgtccctttgtttctcagtgtttatttggcctttattataagcaaaaatatggaaatttttactcctgtggagacataggcttttcctcgttacctcttatttaaactttttatcacctatttgacaattttttaaagacaaattatatcaactattaattcttagaaaaatgcaaccacatttttaatccctaacctacaactgcattgtctgaatccttttgtgagatatgttctttttttagcctttaagatcatccagtaggcttcatggaaataaaagactaaaaggattattacttgaccatctttaatcagatgttgcttgagagtcctagaaaaaatatgccattattttaggaggtygaagaactgaataatttttaaagtcatatgggcagtcagagaagacaatcttttagatgtctctaccgaataatattaaccactagaaaaaaagcgaccacactgacaattttctttaaggactgagaggagattatttcaattaccatgttgccctgtccttgtcaactttttctaggatggcagagctaagaaatacccttaagatacattaaaggagaggtggttgaaaaagagaactaaaattgtctgcaggctaagaatgtctagtttaaaaaataaaacctgaaaaattctccaactattattttccccagctttgttcactacttagtttatactctgcatggaactgctttcttctttcaaaggataatgtccaataagttgtaaagaacaatttggaccatatttatgtgcaaatatttcattgatatcatcacttaatgattctaatatttcccatgtgtcagcttgtgcactttttgtgtagaattctgtgaccagaagataaaaatctactagcagatattttccttgtagggacatgggggagat

SEQ ID NO: 48086 - DNA, 1111 bp, Homo sapiens
cttagctcttaaatttagtgcttcaataattttgccattttgtaaaaacagatatcttccatgcatctcaccaactgactgaaattatttattcctatatgattactttaattacaaacataatcatgaaaagcttttgaatgttcagatgcacagtctacttcctggatactttgcttttaccgcacgtccctttgtttctcagtgtttatttggcctttattataagcaaaaatatggaaatttttactcctgtggagacataggcttttcctcgttacctcttatttaaactttttatcacctatttgacaattttttaaagacaaattatatcaactattaattcttagaaaaatgcaaccacatttttaatccctaacctacaactgcattgtctgaatccttttgtgagatatgttctttttttagcctttaagatcatccagtaggcttcatggaaataaaagactaaaaggattattacttgaccatctttaatcagatgttgcttgagagtcctagaaaaaatatgccattattttaggaggttgaagaactgaataatttttaaagtcatatgggcagtcagagaagamaatcttttagatgtctctaccgaataatattaaccactagaaaaaaagcgaccacactgacaattttctttaaggactgagaggagattatttcaattaccatgttgccctgtccttgtcaactttttctaggatggcagagctaagaaatacccttaagatacattaaaggagaggtggttgaaaaagagaactaaaattgtctgcaggctaagaatgtctagtttaaaaaataaaacctgaaaaattctccaactattattttccccagctttgttcactacttagtttatactctgcatggaactgctttcttctttcaaaggataatgtccaataagttgtaaagaacaatttggaccatatttatgtgcaaatatttcattgatatcatcacttaatgattctaatatttcccatgtgtcagcttgtgcactttttgtgtagaattctgtgaccagaagataaaaatctactagcagatattttccttgtagggacatgggggagat

SEQ ID NO: 48087 - DNA, 581 bp, Homo sapiens
tttrtctttcatttctcttctcatattcatattttccattaaatctttttgagacttactttatttgtttattgtatgggacaatttatattttttccatgaaatattgcagaaattttatattgtggaaaatatttataatatctccttatatttatatttataatatctattttaacatattgtctactaattccaccttggcctctttctctctttttttgagacagggtctccctctgttgcccaagctggactggagtgcaatggcacaatcatagctcactatgacctcaaactcctaggctttagcaatcctcctgcctcatcttcctgcatagctaggcctacagacattcaccaatatgcgtggttaattattattattattattattatttttttttagagatgggggtctcactatgttgcccaagctggtccatcttggtttctttctattgagcgatttttcttttggtgatgagccacatttttttttttttttgcttttttatatgtttagtaattttttattagatgctggacattttgaatattacactgttggtggtgtttta

SEQ ID NO: 48088 - DNA, 581 bp, Homo sapiens
tttgtctttcatttctcttctcatattcatattttccattaaatctttttgagacttactttatttgtttattgtatgggacaatttatattttttccatgaaatattgcagaaattttatattgtggaaaatatttataatatctccttatatttatatttataatatctattttaacatattgtctactaattccaccttggcctctttctctctttttttgagacagggtctccctctgttgcccaagctggactggagtgcaatggcacaatcatagctcactatgacctcaaactcctaggctttagcaatcctcctgcctcatcttcctgcatagctaggcctacagacattcaccaatatgcgtggttaattattattattattattwttatttttttttagagatgggggtctcactatgttgcccaagctggtccatcttggtttctttctattgagcgatttttcttttggtgatgagccacatttttttttttttttgcttttttatatgtttagtaattttttattagatgctggacattttgaatattacactgttggtggtgtttta

SEQ ID NO: 48089 - DNA, 581 bp, Homo sapiens
tttgtctttcatttctcttctcatattcatattttccattaaatctttttgagacttactttatttgtttattgtatgggacaatttatattttttccatgaaatattgcagaaattttatattgtggaaaatatttataatatctccttatatttatatttataatatctattttaacatattgtctactaattccaccttggcctctttctctctttttttgagacagggtctccctctgttgcccaagctggactggagtgcaatggcacaatcatagctcactatgacctcaaactcctaggctttagcaatcctcctgcctcatcttcctgcatagctaggcctacagacattcaccaatatgcgtggttaattattattattattattattwtttttttttagagatgggggtctcactatgttgcccaagctggtccatcttggtttctttctattgagcgatttttcttttggtgatgagccacatttttttttttttttgcttttttatatgtttagtaattttttattagatgctggacattttgaatattacactgttggtggtgtttta

SEQ ID NO: 48090 - DNA, 611 bp, Homo sapiens
tttttctttttctgaatctaagtttcgaattttatgaaaaaaatccataaaacgtttctggaaatccggagtgagatttggagaatctgttgaccacatccattcctgaagcaaaggaagagagagagagatctaggtagctgatttttaaaaagaataaccatgtgaaccaattttatctgtttagatagtgacttggtacttaaacaatcaattttaaatgtatcttttcttagrggaggtggcaagcctcttaaggcagcaagcaaagcagggccagatgaaggaaacaaaataggagcttaaagtccagcaatacaatattcattcatgtatgtatttatgcatttaataaatatttatgaagtgtccatatgtgccaaacattttcttttagttgctggggaccagattcattagaagccaagacaagtctctatatagggagagttttcaactctagtggaaaccaacaagcaaaaaaagaaaatatcagatattggaatatgctatgtagaaagtgactgactttcatggaagagtgataagaagacttccttaggtagaacagacacatagcctactccgagggtgtggaagtttagctgatt

SEQ ID NO: 48091 - DNA, 611 bp, Homo sapiens
tttttctttttctgaatctaagtttcgaattttatgaaaaaaatccataaaacgtttctggaaatccggagtgagatttggagaatctgttgaccacatccattcctgaagcaaaggaagagagagagagatctaggtagctgatttttaaaaagaataaccatgtgaaccaattttatctgtttagatagtgacttggtacttaaacaatcaattttaaatgtatcttttcttaggggaggtggcaagcctcttaaggcagcaagcaaagcagggccagatgaaggaaacaaaataggagcttaaagtccagcaatacaatattcattcatgtatgtatttatgcatttaataaatatttatgaagtgtccatatgtgccaaacattttcttttagttgctggggaccagattcattagaarccaagacaagtctctatatagggagagttttcaactctagtggaaaccaacaagcaaaaaaagaaaatatcagatattggaatatgctatgtagaaagtgactgactttcatggaagagtgataagaagacttccttaggtagaacagacacatagcctactccgagggtgtggaagtttagctgatt

SEQ ID NO: 48092 - DNA, 620 bp, Homo sapiens
cttggcatctctgaaattgagctcaagcagagccagagggcatgagtaaactgcatactccccatggtatccaccactcttgtacgagtaccccttcctcagctttcatctatggctctttggagattctaaaagggggaggaaaaagcccaagcttggtttatgtaagaatgagttwtgtaaccaggagcaagctgaaaatggacagcagcctcatgcagcctcattaggagtggtttcaaaaagcaatggcaggaggaaatcttctcaacaggtgactgttctaacaatgcacctgttcatgcactttgcgtggaagaagtggcctgacatttgaatataaatgaactcctaagcagtagtaaataacttagccagatgatcagggtcctgaaaggaaacagactggaatattgggtacaaataaatcttagatggagacacatgaaagaagataagtgtgaatatcttcaaattaatatccaccaaagagcatccactaccgaagaggcactaaatacctataatatactgatagagtatattaaattattcagcacataatgggcactggagcaaagtggcatggttacagagatgaaagcctgagctcaaaacca

SEQ ID NO: 48093 - DNA, 1053 bp, Homo sapiens
ggagggtacttggactctctcaaggaacacagtgggggtgggtgttcaggttctctgaagtgttcctatctttctaagctttcagtcctttcttctgttttatgccaaggaagttctgacatctcatcacgattgaattgaattgcctttcagtctacatgtcagataatcagccagcctgctggaaacccrcacagttcctttattctctggtcaggtaaaccgtaataatacatttgatttgatccaacattatattttatccttctgggtctcatagccatagaaaccactctcacatctatttatgttctcaccagacttccatttaaagaatgtttaatgctaaaataaatttagtagacacaattaggaatttaatggaaaaaaattagaaactagcaagtgggtggcatttttcaattcctcttctgatttataagcttccatctggtctgtccttttctttcctggacagactgtgaggaaggcagaacttgtctttgtctctgtcttacttttccttttagggattttccttatgttttggccaatgtatattttgaaaatcttgctattcttttggagtacaaactctcttcccccagctatgacaggccacttttctctttggagcaggttgagatctgactgtcattataggtcttgaggcagtgaaggtagtggggagaataggcaccctttgtgaaggcagcaaccttacatgaggttatcacaagatattcaagaaaggggaagctactcttttcaacatattgggggccgcttctgctgacaagtgaggcacagggatattagattgaaaatactcaaacttgactgagtctaacaaaatgtcttcctctcaagtcttaggcacctattccttccaaataatgtctgaactttcacacagaaacttagtccatctgtaaattcatcttatattgtaatcctgcaattcacatgattgtattttgggtttgatttttagtcatatctgctttatgactccagaaaataagaggttcttaaaagttaccaaagacattt

SEQ ID NO: 48094 - DNA, 606 bp, Homo sapiens
tcaggtcaagggaagtgagaagtgtaagtacactaaaactttcatttctgtgggagttaatagatgctgtgaatctataaatcaaaacacagtccttcaactaccagaaaaaaactgaaaataataatataaccaacacatttaggaaatcaagaaagaaaaatagaattgtttaaatttattttaatccctcatcttataaatcactgggttaatgcatgtggtctaaagttgataaattgggaacttaaaattataatgtcaattccagaaaaagtaaaagacaatgggactacttctggggagtaggactaacttaacaggaagtagtaaggaagagatctttacttctaattttatacatttcaatatcttgtaatttatctgtgcatatgtatacatgcattatttccaaaatgttttttaaaagttaaagtaatttgagagtctatgaatgctgtctttgagtccagcaatgcctctaaaagattgtataatgaagcacttggtgaagtctagctcctttcagaattgacttcaccaagtgctaacattaatgygctagcttttaccaaatattgctttgaaaaaccataaaaaatattt

SEQ ID NO: 48095 - DNA, 610 bp, Homo sapiens
ggcccactttttgcaatatgaaaagattggataatagatgttagaaagcttcaaggtcaataagcctttaatagccactctatgctactgattccttttattagaaataaaatcacttatggataggaatttraaatgtatcaaatggcctgaaatcagcaatgattcatttttttttttgagtaaggctgaatagtttataattagcagttactaagttaacaactcattacatttaaggacctcaggggaaattaactatttcaaactgggaaagagccataaactcctggagagagagaaaaaataaaattaaagttaagcaattacaaaaagagtttttcattttcaatcttatgtttctggactatgcaatctgtttacattattggatttgcattaattaaattcacagataagtcaccctgagaagctcactgaattatttttactgtaaaatgcatagaaaccttgaagtcttattgccaagaaaaaccaccattttctgttaaatgtgaccttaataattattttcattcccccttaaacactaaacatttaaacacttgaatactataattgaaagtccaggaaaatagacatatgagat

SEQ ID NO: 48096 - DNA, 610 bp, Homo sapiens
ggcccactttttgcaatatgaaaagattggataatagatgttagaaagcttcaaggtcaataagcctttaatagccactctatgctactgattccttttattagaaataaaatcacttatggataggaatttgaaatgtatcaaatggcctgaaatcagcaatgattcatttttttttttgagtaaggctgaatagtttataattagcagttactaagttaacaactcattacatttaaggacctcaggggaaattaactatttcaaactgggaaagagccataaactcctggagagagagaaaaaataaaattaaagttaagcaattacaaaaagagtttttcattttcaatcttatgtttctggactatgcaatctgtttrcattattggatttgcattaattaaattcacagataagtcaccctgagaagctcactgaattatttttactgtaaaatgcatagaaaccttgaagtcttattgccaagaaaaaccaccattttctgttaaatgtgaccttaataattattttcattcccccttaaacactaaacatttaaacacttgaatactataattgaaagtccaggaaaatagacatatgagat

SEQ ID NO: 48097 - DNA, 465 bp, Homo sapiens
ggtaggcttcccagaagaggacaccgtggagctgacttttaaatttacatttgagttaactgaatgaatgaagcgagacagttttctaggcaggggagtggcatgtgtactggaatattgcaattactggcttgggtagggggcagtgctgcggagacacactcctgtggattaaggaaaaaggaaggcagaggacagaaagaaagtaaggaatgaagggccttgtcggttaaagtaagaagtctgagctttatcctgaaagctatgggcagccatggtcattggaaaatttggatcttcctgggtgcaaggtacttttcacttaatgattagtgattttgatctttgttaaagagtaatttgaattctttagttctgacaattcttttagtaacaattagttatgattagtaacaattattttcatgccagaytggcagggagctcttcctctttggtgcatca

SEQ ID NO: 48098 - DNA, 550 bp, Homo sapiens
tgctcacctcatgtgttgttctgccactatttatctagtcctcaatttctaattttgattcattttctaatcaactggattttgaaatcgaatttatttttctttgcaagaagagcttggtgcgttatattccctgaggtctttcttgcttaagtatgttcatttttgctaatgtacagtaggcctgagaaaatgttctttggtcctactttctttactttagaatactttyggtatttcaccatcgtctctggcattaagtactgctgtggagaaaagtgtgatgctaatcttttttttttgtaggtgatttgattttctgtctagatattggactaatttatttttatactttcaagttgagtaagcgaaccggagatatcttagggctgagcagttcgtatctaattatttgataatctaatgaccatttgaggttcagtgattactctcacaattttggcagtcctgagaaatagtcttctaacaactttgagaagctagagagaatgaatgtgcctggagaagaatgacaaatggtccctccaat

SEQ ID NO: 48099 - DNA, 1287 bp, Homo sapiens
tgcatagatccagggagggcagggattaaaagctaaaacatcagtgtccgatgcccccaatattcctacaaaaccagacacttggttcatacagttatagaattttatattcataaaaatgatccaggaatattcatatatttatttaagatgagaaatactttacattatacatggggacctagtttgttatggaggaaaaataaaatgtgctttcagtctaactaaaattctctctaaatctaaagtttgaatatacctcaagtaatgagatcttcagaatattcctataattgaaggtcagggaaaattatacagttatagtctgtatttaaaactttatgctgaatacaaatctacagtgttttttagaattcttgagactggagaaaagccttggttaggtatcatcacacagcaggaaagtcagagamctcaagaaaagcaaaactgacagttcagatttcaaaaacatacctaggttaatgattaactgtccagaattgtggtcaagttaaagtttacagaagaggcagggatggatctagatttttgtgagatactgaagtttatataattgagagtagaggagtcctctttaagaaaaagaaataggccgggcgcaatggctcatgcctgtaatcctagcactttgggaggccgaggtgggcagattgtctgagctcatgaatttgagaccagcctgagcaacacagtgaaaccccatctctactaaaatacaaaagaaattagctgggagtggtggcatgcgcctgtagtcccagctacttgggagggtgaggcaggagaattgcttgaacccgggaggcagaggttggttgcggtgagccaagatcacatcactgcacttcagcctgggcacagagagagactctctgtctctacaaaaaaaaagaaaaaaaaaggaaaagaaaagaaaaagaaataaaaattacaaacacaaaattagatccatatgagttagctattatgctaaatgctggggatactaaagttaacaagacaggtaaggcctctgtctttgtggggcttcatttgagttgagggtgagagattacaaatgagtaagaaaaaggtacagcaaaacgcagtaatttcagctagtgttaatatctcttaagaacataaaacaggagaatggaataaggggcattcatttattaaattaacttctctgatatatcattgtaaaacatgcaagggtgaaggaaatgtcatcatgaccctcaagaagcttatctagtcaaacaaataaaatattctaca

SEQ ID NO: 48100 - DNA, 1287 bp, Homo sapiens
tgcatagatccagggagggcagggattaaaagctaaaacatcagtgtccgatgcccccaatattcctacaaaaccagacacttggttcatacagttatagaattttatattcataaaaatgatccaggaatattcatatatttatttaagatgagaaatactttacattatacatggggacctagtttgttatggaggaaaaataaaatgtgctttcagtctaactaaaattctctctaaatctaaagtttgaatatacctcaagtaatgagatcttcagaatattcctataattgaaggtcagggaaaattatacagttatagtctgtatttaaaactttatgctgaatacaaatctacagtgttttttagaattcttgagactggagaaaagccttggttaggtatcatcacacagcaggaaagtcagagacctcaagaaaagcaaaactgacagttcagatttcaaaaacatacctaggttaatgattaactgtccagaattgtggtcaagttaaagtttacagaagaggcagggatggatctagatttttgtgagataytgaagtttatataattgagagtagaggagtcctctttaagaaaaagaaataggccgggcgcaatggctcatgcctgtaatcctagcactttgggaggccgaggtgggcagattgtctgagctcatgaatttgagaccagcctgagcaacacagtgaaaccccatctctactaaaatacaaaagaaattagctgggagtggtggcatgcgcctgtagtcccagctacttgggagggtgaggcaggagaattgcttgaacccgggaggcagaggttggttgcggtgagccaagatcacatcactgcacttcagcctgggcacagagagagactctctgtctctacaaaaaaaaagaaaaaaaaaggaaaagaaaagaaaaagaaataaaaattacaaacacaaaattagatccatatgagttagctattatgctaaatgctggggatactaaagttaacaagacaggtaaggcctctgtctttgtggggcttcatttgagttgagggtgagagattacaaatgagtaagaaaaaggtacagcaaaacgcagtaatttcagctagtgttaatatctcttaagaacataaaacaggagaatggaataaggggcattcatttattaaattaacttctctgatatatcattgtaaaacatgcaagggtgaaggaaatgtcatcatgaccctcaagaagcttatctagtcaaacaaataaaatattctaca

SEQ ID NO: 48101 - DNA, 597 bp, Homo sapiens
ggcagaggttgcagtgagccgagatcacaccactgcactccagcctgggtgacagagtgagaccgtctcaaaaaaataagatagaagtaaggacaagatyacacaattatatttcagttataatctaggcttagattgtcaaatatctagttgtagagcgagcactaccctaagccttttacacatattcctttaaaattactagtaacatcaaaaaattttcctgcaagaatcttatacacatgaagacctggagccatcacttaaaaattaaaattcccctacttaatggctactgggactaagaaattatttctgattatttctctcattctgttaatatataacacttcctaaagccatcttactccagctttaattggccaatttaaccttggctattctacatgtcaacaccacataaaaaccctataattgtttatccagcttctgctgaatcctcctccctagtaaaacaattccacacatccatcaggggacaataaagaacattcccaaatagctttatttattgtcttggattatcacataagtttttaacctctctgggcttcagtctttattcacgtaatcttc

SEQ ID NO: 48102 - DNA, 548 bp, Homo sapiens
gtctcagtgccagtaaggtagaaacgataccagccaccccggagaaagagccaacaaacgcaggctggacagcaaaacctggggggaaatctttgagcttgttcacgaggtgcagcccaggtaaagcgtaggaagcacaagcagagtgccgcggtctaaacgaagcgtgtttctctccatggactrgagcgtggaagtgcacacacatttcccacgttcagagagtgacctggaaacaggtcttaagaacaaggtggaaatttagctgctgccattaaacatggggtaaactgtgctttccaggtaatgcggaacgcacgtgcctgcgttcagactccatttatcttcaccgtccttcaaaatggatgagctaaacccacgcacacgcgtggacgggctgcacatggggtaaactgtgctttccaggtaatgcggaacgcacgtgcctgcgttcagactccatttatcctcaccgtccttcaaaatggatgagctaaacccacgcacacgcgtggacgggctgcacatggggtaaactgtgctttcca

SEQ ID NO: 48103 - DNA, 616 bp, Homo sapiens
  misc_feature (1)...(616): n = A,T,C or G
tagtttctatgcagactgggttcttttgtatcttaacacatccctgtgaggcggatatcattttgtacccattttatagataagtaggctgaggttcagtgacttactcaagaacacatatgcagttcatggtagagccaggatctggacccaagcaggctggctccagaggaaccacttttaacctttttgctatacctgtgctaactgtttgacagattgtggctcccactgttagggactttttctgaatataagacagacatggatggtctgatttgtccagaatctgggttttatcaggcacactggatggatcatnnnnnnnnnnnnnnnnnnnnnnnnnnnnnnnnnnnnnnnnnnnnnnnnnnnnnnnnnnnnnnnnnnnnnnnnnnnnnnnnnnnnnnnnnnnnnnnnnnnnccattcattcagcatctacttattttaagccgacactttgcatacattatctcwaaaccaggggttctcaacctcaaccctattgacattgtggactggataactctttgttgtgaggagctgaatgtgcactgtaggatgtttagcagtaaccatggcttctgcccactaaatgccagtagcatccccacatcc

SEQ ID NO: 48104 - DNA, 616 bp, Homo sapiens
  misc_feature (1)...(616): n = A,T,C or G
tagtttctatgcagactgggttcttttgtatcttaacacatccctgtgaggcggatatcattttgtacccattttatagataagtaggctgaggttcagtgacttactcaagaacacatatgcagttcatggtagagccaggatctggacccaagcaggctggctccagaggaaccacttttaacctttttgctatacctgtgctaactgtttgacagattgtggctcccactgttagggactttttctgaatataagacagacatggatggtctgatttgtccagaatctgggttttatcaggcacactggatggatcatnnnnnnnnnnnnnnnnnnnnnnnnnnnnnnnnnnnnnnnnnnnnnnnnnnnnnnnnnnnnnnnnnnnnnnnnnnnnnnnnnnnnnnnnnnnnnnnnnnnnccattcattcagcatctacttattttaagccgacactttgcatacattatctctaaaccagggkttctcaacctcaaccctattgacattgtggactggataactctttgttgtgaggagctgaatgtgcactgtaggatgtttagcagtaaccatggcttctgcccactaaatgccagtagcatccccacatcc

SEQ ID NO: 48105 - DNA, 562 bp, Homo sapiens
aatatctcctctgttttatgttttgtttaaattggaaaagagcagtccaacaaagcctgcatagtgtcagtgtttaagatcgagttgttatgctcttgataaaaagaggagaaagaaaaaaccatgcacagtagaaaccatgaacctgattatgtgactgcctcctattttaccaactgacttaaaatattttagaagcatgtatttttataatttggaagctcagtacaaactgtaagtagactataatgaactcctaatatatgaagyctttgatggagatatcatctgactcttaaatcttacatcataagtatgttaagtttaacacatggtatgctttaaaaatatctagggattttagaaaaagaatagagaaatacaaaattattatgataaaaatttcatcagtagactatgttcccatattgatattttgctgataattcattgatatttttctgattcctcttgtattcctataattaaatttcataagtgtctttacattgtaatcagtcattagtttttttctttgcttttttattccatctttctatta

SEQ ID NO: 48106 - DNA, 489 bp, Homo sapiens
tattctattcctatttattaatcaaggaaaataatcatacttctacataaaaattgaagaatgtagatggtgtttaaatgtgacaataaataaacagctggmaatgaaagaaaacagacttctagcaggccatcctaaataaacaaatggctcagtaaaattgtctgtaaatagtaaatctcaaaaacaagaaatgtttttttttggcaattacattaaggaaacaaatagtttgttttttgaattcctttattttttcctctctctttctttattctaccggatcacatacacaactagggtaggaggcagatgagacagattactattaaagggatttagaatatggcatggcaaaatatgctattttggcatgaggattattttgaactgaaggtaactgaagaacagcagatacatgaggagctctctgccctcccccatctgcctcaaagcagagcataaatttccctttgtaagggtgacata

SEQ ID NO: 48107 - DNA, 603 bp, Homo sapiens
ttaaacactgtcatataattccattttttttccccactccagctcttaaaaacatcctagatgttaagatgtgtagcctaggacagtggttttcacacagtgctctaaggaacctttagagccagacacacagaggaggtatcaataggaggggtctgatgccccttcgacacatgttactataattaacatgtattttgagactgagaatgtaggctccatgaaagccgggattcctgtttcctcacagccatcacctcgtccttttaacagggcccagaatacagtaagctgccggataaaagttttttgactgaataaactgcacggttattacagctgggaactgatttcgctgatttccacggtaaccctgtgaggcaygtatagtagttatcctcactttgcagatgggcaaactgaggctcagagcagcctggcttccaagaccctccttctaaacatcataccacatgacacagcctcccacgtgagccagcagctgtatttcatctgttttacatgtgaggtttcccaccatttgactggagaaaggtcgatgttaggggagaaaaaaccatttaaaaaccaccaacttcatgg

SEQ ID NO: 48108 - DNA, 603 bp, Homo sapiens
ttaaacactgtcatataattccattttttttccccactccagctcttaaaaacatcctagatgttaagatgtgtagcctaggacagtggttttcacacagtgctctaaggaacctttagagccagacacacagaggaggtatcaataggaggggtctgatgccccttcgacacatgttactataattaacatgtattttgagactgagaatgtaggctccatgaaagccgggattcctgtttcctcacagccatcacctcgtccttttaacagggcccagaatacagtaagctgccggataaaagttttttgactgaataaactgcacggttattacagctgggaactgatttcgctgatttccacggtaaccctgtgaggcacgtatagtagttatcctcactttgcagatgggcaaactgaggctcagagcagcctggcttccaagaccctccttctaaacatcataccacaygacacagcctcccacgtgagccagcagctgtatttcatctgttttacatgtgaggtttcccaccatttgactggagaaaggtcgatgttaggggagaaaaaaccatttaaaaaccaccaacttcatgg

SEQ ID NO: 48109 - DNA, 541 bp, Homo sapiens
gctgggattacaggcatgagccaccatgcccggccaagagctctttacactaagtgaggagcagtgttaggcaagccaagacatccatgcttgctctgttattctacggctcccgacagctccagatcaaagttttctgatgaagatgggccaacatctcagaagacaggatggcacaacagtaacacaactatcatagttagaaaacctgggttctggctctgacttggttgtgtgatttttggtagacagtcccaaaagtcttgggtgatttcatctcagtttccctatttataaaacaaagggtgaaaggtaagctagggggagctgaccaactagatgrtctgttaaacgccttccagtgctaagagaattgccttattttcccattgctcactgtgttctcttgtgaccacctgaggtctctgccagctcatcttataccagtgctgtcttccctgtttgatggctcatttctctaaataaagcataacattcacagaacaaaatgagtaaaatctctgtttttttagttcactgg

SEQ ID NO: 48110 - DNA, 543 bp, Homo sapiens
ggccccctttagcctttctcttttcttgatgcttacttgcctgcctcccaggtattactttatgctttaaatacatattgatgggacatctcccacggcattgcactaggcattggatttgtacctaaaacagacagtccttactgcaaagtggccagtcaggcgtgctgccgtcttgcagctgcacactgcattccaagcagacccagttcattgtcacttttgtattctgggcctttatgcgagttccttctgttttatttcttctttctttctttcttttctttctttmtttctctctctctttttttttttccagagtctcactgtgtcacccaggctggagtgcagtggagcagtcacctgagcctcctgaatacctaggactacaggcgtgcaccatcatgcttggctaatttttgtatttttttgcagagacaaggtttcgtcatgttgcccaggctagtctcgaactcctgggctcaagcaatccacccactttgttattggaaaggagccctgattcagaccccaagagagggt

SEQ ID NO: 48111 - DNA, 521 bp, Homo sapiens
ccccatggagagggcaccaggctgtgaggtagatgataactcagttttggacatgctgagcataaggaacttcggggacaaaacaaaatatgtaatcaattactgtttgttttaatggattgaattgagatgctccctaccccctatcaggagctcttcatgattatagtgcagaattaggatattgctctcctatagctaaaaagggagtgctttaaaaaaaattctatgtgataagccatacgtatgggcattattcctcacctcagtgataaatgagatctgtataaatcagctatgttttkatcattacagtgacgtcatagttcaatggctcatgtccactaaattgtccttctttcccagtatcttacttgtatgacttgatcggtagctgatccctctcactaaccaacctcaactaatacaagtcaaactgatgaaaattcaatcatcaacagagaccctcataatcctaactctttaactgcctgacaaacactgaaacacccaatggtact

SEQ ID NO: 48112 - DNA, 1721 bp, Homo sapiens
cagcagcacatcggggggcctgtaccacagggtcaccacctcattggagtaagtctttgtgggcactgacttggccctggccagtcctgggggcagacatgtcactggacctctgtccacaggtgctgtggggttgactgctatgccctcccccactgcacccacaccctgaggcaccccagtagcgtcagacccccaccctagccccagcctcaccaaagtcggccagcttcagctcccccctctcgttgatgagcaggttctggggcttcagctcccggtgcaggatcttgcggtggtgacagtaggcgaggccccggagcagctggaacatgaaaatctgggggagggggaagagaaatgtggggtggaaggtggccctgagcctctgctccaaggctgggaccaggatgggggcaggggcttggcagtgaggtcagcacaagcccctcattctcctgcacaccctgcagcccccatcctggaccccacccacaccagggaatcccatccagaggggaggacagcaggggtgcagaggacgcagtgagtgtgggggaggccagcgaagtctcagtcaggagcacgggggtcaggatgcccgcctatgtggagacatatgtgcttgatcccttttttttttttttttcttttagagtcagggttttactctgtcacccaggctggagtgcagtggtgtgatcatggctcactgcagcctcaacctcccgggctcaagtggccctcctgcctcagcctctcaagcagctgggactatgggtgcacgctactgtgcccggctaatttttcaatttttagtagagatgaggtcttgccatgttgcccaggctggtctcaaactcctgggctcaagccatcttcctgccttggcctcccagtgctgggattacaggcgtgggccaccatgcccagccttgattctttaacaaacaccaggagaggtcattcataaccccgagcttccccagaagcctccctgcattttggcaggtagctcacactcccatttgacagactgggaaactgatgttcagagttgagagtgggttttataccaacagctagacagtggcagacagtgtgtgtctgttcttggggtaaagcgctcaacccagttcctggactcgttgatggcattgccctctccctctttcctacgtgggaaggtctgagccacctcagcagccggatccctggtggtgagagtgggtccccacactgggcttctggacaggtggctgccaagatggggggaccctgccccygaggcctcaccttgacgttgtgcatgctcatgaggttcccacagtggtccagatactgcttcaggtcactgtcctggaacacagagcgtggctcagtcctgccccacgctgacccctggccagaagcccagacacaggctgaggagaggaagcccctccctgggaagggcccacgcccactagtgggacaggtccctggctcgagccacccgtaagcctgagctcttggcccactcctgcacgggagcatctgaaaatctgattccagaacaaggcctgggtcgccctcatcccactactcccactccctcagcttcccactcccctacccacaccccgtttccaccacaagagggagaggcggccagccccagccggactctcaccaggtactcaaacaccagggtgagggaccgatctgtgtggatgaggtca

SEQ ID NO: 48113 - DNA, 546 bp, Homo sapiens
tgttgtttcctgactttttaatgattgccattctaactggtgtgagatgatatctcattgtggttttgatttgcatttctctgatggccagtgatggtgagcattttttcatgtgttttttggctgcataaatgtcttacctttttaaaaaaggtcttctggagagagggctttaaagcaaagaatagaaagaattgcaggccccatgaaaggacgaaattagaattagtgaggccccagaagatctgtcaaaagataccacatagactgccattgcttctttgtttagaaaggtgtagacatagmcacacattgcagaggaccagctggatgaagctctaattctggaatccagaaagtaaatatctaattggcaatatttgttatgaaaagttatgctcccaattagctgaggtttttggaaaagatatattcagattgaaaagtaaacaaaaatgtattgtttgctttcactttattcaaaaaatgactaaaactttatcttaaaatctatatatggaatctactctgtatttgactatgaaa

SEQ ID NO: 48114 - DNA, 551 bp, Homo sapiens
gaaaagcatgaataattaacacatataaacaaatttaagagtaagatgaactgtttatattgcaaattgttcctaggtgacctctgtaactattgcaaacagcagttcatgtgcagaacctaagcctacatgtctatggccgcygctggctggggctgaacagtggctgcagcccccagataagcaccatcatcccagtattccagcctctgccactccctgccattcccaaggttgtggtctcacgtttttgccttttgccaccatgccttccctattgctttttaaggaagaaaacgatagctatctcgcattcacgtttccgagagttgataaaacaagatccaccaagaggccaaagctgttaatcagaatgggaaagaactcgcttttttgctagatgaaagaatagtcctgtatgtttagtataaaaaaaagtgtttggtatgaaaaaagtttgttaaaagaatataatttagaaagtcaatataaagcaattcacagtaagtttcacctgaatcaagtatgacaaaaaaatctaatgaaatgaa

SEQ ID NO: 48115 - DNA, 569 bp, Homo sapiens
acccagaggctcacatctggatggtgatgtttttggacataaaggaagtagaaataatgatggacaggatagtggctgggccaagtttgtcttagagctcagtgtctccatgacctcccttttaaaactctaggaagaagttcatctagcagagcatggatattacatgagtcaacatttcaggcttctctttcatctaacagctctatctcataaacttcagaagggatatcttactcagcagaaaaaacaaaaataaggaacagcatttagtataaaagctactgtagacaaaatcaattactccatgcctaaagagttgattaaaagactactgaattaaraatcatctgacttcactgtctttagaatttcgttgaaagtaactttgaaatgctttgtaacccatatgacaaggtttataatccttatgttcttttatttaaatagctcagcacaaattataattgtagatatttataatgtctctacagatattttactttatattattagcaggtcatttttagggttgatcactctgcattagaacaagaaactacatttaa

SEQ ID NO: 48116 - DNA, 470 bp, Homo sapiens
tgtctttatttcagaaggcaaattttcatttttctgactctgaaggaaatcagaggatttgggcactcaagagtgatacatacttcaaatcagcatcatgtacaggatcatgtacaggtgtgtgcaccactgggggtgctgayatcaatacccttgtaactcttaggcaaacaatggcctattttatgctttgtataaatctctcgtctagcagactagaaaccccataagaaagtcccattttacatccaaggaagaggcagttcatataatttaaatcatttgttcaaacctacataatgaaggagctcagacttaaattcagatctattgactgaaggatggtgtatgatattaaaaaatctttgaaatcatcaaggtgaattccagaatattaaaatcatgggaactctgtaagctttaagggtatgaactaaatacccttaatgggaagaacaacttcacatcag

SEQ ID NO: 48117 - DNA, 615 bp, Homo sapiens
tgtggaagaaatgtaaataaattttggtcattttaaaacctgacctagaaattctctgacactcctcccatcaaaaactggggcctatataacatcccattaaattttatttctgtgactatttgagcaatagaatawagtggaattgatgttttgctagttttggggccaaagccttaagaaactggcagctgccacttcctgttgcttggagtacttgctcctgtaacccaggcatcaatccatgaggatgcaccctgtggaggtgcccatatagtgaggcccatgtggaaaggaaccaagcagcccctgctctcagcctgagttgagctcgtgaacaatagacagcaccaaattgcaccccatgtgagtaaatcaacttagaggtggatcctccagttcccagtggagtggcccctgctgatactatcttgaaaagaaataaactttctctgcctgatcccatttcataccataataattgtgatttatctatgcagtaacagacaaccaaaacataactatcacaagataaataatcttgaggaaaaggaagatgttttggtagtaaaattatgagtgctacagagggttaagagaattgttatttttaag

SEQ ID NO: 48118 - DNA, 1235 bp, Homo sapiens
tcaactaactcctaatagattgtgctacccaatagataacgatgtatcttttattaaaacatatgcttaattttgttgttaagtatttatatttctactataratactttaaaaagtatttgaggtagcgtttatacttggatggccagcagtattacggaagtcaatataaacattcttatgatattgaggatggcagacttgttccatcagtagtggactgctcacctttggactcttatatgagaaaaaaaattcctgatttacctaaaccccaatattttggggtttctttgcataacagcctagcctatacccaaactactctagtcacacagtaagaagcggagctctaatttgaacccacatgagcccatttccaaaagggaagatcttttgatgctatggtgtccctcactaataaattttaaaagaataaacaaaataaagcttatgaaagaaatggcagtaaaagagaatgataatacaatcttgattaattcagagaaagatatccactctgaaaattaggcacactgtttctattctatgatccaattttaatttgtttggtttttccatttttactatctctgtaatctgaatgcatcttataattgatgctgtcttaaattgctgttaggcaggtgtcagtcatgacacagttatgtgaaatcttctgttgataactttcagtaagttttgttttgttctgttttgtttgagacggagtctcgctctattgccaggctggagtgcagtggcacaatctcggctcactgcaacctccgactccctggttcaagcgattctcctgcctcagcctcccaagtagctgggactacaggcgcgtgccaccatggctggctaatttttttgtatttttagtagagaagggatttcaccatgctgaccaggctggtcttgatctcctgacctcatgatccatccacctcggcctcccaaagtgctggaattacaggcgtgaggcaccgtgccccgttagtaagattttttttttaaagcacaaaccaaagggtcttaaactcaatgaaataaaataatataggaaccacagaaaaagtaatcctagactacgaaaatacatggaagaggagccagaaagccatttggaagaatcataaagagttgaaaataattaagatgaaaggtttttttaaagcgctgacataaaaaaaggataggtatgaaaggaaactaatgttgcaacagca

SEQ ID NO: 48119 - DNA, 600 bp, Homo sapiens
aataaccttcttcctatcattcagtaagggtattctctctgaacacagaggcaggatgcacacagggcaagcaggttaagcaataaagcaaatctaaaagaaactataatgctttctgaggttatggarcaattctgtcctttgaagatttccagcttgcagatttgtctctctgagagcttagctgattcaaatcttggcaacatccaaattcagcctagattgaatatatgtctaaatctgtgacaccataaatgtcacaattatggcaaaaatatccatttcctttggaaaccatgtttcacttccagtcattgctcctttaaatgaattgcacatgtttagacttagatgccccagtggttaaactgatagatataaaaaaggacaggtcactctttcagtcctatttgagaaacaatttgtagatataaccgttcttctactctgaagtttttttctgagttctctattaaaaagagatctttcctatgccttcactttttaccaaactgctatttaagtctgttttctttcacaaactaccaaacaagtttcttcaaagagatgtgttaattcacatacttgtggggcaaggag

SEQ ID NO: 48120 - DNA, 600 bp, Homo sapiens
aataaccttcttcctatcattcagtaagggtattctctctgaacacagaggcaggatgcacacagggcaagcaggttaagcaataaagcaaatctaaaagaaactataatgctttctgaggttatggaacaattctgtcctttgaagatttccagcttgcagatttgtctctctgagagcttagctgattcaaatcttggcaacatccaaattcagcctagattgaatatatgtctaaatctgtgacaccataaatgtcacaattatggcaaaaatatccatttcctttggaaaccatgtttcacttccagtcattgctcctttaaatgaattgcacatgtttagacttagatgccccagtggttaaactgatagatataaaaaaggacaggtcactctttcagtcctatttgagaaacaatttgtagatataaccgttcttctactctgaagtttttttctgagttctctattaraaagagatctttcctatgccttcactttttaccaaactgctatttaagtctgttttctttcacaaactaccaaacaagtttcttcaaagagatgtgttaattcacatacttgtggggcaaggag

SEQ ID NO: 48121 - DNA, 525 bp, Homo sapiens
ctggagatgttcttatttggccatcttggctccacccgctcctgtcactattcttgaaacaattctggaaccaatcctccayggatagtgaaggaaaactatattatacttaataacttccaaaccagtaaattaataaagaaaaggttaagttgtacaaaatagtatcagtttaacagttacagaaaaaaatgaaaaaaaaggtaactatgaaaggcagagtaagataatggaaaaggtaaaatatattatcacaataaatgtaaatgacttacatatacctactaactaaaatacaaagactttgttgatagaaacaaaaatgtacctagctatcgtctgcttttaaatgtcataccacaaataaaattgctttgaaatgttccagataaagaaatgggaaaaatatctaatgaacaaagactgttcagaagaatgttattataccaatatagtaatagacaaaattaaaattaagggaatggcattaacataggtaaataggtatatgcataataattaaaa

SEQ ID NO: 48122 - DNA, 578 bp, Homo sapiens
tgaatttgtaatatgtacccaagccaaacaatattagaatattgggaagcaaattctccttctatatcgtgattttataaacagcaaaattaaatttcattttatatatgtatatatatatatatatatgtatatgtgtgtgtgtgtgtgtgtgtgtgttctgtgtattatgtaaaaagaagggacacctacttcaaattggatgctagtctaactactcaaatatcatgagttaattctgagatgaaagtcagccatgccaggcgcagtggctcatgcctataatcccagcacttcagaaggccaagacaggcagataacttgaggtcaggagttcragaccagcctgagcaacatagtgaaaccctgactctactaaaaatacaaaaattagccagcctgtagtcccagctacttgggaggctgagacaggagaatcacttgaacccaggaggtgaagactgtagtgagtggagattgtgccactgcactacaaccgagtgagactgtctcacaaaagaaagaaagaaagaaaatcagctggtgacatttattgtcatgaaattccttctcttgtc

SEQ ID NO: 48123 - DNA, 578 bp, Homo sapiens
tgaatttgtaatatgtacccaagccaaacaatattagaatattgggaagcaaattctccttctatatcgtgattttataaacagcaaaattaaatttcattttatatatgtatatatatatatatatatgtatatgtgtgtgtgtgtgtgtgtgtgtgttctgtgtattatgtaaaaagaagggacacctacttcaaattggatgctagtctaactactcaaatatcatgagttaattctgagatgaaagtcagccatgccaggcgcagtggctcatgcctataatcccagcacttcagaaggccaagacaggcagataacttgaggtcaggagttcaagaccagcctgagcaacatagtgaaaccctgactctactaaaaatacaaaaattagccagcctgtagtcccagctacttgggaggctgagacaggagaatcacttgaacccaggaggtgaagactgtagtgagtggagattgtgccactgcactacaaccgagtgagactgtctcacaaaagaaagaaagaaagaaaatcagctgktgacatttattgtcatgaaattccttctcttgtc

SEQ ID NO: 48124 - DNA, 603 bp, Homo sapiens
ttaaatgcattataaccagattgtaggaagtgcgtggaagtcataagaaaagccaatactctgtgatttcaatagcaacagagatcaggtacctactgaggaaatgaaacatgaactccacgaagacacggactattctgcagaatatgctcaccctcatcaggactagatttagatccaataacttgtccttagtgccttccagaagccctgctggccttcccatcggcaggcacttttgcctccatcccaattcctaagtcctcaatttccctggaatatcgaaatactagcttttccccacagtccaattcagtcctgtctcaactgtgatggactagcctctcaacttcgcttccatctggattacttcactaattggtgaattgtgtgtaactagctcttaaggatatacaacgcaacattgcttagtactgtggcatgtgtctacatctttattctctatgtaggttgtgaactttggggagcaggcatcatgtttcatacttttgtagtgtccactccaagaaaattctgagcatatgttcagcacattcttaytacttaagtcacagtttcccacaggcttgctaaaggggaggg

SEQ ID NO: 48125 - DNA, 531 bp, Homo sapiens
ctctagtcctctgtgacccgtaacggtataaatccttatagtcacagtgctatgctcttaacaggtgctttaaaaaaacagctctgtggaatgattgacatttacatctctgagcagctgagcctggcaagacctaccaaagggcaagcaggatccttatatcttgcagaatatcttgctaaggagagctcaggaggcagaacagatggacacacctcaaattcattctctgatatgamccgtgctacaccaagcacctactctgtgccaagccctgcattgaaggcaagtatgagacagcagacaaggccagatgaccttggaaagccccaagtcctatgggggcaacaggtataaataaacaagcattgacatccataaagaattccaacctttgagagtaactgtgtgtgatgatgtgttcataattttgattgtggaaattattacacagtatatacatatagcaaatcacattatataccttgaatacatacaatttttatttgtcaattataccttaatgaagct

SEQ ID NO: 48126 - DNA, 531 bp, Homo sapiens
ctctagtcctctgtgacccgtaacggtataaatccttatagtcacagtgctatgctcttaacaggtgctttaaaaaaacagctctgtggaatgattgacatttacatctctgagcagctgagcctggcaagacctaccaaagggcaagcaggatccttatatcttgcagaatatcttgctaaggagagctcaggaggcagaacagatggacacacctcaaattcattctctgatatgacccgtgctacaccaagcacctactctgtgccaagccctgcaytgaaggcaagtatgagacagcagacaaggccagatgaccttggaaagccccaagtcctatgggggcaacaggtataaataaacaagcattgacatccataaagaattccaacctttgagagtaactgtgtgtgatgatgtgttcataattttgattgtggaaattattacacagtatatacatatagcaaatcacattatataccttgaatacatacaatttttatttgtcaattataccttaatgaagct

SEQ ID NO: 48127 - DNA, 531 bp, Homo sapiens
ctctagtcctctgtgacccgtaacggtataaatccttatagtcacagtgctatgctcttaacaggtgctttaaaaaaacagctctgtggaatgattgacatttacatctctgagcagctgagcctggcaagacctaccaaagggcaagcaggatccttatatcttgcagaatatcttgctaaggagagctcaggaggcagaacagatggacacacctcaaattcattctctgatatgacccgtgctacaccaagcacctactctgtgccaagccctgcattgaaggcaagtatgagacagcagacaaggccagatgaccttggaaagccccaagtcctatgggrgcaacaggtataaataaacaagcattgacatccataaagaattccaacctttgagagtaactgtgtgtgatgatgtgttcataattttgattgtggaaattattacacagtatatacatatagcaaatcacattatataccttgaatacatacaatttttatttgtcaattataccttaatgaagct

SEQ ID NO: 48128 - DNA, 631 bp, Homo sapiens
tctcccacatccaaggaatatgtgtttggttggaagagttggacaataaacgaaacagaataaacaaagtgacaaacaaacacgctaggtagtgatgcgcatygtggcaatcccagaacaggtgatggtggtgacacacagtgcccacacccagcacagcagggtacactgtcatcagtaatcgcctctccaggaaaccagcggcactcatcagactcagttactcatggtctgtgagtgaaagaattaaagtccctggagagacccatcaggagcaccaatgaccagcagattgcacaggtcacctcagcagcaaagccaaggctacatcttggcattcctggctgcagcccattgctctccccatcctgcacatgactccagacagtggcagcctattcagcatctcagggctgtcaggagtggcatctagggaggaccaggtgctctctccatctgtggcttggaatgtgtgctcagagtcccctgagaacagacaaacccgtgaagaaccaactgagaaatataatcttcctgtccattcagatcaggaaataaattaaaacatctttctttacatagtagatttgaacatgaaaagctgattgtaaatacaatctttgtggattaa

SEQ ID NO: 48129 - DNA, 631 bp, Homo sapiens
tctcccacatccaaggaatatgtgtttggttggaagagttggacaataaacgaaacagaataaacaaagtgacaaacaaacacgctaggtagtgatgcgcattgtggcaatcccagaacaggtgatggtggtgacacacagtgcccacacccagcacagcagggtacactgtcatcagtaatcgcctctccaggaaaccagsggcactcatcagactcagttactcatggtctgtgagtgaaagaattaaagtccctggagagacccatcaggagcaccaatgaccagcagattgcacaggtcacctcagcagcaaagccaaggctacatcttggcattcctggctgcagcccattgctctccccatcctgcacatgactccagacagtggcagcctattcagcatctcagggctgtcaggagtggcatctagggaggaccaggtgctctctccatctgtggcttggaatgtgtgctcagagtcccctgagaacagacaaacccgtgaagaaccaactgagaaatataatcttcctgtccattcagatcaggaaataaattaaaacatctttctttacatagtagatttgaacatgaaaagctgattgtaaatacaatctttgtggattaa

SEQ ID NO: 48130 - DNA, 583 bp, Homo sapiens
gatacatgttaagttccagctaatactttctcctggaaaatgtgatttgatgtggaaactgctgctccaattgacagttgctgaaacaggaatatttgatgtcacaattgtgtctgctctttgtgttgttggaactttagtaccatagaagacatgtgacagctggaatcaagacaattcaaattttgagatagctgacgttgctaaaggaatcactgcagttccagggaaagatagctgctgtagaagaagcgcagattccawataagccatcactgacagagaatatgagttaaccaagaaagaaaattgggaaaaataaatggttttatacatatttggggactttagtctttgtatggcaacaagaaaaaaagacattcaatttattgtgactttaatttctctgatgaaactaaggattgacttactaaggaaattcatattgctcactttaggtttattgtgttctatcattataaagtagatggacctgggttgaaatgctagatccatcacttgttggatctgctgataaattacttaatgcctctgagctgtctctcacctataatatgagata

SEQ ID NO: 48131 - DNA, 1212 bp, Homo sapiens
cagaatcctttacatggcatgaatttttccagtaacacttttgcgtagagctttttagtcttataaatgctatttctgtagtgcagggccatctgttgtcagatgccaggaaggaggaggcatgtcagaaaccctagtctgcagctaaggcctgtcctaggatgttgggcattggtggggatgatgacccacagagtcagctccccattctctccttctcccatctagagttgagcttgcatacattagctgctgttgcaatactcctgctttcagaaccctgaaatggcctggcttggttgctatatagtgatttaaccacagtaaccctcagtgagtggcaggttgtatttttattgttgaattttgttataatgacaaccccagataaacctgaaaatgaaagaggattctctttaactctcaattcttctcatgtttatgaaatagcgcttaattaaataatgtcattttatccttatgagtcttcttcctcctaaccacctcacagccctctagggtgtgtttaaccgttgaattgggagtcaagaactgagaactctcacccagaccttggaagtcggaatgtcagccgtctttctactgcacagccaagcctattgatgtggtcagatctgccctctggaccaccttccttttctgccaagccttggggctgtccatggtgtgctcatgtgccttctccttcccacagcagtgttgtgacttaggctaccatgcaagtctgaaccgggctctacgcaccttcctctctgctgagttaaacctggaacagtcgaagcatgagggtctggatgccatcgagaatgcagtagaaaacctggatgccaccagtgacaagcagcgcctcatggagatgtacaacaacgtcttctgcccccctatgaagtttgagtttcagccccacatgggggatatggtgaggccctttccctatacccccaccctcaaggggcttgagtggasttgtctagattaattacacagaaggcacattattctggggtgggagaggcctgggcccggctttttgtcaggtgggtgaggcacattccacttattgagcaaacagttagtgagtgcctgctgtcagacactcgggcttgggtgcagacatgggggattaaagccctcggggagcttacagtctggggaataaggtcgctaaggcttgaggagggttcaaactat

SEQ ID NO: 48132 - DNA, 494 bp, Homo sapiens
gagactgggaagacgagaggacaggttgggagggaaaggtatattttagagattttcattttacgtgctcattgaatatccacggggagatgttgaggaggcacataggtagatgtaagagtcagtaatgatgcctggaagacatctgggctggtaaatacccatggaagtcattggtccctactgagtgtttaaagctgcagcagctcagagagggaagagaataacagacttttggggagttgtccatgaagagatgatccattggggtgggatcctgagccttgcatgagaaggtcaagaagcagaaattgaggargaagacagtgcaggcgaagggactggcttagtgcaaggacatggagcaaggggtggtttggaatgataaggggacagggaggagtcagatgtggcatttcaggacatgacatggagaggcaagaaagggagtgggaggaagtggtgatgaggtcagagaaacagactggagagcc

SEQ ID NO: 48133 - DNA, 577 bp, Homo sapiens
tgtggagaggtgtggatcctgtgtagaattgaaagccatctgcttgcttttcaactttggcctccatcagggataataaacacattctttagaagaaattatcgtactctgaactatctttccttgttggaaaaaaatgttgctgtatcccttacccattttattttatttttctttataattaatgtacttagagtaaaacaagtccccttcctcaatttctttgtctcctcctccttctcttctttctcctctttgccttctctttctcctcttctcttcctcattcatagtggaaattgcaatctccattttccaataattttgaacagcagaaagaattttatatggaaaaacactggcaaaaatttttatatgaactttcccctgatatttgggtattaccatgacctggtgatatatgtacatttgtcatatgattgtgggatccatagaacaaacacactcccttctactgattcatttcatagtccattctcataggatgcccccattacttgagyttatatctgctagaacctttgcttgaagttgaacatgagaatttacccaacct

SEQ ID NO: 48134 - DNA, 256 bp, Homo sapiens
atatwtatatatatatatatatataggtgtatacacacacacagacttgcactggctttggggtttacttccatgtggtggggtgttaacgggtccttttgtcccttgtgatatctgtgtttatgttgattctcggatctccagtgccacttgagctgcccaggggcacatgttagactggaatttgggttaaaaaaatatgcacctgggagacagaataatgttactatatgaaagaatttgttgataatcggca

SEQ ID NO: 48135 - DNA, 435 bp, Homo sapiens
tataatgaaagtaaaatatttaaatctttagctgtatggtgaagtgtcttcttgaattaactggtggaaatcccattaagatatttcacacattcataaaaagatgaaaattaggtttgagccatttgatattctgacatgtggtattttgcttgcagataagatccttttaattcaagtcttsaaacctctcagacagaatgaaagactaatatctgaaatttcttatctatccttatcttaaattttagatttttttggagaattagagaaaaacattcagactaatagctttagtaagcaggattcatcattctcttccttgactccttggttgacggggcatttaccaccagctgcaagaataaaagggaattttatccataaaatatggaaagttagactgtaacactgattactgacaatttaataagg

SEQ ID NO: 48136 - DNA, 604 bp, Homo sapiens
ataaacagcaacaaaaccaasaaaaaaccccatttgtactaacattgaaaagtttcatataaaagtatggattttggccaggctcattcctctaattccgttactttaggaggctgaagtggaaggatcatttcaggccaggaattcaagatcagcctgggcaccatagcgaggtatagtctctacaagaataagaattagaataagtatagatttcttccttctctaggaagattggcatatctggcatcatcagggcctcttggaggccattggctggacctgagtaactgctgcccctggctgtgggatgtgctatcaggcccacttctgttaccatgccaggtcactcagtaattttacctatttggttctctaggcatgtatattagtttcctggggttgccataacaaattcccacaaactgagtggctgagagcaatagacgtttattctctcacagttctggaggccagaagtctgagatcaaggtgttagcagggccatatgcactcctgagggctcgggggaagacgaccccttccttgcttctttctagctttgtgttgtcgggggcatgcttgctgctccttggcttgtgga

SEQ ID NO: 48137 - DNA, 604 bp, Homo sapiens
ataaacagcaacaaaaccaagaaaaaaccccatttgtactaacattgaaaagtttcayataaaagtatggattttggccaggctcattcctctaattccgttactttaggaggctgaagtggaaggatcatttcaggccaggaattcaagatcagcctgggcaccatagcgaggtatagtctctacaagaataagaattagaataagtatagatttcttccttctctaggaagattggcatatctggcatcatcagggcctcttggaggccattggctggacctgagtaactgctgcccctggctgtgggatgtgctatcaggcccacttctgttaccatgccaggtcactcagtaattttacctatttggttctctaggcatgtatattagtttcctggggttgccataacaaattcccacaaactgagtggctgagagcaatagacgtttattctctcacagttctggaggccagaagtctgagatcaaggtgttagcagggccatatgcactcctgagggctcgggggaagacgaccccttccttgcttctttctagctttgtgttgtcgggggcatgcttgctgctccttggcttgtgga

SEQ ID NO: 48138 - DNA, 584 bp, Homo sapiens
caggtagaggggaagctgggtccaccctgcagtccagccacggtccctgggctcctcaccccatgcractctggtttctgaggagtctggtgtgtaggaggaccctggcttgctcatggggatgtgtggggttttgctccacgaaaccacagagcctcacagcattgtccaatactgtgggtagaagggtgcaaatgtttggtatggattttccacaagtgatattttagtcatgttctaaatcattcctatatggaatacacttttgggagtttttaagattccagatggatccttaaaccagagaatgtaattcactttagacttctctaaacaactctaaaaacagggggacaaaattctcctttgttttcaataattcactattcatgtctgcataaggcagtgacactgccagtttccaggacttgtttataacagacactctcatcgggaaatctcatgactcagaactgtggcaacttcactacaaatcacccttttgatccacagttgtgaattcttagttcctggtaaattttttgaattgcagataatttataacacccaaatctacaggccca

SEQ ID NO: 48139 - DNA, 584 bp, Homo sapiens
caggtagaggggaagctgggtccaccctgcagtccagccacggtccctgggctcctcaccccatgcgactctggtttctgaggagtctggtgtgtaggaggaccctggcttgctcatggggatgtgtggggttttgctccacgaaaccacagagcctcacagcattgtccaatactgtgggtagaagggtgcaaatgtttggtatggattttccacaagtgatattttagtcatgttctaaatcattcctatatggaatacacttttgggagtttttaagattccagatggatccttaaaccagagaatgtaattcactttagacttctctaaacaactctaaaaacagggggacaaaattctcctttgttttcaataattcactattcatgtctgcataaggcagtgacactgccagtttccaggacttgtttataacagacactctcatcrggaaatctcatgactcagaactgtggcaacttcactacaaatcacccttttgatccacagttgtgaattcttagttcctggtaaattttttgaattgcagataatttataacacccaaatctacaggccca

SEQ ID NO: 48140 - DNA, 584 bp, Homo sapiens
caggtagaggggaagctgggtccaccctgcagtccagccacggtccctgggctcctcaccccatgcgactctggtttctgaggagtctggtgtgtaggaggaccctggcttgctcatggggatgtgtggggttttgctccacgaaaccacagagcctcacagcattgtccaatactgtgggtagaagggtgcaaatgtttggtatggattttccacaagtgatattttagtcatgttctaaatcattcctatatggaatacacttttgggagtttttaagattccagatggatccttaaaccagagaatgtaattcactttagacttctctaaacaactctaaaaacagggggacaaaattctcctttgttttcaataattcactattcatgtctgcataaggcagtgacactgccagtttccaggacttgtttataacagacactctcatcgggaaatctcatgactcagaactgtggcaacttcastacaaatcacccttttgatccacagttgtgaattcttagttcctggtaaattttttgaattgcagataatttataacacccaaatctacaggccca

SEQ ID NO: 48141 - DNA, 509 bp, Homo sapiens
gcctgaggtctggctagcaggtggtccgacagcgcgcccataaatcaccccgggcaggcaggtggcctcgccgcaggtcaacagctgcacaggccgccttgctcctccctcacccatccgcgcccaaaccctgcccagtgcacctggctccctgaatctgcgccttgtctcccagcctcctaccctgaccaaatgtttacggacacttctgtggtcaaccaggaccagggatgattttccatggcacacacaggactgggtctgccctggctgaagtactacactgacttctgccagatgctggcagctgtggggcagcagggcgaggggaggactcccttagcccatcccgtgaagcccaggaaggcactcctctacccccacarggggtcagggcccagcttgaaacatctgctgtcccccaacatctgctgtcagactcgccaagaatctcttttctgggaccaagaagaatcttcccaaagaccagggaggtccttccaggcttg

SEQ ID NO: 48142 - DNA, 563 bp, Homo sapiens
cctggctcttgagggcagccagaagcttagcagggggacctgccaacaccaatcccttgtgctgtcggtccccctccggcaataggcacaatgttagaaaacacagtgcctgcccagtttcagccccttccccggacagtgatggcctgctccctggaataggcttggcggtctcctgcctgtacatgacaggcagcccgtgcgagcaccagccggccgctggcgtggggagggaaggaagtggggagkctggctccaataacacacactttccaggcacaaaagtgtggctattcaggcaaagatgctataagctccagcagctggggctgcgggccccaggctgccttcacaaatacactttcatgcttattagaaacactttctttcatgaccagggatttgttcattagtcgggctgggctactaacatggctttttacaagagagtcatggtcattgaatttggttttctagctctcctcaagccactgaataatggagatattaatgcaagaacaggtgggcccacctctcttaaagaaaacttctgagaacaggaa

SEQ ID NO: 48143 - DNA, 597 bp, Homo sapiens
catagtgataacaattatccaaagatctgctgacaacaaagtgacatactcagtgaggaggctgctgaaatattccaaatttgagataagggcctggcctacggtgaacagagaagatactttggcttattcttccaatcctaattggaaatttagtgtccgcractagtcttatcttctttgactaaagtgaactggattgacatagactccttttgaaagttgatattaactaatactggatctgtctcttaactgcttaaattctctctctttttttttttttttaatggagacggtgtctcgctctgtcacccaggctggggtgcagtggtgtaatcttggctcactgcaacctccgcctccccggttcaagcaattctcctacctcagcctcccgagtagctgggactacaggagcacgccgccacacccagctaattttttgtattttagtagagacagggtttcaccttgttgcccaggctggtctcaaactcttgagctcaggcaatccgctcgcttcggcctcctaaagtgctaggattacaggcgcgagccactgcgcccggcttaaattctcttcttatcacccac

SEQ ID NO: 48144 - DNA, 597 bp, Homo sapiens
catagtgataacaattatccaaagatctgctgacaacaaagtgacatactcagtgaggaggctgctgaaatattccaaatttgagataagggcctggcctacggtgaacagagaagatactttggcttattcttccaatcctaattggaaatttagtgtccgcaactagtcttatcttctttgactaaagtgaactggattgacatagactccttttgaaagttgatattaactaatactggatctgtctcttaactgcttaaattctctctctttttttttttttttaatggagacggtgtctcgctctgtcacccaggctggggtgcagtggtgtaatcttggctcactgcaacctccgcctccccggttcaagcaattctcctacctcagcctcccgagtagctgggactacaggagcacgccgccacacccagctaattttttgtattttagtagagacagggtttcaccttgttgcccaggctggtctcaaactcttgagctcaggcaatccgcycgcttcggcctcctaaagtgctaggattacaggcgcgagccactgcgcccggcttaaattctcttcttatcacccac

SEQ ID NO: 48145 - DNA, 522 bp, Homo sapiens
aagacaagactagaaatgyttatcacagcatttgaacataaaattttcctcccaacctacaaatggaataacagtagcactggaacacaagtacaatttgtaagaatgcatgattcttttacactgatgacacattcttcaatcaaaaatttaattacctcaaaagtagagatagatgtactttattttcctaatttttttctatacttttatttatcctaaatctttttttatttttaatgcctgtgggcacatagtaggtatatatctttatggggtacatgagatgctttgatataggcaggcaatgtgaaataatcacatcatggagaatgggatatccatcctttcaagcacttatcctttgggttacaaacaatccaagtacactcttttagttattttaaaatgtagaattaagttagtattgactgtagttgccctgttatcctatcaaatagtaggccttatttattctatttttttttgtacccattgatatggtttggatttgtgtcctca

SEQ ID NO: 48146 - DNA, 604 bp, Homo sapiens
tgcatgtaatcccagcactttgggaggcctagtcgggcggatcacctgagatcaggagttcgagaccagcctggacaagacggtgaaactccgtctctactgaaaatacaaaaattggccaggcgtggtggtgggtgcctgtaatcccagatattcaggaggctgaggcaggagaatcactggaacctgggaagaggaggttgcagtgagccgagatcacrccattgcactccagcctagatgacaagagtgagactccatctcccctaccccacacaaaaaatgttcatccaagatggagaacccctgcactgcctccctgacatagaccctaagcactttgagttcagggagtttgcttattcattttcataccccaagcacctagcagagtgcctgatacaggtaaggcactcagtatacatttgatgaataagtgactgactcactgaatgaatgaatgaatgaatatttcagcctctcatcaattcaaacctgacttaatcaactctgaagagaagagattacatgaaaacatgtaacgtcaggcagcaagcctatcgtgtctatcactgggtactgattattgtgtgctagctgctag

SEQ ID NO: 48147 - DNA, 546 bp, Homo sapiens
gagaaaaattgtgttccgtagtggtatttttccagtttgtcttttttaaacatgtttttgtggagtcatgagttgaaaaatttctttgggcaactgtagtttcttaggatctccacacaataactttctccccatcagtcttggggagttctaccaggtggagagggttcaggatttggggtaagcatgtcattagaactttccagttgcctaggattggcataacctagagtagaaggtcccagacgaggactgcatctagtaacataacgatctgggaggtttctaaatacaaaggcctaaactttatatccagtaattcatctttaakaggcctgggttggggtaggaagatgatagagaaggtggggggataggggaaacccaggaatccatgcaattttttaaaggtttccttcaaattctgatgcacaacgtgtttatgaattactgagtagagaaataaagccataggtaggggacaactctcattcagtcgctagggagtcctcttgttttcactcagctcctcatgcaaggaggggc

SEQ ID NO: 48148 - DNA, 1755 bp, Homo sapiens
tatattatttatttgtttgtctgtgttacattatttaatccccacaaaaacccaatgatgtatatgytttagtgtcataattatttcatacataagtatggaggcttacagaccttaaggcatttgcccaaggttacagtacgtggtagaaactagagttgactctctgtgattcagctcttactcagtgtgactggtctttcatgtagtcatttattgccttcctagaacatacattcacagggtaacaggttttttgtgggttttttttcacttacttgacccccctatattttctatgactaggtcataaaaagtccccttgtgaaaacaattaaaggttaaatcagtggatgtatatggccctttggattctaatagaaagggctagatggtaaaatcttattaaatcttatgtcctttccctttgcaccattttccaaaaaggataaaacagagcaagcatgctttacaaagagaatgaactccttcaccaagccaactatgtgcaaatcttctcaagtatttgagaagcatcaattcttagtgaactaactaaaatgtatctcttcattaaggaagattttatcacaaactttactatgtaataattatttcatgcagctttagtcatagttctgcttttatataaaagtaattcttttgttatataaaaatttactttggaatactttgcagcctgaactttccaccagatcctatcaatctaaataagtgatggttgactgtaactggggaatacaaagaaaacaatttggcataaattaccagtaaatattgttgatcaaccagaaattaagatagtaatgttctacttattcatgtaacattcaaacaaaattcaaaagattcctggctatcactgaagaagttaaatattgttttccaaaattacctgtctagatttctccagcctggatcaccttttctaacagcaatatgaagaaatgacacggagagtgcaagattgttccagaggcttctttcttcaaaagagacaaaacaatccctccaaatgttttgtcattttcccataaatagctataaatcctatttttgtttccttaactctcttttggacaagcagcaaaagtcatcaaagaacagattaagttctacaaactgggtggttgctatttttcattttatctactattgaatatttcacttggatattaatattcatactcatgatcttcttgcttgtggtaatggctagtataggggagaaggaaaaaaataaaggacataattctagcaaatattcactgactacctctaatgtgccaggtattaatctaaggactttatatgcaccaatccacagaatcctcacattaacctttcaggtagatactattattgtctccattttacaagcaaggaaatggcaaaagcaaggggacctcaggcctagagagctgacctccagagcactgtacctaacccctatattaatgagttctgagtttcatattctgattatattttagataatttgaaccaactctattcaaaaacaatggtttgtgtgcaaacatacaggaaatcattcccacactgcaattacttatttagaaataaaaataacctaaccctatatggaaaattatctctttgttggaattcctatcaaatttattaagcctcagtaaatatcaaaacagcaatattaaaattgtctttgaattcaatgtcaattctttaattttcttgttaaaactaaaaacatgc

SEQ ID NO: 48149 - DNA, 1755 bp, Homo sapiens
tatattatttatttgtttgtctgtgttacattatttaatccccacaaaaacccaatgatgtatatgttttagtgtcataattatttcatacataagtatggaggcttacagaccttaaggcatttgcccaaggttacagtacgtggtagaaactagagttgactctctgtgattcagctcttactcagtgtgactggtctttcatgtagtcatttattgccttcctagaacatacattcacagggtaacaggttttttgtggkttttttttcacttacttgacccccctatattttctatgactaggtcataaaaagtccccttgtgaaaacaattaaaggttaaatcagtggatgtatatggccctttggattctaatagaaagggctagatggtaaaatcttattaaatcttatgtcctttccctttgcaccattttccaaaaaggataaaacagagcaagcatgctttacaaagagaatgaactccttcaccaagccaactatgtgcaaatcttctcaagtatttgagaagcatcaattcttagtgaactaactaaaatgtatctcttcattaaggaagattttatcacaaactttactatgtaataattatttcatgcagctttagtcatagttctgcttttatataaaagtaattcttttgttatataaaaatttactttggaatactttgcagcctgaactttccaccagatcctatcaatctaaataagtgatggttgactgtaactggggaatacaaagaaaacaatttggcataaattaccagtaaatattgttgatcaaccagaaattaagatagtaatgttctacttattcatgtaacattcaaacaaaattcaaaagattcctggctatcactgaagaagttaaatattgttttccaaaattacctgtctagatttctccagcctggatcaccttttctaacagcaatatgaagaaatgacacggagagtgcaagattgttccagaggcttctttcttcaaaagagacaaaacaatccctccaaatgttttgtcattttcccataaatagctataaatcctatttttgtttccttaactctcttttggacaagcagcaaaagtcatcaaagaacagattaagttctacaaactgggtggttgctatttttcattttatctactattgaatatttcacttggatattaatattcatactcatgatcttcttgcttgtggtaatggctagtataggggagaaggaaaaaaataaaggacataattctagcaaatattcactgactacctctaatgtgccaggtattaatctaaggactttatatgcaccaatccacagaatcctcacattaacctttcaggtagatactattattgtctccattttacaagcaaggaaatggcaaaagcaaggggacctcaggcctagagagctgacctccagagcactgtacctaacccctatattaatgagttctgagtttcatattctgattatattttagataatttgaaccaactctattcaaaaacaatggtttgtgtgcaaacatacaggaaatcattcccacactgcaattacttatttagaaataaaaataacctaaccctatatggaaaattatctctttgttggaattcctatcaaatttattaagcctcagtaaatatcaaaacagcaatattaaaattgtctttgaattcaatgtcaattctttaattttcttgttaaaactaaaaacatgc

SEQ ID NO: 48150 - DNA, 623 bp, Homo sapiens
tgtgtgtgttggagagggcaggtaataaataatacatatttaacgcatcaggtggtttgatgaggaaacatttgggcaggttccttttttttttttttttgrgacagagtcttgctctgtcgcccaggctggagttcagtggcgtgatctcagctcattgcaacctccgcctcccaggttcaagtgattctcctgtctcagcctcctgagtagctgggattacaggtgcctgccatcatgcccagctaatttttgtgtttttagtagagacagggtttcatcatgttggacaggctggtttcgaactcctggcctcaagtgatctgcctgcctcagcttcccaaagtgctgggattacaggcatgggccaccacgcccagccactgggcagattcgtgaataaaggagccatgtagaaaatggggagatgggcattcctggcacagggaacaacagcaagtgcaaaggctatgttaaaaccacaaaaaataaaaccaatggagatgccaattataaaggtcaagactggtcataagaacaaaggtggaggactcctactttccatttttgaaacttactacaaagctacagtaatcaagacagtgtggtactggcataagggc

SEQ ID NO: 48151 - DNA, 623 bp, Homo sapiens
tgtgtgtgttggagagggcaggtaataaataatacatatttaacgcatcaggtggtttgatgaggaaacatttgggcaggttccttttttttttttttttgggacagagtcttgctctgtcgcccaggctggagttcagtggcgtgatctcagctcattgcaacctccgcytcccaggttcaagtgattctcctgtctcagcctcctgagtagctgggattacaggtgcctgccatcatgcccagctaatttttgtgtttttagtagagacagggtttcatcatgttggacaggctggtttcgaactcctggcctcaagtgatctgcctgcctcagcttcccaaagtgctgggattacaggcatgggccaccacgcccagccactgggcagattcgtgaataaaggagccatgtagaaaatggggagatgggcattcctggcacagggaacaacagcaagtgcaaaggctatgttaaaaccacaaaaaataaaaccaatggagatgccaattataaaggtcaagactggtcataagaacaaaggtggaggactcctactttccatttttgaaacttactacaaagctacagtaatcaagacagtgtggtactggcataagggc

SEQ ID NO: 48152 - DNA, 623 bp, Homo sapiens
tgtgtgtgttggagagggcaggtaataaataatacatatttaacgcatcaggtggtttgatgaggaaacatttgggcaggttccttttttttttttttttgggacagagtcttgctctgtcgcccaggctggagttcagtggcgtgatctcagctcattgcaacctccgcctcccaggttcaagtgattctcctgtctcagcctcctgagtagctgggattacaggtgcctgccatcatgcccagctaatttttgtgtttttagtagagacagggtttcatcatgttggacaggctggtttcgaactcctggcctcaagtgatctgcctgcctcagcttcccaaagtgctgggattacaggcrtgggccaccacgcccagccactgggcagattcgtgaataaaggagccatgtagaaaatggggagatgggcattcctggcacagggaacaacagcaagtgcaaaggctatgttaaaaccacaaaaaataaaaccaatggagatgccaattataaaggtcaagactggtcataagaacaaaggtggaggactcctactttccatttttgaaacttactacaaagctacagtaatcaagacagtgtggtactggcataagggc

SEQ ID NO: 48153 - DNA, 620 bp, Homo sapiens
aaacgtgcagcacaatttggaagaaaacatttccatctgttaataaagagcaacggcctctggtcataagtgacacatgaccctttgcctgagtctttttaaatttttccatatgttccatattttctacaccaaatgtaagctactttcataatcacaaaaacttaatggaaagaggaggaggaggacgggggtggggagtagtagccatgggttcgagcccttcctctccgcatgacttggataacacggtatattcacacagctatttccccatctatgaacttctgaggtgcttttattagttgatgtctgggacccctaggagctctctttatacctcatgatatcaaatgcccacctttccagctcctcttggcctcctgcccttcctggagggagatgcgctccctggagctgctgactaggtggaagcagactggctccttcagtgggtaggccagcctgcctgtctccctagcccagtcccaccgtgctggcctcagtggtggaggcaggcrtggagccttggaggaaccactcctccccagccgccaccaacatttgtggcaccgagaagcacccgtgctattccggacagggatggggttggacaccca

SEQ ID NO: 48154 - DNA, 620 bp, Homo sapiens
aaacgtgcagcacaatttggaagaaaacatttccatctgttaataaagagcaacggcctctggtcataagtgacacatgaccctttgcctgagtctttttaaatttttccatatgttccatattttctacaccaaatgtaagctactttcataatcacaaaaacttaatggaaagaggaggaggaggacgggggtggggagtagtagccatgggttcgagcccttcctctccgcatgacttggataacacggtatattcacacagctatttccccatctatgaacttctgaggtgcttttattagttgatgtctgggacccctaggagctctctttatacctcatgatatcaaatgcccacctttccagctcctcttggcctcctgcccttcctggagggagatgcgctccctggagctgctgactaggtggaagcagactggctccttcagtgggtaggccagcctgcctgtctccctagcccagtcccaccgtgctggcctcagtggtggaggcaggcatggagccttggaggaaccactcctccccagccgccaccaacatttgtggcacygagaagcacccgtgctattccggacagggatggggttggacaccca

SEQ ID NO: 48155 - DNA, 544 bp, Homo sapiens
atgacaaaggaccctaactaagcacaagtcgatgtttaaataaatacacaagccagtgtggtgactcatgtctgtaatcccagcactttgggaggccgaggcaggtggatcacctgaggtgaggaggttgagaccagcctggccaatatggtgaaaccccatctctactaaaaatacaaaaattagcctggcatggtggtgcacacctgtaatcccagcaactcgggaggctgaggcaggagaatcacttgaacccaggaggcggaggttgcagtgagccaagatcacgccactgcactccagcccggacaacaagagcaaaactctgtctcaaaaataaataaatacacagagamacacagaaaacttacttcaaagtgtagtcatcaaaaatgcaaattgcactactctagaaaattactcaggaaagctcagcattgtgcagaaccagcaggaagaggccatttcccagctccgtgatgcaaacaaggagcttttcctatgctgtagtgcatcagcataggttcattgagattgcaactgg

SEQ ID NO: 48156 - DNA, 626 bp, Homo sapiens
ttgtaatatcctttataatcaaccaatacacaaaagtgttttcatgagttctgtgagcagctctagcaaatgaatcaaacccaaggaggaagttgtgggaaccctgatttatagccagttggtcagaagtttgtggtggcccagacttgcaactgcggtctaaagtgggggactgtattgtgagactaagccttcatcatatagagagcgtcacaattgatttaaattaaaagacatctggctggtatccactgcagaattgattggttggtgtgtggggaaacatgcctcacatatctggtctggtatcgtctgataccagatatgtgaccrcatgagagtagagagtagaaaaaacacttttagggtatttttatagctctaacagcctaatctatttcctctctctacaggaggtgcctgggaaagacagaaaaagatgatttgttcaaaaactcttgcaaaattgctaatggcaatacagtaacaatatgtggtagtaatagaatccttacatatgaaatgcttctagccggttgtacctggtctacacaggctaatgaaatgttaataggaaataatccttaacaaaagggttacctttgtgcaagtaatgtcctgatgca

SEQ ID NO: 48157 - DNA, 409 bp, Homo sapiens
taaagacatattcaaaaaattactagtgaaacatacctaaatcattttatataatctagtaagaacatagtgattaaaaatatttcatgtaatttatttcaactattaatttaaaacatcgatattaattctatgttatgcaaacaatttattttttaaaaccatgtgattgtggtttttaaaaaaggtcctaaattacataggagtaaaataaattatttttattttatatatatatatatatatwttttttttttaagagatttggtcttgctctgtcacccaggctggagtgcagtggcacagtcgtggccactagaacttgtgggctcaagggatgctgccacttgagcctaccaagtggctggaactacaggcaagcaccatcatgcccagctacttaaaacaa

SEQ ID NO: 48158 - DNA, 533 bp, Homo sapiens
gaaatgaggtgagtcatgtttggttgtgcttgagtctgctaacagaccatcatgtccatgtccaaatttgtaccctgaaccgcacaacagaagtttatgcacttgcttgcttgcttggcgacaatgaaaatagttttgtttaaacacttaactttacttaaagatacctaagaggtgctgaaattcatattccagctacttcaggggtgctcagaagctattctcaagccttgtttcttggcgaaatatcccctgctcatgaattttaacacggcactcccctcctggtccagaatgagtcaacactcaacasatacgagatgtttcaaacacctttaagttcattttccatcactgccaaattccagcaattaacacaaagcacctcacccttaagagatgcccatcatttataaagttttgggattctgaatgcatccccttccattctcccagatctggtgataactcaatctgttttccagtagccttgcgacttttctttaaagaagagtttagtaaccagcgtaaaa

SEQ ID NO: 48159 - DNA, 622 bp, Homo sapiens
accagtgcacaaaattgtatatacattacagttacagccatgtaaaaggctttcctctggtaggaaagaaatcctattggagaacataccaaaccgttaacaggaatcattgtgtttagatggtagaatcataggtaatttttttcccttctttccttttgtaagttttctaaagcttctcccatgcaagtactaactaggcctgaccgtgcttagcttctgagatcagatgagatcagacatattcaaggtagtatggctgtaggctaatttttcttttcttttctcttttcttttttttttttttttttgagatggagtcttgctcttgttgcccaggctggagtgcagtggcatcatcttggcttactgcaacctccaccttcctgggttcaagcaattctcctggcycagcctcctgagtagctgagattacaggtgcccaccaccacaactggctaatttttttttgtatttttagtagagatgaggtttcaccatattgtccaggctggtctcaaactcctgacctcatgatctgcctgccttggcctcccaaagtgctgggattacaggcctgagccactgcacctggccaactaattttctttaataaacatac

SEQ ID NO: 48160 - DNA, 537 bp, Homo sapiens
acacacacacacacacacacacataaatatttggagacagggtctggctctgccacccaggctggagtgcagtggcactatctcaggtcactgcaacttctgcctcccaggctcaagcaatcctcccacctcaacctctggagtagctggcactacaggcatgcgccaccatgcgtggctaatttttctattttttgtggagacgggatttcaccatgttgcccaggctggtctcgaactcctgagctcaagyaacccacctgcctctgcctcccaaagtgctgggattacaggcatgagccaccacacctggacttatttttattaatatctttttggtaacggtaaaagaatcctcctttccaaaggtatccacagtaggtggctaaagtgtagtggttcagcaaacatgcttcagaaacaggggtctggctcctgctccatcccttagtaggcatgtaaatttggataaattacttaacttccctgaatctcacttgcttcatctgtaaaataggcaaaagaatatttcctcat

SEQ ID NO: 48161 - DNA, 581 bp, Homo sapiens
taccccttttgactacatacccaggtaaccactgatctgccttccgtctctatatatttgcctttgggggacattttatatgaacgcaatcatgcaatagttccyattttccacatgcctttttaatttagcctgtatctgaggctcatcattttcatggcatgtattagttgttctgtcattgccaaataatctctcattgtaaaattatgctcgatttgtttatctagttaaccactactgtacatttgtttccagtttttggctattatgaataatgctgctagaaacattaatgtctttttgtgaaaaagtactttcgtttcccttctagacacctagaagtgaaatgactgggtcatattgatacggcagcagcaggcagtcctgagcggccgctgccatcgcgccggctgcagcggaaaggtacaagcggtggcggcaggagccgctgtgggagcagcagtggcggcagtgggagccctgtgccacgcgtcccctgtgcgccgtgtccccaaggcagctgactacacctcccccaccctcctgcagcagggtggatcccacctagcgggactccc

SEQ ID NO: 48162 - DNA, 576 bp, Homo sapiens
cagctccttgagtcccagcaagcttaacaccccctaaaatcctgaaagctttcctacacaatcctaagccccgccttctacctccaaaatacacctcgagttgacccacttctagccatccccatggccacttctccaatgtaaggcagcagcaagcctcgccttgatcactgcagaccccttctaactactctctccaatctctcatcaccacasctgagtgccagatgggctcatctagccaaatggaatcatgccactccactgcttaaagccctttcatcctttacattctacttagcatgtgatcccacatcttaaatctgcacccccgtccacctcttctctcatagcccctcagtccttggcactagccacatcagccttcctcccatttctgctacatgttatgcccctgcttgcccagggcacccacacatgctggtccctctacctggaatgttctttcccaccacccaaatcctatacctgctccttctcatccttcagatttgagctcaaaggtgatttccccatatagacctttcttagcccccaacaccccaagtaggtttg

SEQ ID NO: 48163 - DNA, 784 bp, Homo sapiens
gtctgcgcagaaaccactctggaaaacttctgtactcttagtctctagaggcatttccaatccgcctccccaaatccaggtaagagcctcgttacttcctcctggactggggcaggagctcctgattgcgatgcaggcgygctctgcctcctttcatttccgtcctgcagggaatacagcaggattttccaacactcgaccccagcccgatgcttccctgcttgaggccttctgggcaccttgctgcttacacttttaagcccaggctcctaagcctgagctccagaacgcctccccatctgtgccatctttgcaggtccttccccatgcacccagccagctttctcttctctgcgtttctctgcctatctgtcttctcctacctttcgctgtcctgtctaaatcccccttcctccaggaagcctttcatgatcctgaggagggctgtcagatatagcaggtaagaaatacagaccatcagccgggtgcggtggctcacgcttgtaatcccagcactttgggaggctgaggcgggcagatcacaaggtcaggagtttgagaccagcctgaccaacatggtgaaaccccatctctactaaaaatacaaaaaatgagcctggcatggtggcgcacgcctgtaatcccagctactcaggaggctgaggcaggagaatcacctggacccgggaggcggaggttgcagtgagctgagatcacgccattgtactagagcctgggcaacagagtgagactccatctcaaaaaaaaaaaaatagagagagag

SEQ ID NO: 48164 - DNA, 516 bp, Homo sapiens
cttttttcactgtcgtcatgtatgattttagtggacaatgagagatgatccatcagaggctgtcagyaaagtgcctttttgactggagaattacacatttataatttagtatgcaacatttggccttcagttttgaggctctacccaaggtctcagactttccgggcctaaaaggaacatggtccttcctttgctcaccccaccaacctctgctaattgttactctgttgcatgcatctaggcttcctaatgaaggtctgctgtgtggacagcactgagcagtctggttctgtacttttcccagttctgaagggatcctggaatgaggcctgttattgtttgtcagtagaccaattactggtggctttgaagatctccttcatgcacgtttcctggttctgtcactgtttctactacattcttggtggagtcaagtgctggagtcctgtgctgagtccatagcaggaatagggtcacagaatttcactccatgtcctaaactactagggatcaaag

SEQ ID NO: 48165 - DNA, 516 bp, Homo sapiens
cttttttcactgtcgtcatgtatgattttagtggacaatgagagatgatccatcagaggctgtcagcaaagtgcctttttgactggagaattacacatttataatttagtatgcaacatttggccttcagttttgaggctctacccaaggtctcagactttccgggcctaaaaggaacatggtccttcctttgctcaccccacsaacctctgctaattgttactctgttgcatgcatctaggcttcctaatgaaggtctgctgtgtggacagcactgagcagtctggttctgtacttttcccagttctgaagggatcctggaatgaggcctgttattgtttgtcagtagaccaattactggtggctttgaagatctccttcatgcacgtttcctggttctgtcactgtttctactacattcttggtggagtcaagtgctggagtcctgtgctgagtccatagcaggaatagggtcacagaatttcactccatgtcctaaactactagggatcaaag

SEQ ID NO: 48166 - DNA, 602 bp, Homo sapiens
gcgcccggcctgtgtacacataatttaattttcacaacaatgctataagatggttctattactgggttggagtatacttcttcaaatgaaattctgtgtcaaaactgacctgtgaaagacctcaggtgtcttagaattgaccgtggttaggctgggcgcggtgactcatgcctgtaataccagcactttgggagggtgaggcaggcggatcacgaggtcaggagttagaaaccagcctggccaatgtggtgaaaccctgtctctagaaaaaatacaaaaattagccgggtgtggtggcacatgcctgtactcccagctactcaggaggctgaggcagaagaatcgcttgaacccaggaggtggaggttgcagtgagccgagatcgtgccactgcaccccagcctaggcgacagagcaagattccatctcaacgacaaaaaaaagaaaaaaaagaatyaaccatggtttatccctctggaggacagaagtatgaggcagaagtcattgaaagaattttcatgcctctcaacaaaagcagatttggactttcgagagttgactctggctgcaatataggagatgaacagaagaagaggagaatg

SEQ ID NO: 48167 - DNA, 1602 bp, Homo sapiens
agaaccacacacattggcctattgccgtaagtttgtcagcacgttgtctcagaaaaaaaaaaaaatcctcatcctaaagtgttcttcaaaggctagcgagattgtttaataatacggctattcttattttatagatggccaagctaaagcacatcattttcttttccttcagtgccagcatgagcagggcggggggaccaacctcagatttaagaaagacatgtggctgatttttagggttgtttttagaaacattagatttcttctctaataatgaaatatacttttgaaggactctgacaatgctggaagctcttttaagaaaaatgtcattcttatctgaaaatctttttttttcttctctctctcatgctacattacagctgatgaagttaaaaagcctgggcataagaaaaggggagccctgggtgtgactgccctggaaaaagaggtagagagtgcagtgggttcaagtatgtttgggtatgtgcagtcagtctttgtgtctttctcattcaagtaaattccatagcaattaaagtgaaaataatcatctttcatttgtgagtagagcatccatagaaagcaacatatatcttggtctagaacttaaattccaaaagaatgtgttatatttttcattttcccgtttttgttgcacagggacgagtttcctgatgcttccttgccataggccctgggctctgtgtgtagtgttcttcccaaaccaaaaattaaaaataggaaaatcagaatctataccaagaactttgtctaggaggcttgtctgcagtaggtttcttcagtgcctatgcctcctgctggattgtgtttgattaatccatttcttttaacttgtacaaggtccccattgttagagccacaagtcatttggccactgarggtaaaagatggttaggagtgggatttgttccacttctttgcagcgattaaacagtcagtttgaactggggaaagtatttgacctttagtctgtcctaaaagaatgtcatcaggctgtttatacattaaaaggctctcataagatatgtactcccagattcataattttggaacttctctcctatggtacacacccttgtatgtatgcacacctggctctcactgagtcacttatgggaaactgaagcaagtttttctattaataggggaaaaaagacctcataaaagagtcaaagtaaatgagacttagagaaatgtagaagcatgactatgcatcactgggcctttgcttagtttttattcatcagccatggagaagaaaggcatgactctttcctgcctcccacacccaccggacttgtaaagctcgacttcgatgatgcattataaagtggtgcacaggattggtttttaatgagatttttgccattggagcaaagcaagactgtttccctgccagctgctttattcaagtcatgaggcattttgttgtctcctcctgtacttgtggtacatgggccctccattttctagcccagttcttgttagatacctttgcacattcatttgtatgtatggcagaactgatgatatggcctttctttcacccccaactactaactgtccatgccattaaag

SEQ ID NO: 48168 - DNA, 1077 bp, Homo sapiens
aggaccacatgacatagtgcgtgggaagaccctgtctactgaatggccagggagggcctctctcaggggtacccttgaggctgagatctgaatgaactactctcgtgaagatcagggtaaagagcattccaggcagagggaacagataatacaaaggacttagggtaagaacgaactgacttttagaataaacaccctggttagctaaagccaaggcattaaaaggacacaatgaagaaaatgcctctaagggagatagaaccgaagggagatcatagctggttgtggagccaaaggtaaattattctttaagatgtactagatacttattggcagctgctaatagcaaaataaaaaaggtcctgttgttcacaactgaggcacaaaagtacttaggaatgtagggagcagacaccccctccacatttcacttggagccatgcggtctgtgtcaagatggcctgtgtgaagagccaccagttatagttcatgtgggtttccattattctttgggccttcactttgcccaaggcacacagttaatataaccacaagaatgtgaacacttttatttgttctgaaatatgcttttaacctttacagtgggaaaggcccttaatttatctattccttattattttccagccctcatattttctatttcctttctgtgctcctgaaaaacaagatgccatgtctaaaatcctgtgtgcctttgkgcagggcaaagccatgtcctcgtgcacagtcatggggtatggccgagggttatgtaacaagagctgttcctagtgcagttggctcctgcaggagaccatgatgtggcaactacaaagctcatcgcaggtaggctgagcatgaacttgtcaagcaagagccgtggctcggggcagcctcttggtcagctttgttctgactcagaattattcccttgaaatgcttggtttgggttcaaaagacccaagagttctgtttcatagaggggtgctcctgccagagtcatgatgtactagagatccatactttttttctctccccagtgggtgggtagatattggaaactagatctgttctgat

SEQ ID NO: 48169 - DNA, 334 bp, Homo sapiens
acaaaagaaaacatccaaatagcaaaaaatgtatatagcacatacatatatgtaggactatacatacacttacttatgtatttatatacacacaccattagtcatcagagaaatgcaaattaaaactacaataagatactactggggtcctggtaaygttctattttatgacctgggtgatggtttcacgggtacgtgtcactagaaaaaactgagttgtacaattaaggatgtatatactcctttctacatattatactttaataaagatgtttactaaaaaaaaaaaaaaaagggccgggcgtggtggcttatgcctgtaatcccagcactt

SEQ ID NO: 48170 - DNA, 625 bp, Homo sapiens
ttatttatgtcttgtttctttcagaaatgttctgtagtttccattgcacatgtcctttaattccttggttaaattaactcctaagtatttaaatgaattcttacatattttactactttygatactattataaatggattttttttgtaatttctttttcaaaatgtttattgttagtgtatagaaatgcagctgattagctgggtgtggtggcttatgcctgtcattccagcgttttgggaggctgaggcaggaggatcacttaagtccaggagtcagaggctgcagtgagctgtaatcatgaataaaactgtatctccaaaaaaaaaaaaataacaataatttaaaaaggaagaaatgcaactgatttagtatgttgattttgttgcttttttacttttctgatttcatttatttgttataacagctatttaacatggaatcttcagggttttctgcatggttttctatcatctgcaaacagaggtaattttagtttgttctttacaatttggatgccattagattggggtttgtttcattgtacctgaaacgtctttagctgaaacattcttttgccttttagaaaaagctgcctacgtttcactgatacctacatttttaa

SEQ ID NO: 48171 - DNA, 523 bp, Homo sapiens
tggaaccatgccatcggtaggtgcatctttgaaaggcgactgaaatgatttggtggcttggtttgaatacgactctcgaaattttaccacgtatgaacatattctatttctaaaaacagcctcaaatcaacttggcttctcaaatgttaaataattgttgaatcttttaaattgctatctagccatattgcaattagagcaaacataggatgcatcagctctgccaactcatgagtggtttctatgattgcatttctccttaaatttgtggatgttgtatcagcattcagactgtgtacrtcagtcatttaaatgcctctatgtgcgtgtatatgaatgttcataagaactaccatttactgagctgctacatctcttaaacctgcagtgttaggctcttacactatgctaagggattcatatatatatataattgctccatgtatattcacatcatattattcatatatatcgtttatatatatgaatatatacatatatagggcttcatatataggaatac

SEQ ID NO: 48172 - DNA, 609 bp, Homo sapiens
tgagggtttaaaattcatcacacgacggaaatgtagctgaacgtctccgtttccttctttggcaacttctgtattctgcacgtgaggctttctggggccagcaattgagcatacgctgcatgaggatctttccatctcacattatggctgggaatcttactgtttcatctgatamcctgttcagatttcaagagagctgtagccttatcctggttttatagaggtgaaactttcaagagatttactgactttcctggaatagttgcttttccggaaacctgatactttcataagccattgtgattagaatgactgatacaggcttagctttgtgtgagaaccagtcacctttctcctaggccatgagaagtgctgttcatgttactttagttctatgggatgtttgcatttttaacacattctaccacagtacacttagaatgattgcccttgatagttttttttttttttaattctgtgtatgtgtgtataaaatgccaattaagaacactggtttcgggccaggcacggtggctcacgcctgtaatcccagcactttggaaggttgaagtgggcagatcacgaggtcaggagatcgagaccatcctg

SEQ ID NO: 48173 - DNA, 354 bp, Homo sapiens
cccagctaaaatttttgtatttttagtagagacggggttcaccatgttggccaggctggtctcaaactcctgacctcaggtgatccgcccgcctcggcctcccaaagtgctaggattacaggcatgagccaccgtgcccagccagactgacgtatttcaacacgttggccagaatgcataaatccaaggcatcattcagggtttagttaagaaaccccgatgtcctaatagggcaattggaacgatcaccttcactagacagcctggagtcaagggagggacacaggagaccattayctgcaagtcctaagggacagaagggacatttatcatctcccagcactgccttcatca

SEQ ID NO: 48174 - DNA, 599 bp, Homo sapiens
gccatacatagctccaagaagaattgctgagtagaaagatacctgctagaggagtaagttgctttatgatcaactcatgtattcattttttcatccaataatttctattgagtatctgttgtgcattaatcactggggtaagtcagaggtagctctaaccttcataaagcttaattgtacagagagagagagagatactaattgtacaaagagaattaaatcgctattaaaaaattatacttaaataaaaagtttcctttaaatactgggtatacagagttaagatacattcccatttaaaaaamagtattcagtttttcagaggagacagcaatgttctcaagcagtgcagtgcaccatagtacgtgcaacagcagaagagtgcataaatcttccctggagcttcaaggaaaccatgcttgtctcagctttggttcattgaagaattgccttttaaactggagaggaaaaaaaatagatgccttgaggcaaatggggaggtggagaggggaaaggagtcttttcaggcagacaactacagatgtaagggcaggaaattgagttctatatgaatttaatgggaaaaaaaaaggaactta

SEQ ID NO: 48175 - DNA, 561 bp, Homo sapiens
tgcacctttgtaaaactgaaaacttgtaagtcaaactattgttaaatcaggtttctctgtatataaaacattataaaatattacttattaaaattgtaacatyttaaaatatgtggtgttttttcaaattagtatgaaaatgatgtagcatcttcaaggctcatttaggaaagaccatgaagaataaactaattatccacattctttagccataatggaaagtattaacactctaaatctttagatattttacaaagagaatatacgattataaaatggctataataaaatggtaccactatactttagtggtggtttaaatttatacactctataatatttaattaaaatcccttaattgcacatgtttcatataagaatgtatcaaataaaaatcatgagatgtccccagggatatctgattgaaagttttcattagagtgctatataaataagtaaatattgcaaaccaactaaaatgatgatagatgaaagaaggtctacacattggaatacaaggcaatgaaattttgatgtcattgatatcaatgatgatataat

SEQ ID NO: 48176 - DNA, 690 bp, Homo sapiens
aataatctatgaatccattaacccattaccccactaatccattaatccatgaatggattaatccattcatcagggcagagccctcctgacccagtcttctcttaaaggccggacctttcaatactgccacactggggattaaatttcaacatgagtttctgaagggacagacattcaaaccatagcacaggaggataatcaagagctcattatgtccagtggtctactctgctatgctgaaatggctgggtggatagagtaatgtcaacatccttgtcctttggaatccatggttcagctagttagaatcaactttaggggaaatggaagattgaagaactgtaggaaattgtagccttggaagtgttcatagaggaattttcagcatggacagaagaggaagagatgaaggggtgtgtgggatttgggggtggtggataaggaagtggcattgttacatcttgctacagattttgatctctcatactgaccctrtgtgctttcacttcccatcagctgtcacaggacacagcaattaaggacccaactccttgtttccctgaattgtgcaataacctcattgttcacaactgctggttatctggttttgtttaggatagcaatgctttcagttgagatagttgcctcccagcctctcttcgtgctatgatggtcgaggttacacagccc

SEQ ID NO: 48177 - DNA, 650 bp, Homo sapiens
tgcatacaacaagatcaagatgttcctctttcttgctctctggacttttatgtcttgataccttcagcagtcaggtaagaggtttcaggagagatgctgggaggagcaacagaacaaaaccttcatagctactttaaggatgtggtaccayatattttaccaaatgagtttgtggtaccatttattttgtctttactgttgtatctgtaattacatgaatgtttcctttacttctccatgtaaataaccatactagtaaatttataggaggccaaaatccaagggtagagtgcactgcaattgccatttgtctcgtgctaattcttcaccaaactcctgtttctgttttctacatggcagtagttcttcatattctggattatagtttctataaactgcccaagtactaatagccttcatttttattctttatgctccttagtaaatctttgaataccttgcagtctgtgtgtatgtgtggtagtagttgtggggctgggactgcatgtaattctatcggattatccactctaccttccttacaatgtttctgattcttctgatagaatggttttcttctattaaatcacagttttagtgaatctgaaagcaaaagttaccttcctttttcccagcaaaattgtattcta

SEQ ID NO: 48178 - DNA, 300 bp, Homo sapiens
taatcccaaatttgttattcattgttacacagaactatagttgtcccttaaaatccattctcccttctttgggcacagagctagactacatttcccagcctcccttatattgggtatggctacatractaggttcttgccaacagaagaggagtagaaggaatatatgatacttccacacctagtccatggaaaccctccacaagcatctctccttgctttgcccctttctgtggactatatgcagattgggatgaggtcctgcaggatggtgaaggcacatgatggaagaattctgggt

SEQ ID NO: 48179 - DNA, 555 bp, Homo sapiens
ttaagaagactcacaaaaatagaacacaagatagaaggaaatgaaaaagctacaagagaaaaaatagggacacaaggaaaatgcaggtaaaaagagatcacctgaaacgcaggaggagttaagctaggtgtgcggccaggtccaccacacagaggaggtagacctcagatttggstctgagcttcctagtggccaattcaacaaggaaaagagaatcagaaagggatttatttggtgtctataagataaaagccacaagttgctaaggagcagcacatcttttctctatagtgagttttgagagaaatgggtactgggggtccccttggaaagaaacaacaaggacaaatgacctccctagggtcttggcaacttggtggcagtggaggagccaccttgggcctgggctcgggtgggaaagcaaggagcaaatcagcaggctccgctccaggcccccccactcctccctcaccttgagcaactgctgggggtggcgggagtgcacctgtctgtggcagctggtgatgctcaccagacgtcccattgctcccctca

SEQ ID NO: 48180 - DNA, 555 bp, Homo sapiens
ttaagaagactcacaaaaatagaacacaagatagaaggaaatgaaaaagctacaagagaaaaaatagggacacaaggaaaatgcaggtaaaaagagatcacctgaaacgcaggaggagttaagctaggtgtgcggccaggtccaccacacagaggaggtagacctcagatttggctctgagcttcctagtggccaattcaacaaggaaaagagaatcagaaagggatttatttggtgtctataagataaaagccacaagttgctaaggagcagcacatcttttctctatagtgagttttgagagaaatgggtactgggggtccccttggaaagaaacaacaaggacaaatgacctccctagrgtcttggcaacttggtggcagtggaggagccaccttgggcctgggctcgggtgggaaagcaaggagcaaatcagcaggctccgctccaggcccccccactcctccctcaccttgagcaactgctgggggtggcgggagtgcacctgtctgtggcagctggtgatgctcaccagacgtcccattgctcccctca

SEQ ID NO: 48181 - DNA, 587 bp, Homo sapiens
agatactcacaggagcccaaggctcatcctggccctcagagaaccacagtagcaagatcagttccagactctaccagctagtgggagctctgtctattgttatattatgggtcttgaccacagaggggtcaggataaggctgaggcaagaccaagaagccaggaccttacaggcatcaacactggcaaagacacctgaaaacacacatacatgcacacacacacacacaccaccctctggaagtatatactccaaaatattaacagtggttaatgatttggtggtagaattatgaatgggttctttgctgcttttctaaaattttatttccatgtccrtgtctgcttgattattttttaccatgaaaataaaatgactataagaacttccataataagaaaaaaggttattaaattatgcaaaatatatgattcactctaattgaatttatacttggagcaggtttaaaggttgttaacgtggaaaaaaaaaagaatggtgaaagttcttttccccacacataggtcttattacaatctaatcatgattatacaattaccctccaaccctctttctgtccttgcagg

SEQ ID NO: 48182 - DNA, 587 bp, Homo sapiens
agatactcacaggagcccaaggctcatcctggccctcagagaaccacagtagcaagatcagttccagactctaccagctagtgggagctctgtctattgttatattatgggtcttgaccacagaggggtcaggataaggctgaggcaagaccaagaagccaggaccttacaggcatcaacactggcaaagacacctgaaaacacacatacatgcacacacacacacacaccaccctctggaagtatatactccaaaatattaacagtggttaatgatttggtggtagaattatgaatgggttctttgctgcttttctaaaattttatttccatgtccgtgtctgcttgattattttttaccatgaaaataaaatgactataagaacttccataataagaaaaaaggttattaaattatgcaaaatatatgattcactctaattgaatttatacttggagcaggtttaaaggttgttaacrtggaaaaaaaaaagaatggtgaaagttcttttccccacacataggtcttattacaatctaatcatgattatacaattaccctccaaccctctttctgtccttgcagg

SEQ ID NO: 48183 - DNA, 587 bp, Homo sapiens
agatactcacaggagcccaaggctcatcctggccctcagagaaccacagtagcaagatcagttccagactctaccagctagtgggagctctgtctattgttatattatgggtcttgaccacagaggggtcaggataaggctgaggcaagaccaagaagccaggaccttacaggcatcaacactggcaaagacacctgaaaacacacatacatgcacacacacacacacaccaccctctggaagtatatactccaaaatattaacagtggttaatgatttggtggtagaattatgaatgggttctttgctgcttttctaaaattttatttccatgtccgtgtctgcttgattattttttaccatgaaaataaaatgactataagaacttccataataagaaaaaaggttattaaattatgcaaaatatatgattcactctaattgaatttatacttggagcaggtttaaaggttgttaacgtggraaaaaaaaagaatggtgaaagttcttttccccacacataggtcttattacaatctaatcatgattatacaattaccctccaaccctctttctgtccttgcagg

SEQ ID NO: 48184 - DNA, 640 bp, Homo sapiens
tcaggtccttctcttcctgaccctcttttctcttgtactttccgtcccaggccatgtagtacaaaaatcctgatacacatgatggcaatagaacacccttgcgttaagatcacaggacattgtgtttgtatctttctgactactcggtgaacatcaaaccatgaaaactgaagctgctacaggaaatgggaaggtaaaagcctaaatccattttgacaaattctaactagggatcccacagtaatgcggcgggggggtgggggagcagtttctagagcaattttacaattctcaaaagctaaattgaaaccataagacttcacagagcaataaaattgtcaagttctttatttttggttggaactttattaacttagcaagttactgtttaytacattgtgctgttgaatgctctagtggcttgttacttttattgttaagtaagaagaacagaaaacactcattactatagtaaaaggggatatatttgtgtgataggaagagaaacctgagtagggggtaaaaattaatgcaggatgcagtctgctttgcagatgaaatctctcaaaattgtcttcattgacaaaaaaaatacagaatcattgatgatttttaaaaactgaaaataaacttaatgcat

SEQ ID NO: 48185 - DNA, 578 bp, Homo sapiens
tgcatacttataagcaaaataaaccattaagaaaaggctacatactggatgattccaatatataacattctggtaaaggcaaagctggggaaatagtataaagatcagtggatgtcagggatatggtggtaaaggcaggtagaaagggattaatagaaggatcatgaaatatttttaggtcagtgaaaatactctggatgataccatgaagttggatagatatcattatacatttgtccattcccatagaatgtacaacaccaacggtratctttaatgtaaaggatgaactttggtgattatcattgttcaatgtagattcatcaattgtaaccaatgtacaactttgattagggatgttgtaagtggggaggatgtgcacgtgtggagacatggtgtatataccttcctctcaatttttctataaacctaaaactgctctaaattaatagccttttcttttttaaagcagctatactctgaagccatcctgtgcctttaatgactcctaagcgttgtaatcttgctcatacagcagaacagatagatagcaggggatgctaaaaggaaaataacct

SEQ ID NO: 48186 - DNA, 566 bp, Homo sapiens
cattaacaaacagccagggaaactctttttgattaattatgttgataagttttttttgtagtgtgctacaagctcttttaatttaatctgcttggacagcagcccattcaggtgaaatgtcttgacttatctaaagaagcactgatgagaaggctactgggcctgggattttactgtactatcatgtaatcattaacacatgtrgctactgttttcctgcattttgattttcttcttgaaaggaaggacatgtctgtggggtgggggtattagggaagtaaggatgagacccagcagcagtgacaggaaaagaggatgctattactagctgagcctgaaaacactatctttattgccaggagtaaaagtatttgaaagcactaataatggcttcagtgaatactcatcttttaaaaaagagcaaaggatggcgaggacatagttctctcaaagagtggaagtcttctagattagggttgtccaatcttttcacttccctgggccatgatggaagaaaaattgtcttgggccacacataaaatacactcacagtaatgataggtgat

SEQ ID NO: 48187 - DNA, 552 bp, Homo sapiens
tcatgagtgaatggatattgtaaagtacttagaatagtacttgtttgcttcaacaaaaactgagtgcccactccgtgccaggcactgttgcagacactggggatataagcgtgaacaacagccctgaggttttgttggtggggggraggggaagaaatctacacgttagcacttgagtgatacagccgcaaagcagagtagtcagcgttgactattctcgtgctcagggattgatgctcctgattcttgatgctcagggtctggctctgtcacccaggctggggtgcaatggcaccatctcagcccactgcaacctccacctcccaggttcaagagaatctcctgcctcagcctcccaagtagctgggattataggagtgtaccaccatgtctggctaatttttgtatttagtagagacagggtttcaccatgttggccaggctggtctcgaactcctgacctcaggtgatccacctgcctcagcctcccaaactgctgggattacaaggtgtgagccactgcacctggccctgattctttttttctaaaca

SEQ ID NO: 48188 - DNA, 552 bp, Homo sapiens
tcatgagtgaatggatattgtaaagtacttagaatagtacttgtttgcttcaacaaaaactgagtgcccactccgtgccaggcactgttgcagacactggggatataagcgtgaacaacagccctgaggttttgttggtgggggggaggggaagaaatctacacgttagcacttgagtgatacagccgcaaagcagagtagtcagcgttgactattctcstgctcagggattgatgctcctgattcttgatgctcagggtctggctctgtcacccaggctggggtgcaatggcaccatctcagcccactgcaacctccacctcccaggttcaagagaatctcctgcctcagcctcccaagtagctgggattataggagtgtaccaccatgtctggctaatttttgtatttagtagagacagggtttcaccatgttggccaggctggtctcgaactcctgacctcaggtgatccacctgcctcagcctcccaaactgctgggattacaaggtgtgagccactgcacctggccctgattctttttttctaaaca

SEQ ID NO: 48189 - DNA, 546 bp, Homo sapiens
caattgtgccccatttttcattctctcctggtgagtccctgtcattagaaagggcatgttcgatctcatcttcccttctggttcccactcagagatgaggacttgcctccagggctcccagtggcttattcccatgttttcccatggtctggactcaaggagggaggggtctctctctctctctctytttttttttttctaatttagagacagagtctggctctgtcacttgggctggaatgtagtggtgcaatcatagctcactgtagccttaacctcctggtctcaagtgatcctgccacctcagcctcctgagtagctgggactataggtgcacactgccatgtccggttaattattttttatttttgcaccatgtttagctagtacccaaacatgtcagagagcccagcatgaaaccttacacaaaagagtacaaactgtatgatttgagattcttccaaactgttgaatgtattagtagttgattcctctttctcgctgagtagtatttcattatataaatatgccaccatttgtttatcc

SEQ ID NO: 48190 - DNA, 546 bp, Homo sapiens
caattgtgccccatttttcattctctcctggtgagtccctgtcattagaaagggcatgttcgatctcatcttcccttctggttcccactcagagatgaggacttgcctccagggctcccagtggcttattcccatgttttcccatggtctggactcaaggagggaggggtctctctctctctctctttttttttttttctaatttagagacagagtctggctctgtcacttgggctggaatgtagtggtgcaatcatagctcactgtagccttaacctcctggtctcaagtgatcctgccacctcagcctcctgagtagctgggactataggtgcacactgccatgtccggytaattattttttatttttgcaccatgtttagctagtacccaaacatgtcagagagcccagcatgaaaccttacacaaaagagtacaaactgtatgatttgagattcttccaaactgttgaatgtattagtagttgattcctctttctcgctgagtagtatttcattatataaatatgccaccatttgtttatcc

SEQ ID NO: 48191 - DNA, 644 bp, Homo sapiens
catctaacattacagtatcatacagagtagtttcactgccctaaaaatgccctgtcctctatcccttttccaaaacacttgaaatagttgatctgtttactgtctccagagttcacctctttcagaatgtcatatggttggagacatatagccttttcattttggattattgcacttaacaatcggcatttaagtgttctttgtctttaatataatggtttctattttattattcaagtaacctcagaggttgacattttatttctaaaatgtaaaaataaaaatatgttggaagaacaggaaataaaaatggcaaatgagatgtttttgtgcaacatcaagaattgtttttctaaggaataaaacataaaataygactcacttggtttaaagacttcctttactcctaaaaaagtagtaaagttcaagccatttcttaaagtgtaatgctttttctttgtaaagtattgcgttttgtaccaaaaattttaggtaattatttttatatgttcagtttaataatgtaaaagttgcatacctaagaaattgtgttttatccaaacaattgttagttggggaaagggagggtaaggactagataactttaatcttgcaatatcaaatgaattttactatagaaagtt

SEQ ID NO: 48192 - DNA, 602 bp, Homo sapiens
cactcaattcaggacaaaacaaagaatgccccatatttggtactcctgagttaagagcaygagaaatttgaatttgctacagaattgtatatcatctagcttattaaaaaacactgggctttacatctatctgaatgaaacagtaaaaggaagatgctattatttctgacagggtcaaacactattcaatcaggtattattcatatttacaaataaacaattgcataaaaacctaatgaaacaaggatcctctaaggaggaaatagttgacttatcaaggactgcccaagaggagaggtccttcactgctagaccttcactatcttccagcaaaccctaaaatctcaggggttgttctccaagacaggttctgctctgcttcttctctgctcagcagctcccagaagctcccacaattttattctgcctcgcccttcatgacattctctggggaagctgggtgccattgctctaggataattacgcgcaaagtactggatggagagtcttagcagtggtgctcttgcatgtgtgttttatcacctcctcccttcattgaatttcattctttagccatgaaaaagaagctatctgtgaatgcc

SEQ ID NO: 48193 - DNA, 602 bp, Homo sapiens
cactcaattcaggacaaaacaaagaatgccccatatttggtactcctgagttaagagcacgagaaatttgaatttgctacagaattgtatatcatctagcttattaaaaaacactgggctttacatctatctgaatgaaacagtaaaaggaagatgctattatttctgacagggtcaaacactattcaatcaggtattattcatatttacaaataaacaattgcataaaaacctaatgaaacaaggatcctctaaggaggaaatagttgacttatcaaggactgcccaagaggagaggtccttcactgctagaccttcactatcttccagcaaaccctaaaatctcaggggttgttctccaagacaggttctgctctgcttcttctctgctcagcagctcccagaagctcccacaattttattctgcctcgcccttcatgacattctctggggaagctgggtgycattgctctaggataattacgcgcaaagtactggatggagagtcttagcagtggtgctcttgcatgtgtgttttatcacctcctcccttcattgaatttcattctttagccatgaaaaagaagctatctgtgaatgcc

SEQ ID NO: 48194 - DNA, 1234 bp, Homo sapiens
  misc_feature (1)...(1234): n = A,T,C or G
caaggttttcatttcctgtgttgcgacttggagttgaactgagagacaaataaggaaggcaagcacagtgcttgttgtaaaaatgcagcatcaaaacaccctaatgatacttataattgctagaagtaatttaaaactgtctttctgctttaggaaggaatgaaactctaaggaaatacaaatgagggaattgaagagaacatattttaggaagaaaatgtattcaaagagaatctttccattttaatttcctcatgtcagtagaaattctagatacatttaacaggaaaactcctcaagacttttttttctggaaatccctaaagtttttctggggggtctctccttatgtatcattttttattttactccttgctaagaattcttattagtcattctaaccattcaatttgtcctgcctgttttgtaatgaataaatagcatatactgttaattggccacctgaggttcaaagaggggaaaaatggagttgatgtctgcacactgttatgtgctgacaacatattgaccacactctatttcacaagatttaaaatcaagcttcctcaccctattcacacttccctacctttgctccattcttgactgtttgttggggctaatataattttctttaagnnnnnnnnnnnnnnnnnnnnnnnnnnnnnnnnnnnnnnnnnnnnnnnnnnnnnnnnnnnnnnnnnnnnnnnnnnnnnnnnnnnnnnnnnnnnnnnnnnnngggacacagacaggcaagttcacccaagtcattgaactaagtggcagagccaggacctccaacctatctcctctgactacagatgtttctgattatctatttaaactcagaatatttgtaatattcttcatggaatggggttggcagtttcataacctcaaaattgttatggtgcattgtgttctaggattttgttttaattgcgtttgaaaataagcagtgacaattgctggaggggagagaaggagtaaggagctcctaaaagcattgtacattgagaccacagaagtgtgactgctttagagaatatatggttcctagtttttatacttatttttgttttcctcttagtgttaggcaacattaaattaactctagttggaaaattacattcctgaagtatctcccaaatgagcytgagcaaagaataaccatttggctattcagagagaactgaaaatgtgatttctctaaacacaggctactcaggaggaa

SEQ ID NO: 48195 - DNA, 795 bp, Homo sapiens
gggagggcgctgagtgagccagcagtggagaggggctggacaagatccgctgatcacagaagaggagagggaggttctgagtgacccacagcacactccacacccttggaagatggagaacccttcctagccccccactgagtcctggaggcagccagtagaatgttctgggtctgagacccaagtcatttttcaccctgatcctgccctctccttggtagctctcagaactgactcctgagggaaggcaagtgtttgaattgactttctccaaggttctcactcttaggaagatgcaggtggagttatctgtgattctccctgtaggtcaggtgagtcctcaaactgcttccctcatggtgataaagtggctgccaacaccttccaggccacatgtgtcttcrttcatatctaggagggagatggcttcacatcccccagacatagaacaaagcccccaaagaagaggacttgctggttttccattctttgctttcctagttccttaagtcctggaggtagtgggttagagtcagaatggacaagtaattcgttgtccagatcaggccctttccagagtgatgggatgggtggtgcatgtgataatggtgctgggatggcagagggagccggtcaccttggcccttgtgggggacccaggagagctgagtggaggtccagctctgccactggacttctggggctcagtttcctcctctgtcaaatggtgtcatttgattgtgatactttttgtctctagtttcctaatgaatgccagctgcttgacagaatgca

SEQ ID NO: 48196 - DNA, 547 bp, Homo sapiens
ttatctcaggtgagcctcccagggatgactttgaatagaatgggaggcaagtttgccttaaccagttcccagcttgactttccccttttgcttagtgatttgggggtcccaagatttattttcctttcacacatcaaagtcccagaatcataaaacttggcacttgggaaaaaaaaaaaaaaaacacagagtgactgtagtgcaatcccttcacttacagaagagggaactaagayctagagaaaatgtggcagccccagatcacagggaacctcctaacttctaatttgatactaaagcaatacaaccaaccaaagcagtctcccttgggtcagttttataaaaacaaacaaataaataaataaagtaaatgttgtggatgagactgtgaacagcagatcatctggtgaatggttgagacaatcaaaatgtaaagagatgagggctggtttcagtagagggaggtgagcctgccaggaaaggcttggagatgagctttgaagcactccctaaacacagtgtccacagacacaatgtgacgatgaaa

SEQ ID NO: 48197 - DNA, 468 bp, Homo sapiens
cacgggacctttctcgctttccactctgcttcaggcactaaaccacagagrataccctattgctctctgcatttccatcttcctttctgcctatctgtccactcgcttcatttcctttattatgctagagattccaaatcaccaggaaccctgagtttaaatttcaggctccacatactgtgttcaaggtagtttactaggggagccagggaaaaacaagtcagcagttaattcttcaagcaaacacgctggcagaaacagatatgacccttcagcttctctcactaatctggaagcactggtttttatctgaatagtgttgatgatgtgttgggtaccttctgagacctataaatccttatgactactccatcaagtgaatgtcattattctcattttgcagataggaagcctgtgtaactcaactgagggcacacagaataagggacagacccaggatttgaaccc

SEQ ID NO: 48198 - DNA, 1489 bp, Homo sapiens
tggaaacacaaggaacctcactggccagttattcagccccaatcagccccttccacacccaaaaagcattagtagcccctttcaaaaacccatttcctccaccagctaggggccttgtgacttgtttttctctgcacccttgactgtggtgrcccagaagccctggagctccttcctctgtccaaccttatctctcctctggagactttggcacatgaggaattgattttttctgcctttagagaaatgagaacctgagggagatgttctttcccctctttgtctccctatcctacctctgatctctccccacggctcagctaccactggggtggatcagcaaaaaaaaaggctgaggagacattcagctagggatggaaatgaccatctgcccaccatagtttacaaggcagttgtcttgggcaccacttcagtgcctctagggagaaactagttggtggccttctccttgagataggggcagccttgctttaaatctgaaggatctccccaaaagcaacctctttccagcttccagtctgcttatatctctcctccccagcagtcttttgtggcctctactgcaccctgtggtcagtggtgacaagtgagaggggcatcctgtagccagaagtaggactttctttgaattccaaaggacttggataacttacacctccatagttcattatctctgtgtcataaatgaaagtcaagagcaggaaaaacctcagtcagtacttcacaacatcctatcacacagaaatgagttgttggcaaggaaaagacccccatttgtccctaaagacttgcatcaaagatgggatcccctgcccaaagcaattagggaaattcctactaacagaagagatgtagaaacatctgtttcccactgatgtcaaggccaggggtggaggcgctggcctaaaataacctttcctgggccaaacagcctaatgggacatttaacctctctgagactcaatttcctgatctgtaaaatgacaattgaattagtccatatggcattcccagttcagagactttaagagttaagataatggaatgtggtgatcctgtataaataaaagaaacaagcaatttttttaaaagctatttggaaacccccttcacaatttgtgactagagatagaattcagatttataactgaagataatcttttcctatctccccaaatacttgcaatttactttttggcttactgttatattctattgtggataagccaaatgtattttgttctgattacatgaaagcaaaaccaagtaactactccaattaggtaagtaaactcataaacctagagcggtacagcaaagatgtaaatgaaaactcacaaaatgtaataaaggactctagtgacaaatggataaagagcaatgatgtctgtgttcaggaccattaaaatgatcttaagacgaaaagtggaacccaagggcagacaggacagcaggccccatgggcact

SEQ ID NO: 48199 - DNA, 453 bp, Homo sapiens
caccacacttggctaattttagtattcttagtagaggtggggtttcactatgttggccaggctggtcttgaactcctgacctcagtgcttccaatgtgatattctaaggtacccaccacctactcttcagagcagcctaccrgggaatcaggcaaagggaatcatattaatgggaacctcccaagctcaaggctcttcctgtgactgggtaaataagtgatcttgttccattgcctcagccttctggtctttatccccagggctgctaccctggaaaaggaagtggccgggttgcgggagaagatccaccacttggatgacatgctcaagagccagcagcggaaagtccggcaaatgatagagcaggtaagttgggctggtttgtaacctgccctcggggagtcaccccaagtctatgctcttatttgtttcctagggagcttgacttatatt

SEQ ID NO: 48200 - DNA, 598 bp, Homo sapiens
ggaattcgagaccagcctgggaaacatagcaagatcccatctctccagaaaaaagagtctcccatactttttgagagttaggcgtttcacagatattaactaatttgctcctccgaatgtcacttataaataaagcaaccaaggctcagagagactcagtaattcacccaaggccacataagcagtggcagagctggttaratgaccaaacccagggcaagatggcgccatcctcccctctctgtttgccatgccaggttgcaccacacagatccacatcaggaggcagggacaccagccttggcgcagcagctgagaccagggcgaggtccctcaatgcctgtaagctcttcctcatttgcaaaaatgatctagataccccctttcattcctaaagcaccatctctctaaaatgtttgattggctggataacccccagatcacatatgcacgtggtttgtagactgcaccaggcattgactgtgatgggcagccctgcagccgtggctgcagcccttgctaacagtagcccttgttacaactgccttctgtacatggttctcccctcctgccaagacctgcaggctacatctgtgct

SEQ ID NO: 48201 - DNA, 598 bp, Homo sapiens
ggaattcgagaccagcctgggaaacatagcaagatcccatctctccagaaaaaagagtctcccatactttttgagagttaggcgtttcacagatattaactaatttgctcctccgaatgtcacttataaataaagcaaccaaggctcagagagactcagtaattcacccaaggccacataagcagtggcagagctggttagatgaccaaacccagggcaagatggcgccatcctcccctctctgtttgccatgccaggttgcaccacacagatccacatcaggaggcagggacaccagccttggcgcagcagctgagaccagggcgaggtccctcaatgcctgtaagctcttcctcatttgcaaaaatgatctagataccccctttcattcctaaagcaccatctctctaaaatgtttgattggctggataaccccsagatcacatatgcacgtggtttgtagactgcaccaggcattgactgtgatgggcagccctgcagccgtggctgcagcccttgctaacagtagcccttgttacaactgccttctgtacatggttctcccctcctgccaagacctgcaggctacatctgtgct

SEQ ID NO: 48202 - DNA, 584 bp, Homo sapiens
ctcttcttcctccatttgcaggctgaggcttgtgctgyccctccagggccctgtgctagatgctggggacaaagatcctgtcctgtggggacatccagcgtctgactgaaacactggtgtgagcctgagctttggggtgggttgtggggactactctgtgctccagagcccctcttcagggccaagctgctgggactgctgttacctcactgggttataccccatgccagggacagcctgtggccagtgcctgacccatgtgtggctgcagaggcacggctccttctcaactaggaaaccctaggggatcgtcagctccaggggtcctcgtagggacctcagttgcaacctcacggtgggtcagtctccttctgcccagtcagccttgctccttccttccaggtggatctcccaaggacatgccccaagaaacacacgtgcagtccagaatctgtttccaggaacgcaggctgaaatacttgtcacagacaatcctggcattgaatgagacccaacccaggtcatccgcagactcatcgttcccaggcagactgaacctcaatactgcttacagacggagccta

SEQ ID NO: 48203 - DNA, 584 bp, Homo sapiens
ctcttcttcctccatttgcaggctgaggcttgtgctgcccctccagggccctgtgctagatgctggggacaaagatcctgtcctgtggggacatccagcrtctgactgaaacactggtgtgagcctgagctttggggtgggttgtggggactactctgtgctccagagcccctcttcagggccaagctgctgggactgctgttacctcactgggttataccccatgccagggacagcctgtggccagtgcctgacccatgtgtggctgcagaggcacggctccttctcaactaggaaaccctaggggatcgtcagctccaggggtcctcgtagggacctcagttgcaacctcacggtgggtcagtctccttctgcccagtcagccttgctccttccttccaggtggatctcccaaggacatgccccaagaaacacacgtgcagtccagaatctgtttccaggaacgcaggctgaaatacttgtcacagacaatcctggcattgaatgagacccaacccaggtcatccgcagactcatcgttcccaggcagactgaacctcaatactgcttacagacggagccta

SEQ ID NO: 48204 - DNA, 584 bp, Homo sapiens
ctcttcttcctccatttgcaggctgaggcttgtgctgcccctccagggccctgtgctagatgctggggacaaagatcctgtcctgtggggacatccagcgtctgactgaaacactggtgtgagcctgagctttggggtgggttgtggggactactctgtgctccagagcccctcttcagggccaagctgctgggactgctgttacctcactgggttataccccatgccagggacagcctgtggccagtgcctgacccatgtgtggctgcagaggcacggctccttctcaactaggaaaccctaggggatcgtcagctccaggggtcctcgtagggacctcagttgcaacctcacggtgggtcagtctccttctgcccagtcagccttgctccttccttccaggtggatctcccaaggacatgccccaagaaacacacgtgcagtccagaatctgtttccaggaaygcaggctgaaatacttgtcacagacaatcctggcattgaatgagacccaacccaggtcatccgcagactcatcgttcccaggcagactgaacctcaatactgcttacagacggagccta

SEQ ID NO: 48205 - DNA, 596 bp, Homo sapiens
ccccgtgaggaccggattcctagccacattgaaggcagaaggaaacaggctcagagaagggcagctcgcagtcacacaggtgagtccacctaactacaactccacacyggttgattaggactcaggatggggcaatacttttcacctacgacccccaggcctcccagggccagggcagtaaatgttgaccagatcgatttccaccatgcctgaaagtcagcggtcagctgctgaccacactgtcaattattcaggctccctgggatttcaccaagagctacggtttaactaaaacacagctccattgtcctcacacccccagcttgccctcagaggcctgggtgcgggtggacagccagggcacctccccgggcggccaagcacatatctgccccagcccctcactccccttcccagctcacagatcagactggagcttcctggtcctcaaatcccttggaggaggtcctgggctgaaagggctgaagccctgagggcagaactgggaccggccaccagaagttacctgaggcaggtttaggttccgttctgctgttctgcaagacccagacttttctttcctctttttttttttt

SEQ ID NO: 48206 - DNA, 596 bp, Homo sapiens
ccccgtgaggaccggattcctagccacattgaaggcagaaggaaacaggctcagagaagggcagctcgcagtcacacaggtgagtccacctaactacaactccacaccggttgattaggactcaggatggggcaatacttttcacctacgacccccaggcctcccagggccagggcagtaaatgttgaccagatcgatttccaccatgcctgaaagtcagcggtcagctgctgaccacactgtcaattattcaggctccctgggatttcaccaagagctacggtttaactaaaacacagctccattgtcctcacacccccagcttgccctcagaggcctgggtgcgggtggacagccagggcacctccccgggyggccaagcacatatctgccccagcccctcactccccttcccagctcacagatcagactggagcttcctggtcctcaaatcccttggaggaggtcctgggctgaaagggctgaagccctgagggcagaactgggaccggccaccagaagttacctgaggcaggtttaggttccgttctgctgttctgcaagacccagacttttctttcctctttttttttttt

SEQ ID NO: 48207 - DNA, 554 bp, Homo sapiens
tttctgagcgtattagtatcaccttagctgctctaataaacagccccaccccaaaaacacaatagacttttcttgctcacaggacagagttcctggttggtcaatgagccttccactacgtgattcagggacccagcctccctccttattgtggtgacaccttttcctagaactcagaatcatctgctttcgtctggatgagggaagaatttggaggattacacattgaaggtttttatggtccaggccagaagtggcccatgtcacttccgtccatgtcccactagtcaagsctcagtcacatgtcatgcctaaccacagggaagccgggaggtgtcacctggctctgtgcccaggaggaagagaaaggctggtgaacaactgtccaggtcttggtgcctgggctggaagatgcatgagcagaggaatgagacagcagacctgccctgccagagctcacagtccagtgttgtgagatggggatgggggagcaacagcaaacacaggtcacttatgtcccatgtccccagcttgaggttcagaataaggaccat

SEQ ID NO: 48208 - DNA, 609 bp, Homo sapiens
tacctgttacattgaattaattcctaccaggacgcttctaatctcaattgtttgttatttctttttactctccaacatctaatcagttaccaaattgtaactattctacctctgccaggtctctcccatcagtcatctcttttctaccccttctgtactagttcaaaaatctcactactacttccactaacacaatagcctcctagctggaattccccaccttccatatctcccccattcctcactaccgtcaattatttttcaaagcacaaatctaataatgtcactcatgtcctcaaaaaccttcagtggctcctatttatgagataaaattgaacccttaaactggcttaaaaagtcccattcaacctgggcctagcttacctttaatacattccttatctctcactatatcccctctcccacatcacagacttacaacagtatcagattcttccttctttcagaacatttccatgccttttcttayattgtgcccatccacgtgaaatatgctcctttcatctgtctgtgaaaatattatcactttctaatgccctgctcaaattccacctccttcacaaagccttaccagatcttttccttaaa

SEQ ID NO: 48209 - DNA, 501 bp, Homo sapiens
ggcacaatctcagctcactgcaagctctgcctcccgggttcacaccattctcctgcctcagcctccccagcagctgggactacaggtgcctgccaccacgcccggctaatttttttgtatttttagtagagacggggtttcactgtgttagccaggatggtctccatctcctgacctcgtgatccgcccgcctcagcctcccaaagtgctgggattacaggcgtgagccaccgcacccggccgcccctattactttttaaaaccattagatttcacttttcctaattttttaatttttaaaattgcaaatctataaaataaattggaaggctagactaagatcacctatatattcacctratataccagtcgttaacgttttgctatatactctctctctctctctcccttcctgtttctcttttttctctcccaccactacacattttttgaatcatttgtgagttacttgtagacattatgacaccttatttctaaata

SEQ ID NO: 48210 - DNA, 599 bp, Homo sapiens
  misc_feature (1)...(599): n = A,T,C or G
agtgtacgggaaaatacttggatttagactaaaaggtctgattttgaatcatgattggaccatgttatgtgagtcagtttaggatattactaaattctctgagggtagtgtgaggatgtgagaattatattatttggtttaccttctgcacaggctattgtgagaatcyaaatatttatacttataataaacttgagcacagtttaactatttggcattagattaaataacttaaaataagagctagtgtgaggttaatgttcaataaatgttacctatttacattatattccaatatggtactcgattctcatcctcaaaccatcgccttaactctctacattttttctcttctcttactattcagtagctgctttctctatgaagtttttttttttttttttttttttttttacaaaaaggagtaagatcctagatctaatgagatcttctctgatttaggtcccagataatgcagttttcagcctatgtaatatattggctcatgatgtctagtaacagttacttgaaggagtattcatcgagaaagttaggtttcagaaagccttcagaacacacgtgtgtgtgnnnnnnnnnnt

SEQ ID NO: 48211 - DNA, 553 bp, Homo sapiens
cgtttgcctccttatcatgagatctttttgctaagctggcagaaagattgcatartcagtgcttccagctctgctcccacctgatcctgcactgtcctctggtccctgaatgaatgaactctgatacccaatcttgtctcgagccttctctatgccactcatggctcctcttctgctctttccatctttttgctgagagttctgagctctgtacttcctcttggcccatctcacttcctgaaacacccctgaagagggttgcttatcttgatggaactcaaaaagccaaaaagctgcaggcagaggcgttgaggacatctgtttggggaactaagagcagcagcactttcagattcagtccatatagagctgtcctacagcattctggaaacttgaggatgtgcggtgcataaaggggctggaagtgacccacctgtgatgagccctttctaaggagaagggtttccaagagatcaccccaccagaaaagggtaggaatgagcaagttgggaattttagactgtcactgcacatggacctctgggaagacgtc

SEQ ID NO: 48212 - DNA, 553 bp, Homo sapiens
cgtttgcctccttatcatgagatctttttgctaagctggcagaaagattgcatagtcagtgcttccagctcygctcccacctgatcctgcactgtcctctggtccctgaatgaatgaactctgatacccaatcttgtctcgagccttctctatgccactcatggctcctcttctgctctttccatctttttgctgagagttctgagctctgtacttcctcttggcccatctcacttcctgaaacacccctgaagagggttgcttatcttgatggaactcaaaaagccaaaaagctgcaggcagaggcgttgaggacatctgtttggggaactaagagcagcagcactttcagattcagtccatatagagctgtcctacagcattctggaaacttgaggatgtgcggtgcataaaggggctggaagtgacccacctgtgatgagccctttctaaggagaagggtttccaagagatcaccccaccagaaaagggtaggaatgagcaagttgggaattttagactgtcactgcacatggacctctgggaagacgtc

SEQ ID NO: 48213 - DNA, 881 bp, Homo sapiens
ttaaagtttgggaagcactgacttagattaccttttgagaattccagatgggtcagaaaccagacagaaatactcagtagtgagaagctatggtgtatcagaagctgttaggcatttcatggtttggtagtgagcaagacagatagttttcctgtattcagygacttagtctagagagagacaggatggaattaagtgtttaggtgctagccaaaagtaaagattcgtagaaaacaagggttcatatcccagtcatcaaagtgataaattttccctgcttaacatttagattaaaaagtaataattaggccaggtgtggtggctcacacctgtaatcccagcacttttggaggctgaggtggacagatcacttgagctcaggaattcgagaccagcctgggcaacatggtgaaaccccatctctacaaaaaataccaaagtcgggcacggttggttgtgtgtgcctgtagttccagctacacgggaggcagaggcaggagaatcacttgagcctgggaggcagaggttgcagtgagccaagattgggtctttgtactctagcctgggcgacaggagtgaaacagtctcaaaagaaaaaattaattgacaaacattgtgtatattcaaggtatacaacgtgattatttgatagacgtgtaatgagttatcacaacaagcaaatggtacacaatatagtttcggagggtttatgtataaggggactaattagaaaggtttggaaatggtgtaggagaaccaaagggctagtgcccaagggcaagggaagggagtggttacctgaaactggaagaaaagatagttttgtagagcatctgctttgagagcagcagtgacttttatcaagagatagagttaccttg

SEQ ID NO: 48214 - DNA, 881 bp, Homo sapiens
ttaaagtttgggaagcactgacttagattaccttttgagaattccagatgggtcagaaaccagacagaaatactcagtagtgagaagctatggtgtatcagaagctgttaggcatttcatggtttggtagtgagcaagacagatagttttcctgtattcagcgacttagtctagagagagacaggatggaattaagtgtttaggtgctagccaaaagtaaagattcgtagaaaacaagggttcatatcccagtcatcaaagtgataaattttccctgcttaacatttagattaaaaagtaataattaggccaggtgtggtggctcacacctgtaatcccagcacttttggaggctgaggtggacagatcacttgagctcaggaattcgagaccagcctgggcaacatggtgaaaccccatctctacaaaaaataccaaagtcgggcacggttggttgtgtgtgcctgtagttccagctacacgggaggcagaggcaggagaatcacttgagcctgggaggcagaggttgcagtgagccaagattgggtctttgyactctagcctgggcgacaggagtgaaacagtctcaaaagaaaaaattaattgacaaacattgtgtatattcaaggtatacaacgtgattatttgatagacgtgtaatgagttatcacaacaagcaaatggtacacaatatagtttcggagggtttatgtataaggggactaattagaaaggtttggaaatggtgtaggagaaccaaagggctagtgcccaagggcaagggaagggagtggttacctgaaactggaagaaaagatagttttgtagagcatctgctttgagagcagcagtgacttttatcaagagatagagttaccttg

SEQ ID NO: 48215 - DNA, 464 bp, Homo sapiens
gccacaccttccctggggagtttataacctagggtgcaaggcggaaggcatgagggtcccttttagaatccagatgaggggtgtgaggtgagcggagcctctggggctgcggagccctcccagtgcccrgagcaccctcgggaggccgtgccagccctcaggaggaagcgcatggaccctgcgctgggctcagggcaagtgattggtgcttctgggaacttaaagagttggaagcccggtcgttgccttcgaggggcttccccagaaacccgggagccaaggcagtcatgctgaggcctgttcactcatggcagagcgaggtttgcgctttgaggcatccagggcccctctgggtccacaagagaggaaaaaagtgggcttcttggaggtgggggcctttgagattgtcctcgaggagtgggaacttttggtgatgagggggctgtgggccagcggggaggagc

SEQ ID NO: 48216 - DNA, 536 bp, Homo sapiens
aacagtgaactacctattatgcagatctcctgcctttcatartgctttataaactgtgaagcagaaagcagaatgtgtggttgtttgggcaccaggaggacaaaggtccccaggctttgaatttctctgacctctctaaattgtgtttgaattccagagaagagctctgtttttctaggtgagaattaggcaagcttttcctggagctcaccccagtcagcaccctgagggctgagggctgagggctgagggcttcccttccacaagacctccctgtctttgtgaggctcagcatcacaaagccacctggggagtcaagggtaggtattgttcttcagagacacctggatgctggctcactccctgaggaggagggaaagctgctctggcctttgaaacattgtattgaaaactcacacacagaagccaaaactgacaaggatgataagctgctaatatgctaataataataataatgaactatgcctgttcttcacatactgtgctctgagagaggttaaaatgcctttaggcca

SEQ ID NO: 48217 - DNA, 536 bp, Homo sapiens
aacagtgaactacctattatgcagatctcctgcctttcataatgctttataaactgtgaagcagaaagcagaatgtgtggttgtttgggcaccaggaggacaaaggtccccaggctttgaatttctctgacctctctaaattgtgtttgaattccagagaagagctctgtttttctaggtgagaattaggcaagcttttcctggagctcaccccagtcagcaccctgagggctgagggctgagggctgagggcttcccttccacaagacctccctgtctttgtgaggctcagcatcacaaagccacctggggagtcaagggtaggtattgttcttcagagacacctggatgctggctcactccctgaggaggagggaaagctgctctggcctttgaaacattgtattgaaaactcacacacagaagccaaaactgacaaggatgataagctgctaatatgctaataataataataatgarctatgcctgttcttcacatactgtgctctgagagaggttaaaatgcctttaggcca

SEQ ID NO: 48218 - DNA, 593 bp, Homo sapiens
tgatgagaaactgtctcatgacagcctccccgagagaataagggggaggttgggagactgatctccgaattgcttcttactaagttaccatcctttcatgttctagcaggatcacaaagtattctgtcaaaattcaggaaagctgtgggtcaagcctttccttgatgtttttttataacttcatagagtgcgctacacaaattgcttacctgttccaactctcctgggtcctaaggagaggkatctgcagtaaaagactgcaagtcctgctgtctctgaaatctctacaagaagtgagagataatggaaaccttacctacctggtgaagctttgaaaaaataaagaaggatggtattccggaaagccaacctgaagagatgaagagggagagtggtgaatgttaggagcagctggagggtatgtatttgccttaaacttagtccctggagactttctgaactaatttggaggaaagttagcacttaaaaagccctccttgattgtgatgattgaagtaagaagagtaatagtgatttattgctatgattttgtgtcttctgtatcctcagattcatataatttgggaattatg

SEQ ID NO: 48219 - DNA, 593 bp, Homo sapiens
tgatgagaaactgtctcatgacagcctccccgagagaataagggggaggttgggagactgatctccgaattgcttcttactaagttaccatcctttcatgttctagcaggatcacaaagtattctgtcaaaattcaggaaagctgtgggtcaagcctttccttgatgtttttttataacttcatagagtgcgctacacaaattgcttacctgttccaactctcctgggtcctaaggagaggtatctgcagtaaaagactgcaagtcctgctgtctctgaaatctctacaaraagtgagagataatggaaaccttacctacctggtgaagctttgaaaaaataaagaaggatggtattccggaaagccaacctgaagagatgaagagggagagtggtgaatgttaggagcagctggagggtatgtatttgccttaaacttagtccctggagactttctgaactaatttggaggaaagttagcacttaaaaagccctccttgattgtgatgattgaagtaagaagagtaatagtgatttattgctatgattttgtgtcttctgtatcctcagattcatataatttgggaattatg

SEQ ID NO: 48220 - DNA, 593 bp, Homo sapiens
tgatgagaaactgtctcatgacagcctccccgagagaataagggggaggttgggagactgatctccgaattgcttcttactaagttaccatcctttcatgttctagcaggatcacaaagtattctgtcaaaattcaggaaagctgtgggtcaagcctttccttgatgtttttttataacttcatagagtgcgctacacaaattgcttacctgttccaactctcctgggtcctaaggagaggtatctgcagtaaaagactgcaagtcctgctgtctctgaaatctctacaagaagtgagagataatggaaaccttacctacctggtgaagctttgaaaaaataaagaaggatggtattccggaaagccaacctgaagagatgaagagggagagtggtgaatgttaggagcagctggagggtatgtatttgccttaaacttagtccctggagactttctgaactaatttggaggaaagttagcacttaaaaagcccyccttgattgtgatgattgaagtaagaagagtaatagtgatttattgctatgattttgtgtcttctgtatcctcagattcatataatttgggaattatg

SEQ ID NO: 48221 - DNA, 514 bp, Homo sapiens
ggggcagggcaggcccaagggccagagcctgagggaccccagggcctggatgccccagccagcctcctcctaaaggggaagttgtaagaggaataggatgacctctcaccaccacttcccttccccaaaaaagtgagaagcatggagaaaggcacaggagaaaagtgaggcagcagagagagacaacaagacagcccacacgagaatgaaggacaaaggtggtggtgaagcagatgaagcactttaaccagcctcccaagcatggcgcactcttaagttagaaatgctctgcaagacatagcatgaaaacacacttcggggaaaatgaaactgataagttacattcctttactttcctgcctcattattaattagtttcccacatttttatacaaagtgtttattagttaatgttacagacccagcaagggggtttctatggttggctctgctgccaatttgctctgaaaactcaagaacttctatctggcatgyggttgagtccagaagagtg

SEQ ID NO: 48222 - DNA, 557 bp, Homo sapiens
ctattatcaatcattgcaagattttttataagaagcacttttaaaaatttttttacagttttgcgaagtatgaagaaatgacttagaataataaatttgaaaaatgaagggtctttaattgttaaattcttgattttacagactcgtgaaattgaaagacaaagagataggtgacctgcacaaagttgtagttagaagtatactgagacctcagtattccagacagcatgtagcattttcttttttttataattcaatttctattttagattcagtgggtacatgtgcaagtatgtcacatgggtatastgcatgattatgaggtttggagtatgaatgatcccatcactcagatagtgagcacagtacacaataggtactttttcagtccttaaacgcctccctctctcctgcctttaatggttgccagtgtctattgtttccatatttatgtgcacgtgtagccaaagcttagcccccacttataagtgagaacatgcgagggctgggtgcagtggctcacacctgtaatcccaacactttggaagtgtgggggg

SEQ ID NO: 48223 - DNA, 541 bp, Homo sapiens
ttggagttaaactcattctctctcgcttattgccacagtcctgaataaagtcttcccgaccactgtagcaagcgtcagaagaatttctctaatgctgcgggggattatgctctggacctgggatctgggagggctttgtccaaggtgtctctgcaaagcagacactaaggcasggacttgctccctaggagcagaaagccaggggcttccccctgcaaagcccacatgaggctttcacgaagccagggcaggggtggccagggggatgcagcccaagggggcagctttctgatgatgtgcaatgcagcagccgcaggcaggcacgtggggcaatctatgatattaacttgagtggtatattctattccctactcatgccggcctactccaggcacttggtggccatctggagtgagcgctacaacactgtccagtgtgctgctggcccctttaggacctggctccctaaacctcactgatgcaggaataatggtctggggagaatgttctcctgggaggcagtcacggatgcaccaggaaa

SEQ ID NO: 48224 - DNA, 793 bp, Homo sapiens
catccctacatataccacctccagccagtccagagctccactggcactctcatacaggagctttttcattacagaatcccagacaccccattcaattattaaagaacgccctgtgatatttattacagaggtggctgatattgctgccaattgtcgaatttcggtttcctgtggttgattttcatgcatgaggaacacacggctgctgggcaggcgccagcactccatcaatctctccaggctgcctcgacctcaggatatgtaagagtagcggataaattggaagatcaatgacttgtccctcctgccgcaccacctgctattgagaaattaatatgargatcactataaataaaagataaaagatgatatggcttatagtgtaaaatattaaggctggacacaatgtgctggaggaatccaaaccaaaatctaagcaaattaaccctgtaagggcctactaccacctttctggaaatcgagtttgagagagatcatgctgtaatgtgatatgggtttctttatatacttgatagagaaaaaggaacattaatgaaatagtgtcccttctcttttctatgtagagtttttggacttgaagggattacagaaattatttattccagtcaactcatttaacatgagaaaactgcagaccagagaattaagtggtttgctcaagtttttgcagctagctggtgacagacctgctaattggcctccgttctaatgttcaatctttatttttttttatcaagccacctcctatcacaaaggctcttaataaactctc

SEQ ID NO: 48225 - DNA, 555 bp, Homo sapiens
tcggaagtcagctacatgaaacgttcaatttgggttccatctcctctgaagaaaaatgcagttaaaaaaaaaataagaggattggccagccgcagtggctcacacctgtaatcccagcactttgggaggccgaggcaggcagatcacctgaggtcgggagttcgagaccagcctgaccaacacagagaaaccccgtctctactaaaaayataaaaaagttagccgggcatggtggcacatgcctgtaattccagctactagggaggctgaggcagaattgtttgaacctgggaggtggaggttgcggtgagccgagagtgtgccattgcactccacctgggcaacaagagcaaaactccgtctcaaaaaaaaaaaaaaaaaagaggatgacaattttatttaaaaccaaatcatctactgagtgacagaggctgattctgcctttagtaggttagaaagatccccaatctcaaactcttactttttctaaaaaaaaaaaaaaaaacaaaaaaaaccaaaaaactgtcagtgctgtttcttaaggatcaaaaagta

SEQ ID NO: 48226 - DNA, 555 bp, Homo sapiens
tcggaagtcagctacatgaaacgttcaatttgggttccatctcctctgaagaaaaatgcagttaaaaaaaaaataagaggattggccagccgcagtggctcacacctgtaatcccagcactttgggaggccgaggcaggcagatcacctgaggtcgggagttcgagaccagcctgaccaacacagagaaaccccgtctctactaaaaatataaaaaagttagccgggcatggtggcacatgcctgtaattccagctactagggaggctgaggcagaattgtttgaacctgggaggtggaggttgcggtgagccgagagtgtgccattgcactccacctgggcaacaagagcaaaactccgtctcaaaaaaaaaaaaaaaaaagaggatgacaattttatttaaaaccaaatcatctactgagtgacagaggctgattctgcctttagtaggttagaaagatccccaatctcaaactcttactttttctaaaaaaaaaaaaaaaaacaamaaaaaccaaaaaactgtcagtgctgtttcttaaggatcaaaaagta

SEQ ID NO: 48227 - DNA, 555 bp, Homo sapiens
tcggaagtcagctacatgaaacgttcaatttgggttccatctcctctgaagaaaaatgcagttaaaaaaaaaataagaggattggccagccgcagtggctcacacctgtaatcccagcactttgggaggccgaggcaggcagatcacctgaggtcgggagttcgagaccagcctgaccaacacagagaaaccccgtctctactaaaaatataaaaaagttagccgggcatggtggcacatgcctgtaattccagctactagggaggctgaggcagaattgtttgaacctgggaggtggaggttgcggtgagccgagagtgtgccattgcactccacctgggcaacaagagcaaaactccgtctcaaaaaaaaaaaaaaaaaagaggatgacaattttatttaaaaccaaatcatctactgagtgacagaggctgattctgcctttagtaggttagaaagatccccaatctcaaactcttactttttctaaaaaaaaaaaaaaaaacaaaaamaaccaaaaaactgtcagtgctgtttcttaaggatcaaaaagta

SEQ ID NO: 48228 - DNA, 555 bp, Homo sapiens
tcggaagtcagctacatgaaacgttcaatttgggttccatctcctctgaagaaaaatgcagttaaaaaaaaaataagaggattggccagccgcagtggctcacacctgtaatcccagcactttgggaggccgaggcaggcagatcacctgaggtcgggagttcgagaccagcctgaccaacacagagaaaccccgtctctactaaaaatataaaaaagttagccgggcatggtggcacatgcctgtaattccagctactagggaggctgaggcagaattgtttgaacctgggaggtggaggttgcggtgagccgagagtgtgccattgcactccacctgggcaacaagagcaaaactccgtctcaaaaaaaaaaaaaaaaaagaggatgacaattttatttaaaaccaaatcatctactgagtgacagaggctgattctgcctttagtaggttagaaagatccccaatctcaaactcttactttttctaaaaaaaaaaaaaaaaacaaaaaaaamcaaaaaactgtcagtgctgtttcttaaggatcaaaaagta

SEQ ID NO: 48229 - DNA, 555 bp, Homo sapiens
tcggaagtcagctacatgaaacgttcaatttgggttccatctcctctgaagaaaaatgcagttaaaaaaaaaataagaggattggccagccgcagtggctcacacctgtaatcccagcactttgggaggccgaggcaggcagatcacctgaggtcgggagttcgagaccagcctgaccaacacagagaaaccccgtctctactaaaaatataaaaaagttagccgggcatggtggcacatgcctgtaattccagctactagggaggctgaggcagaattgtttgaacctgggaggtggaggttgcggtgagccgagagtgtgccattgcactccacctgggcaacaagagcaaaactccgtctcaaaaaaaaaaaaaaaaaagaggatgacaattttatttaaaaccaaatcatctactgagtgacagaggctgattctgcctttagtaggttagaaagatccccaatctcaaactcttactttttctaaaaaaaaaaaaaaaaacaaaaaaaacmaaaaaactgtcagtgctgtttcttaaggatcaaaaagta

SEQ ID NO: 48230 - DNA, 538 bp, Homo sapiens
aattgcccaatctgtgtgaagttattctattccagtggacgttgttttaaataagttattcttcagacttgaatattgactcttagtgtcttactgtctgttcttagacacttcaacaagtctgcatgttctccaattgccctgacagcccatccagctgaaatccatgtcttttgttatcagtaaggaattagggctgggcgcagtggtttacgcctgtaatcccagcactatgggaagctgaggcgggaggatcacttgaggccaggaggatcgcttgagaacaacttgggcaacatagacctccaactctacaaaaagctaaaacaattagcygggcatagtggtgcatgcctgcagtcccagactcaggaggctgaggcctgaaatttgaggtttcagtgagctataattacaccactgcactgcagcctgtgtgacagagtccccatcactaaaaagaaaaagaaaacaaagagaattaaatcagtaattttcaaattgaaagaactgtatcaatttcaggaatcactatttt

SEQ ID NO: 48231 - DNA, 376 bp, Homo sapiens
tggggaaaaatgataaattgatatatcatattttatccttaacatgtttttaggaagattacataagtgtaaaaatatacagtagagatacatggtggatttttaacaaatagtaattctttctttatatattctggcagtagtwccctctgaatctcaaggtaaaccatcaaaaacattacaggacctaattggagatcttttttttagcaagtaattaatgaactcctatgtgtctggtactatgtcgtgttctgatgataaatggttaataagcaaacttactatttaatcagaaagcccagcagaaaaaaagtcaataaacacatgaaattaaaattgcaataaatgcaaaggctttgaataagcaaatgtg

SEQ ID NO: 48232 - DNA, 376 bp, Homo sapiens
tggggaaaaatgataaattgatatatcatattttatccttaacatgtttttaggaagattacataagtgtaaaaatatacagtagagatacatggtggatttttaacaaatagtaattctttctttatatattctggcagtagttccctctgaatctcaaggtaaaccatcaaaaacattacaggacctaattggagatcttttttttagcaagtaattaatgaastcctatgtgtctggtactatgtcgtgttctgatgataaatggttaataagcaaacttactatttaatcagaaagcccagcagaaaaaaagtcaataaacacatgaaattaaaattgcaataaatgcaaaggctttgaataagcaaatgtg

SEQ ID NO: 48233 - DNA, 376 bp, Homo sapiens
tggggaaaaatgataaattgatatatcatattttatccttaacatgtttttaggaagattacataagtgtaaaaatatacagtagagatacatggtggatttttaacaaatagtaattctttctttatatattctggcagtagttccctctgaatctcaaggtaaaccatcaaaaacattacaggacctaattggagatcttttttttagcaagtaattaatgaactcctatgtgtctggtactatgtcgtgttctgatgataaatggttaataagcaaacttactatttaatcagaaagcccagcagaaaaaaagtcaataaacacatgaaattaaaattgcaataaatgcaaaggctytgaataagcaaatgtg

SEQ ID NO: 48234 - DNA, 1447 bp, Homo sapiens
atcaccacctccggctaatttttgtgtttttcgtgaagacagggtttcaccatgttggccaggatggtctcgatctcttgacctcgtgatccacccaccctcccaagtgctgggattacaggtgtggatgctcagctaattttttatacttttagtagagacagagcttcrccatgttgcccaggctggtcttgaactcctgacctcaagtgatcctctcaccttggcctcccaaagggttaagattaaagcatgagccacagcccccaaccaattttgatttgtctcttgatgaactgggatgtatcagagcttttgcacatataataacatatttctttagtcttctcaaacagataacagtttggccaagcataatgttctctaattgtacacgtttctctgccagcactgatggcattgatctggtattttccagcattcatagaggtctaagcctctgttttgttcctttcaggcaacctgtttttatctgcatgggcttttacagcacaatatttcttctctatctgtgcaaaagggtaaaattgcactgaaccaatggtcattacgtggtgctatgtcactgttaggtggagtacacaggtcttggaacccaaagcatagaagtagtggctgtccctgcaagtttagactctgctggaccccaggtcctggttccctgaaagggtaatacttcttccaaaggactaaataaggggttccactgaacctagcgcttcaactgccatttggagcttctcatgctagtgaatcagaaagcaatgtggagctgtagcatgagcttcctgccatcctgttgtaagtctagttttgagaaattttgactggtcaccccagaggaactggtgacagaatgccatgaaccaattggggcatgaatggatccgagtggtgcaaatgctggacaatagtgacgcccccaatgcagcccccgtatctccagtctcttaatgcagccagtctgacttccagctgctagcacctgcgcctcctactgcaagctggaatgccatcaaaatatgcccatggaagcagacttcaaccagtgactgacagaaggaagtgtacacaaatatgccccagtttccttgactttcaagtgagataaatctgagcttcctggccaggcgcggtggctcacgcctgtaatcccaacacttcgggaggccaaagcgagcggatcacctgaagtcaggagttcgacaccagcctggccaacatagtgaaaccccatctctaccaaaaataaaaaaattagttgggcgtggtggcgcatgcctgtaatcccagctactcgagaagctgagcggagatcgtgccactgcactccagcctggatgacagagcgagatcctgtctcaaaaaaaaagcaatcatctgaacttccgttctctgctgtctcccaggtctctgtttaggatta

SEQ ID NO: 48235 - DNA, 1447 bp, Homo sapiens
atcaccacctccggctaatttttgtgtttttcgtgaagacagggtttcaccatgttggccaggatggtctcgatctcttgacctcgtgatccacccaccctcccaagtgctgggattacaggtgtggatgctcagctaattttttatacttttagtagagacagagcttcaccatgttgcccaggctggtcttgaactcctgacctcaagtgatcctctcaccttggmctcccaaagggttaagattaaagcatgagccacagcccccaaccaattttgatttgtctcttgatgaactgggatgtatcagagcttttgcacatataataacatatttctttagtcttctcaaacagataacagtttggccaagcataatgttctctaattgtacacgtttctctgccagcactgatggcattgatctggtattttccagcattcatagaggtctaagcctctgttttgttcctttcaggcaacctgtttttatctgcatgggcttttacagcacaatatttcttctctatctgtgcaaaagggtaaaattgcactgaaccaatggtcattacgtggtgctatgtcactgttaggtggagtacacaggtcttggaacccaaagcatagaagtagtggctgtccctgcaagtttagactctgctggaccccaggtcctggttccctgaaagggtaatacttcttccaaaggactaaataaggggttccactgaacctagcgcttcaactgccatttggagcttctcatgctagtgaatcagaaagcaatgtggagctgtagcatgagcttcctgccatcctgttgtaagtctagttttgagaaattttgactggtcaccccagaggaactggtgacagaatgccatgaaccaattggggcatgaatggatccgagtggtgcaaatgctggacaatagtgacgcccccaatgcagcccccgtatctccagtctcttaatgcagccagtctgacttccagctgctagcacctgcgcctcctactgcaagctggaatgccatcaaaatatgcccatggaagcagacttcaaccagtgactgacagaaggaagtgtacacaaatatgccccagtttccttgactttcaagtgagataaatctgagcttcctggccaggcgcggtggctcacgcctgtaatcccaacacttcgggaggccaaagcgagcggatcacctgaagtcaggagttcgacaccagcctggccaacatagtgaaaccccatctctaccaaaaataaaaaaattagttgggcgtggtggcgcatgcctgtaatcccagctactcgagaagctgagcggagatcgtgccactgcactccagcctggatgacagagcgagatcctgtctcaaaaaaaaagcaatcatctgaacttccgttctctgctgtctcccaggtctctgtttaggatta

SEQ ID NO: 48236 - DNA, 1447 bp, Homo sapiens
atcaccacctccggctaatttttgtgtttttcgtgaagacagggtttcaccatgttggccaggatggtctcgatctcttgacctcgtgatccacccaccctcccaagtgctgggattacaggtgtggatgctcagctaattttttatacttttagtagagacagagcttcaccatgttgcccaggctggtcttgaactcctgacctcaagtgatcctctcaccttggcctcccaaagggttaagattaaagcatgagccacagcccccaaccaattttgatttgtctcttgatgaactgggatgtatcagagcttttgcacatataataacatatttctttagtcttctcaaacagataacagtttggccaagcataatgttctctaattgtacacgtttctctgcmagcactgatggcattgatctggtattttccagcattcatagaggtctaagcctctgttttgttcctttcaggcaacctgtttttatctgcatgggcttttacagcacaatatttcttctctatctgtgcaaaagggtaaaattgcactgaaccaatggtcattacgtggtgctatgtcactgttaggtggagtacacaggtcttggaacccaaagcatagaagtagtggctgtccctgcaagtttagactctgctggaccccaggtcctggttccctgaaagggtaatacttcttccaaaggactaaataaggggttccactgaacctagcgcttcaactgccatttggagcttctcatgctagtgaatcagaaagcaatgtggagctgtagcatgagcttcctgccatcctgttgtaagtctagttttgagaaattttgactggtcaccccagaggaactggtgacagaatgccatgaaccaattggggcatgaatggatccgagtggtgcaaatgctggacaatagtgacgcccccaatgcagcccccgtatctccagtctcttaatgcagccagtctgacttccagctgctagcacctgcgcctcctactgcaagctggaatgccatcaaaatatgcccatggaagcagacttcaaccagtgactgacagaaggaagtgtacacaaatatgccccagtttccttgactttcaagtgagataaatctgagcttcctggccaggcgcggtggctcacgcctgtaatcccaacacttcgggaggccaaagcgagcggatcacctgaagtcaggagttcgacaccagcctggccaacatagtgaaaccccatctctaccaaaaataaaaaaattagttgggcgtggtggcgcatgcctgtaatcccagctactcgagaagctgagcggagatcgtgccactgcactccagcctggatgacagagcgagatcctgtctcaaaaaaaaagcaatcatctgaacttccgttctctgctgtctcccaggtctctgtttaggatta

SEQ ID NO: 48237 - DNA, 545 bp, Homo sapiens
tgaaaagataatctcctggaagaggaagtctgtatgaaggcttaatcaaatctggggcagaagttatgttgccaaaattactaatcatcagaatgaccctgcttgctcattagtgcattaataagtgtggccacccttcacctgagcaggctgctaatctccacggtcaggcataatccatttcttctcctctctcttcacctcaatattaatggcttagcaaagacccctttaaaaaaacagaacccagaaggcactgttatttatcaccgaagataaattcatgcagcttacagtattcatgccrgaataaagagagccagtaacagatttgttcctgatgcattagaaatgagccccagtgacaaactcctgctctctccccagcaaagctgatgtattgactagacaggtagatatgagctactcaggctgtctgggtgctatggaaatcatgtcgagtgcatttgaccatcggcaatggggccagacacgcatgaggctcattcttattccagccagggaaaaggcctcgtctgcatttg

SEQ ID NO: 48238 - DNA, 2014 bp, Homo sapiens
tcctgacctcaggtgatccgcccgcctcagcctcccaaagtgctgggattacaggtgtgagccaccacgtccggccttattacttctttgacagcattcttttgcaatgttcacaactaccctcacttacgcattttgaagtttggatggtcatcgattggaatttcttaaaatgagagcatatccatgcatgttttatatggagttgataatcacaacacaggtggtggtctcctggttttccctgttttactgtcatctcaaaaacagtgactaaggagcccatcttttgcagctatctttgtactacaatacaaatacaacatttacacttacataaatagcttttcagggcagaaaatacagcaagatgaatctgtcatttttatttcctaatacattccaggatattgttttgctaaattatagtcactaaagcccacaaaatatgcaaacttcctactttcccccctcaaggtacactatctgaaggaaaccattacataaatagtgcctctgctaattaattactgctggtcatactcatttttccaaactaagaaatgaaaccaaatagtataatttacatttttttctccaactctagttaaaagtaaaaagacagggataaattcagctgcagaatgctgcttacaatgcttccttttttttctaattactcaaatcaatgagtattaaaaaagaccctcatattcagtttggtttttggtttcacacaacagggtggttaattaaaaccactgcacattctggtatgcagtttatgactgtgaaaaggtcacacacttgaaaataaagttcactacgcctcctgcatttagctaaataatcacagagggggtttaaaaataatttatagccctcccttccaagaggcttttcttttccctgtttactcatgacttcccatcagcacctcctctcagcacctcagggagatcatactgataggatctctccaaattcctcagtaaagttacaattttgcagagagcatgagaaaacaagcatcctggttctggtaaaaacaaaacaagacatcatcctggaaaaatgacattccagaactggaacacatagctaagcatccattggatagctgcagcactgatcgcccaggtaaatgtcacaaaaatatctactttaaagacactatctttttggttaagaagagtcacctctgcctctcctttgagaggtctctaaattcagacagggcatccactggccccaaaccccacagacctcaccgcatcgaatgaaaaccaaggttcatctcatcttttcaaaacaaatcataaacttcagacatgcctacgccttttcatgctatcagtgtctgattaatgcatttgtgtgtgaatatatttcagtttttctccatttctaaaaacattcactctgtttaactcttccagacctttactatgtgtagttttgtattgctgattagtttcaggactgctgctctatattctaaaacagtggttcccaatctttttggcaccagggaccagattcgtggaagacattttttccacagacaggggcttgggcgaggggtggtttygggataaaactgttgcatcgcaggtcattaggcattagagtcccatatggagtgtgcaacctagatccctcgcatgtgcagttcacaatagggttcacgctcctatgagaatctaatgccatcgctgatctgacaggaggtggagctcaggcagtaatgctcaccagcctgccgctcacttcctgctgcgcagcctggttcctaaaaggccttgggccagtacctgtccatggcctgtaggttggggacccctgttctaaaattttagtgaatattttgcttctatctatctgatggctgttagggtaaaaaatgttggtcatacattatcacttaaactacgtcagctgcagatgaacaaaaactcagtaaattggcagattcatcatgatacgactgacttctctcatgtgtcttttcctc

SEQ ID NO: 48239 - DNA, 2014 bp, Homo sapiens
tcctgacctcaggtgatccgcccgcctcagcctcccaaagtgctgggattacaggtgtgagccaccacgtccggccttattacttctttgacagcattcttttgcaatgttcacaactaccctcacttacgcattttgaagtttggatggtcatcgattggaatttcttaaaatgagagcatatccatgcatgttttatatggagttgataatcacaacacaggtggtggtctcctggttttccctgttttactgtcatctcaaaaacagtgactaaggagcccatcttttgcagctatctttgtactacaatacaaatacaacatttacacttacataaatagcttttcagggcagaaaatacagcaagatgaatctgtcatttttatttcctaatacattccaggatattgttttgctaaattatagtcactaaagcccacaaaatatgcaaacttcctactttcccccctcaaggtacactatctgaaggaaaccattacataaatagtgcctctgctaattaattactgctggtcatactcatttttccaaactaagaaatgaaaccaaatagtataatttacatttttttctccaactctagttaaaagtaaaaagacagggataaattcagctgcagaatgctgcttacaatgcttccttttttttctaattactcaaatcaatgagtattaaaaaagaccctcatattcagtttggtttttggtttcacacaacagggtggttaattaaaaccactgcacattctggtatgcagtttatgactgtgaaaaggtcacacacttgaaaataaagttcactacgcctcctgcatttagctaaataatcacagagggggtttaaaaataatttatagccctcccttccaagaggcttttcttttccctgtttactcatgacttcccatcagcacctcctctcagcacctcagggagatcatactgataggatctctccaaattcctcagtaaagttacaattttgcagagagcatgagaaaacaagcatcctggttctggtaaaaacaaaacaagacatcatcctggaaaaatgacattccagaactggaacacatagctaagcatccattggatagctgcagcactgatcgcccaggtaaatgtcacaaaaatatctactttaaagacactatctttttggttaagaagagtcacctctgcctctcctttgagaggtctctaaattcagacagggcatccactggccccaaaccccacagacctcaccgcatcgaatgaaaaccaaggttcatctcatcttttcaaaacaaatcataaacttcagacatgcctacgccttttcatgctatcagtgtctgattaatgcatttgtgtgtgaatatatttcagtttttctccatttctaaaaacattcactctgtttaactcttccagacctttactatgtgtagttttgtattgctgattagtttcaggactgctgctctatattctaaaacagtggttcccaatctttttggcaccagggaccagattcgtggaagacattttttccacagacaggggcttgggcgaggggtggttttgggataaaactgttgcatcgcaggtcattaggcattagagtcccatatggagtgtgcaacctagatccctcgcatgtgcagttcacaatagggttcacgctcctatgagaatctaatgccatcgctgatctgacaggaggtggagctcaggcagtaatgctcaccagcctgccgctcacttcctgctgcrcagcctggttcctaaaaggccttgggccagtacctgtccatggcctgtaggttggggacccctgttctaaaattttagtgaatattttgcttctatctatctgatggctgttagggtaaaaaatgttggtcatacattatcacttaaactacgtcagctgcagatgaacaaaaactcagtaaattggcagattcatcatgatacgactgacttctctcatgtgtcttttcctc

SEQ ID NO: 48240 - DNA, 555 bp, Homo sapiens
tgaaaaagctcctccgagacatactgttacatttaaaaaaaaaaaaattgggcctggygcggtggctcacacctgtaatcccagcactttgggaggccaaggcgggcagatcatttgaggtcaggatcattcgagaccagccttgccaacgtggtaaaaccccatgtctactaaaaattcaaaaaaaaaaaaaatagctgggcagggtggcggttgcctataatcccagctacttgggaggctgaggcaggagactcgcttgaacctgggaggctcacttgaacccgggaggcagaggttgctgtgagctgatatcgtgccactgcactccagcctgggcaacagagtgagactctgttctcaaaaaacaaacaaacaaaacaaacaaacaaaaaatggttacatagaagtatttaagacagaagtctattcatgtaaaatattatgtaatctacatatgagtctgtatatgtacaaaatgatgctactgctatttatgaagcacttgtgatataccagatactgtgctcagtgtttgcatgtattacatcattt

SEQ ID NO: 48241 - DNA, 555 bp, Homo sapiens
tgaaaaagctcctccgagacatactgttacatttaaaaaaaaaaaaattgggcctggcgcggtggctcacacctgtaatcccagcactttgggaggccaaggcgggcagatcatttgaggtcaggatcattcgagaccagccttgccaacgtggtaaaaccccatgtctactaaaaattcaaaaaaaaaaaaaatagctgggcagggtggcggttgcctataatcccagctacttgggaggctgaggcaggagactcgcttgaacctgggaggctcacttgaacccgggaggcagaggttgctgtgagctgatatcgtgccactgcactccagcctgggcaacagagtgagactctgttctcaaaaaacaaacaaacraaacaaacaaacaaaaaatggttacatagaagtatttaagacagaagtctattcatgtaaaatattatgtaatctacatatgagtctgtatatgtacaaaatgatgctactgctatttatgaagcacttgtgatataccagatactgtgctcagtgtttgcatgtattacatcattt

SEQ ID NO: 48242 - DNA, 556 bp, Homo sapiens
aaagtcaaaatgggaaatgaagaattttcaatagattttccctataaaaggatccttttataggaaacaatcaataatacatagaaaaacaatcactgatacacagaatggacagtgtaaaataagcattacatattataaagtacatttcaaaaaattgcatagccaaatgataaaccatatttcataagattcatgacactgattataagagataacatcatgttgtatagcactctgccaattaagctatgactcacacatttttagaaactggaattttcattttcttcttatctaaagaactctgattgagttattcaacgcataaagaaaatataaacaaaatagattggccaaggtgttcccaaaaattcttacatattcagaatccaactctaccaaattgcacgtcaactaagagttactgctgtctrtgcttttccacacaatatcaacttgggtcaccacgagcactagaaatgtatcacttaagagtgctccattactgtctccaggattttctccaatccactaacatccaatgtccaatttt

SEQ ID NO: 48243 - DNA, 653 bp, Homo sapiens
tgggctatgagaggacacaccacctcaagcttggacaagtgaagtgatttaaagcattaaatcactgtgattgaattagtgatgggcacatgtctcaagtcagggcaataagcctcaacctaagagtttgaccagaactcttgggcaagagggccattcttttcattatgattgttgagctggtagaacataagcctggagatgctaatgccataattgacctcacttgggagaaactgcctgaaaatgaagcaagcaccgaggaaagtagagccaaaatgtagaaaaagtctgatgcttggttgctttatctgagcaactggacacaactatgcctgaartaatttatccactgaacaatttgttttctgagggtaatttaaaccgggcttctttcacttgtaatcaagagtcctgagaaatatatgggcttgggttaactctcccagctttgtgtcttccttaaattgaataagcatactttccatatcttcaccttggttactaataaaaattttgagagggacagaattttttcccatgccatcaattaacacatttatttatctattttaaatgggcaaataatattgtaagtttttatcatgtacagcatgttttctggaatagataaatctagctaattaacaaat

SEQ ID NO: 48244 - DNA, 430 bp, Homo sapiens
ggctcatattgtgtatgttgtatcttccctgtctcagccctggaatcagccatttctccagagaggcttggttgcatatattgaagaatggtatttaaaaaccaatatctggtcactgggtgtgattgttgctgctgtgtcactgcttctaagtttttaagtaaagaaataatataactgtaattggagaatgtcctggcaggcaattgtcaggggatactgcaggagacggtgaggacaccatgctgattgattgccctggcaagacaggaggatgtactgaacctcggcagtggcagcaccagtggaaaggagggtgagggagtttgtggctcatctagacattggtctccagcagttatagcctgagtcctactctgctacttgcyggctatgaccttggacaatatgaatgtccttggacaagtca

SEQ ID NO: 48245 - DNA, 551 bp, Homo sapiens
tatcctcttaattatttcatctgtgaattaggartcacaggactttattgtggcaaaggactccgaaggtcatccccactcgcatcattgttttgtcattaataatacaacttggatgatttctagcaatccacagcatataaagggcgcacacatgtgattttcatgatagaaattagggaactcagacctggaaaggttgggtggatgccccaagttggttggtgtcctctgcacaggctgacagtgttctgaagggtggagccgagtgttcggcatcattttgcctcttctgtgctgggcacagggttgggcacaccaggctcaccattaaacacactgtgctccttcagccaccagaaggggatgccacccacatggcgccccctggtgggctcatgggaacataccacaaatgcctttgattaaaaaaaagggtgcttgaaccacagtaaactacggcgccctagagagaccttatctcccctgcactccagccctttcctctttacaacagccgttttcatgaggaattaaagaataaagaacaa

SEQ ID NO: 48246 - DNA, 577 bp, Homo sapiens
ttttgtatatgctatgaacagttaaacttgggtcatacattaattgtgaataaaggtttaagctatagacctaagtttagggtgttgtctctgctacatgtagttttaagatgaggctgttaaataagctggaccactcctttgaagcagtaggatgtgaaagtctgttgtacctttagcatcatctagcaccacttattaaaccatagcataaagttgcaaaaggtcagtatctatctatctatctatctatctatctatctatctatcatctatctatctatcwctctatctatctatctatctatctatctatctatctatctatctatctaactatcatctgtttatctatctgtcacgggtagaccgcaaggctaagcatgcctggctacactatcactgatggaagagcaatgcaagttaggcatctttccgccgtgctgaaatagaggaagtgcagctctgagagattcaggaacttgcctgtagtcatagttgggaagtgggacagctggaattgcaaagctgtgactacaaatctggagcactctccactacatgtgaaagcttgcag

SEQ ID NO: 48247 - DNA, 577 bp, Homo sapiens
ttttgtatatgctatgaacagttaaacttgggtcatacattaattgtgaataaaggtttaagctatagacctaagtttagggtgttgtctctgctacatgtagttttaagatgaggctgttaaataagctggaccactcctttgaagcagtaggatgtgaaagtctgttgtacctttagcatcatctagcaccacttattaaaccatagcataaagttgcaaaaggtcagtatctatctatctatctatctatctatctatctatctatcatctatctatctatctctctatctatctmtctatctatctatctatctatctatctatctatctaactatcatctgtttatctatctgtcacgggtagaccgcaaggctaagcatgcctggctacactatcactgatggaagagcaatgcaagttaggcatctttccgccgtgctgaaatagaggaagtgcagctctgagagattcaggaacttgcctgtagtcatagttgggaagtgggacagctggaattgcaaagctgtgactacaaatctggagcactctccactacatgtgaaagcttgcag

SEQ ID NO: 48248 - DNA, 577 bp, Homo sapiens
ttttgtatatgctatgaacagttaaacttgggtcatacattaattgtgaataaaggtttaagctatagacctaagtttagggtgttgtctctgctacatgtagttttaagatgaggctgttaaataagctggaccactcctttgaagcagtaggatgtgaaagtctgttgtacctttagcatcatctagcaccacttattaaaccatagcataaagttgcaaaaggtcagtatctatctatctatctatctatctatctatctatctatcatctatctatctatctctctatctatctatctatctatctatctatctatctatctatctatctaackatcatctgtttatctatctgtcacgggtagaccgcaaggctaagcatgcctggctacactatcactgatggaagagcaatgcaagttaggcatctttccgccgtgctgaaatagaggaagtgcagctctgagagattcaggaacttgcctgtagtcatagttgggaagtgggacagctggaattgcaaagctgtgactacaaatctggagcactctccactacatgtgaaagcttgcag

SEQ ID NO: 48249 - DNA, 636 bp, Homo sapiens
tgaaagctttttatttctgtaacgtaaataaactttaaccatggtttctcattatcccacggaaatttaaaatgtgttcaagatttctctacaaagataaccatcactgtgctgtgatgttgaaaaagaccaaaggaaacatggcaaaaagcatagtatccatgaataaataattggtgaaatataccatggaatagaatattgtcactaaaaataatcacaaagaagacctttgttgaaagtaaatgtgttaggagaaatggcagtcacttcttttcacccctcttttaaacaccctactctaccaatcaaaatgttacttgctttagtgtctccagataatcttttatacacaactccaaccactatcgacagcatcacagaacaacctcacaacatacaagtttcattataatttaggcaaaaaattacatgatctatgaagtaacagactaaaacattaataatattttcccttaaaatgtcatttttttcttctctgtatragatcacttcttttaaaacagtcaactagaaaatgagtatttatacaaaatgtgaataaattcaaaccaccacataaatatattgtaatataataccctaaatgagacttttgatctttttcattaagtt

SEQ ID NO: 48250 - DNA, 636 bp, Homo sapiens
tgaaagctttttatttctgtaacgtaaataaactttaaccatggtttctcattatcccacggaaatttaaaatgtgttcaagatttctctacaaagataaccatcactgtgctgtgatgttgaaaaagaccaaaggaaacatggcaaaaagcatagtatccatgaataaataattggtgaaatataccatggaatagaatattgtcactaaaaataatcacaaagaagacctttgttgaaagtaaatgtgttaggagaaatggcagtcacttcttttcacccctcttttaaacaccctactctaccaatcaaaatgttacttgctttagtgtctccagataatcttttatacacaactccaaccactatcgacagcatcacagaacaacctcacaacatacaagtttcattataatttaggcaaaaaattacatgatctatgaagtaacagactaaaacattaataatattttcccttaaaatgtcatttttttcttctctgtataagatcacttcttttaaaacagtcaactagaaaatgagtatttatayaaaatgtgaataaattcaaaccaccacataaatatattgtaatataataccctaaatgagacttttgatctttttcattaagtt

SEQ ID NO: 48251 - DNA, 1261 bp, Homo sapiens
agggtttttgtcaacaatacatgaagcaaaggcctttaacaatacacagaaattccaacaaggcaaaaaaaacaaaaaccgaaatccctcatcaggtaatgtcaattctacatccagcccagctcaatcactaattagcagtgggtccttggtgaagccatttcatgcctcttatctttttcctctagaaataaactagaacgattctcgagttcctttgagacctcactagatcatagagtcttgagatcccttggaggtcttaactgccctcatcctcaccagcaaccaggaatcccacagacaattagatatttcagcgcagggacacaaactgaattccaccacccagacacggcttgactctcatggcaaagaaactctttcctcaatgacaaaggggagagtttgtctttggagaaagccagaatgttacttagagaatgcttgtgcaacacaggtgtgacgtcctccaggagggcaaaatgggagagcaatgaaaatacatactctcagcctgagagaatgcaagagacccgctgcgggctgtgggtgcctctctactttagagcaggactcagaaccgcgtgctagtgccagggtcccacacactcagtgtgtactgagtcatgcatgtacacaggtcacgcctggatggtaaggtscatcacagacacaggcacacagctactttcaggcactctggccttgccagtcgtgttcgtaatgcagagaaacaaggcacaaagccgcaagacaccacgctggacacgaaacttttcttacggaataacacaaaaataatgttcttcaaggaggttaaccacaatttgttctcaagcaaactcacatccaaaaccatcttggaaaaactgagtttctagtgtttgcagtcaccgccagtctatcccgacttcctcctccccaatacaaccaacaaccagctgtgtgcacctagaccctgcaccacccggctgggaggacctctgtgcgggtactgcccacagacggccccgaagggtcaggttccaagtcaaagcatataggattatttacacatctagtgaaaaaaacaaaaagaaggtcatgcttcagtgatgagcatcatggtgcacctttcccagctaccgcatcgaaacccagacatccaattcatcatgagacctacttgtttgggggcgtctgcggaggtggtatgaacttcagaaccccgaggcccatcggactcaaacaccactgtgggaacaaggggtttgttaac

SEQ ID NO: 48252 - DNA, 2492 bp, Homo sapiens
gaacaaacagagctggagaatgtrtatcactagatatcaagagtttttttaaagctagcaataagacagcatagtgtccatgtaagtgtagagatataggacatagcacctagagaacagaaaaagacacatacctatataactcccaaatgtacacaaagacctaagttgaaaaggattacagatctatataagaaaggaaaaataataaagcttttacaagaaaatttaagtgcatattgcagaaaatacaaaacataaaagaataaccataaaattttgagaaattaaacttagtttaaatagggatttctatgaaataaatacatcattaaaagagtaaaatttccaggagaagatatttgcaagccatacatactcatacttagctaatacaaagcacggctacaaaacaatgcagaaagggcaaacaaatataatatgcaaacaaatagagcagacatttcagcaataaggttttctgaatgaccaatatgtatataaaaggatacttgacatattagatccacccccagaatggctaagatttaaataattgacaagacctagtgttgtcaaaaatgtagagcaactggaaatttcacaattccctggttggaattgaattggtaaaaccggttggaaaaaccttttcattgtctactaaatctaaacatttgtacagaaactaacaactactgaatgtacatcattcctaaaatatataagtaatttgtaatatattaatataataaaatctgccaagcaagaaaagagcaaaccactgaaacatgcaataacttggatgaatcccatatttacaatgttgagtgaaaaaaaatgagatatgaagtactatatactgtattattacatatatatgaatttcaaaattaggaaaaataacatatgatggtagaaaatataaaagtggtcattttgggtaatcgttatccagaatgaaggcatgagggtgcctgatggggtcctagaaatataatgtctttgtctggatgtaaacatacattaaaatcatgaagatgtagacttaagatttgtgcactatgtcatatgtaagttttacttgaaagaaaaataaatgttagcaaatgaattttttaaaaggtaaggcagaatttaagataaagtcagttctgaaaagttttgactcaatatattggtcttcttattttatcagtatttccttgcattgctaaaacaaattatagaacatttctaatatttctgaaaaaaagtgcagtgcatgtaaataaatatacacatatgtatgcacataaatgcatacactcatatgcatatatattaattcagcaaattttgactgagtttccacttcattgtcagcactatgctagcatggcatacttaaaatcatattaaagaccagatcccagtgtccactcaataatgtaagacaattagagaagatagaaagcaattccactaccatcaggatctacaagcttcctgggggactttggggctgatcatcaggcctttagtaggaagaaaatattctcctccgtgggatcgctctcagacatcgcaaaactcgctgtagggtaagaaagagccaaaagatccatatttatgaacagctataaatacaacaccggggggtatccttcaaacctcactgattaccatgcaacatcacccaattatccacggcatcgtaagattgccataccaagcagcagctaatgttaggcttgatatctgctggaagatcatgagggagacagctagggatcaagtgacaatattatacatgatttcagtgctaaattttatttttattgtcatcctgggcttcatctcttatatccgtgtatcactgagaaattatgcttggacacacaaactaaacttattgtttctcttctctttttaattcatgcctaaaaccaaggaccccaggcaattagctatgacattttctgatgattatctctggaaagttatatagaatagtgtaaacaactcacccttaacctgcattactcagtttccaatgtaaattggctataatagataatgaatgtttttagctatttatgtttgtaaatgtattgttaatccacttcagtgaaatggcattttttctaatcctatgaatgaacacctgagaggaatctagtgaaaatgttctcttggtgaaaataaactgtggtttctttgtaacacacactgttgctggcaattcatgtatgcagtgctcatttccagatctgaaaattaaaacaaaacaatggttttgctttcttccaaagcgtactccatggattcaaaagatctcgagaaagcttaaatttctctttattttatttctccgtaagacaaaggacaatgactaaaacttaaaaaaaaagttgtttgctttcattaaaacataatgatattctaagaacattttattctctttgtttttctgatatagtgcattgcacagaagtcaaacaagattaaga

SEQ ID NO: 48253 - DNA, 2492 bp, Homo sapiens
gaacaaacagagctggagaatgtatatcactagatatcaagagtttttttaaagctagcaataagacagcatagtgtccatgtaagtgtagagatataggacatagcacctagagaacagaaaaagacacatacctatataactcccaaatgtacacaaagacctaagttgaaaaggattacagatctatataagaaaggaaaaataataaagcttttacaagaaaatttaagtgcatattgcagaaaatacaaaacataaaagaataaccataaaattttgagaaattaaacttagtttaaatagggatttctatgaaataaatacatcattaaaagagtaaaatttccaggagaagatatttgcaagccatacatactcatacttagstaatacaaagcacggctacaaaacaatgcagaaagggcaaacaaatataatatgcaaacaaatagagcagacatttcagcaataaggttttctgaatgaccaatatgtatataaaaggatacttgacatattagatccacccccagaatggctaagatttaaataattgacaagacctagtgttgtcaaaaatgtagagcaactggaaatttcacaattccctggttggaattgaattggtaaaaccggttggaaaaaccttttcattgtctactaaatctaaacatttgtacagaaactaacaactactgaatgtacatcattcctaaaatatataagtaatttgtaatatattaatataataaaatctgccaagcaagaaaagagcaaaccactgaaacatgcaataacttggatgaatcccatatttacaatgttgagtgaaaaaaaatgagatatgaagtactatatactgtattattacatatatatgaatttcaaaattaggaaaaataacatatgatggtagaaaatataaaagtggtcattttgggtaatcgttatccagaatgaaggcatgagggtgcctgatggggtcctagaaatataatgtctttgtctggatgtaaacatacattaaaatcatgaagatgtagacttaagatttgtgcactatgtcatatgtaagttttacttgaaagaaaaataaatgttagcaaatgaattttttaaaaggtaaggcagaatttaagataaagtcagttctgaaaagttttgactcaatatattggtcttcttattttatcagtatttccttgcattgctaaaacaaattatagaacatttctaatatttctgaaaaaaagtgcagtgcatgtaaataaatatacacatatgtatgcacataaatgcatacactcatatgcatatatattaattcagcaaattttgactgagtttccacttcattgtcagcactatgctagcatggcatacttaaaatcatattaaagaccagatcccagtgtccactcaataatgtaagacaattagagaagatagaaagcaattccactaccatcaggatctacaagcttcctgggggactttggggctgatcatcaggcctttagtaggaagaaaatattctcctccgtgggatcgctctcagacatcgcaaaactcgctgtagggtaagaaagagccaaaagatccatatttatgaacagctataaatacaacaccggggggtatccttcaaacctcactgattaccatgcaacatcacccaattatccacggcatcgtaagattgccataccaagcagcagctaatgttaggcttgatatctgctggaagatcatgagggagacagctagggatcaagtgacaatattatacatgatttcagtgctaaattttatttttattgtcatcctgggcttcatctcttatatccgtgtatcactgagaaattatgcttggacacacaaactaaacttattgtttctcttctctttttaattcatgcctaaaaccaaggaccccaggcaattagctatgacattttctgatgattatctctggaaagttatatagaatagtgtaaacaactcacccttaacctgcattactcagtttccaatgtaaattggctataatagataatgaatgtttttagctatttatgtttgtaaatgtattgttaatccacttcagtgaaatggcattttttctaatcctatgaatgaacacctgagaggaatctagtgaaaatgttctcttggtgaaaataaactgtggtttctttgtaacacacactgttgctggcaattcatgtatgcagtgctcatttccagatctgaaaattaaaacaaaacaatggttttgctttcttccaaagcgtactccatggattcaaaagatctcgagaaagcttaaatttctctttattttatttctccgtaagacaaaggacaatgactaaaacttaaaaaaaaagttgtttgctttcattaaaacataatgatattctaagaacattttattctctttgtttttctgatatagtgcattgcacagaagtcaaacaagattaaga

SEQ ID NO: 48254 - DNA, 590 bp, Homo sapiens
ataacttttagaattactaagtgaattaaataaaactgttgactacaaggccaatacttattaaaaatctatttctacaartaagaaataaggaaaaattataatatcaacaacacaaaaatcagagacgcaagaggtctaaaggaaactataaagtatttttgaaagaaataaagaaggcctgtattcatactttataagactcaataatgaaaatgtctattctcccaccacagatttatagatttaaaacaatccaaaatcaatatctatgaggtgtttttgagtgtgtgcgtacacaaactatcttaatgcctttctataattttctagttatttaataatgtaaatactgtgtaacaaactaccacaaggctgatgttctatatgtcatggttttgattgtaaggacttccaataggacatgactgtttgattctattgtgacagggtcaaaagtaaccccaagccctcacacaatcaatggcaagatgaaatagtgtgcagatcttgctaagagaagtgcataagaatacttaaccacttttaatccacagaagctcaaactgtggccatgtatttaaaattcc

SEQ ID NO: 48255 - DNA, 590 bp, Homo sapiens
ataacttttagaattactaagtgaattaaataaaactgttgactacaaggccaatacttattaaaaatctatttctacaaataagaaataaggaaaaattataatatcaacaacacaaaaatcagagacgcaagaggtctaaaggaaactataaagtatttttgaaagaaataaagaaggcctgtattcatactttataagactcaataatgaaaatgtctattctcccaccayagatttatagatttaaaacaatccaaaatcaatatctatgaggtgtttttgagtgtgtgcgtacacaaactatcttaatgcctttctataattttctagttatttaataatgtaaatactgtgtaacaaactaccacaaggctgatgttctatatgtcatggttttgattgtaaggacttccaataggacatgactgtttgattctattgtgacagggtcaaaagtaaccccaagccctcacacaatcaatggcaagatgaaatagtgtgcagatcttgctaagagaagtgcataagaatacttaaccacttttaatccacagaagctcaaactgtggccatgtatttaaaattcc

SEQ ID NO: 48256 - DNA, 914 bp, Homo sapiens
tgattagtaatagaagaggtgacatctgtactctgatgatgacttctcccatttttaaaaaaggtgcaagcatatagagtagccataagttatctgtaaaattgagtagattgcatataaaattgataaaacaaaactaataattytctgtgagtcttagccctgacatactctcaatattgaaaaaatgctataatagaatattcatgatgaatttttgtgtaatttttcattattaacagtaagaattagagtttaactcctctgagattttagaaatatctgtgttaacttttttacatcgcttgcttttgaactcacacaagaggcaaccacaggagcattctgaacattaaaacattcagaatggcatgtcacccagcactgcagggacagtgtatttcaaaggaattatgctgaatgaaaaaagccaatttcataaggatattcttatgatttaatttatgtaccatttctgaaatgacaagattatatttctggagaacagattaacagctgccagggtttacaaaatggggccctgggttctacctccctgtgttggcttcacggtcttaggctcgttttcttccacataatgggcagcatgactactgatatctttgtagtggcactgttcacaatttcaacaccagagaaattatcccttcccttggtacttaacaaagattaccactacaatggccccgtgtgagtcacagttgctcatcacaactagttaagtgtggcttccagaaagatgacgggttgacagtaccctctagaaccatatgtttaacatatgggcaggatcctgggccaaatattctgtttctaagactacagagaaatgctgggcagggaaaataataggagcaatatgtgagcatttatttaacttcgtgtttttaagt

SEQ ID NO: 48257 - DNA, 574 bp, Homo sapiens
cacctgaggccaggagttcgagaccagcctggccaatatggtaaaaccccatctttactaaaaatacaaaaattagctgagcatggtggtgcaggcctgtcatcccagctactcgggaggctgaggcaggagaatcgctcgaacctgggaggcagaggttgcagtgaaccgagattgtgccattgcactccagcctggcaacagaacgagactccagctcaaaaaacaattaaacaaacaaaaccaaattgcacattttgcaaatcataaggcccttagtatacttgacaatgaatttaaagcagcctgaaatactcaagcgcagtatagacaagataaggagtaagaggacttctgagggaataggcttagamcctctgtcagccaagaaagtatgtgtcctacatattcttagctggaagttatggtgtgactccaccctccgcccatacctgggcttcccactcacaaggccaagcaagttttcaataaattccctgaaggagcttgaaagtaaattcaatttctattagtgcaacatgtaagtacattataaaatgtgggaaacagagaa

SEQ ID NO: 48258 - DNA, 539 bp, Homo sapiens
tcaagccattctcatgtctcagcctcccgagtagctgggactacaggcgtgcaccgctacacctgactaatttttgtatttttagtagagacagggtttcaccatgttggccaggctggtctcgaactcttagcctcaagtgatccaaccacctcggcctcccaaagttctgggattgcaggcgtgagcctccacaccggcctgttttacaatttaaataaattatgtagggaaaggaaaaataaaaagtcctgtttattatcctcaggaggcaaaagaatcctaggcctcctggataaatagccttasgcaaaaagaatgaaaacagtaataatacatacacacacgaatacaattgccccatagcatttgccccgtggaatagggaaaagatagtcatgatttacaagagccagcaggaacaagacaagatacatgtgttgagaagggaacagataattggaagatgctttgagtctgcagaagctttgagtgttactactaacatgcagaattattacccagctgtgtagataatc

SEQ ID NO: 48259 - DNA, 548 bp, Homo sapiens
atggaaacttcagattcctacagtcccatggagatcaaattttaaaagtacagtgaggacctgtggcaatcgcggtttaataactaaacatcaatttagaaaatactgtagaataggcagattttaagctaggttgatagaaatggtgggcacagataactcttcaagtyggtgaaaaggtgaagtttaaaaatgatggtaatttcaaggcaattcttctgctctaaatagtgagactgaatggtagctcactttcaccgcattcctcagtaatcatcgtcctcatcggtgttttgttctttagttctatgctgtgctgaaggagaggaagaagccatagaagccgcaataaagtgccattttcagcactgtcacccgaatagcagcatgggcccctgtgaagtgcagtcctgagaaagttcggttgagctgtttcatcgcttgtttatttccattaccttcccagagcagtgtttaaccttggcctcctttttccttctgctttaaagaagtgtttctgtctccccaagaagagctaggactgaaag

SEQ ID NO: 48260 - DNA, 548 bp, Homo sapiens
atggaaacttcagattcctacagtcccatggagatcaaattttaaaagtacagtgaggacctgtggcaatcgcggtttaataactaaacatcaatttagaaaatactgtagaataggcagattttaagctaggttgatagaaatggtgggcacagataactcttcaagttggtgaaaaggtgaagtttaaaaatgatggtaatttcaaggcaattcttctgctctaaatrgtgagactgaatggtagctcactttcaccgcattcctcagtaatcatcgtcctcatcggtgttttgttctttagttctatgctgtgctgaaggagaggaagaagccatagaagccgcaataaagtgccattttcagcactgtcacccgaatagcagcatgggcccctgtgaagtgcagtcctgagaaagttcggttgagctgtttcatcgcttgtttatttccattaccttcccagagcagtgtttaaccttggcctcctttttccttctgctttaaagaagtgtttctgtctccccaagaagagctaggactgaaag

SEQ ID NO: 48261 - DNA, 1244 bp, Homo sapiens
agcaacctctgcctcctgggttcatgcaattctcgtgcctcagcttcccaagtagctgggattacaggcatgcaccaccacccttggctaatttttgtatttttagtagagatggggtttcactatgttgaccaggctggtcttgaactcctgacctcaggtgatccacccgtcttggcctcccaaagtgctgggattacaggcattagccaccktgcccaggctctcctgagtttttatactgcagcataaagagctttgcctcagagatgagattatcagccacactgacaacatctctcatcccatggccttcattctaaaggattctggttcagagtccaaaccctggagcagacagatgcctgtgtgaccttgggcaggcttcttaaattttccctctgggttccctcatccatatcatagggacataacaatagtacatacctcaaagagttgttcaaagactatacagtgtaggtaagatgcttagaacagtgcctggcatgtagtgagcatgatataaagtgctggtttttactactatcatacgaaaatcagggattctagttcttgttttggtggccaacttaacgttttctcccactggtgtttagagtgtttgctctcatgcatatgagcaactcctcactgtctcaagttaagcttttcatgtgacagtcactccttccttactcagcacagggataagggatgagggggagtactagttcattttcacactgctgataaacacatacctgagactgggcaatttacaatggaaagaggtttaatggagaactcacagttccatgtgactggggaagcctcataatcatggtggaaggctaggaggagcaagtcacatcttacctggatggcagcaggcaaagagagcttgtgcatggcaactcccccttataaatccatcagatatcgtgagacttattcactatcatgagaacagcacaggaaagacctgctcccatgattcaattacctcccaccaggtcccaccaacatatggaaattcaagatgatatttgagtgggacacagccaagccatattggggggaaagtggaactggggctcctgggggagtcttcccttgagagtgagtggctaacatgcaacctgagtttttagtaggccctgtaaatcccacgtgaatggaaaccctatatatcatgaaaaggatagaaatgtggggacctgttaatactacattaacgtatataa

SEQ ID NO: 48262 - DNA, 1244 bp, Homo sapiens
agcaacctctgcctcctgggttcatgcaattctcgtgcctcagcttcccaagtagctgggattacaggcatgcaccaccacccttggctaatttttgtatttttagtagagatggggtttcactatgttgaccaggctggtcttgaactcctgacctcaggtgatccacccgtcttggcctcccaaagtgctgggattacaggcattagccaccgtgcccaggctctcctgagtttttatactgcagcataaagagctttgcctcagagatgagattatcagccacactgacaacatctctcatcccatggccttcattctaaaggattctggttcagagtccaaaccctggagcagacagatgcctrtgtgaccttgggcaggcttcttaaattttccctctgggttccctcatccatatcatagggacataacaatagtacatacctcaaagagttgttcaaagactatacagtgtaggtaagatgcttagaacagtgcctggcatgtagtgagcatgatataaagtgctggtttttactactatcatacgaaaatcagggattctagttcttgttttggtggccaacttaacgttttctcccactggtgtttagagtgtttgctctcatgcatatgagcaactcctcactgtctcaagttaagcttttcatgtgacagtcactccttccttactcagcacagggataagggatgagggggagtactagttcattttcacactgctgataaacacatacctgagactgggcaatttacaatggaaagaggtttaatggagaactcacagttccatgtgactggggaagcctcataatcatggtggaaggctaggaggagcaagtcacatcttacctggatggcagcaggcaaagagagcttgtgcatggcaactcccccttataaatccatcagatatcgtgagacttattcactatcatgagaacagcacaggaaagacctgctcccatgattcaattacctcccaccaggtcccaccaacatatggaaattcaagatgatatttgagtgggacacagccaagccatattggggggaaagtggaactggggctcctgggggagtcttcccttgagagtgagtggctaacatgcaacctgagtttttagtaggccctgtaaatcccacgtgaatggaaaccctatatatcatgaaaaggatagaaatgtggggacctgttaatactacattaacgtatataa

SEQ ID NO: 48263 - DNA, 635 bp, Homo sapiens
ctgattgcctgggtaacagggaaaataactgagttttctgtacctgtttgctcagctttaaaatgaacattataatcatacttttctatgtggtcatcgtgaagagcattcaataagtggaaactgctctttgcagaagcacacaaaactattgaaaatgcagatcagtagcatcttagcttcacactgttatcagaataagcccttattttttctcagaaccatcaaagccacttctcaggggctctggcccaggactcctggtgtggcagcagaaacagtgggatgtagtgccrcccgcagcgcagttactcaaagtgagatcttaagcgagtcaagctccctccacctcagtatccccaggaggacagtggtccccatcttgcggcatcattatgaggactgcaaatggcacatttctctggaggaaagctcactgcttttaggacgcctggcctgttcagccattgtcagcaatggtcaaccctccttgctggcagcaacgtgttctttctgaatcttcgcccactgccattgccctgtcttagattcctctccaattaatccacaccagagatttctaggatttctaatgaaactttagttgacaatgaatacttccaaatactttgtca

SEQ ID NO: 48264 - DNA, 539 bp, Homo sapiens
gtatagctagatggcttaagtaatgcttgtaactgttgtgcaaaactaatgaataagaataaaattctaagaatttgggggtactaattatttaatatttcttttcaacttgtgatctgttctcttgagtgagtgagaaatgagcataaattgaccaaaaggaaatgaatttatcttactttttttgccctagctgaaatttagagctatagctaccaccatctggaaaatctctgtcagagatgctaaacagcctttccctcctcattttatagtctccattgaggaatgggaatattaagtgacttacgttatagcaaataattttgaaagcatgstttctattataggatggtttataagcaatcactgactgatgatttggtgagtagtttaaaccatttgcttctttttttaaaaaaaaattcaattctttcctctagatccactcttcacagctgtggtctgaaagtttgtgtttccccaaattcatatgttgaaacctaacactttatgtggaactattgtaaggtgtggtc

SEQ ID NO: 48265 - DNA, 565 bp, Homo sapiens
tctcgtaaaattcttatgttttctgccagcaaaggactctatattcagtatcaaaatattgccctttgtaacttcaatatattattattgattttacccacttacataatctatatattatatttgaccaaaggccatagaataaagagaaacaatactccatgaattgaagatcaaagtttatctaaaatatggaatatttttagtttgtttgctttttgtttgtatactgactacaactttcaaagagaaacaaaatagatgtgattctcttcagaaaccatgtgtccacttacacacatgcacaaaacgtttaaaagacaaatgcataaatattcatattgtataagggtgtttaggtatttagtgtaggaaattttacaatttttctacattcctgcataatttaccttttcatattttggttgtgcaatacatattttacgtacaataatttctgcaactcattaaaaaatgtgcagcttattcagagtcatggaagaaaatacttccgtatmatttgtacttaattatttataataatctttctgtgcctttaaactac

SEQ ID NO: 48266 - DNA, 627 bp, Homo sapiens
atccctgaacctgttctgttccatgcatcgttatgaccatccttcaccattatcacaatgtcttcattaattttcattaatactaagatgagtattaagagtcctccaataccttcctttagaattgcagcattcacagatctttactgagatctgtcagtaggaaagtgcaccagggctgccaggaggaccccatacagcgacccagacacagctcagtgtgaatgagcccatgggggctgttgattcagagcacgtggccagcagtgaaggctgcaaccaccacagcaggactgccaggctttgggaggaagggaaggtctgtcagggtgaacagaggaggtttcaccataggaagccaacaggaagcatcaccacagcctgtgtggggaccagagcagcaaggtatcgagcattgagctgggccccaaagagaagatcacagcacggctgtccagaccagggccaccattgagtagcttggcctccayaggtctccctcacctctgcaagcctttggaagcataactgactcctttgggcagtgaagctcttacctttcaaaattaggagtaggccggcacggtagctcacgcctgtaatcccatcactttgggaggccaaggc

SEQ ID NO: 48267 - DNA, 538 bp, Homo sapiens
tccctatagtctcttaaggttcaaggggagtatgctatgatttcagttttccatgaactgatgaaaagtccatgatcaatttctgttaaccattttaccaccttcaactaaatatgtgttctctgttcaactaagctaagcaattcttttggtactttattctcattttgaagttctcatatatcttttaccttgttggatacacatgattctgccccaaaagaggtaaagaaataagaagctcacaatattacaggtgtagatacattttccttggttttatttaattatttaaataatgttttgttaccaatatayttgaacagatgaccaatccggtcaatctctgacacaaaactgccatcatgcatggtttatttaatgagctccatgcttttaatacgaaacctatcccagttttcttcatttcattacaggaattactggaattccaatattggctatgtatcactgtttacaaacgaagagtatatttctatccttcttgtcagaaaactcaaacaacaggattactact

SEQ ID NO: 48268 - DNA, 551 bp, Homo sapiens
aatgtgattgagactatttgtagaatctaggctatctgaaactgaaactcaaaaattcatcattttgagtaggtgagttcttaatattactaatttcacatctctttaagtgccaaaacttacaaacaattatttgttatgtaattcccctcttaatagagtatcactggatagaattttaatgttttcttaagcagttatggccttcaataggaaaatgaggaattagactactctcagtcattaaaatgggctgtaaaaattgtaatgttcatttattctacatgttttttgagtgcctactctgtgccaaaactttatgtaaattaactcttattagttagcaattctagcactgtaaaaaggttagctttttcaagatcccatagttaagtgrtggagctgaatttgataatccaatttcatttgttttctttatttcattcctctatggctgtggctacagcttcaacaatcttgtatctaagctatgtaaaaaaagaaaaaagtactcatagtattttaactttaatgttcatagtagatggtca

SEQ ID NO: 48269 - DNA, 551 bp, Homo sapiens
aatgtgattgagactatttgtagaatctaggctatctgaaactgaaactcaaaaattcatcattttgagtaggtgagttcttaatattactaatttcacatctctttaagtgccaaaacttacaaacaattatttgttatgtaattcccctcttaatagagtatcactggatagaattttaatgttttcttaagcagttatggccttcaataggaaaatgaggaattagactactctcagtcattaaaatgggctgtaaaaattgtaatgttcatttattctacatgttttttgagtgcctactctgtgccaaaactttatgtaaattaactcttattagttagcaattctagcactgtaaaaaggttagctttttcaagatcccatagttaagtggtggagctgaatttgataatccaatttcatttgttttctttatttcaytcctctatggctgtggctacagcttcaacaatcttgtatctaagctatgtaaaaaaagaaaaaagtactcatagtattttaactttaatgttcatagtagatggtca

SEQ ID NO: 48270 - DNA, 571 bp, Homo sapiens
ggacagagtgagaccctgtctcaaaaccaaaccaaaccaaaaaaaccccaccctataccattatagaatcacccagcagacactcatatcctacaatattgccctccctactctcccttccttgttcctctggagtaactctcccttaatgcagcaagttaaacacacttgtttgactacaagtgtgtttctagtagtctttaatatatgggtcagcaattttggctgagctcagctagatggtccttctgcacctggagtcacttacatggctgcagttttctggcakctcaactgggataagatggtctaagatggcttcattcacatggctagtggtcaggctggctgacagctgagccacatgtctccagcaggctagcccaggcatcttcatatggtagacttaggtggtataaggcaaaccccaatgcacagtatgttttaagcttctgcttgcatcgtgcttgttaatgtgccactggtcaaagtaagtcacatgactaatcacagactcaatgtggaggggactaccaagagtgtagaaataggaagaagtgatcaggggcca

SEQ ID NO: 48271 - DNA, 571 bp, Homo sapiens
ggacagagtgagaccctgtctcaaaaccaaaccaaaccaaaaaaaccccaccctataccattatagaatcacccagcagacactcatatcctacaatattgccctccctactctcccttccttgttcctctggagtaactctcccttaatgcagcaagttaaacacacttgtttgactacaagtgtgtttctagtagtctttaatatatgggtcagcaattttggctgagctcagctagatggtccttctgcacctggagtcacttacatggctgcagttttctggcagctcaactgggataasatggtctaagatggcttcattcacatggctagtggtcaggctggctgacagctgagccacatgtctccagcaggctagcccaggcatcttcatatggtagacttaggtggtataaggcaaaccccaatgcacagtatgttttaagcttctgcttgcatcgtgcttgttaatgtgccactggtcaaagtaagtcacatgactaatcacagactcaatgtggaggggactaccaagagtgtagaaataggaagaagtgatcaggggcca

SEQ ID NO: 48272 - DNA, 544 bp, Homo sapiens
tttaatcttctttaaatacatgtggattgaatgagctgtaatcaaatccacatgttgtggatcctaaggtcatcctgattttttttttttctttkgagacagggtctcagccgagtacgggggctcacccttgtaatcccttgggaactttgggagaccgaggcaggtgggttgcttgagcctaggagtttgagaccagcccaggcaatatagtaagagctcatatttacagaaagaagggattgaggctgggtgtggtggctcacacctgtattcccagcactttgggaggctgaggcaggtggatcacttgaggtcaggagtttgagaccagcctggccaacatggtgaaaccccatctctactaaaaatacaaaaaattagccaggcatgatggtgcgtgcctgtaatcccagctacttgggaggctggggcacaagaattgcttgaacctgggaggtggaggttgcagtgagccgagatcgtgccactgcactccagcctgggtgacagagtgagactccatctcacaaaaaaaagaagg

SEQ ID NO: 48273 - DNA, 544 bp, Homo sapiens
tttaatcttctttaaatacatgtggattgaatgagctgtaatcaaatccacatgttgtggatcctaaggtcatcctgattttttttttttctttggagacagggtctcagccgagtacgggggctcacccttgtaatcccttkggaactttgggagaccgaggcaggtgggttgcttgagcctaggagtttgagaccagcccaggcaatatagtaagagctcatatttacagaaagaagggattgaggctgggtgtggtggctcacacctgtattcccagcactttgggaggctgaggcaggtggatcacttgaggtcaggagtttgagaccagcctggccaacatggtgaaaccccatctctactaaaaatacaaaaaattagccaggcatgatggtgcgtgcctgtaatcccagctacttgggaggctggggcacaagaattgcttgaacctgggaggtggaggttgcagtgagccgagatcgtgccactgcactccagcctgggtgacagagtgagactccatctcacaaaaaaaagaagg

SEQ ID NO: 48274 - DNA, 543 bp, Homo sapiens
aaacagtcartttacttgggcttaaaagtatagctataaaaccataacatagttcaacaaatccataccttgcttttgctctagaactgcactgttctgtatagtagctactacctgcatatgtctacataaatttaaattaattaaaatgaaataaaatgtaaaattcagttccttagttgtactagccacatttcaagtcctcagtagacacatatgtctaggggctactgtaccagacagcacagatacagaaaatttccatcataacgaagttctagagcaaggactccctgttctaggataatggtcttttgtttttctaacatcatcagctctttcacaggtgcagaacctgtaaatgtatttattatgttttattcccattgttaggctaagcaaaagtgcagagctgataggctttgccagagctaattcccagttgctaccatagccagcagattacaaatcacattttaattaacttacaagatctaattcatgttatgacaattaaggcaaatagaaaaatggctgtactaa

SEQ ID NO: 48275 - DNA, 504 bp, Homo sapiens
aaaagagaaaaaaaaaaaaaacctcagtcaaaagggcagctggggaagcccacctaactctcttctctgagtccttkgcctattaaaaaaaactctcacctcctggtccaggcacgaaacaacactgtctatccgacagagcctgggctgggagcagcacagggtctagacttgcctctgcgtagacctcagtgtattctaagatcctacttttcttggcctgtttctccatctacaaagtggaagtcatgttccttgcccctcccagcacttaaagctattatagagaggaatgagttcaaaggtatgaaaacatgtaggagggaaaacgtacaaacgatcttctagagtgacttataataaaactctaggcatatacctccatgcttaactcccttcttaggcattctccttttgacttctaagcaagcaagatgttctatcataaaaagacaatcagttgcattcactgaaagtagaaaaatggactctcacattgatgaa

SEQ ID NO: 48276 - DNA, 504 bp, Homo sapiens
aaaagagaaaaaaaaaaaaaacctcagtcaaaagggcagctggggaagcccacctaactctcttctctgagtccttggcctattaaaaaaaactctcacctcctggtccaggcacgaaacaacactgtctatccgacagagcctgggctgggagcagcacagggtctagacttgcctctgcgtagacctcagtgtattctaagatcctacttttcttggcctgtttctccatctacaaagtggaagtcatgttccttgcccctcccagcacttaaagctattatagagaggaatgagttcaaaggtatgaaaacatgtaggarggaaaacgtacaaacgatcttctagagtgacttataataaaactctaggcatatacctccatgcttaactcccttcttaggcattctccttttgacttctaagcaagcaagatgttctatcataaaaagacaatcagttgcattcactgaaagtagaaaaatggactctcacattgatgaa

SEQ ID NO: 48277 - DNA, 978 bp, Homo sapiens
ccatttagcccaggagaaacaagtttctttgacgccaagttgaggacccaggctcgaccttagccttcagcgggcaaatctggttggtggcctgcccagggctctgcccctgctctggcccaattcccttactttacagctgaggaaactgcattcctgagacatacagcgtttcagctaccacacaggtgacttagtgaggcttgaggagcagaggaaggggcctagtccttgaaccccatagccttgggtttagattccagtcttacctcacctgtcctatgactcctctctgagcctgagtttcctcttttgcaaaagggagtaatactaatctctcacttgctggcctgtcttaaattttttgagaaagggcctcactctgtcacccaggccgtagtgcagtggcatgatcacagcacactacagtctctatgtcccagggccaagggatcctcccatctcagcctcccaagtagctgggaatacaggcacatgccaccatgccgggctaatttgtaaattttttgtagagatgggatctccctgtgttgaccaggctggtctcaaactgctgagtccaagcagtcctcctgcctcggcctcccaaagtgctgggattccaggcatgagcccctgcaccctatccttaaattcttttttcatggttttattcatcatcccaagctgtctgggctcaaggcgttagtatcccatgcaatgagggcctagaagtttcgtctcctgacatcctccccaggcagtcccatcgctgggtttcagaggccatcaagcccagcaggcttcaaatcccccaacagagtcccccttacctggggctgcytggggaactcccatcccacttcaacttgagcacctttgcctttgtatttttatttatttacatttcctggtaagaatttgttgcaagcacatgaaagattttgtggctgaagtaatgtaaaaccattgatcaaa

SEQ ID NO: 48278 - DNA, 978 bp, Homo sapiens
ccatttagcccaggagaaacaagtttctttgacgccaagttgaggacccaggctcgaccttagccttcagcgggcaaatctggttggtggcctgcccagggctctgcccctgctctggcccaattcccttactttacagctgaggaaactgcattcctgagacatacagcgtttcagctaccacacaggtgacttagtgaggcttgaggagcagaggaaggggcctagtccttgaaccccatagccttgggtttagattccagtcttacctcacctgtcctatgactcctctctgagcctgagtttcctcttttgcaaaagggagtaatactaatctctcacttgctggcctgtcttaaattttttgagaaagggcctcactctgtcacccaggccgtagtgcagtggcatgatcacagcacactacagtctctatgtcccagggccaagggatcctcccatctcagcctcccaagtagctgggaatacaggcacatgccaccatgccgggctaatttgtaaattttttgtagagatgggatctccctgtgttgaccaggctggtctcaaactgctgagtccaagcagtcctcctgcctcggcctcccaaagtgctgggattccaggcatgagcccctgcaccctatccttaaattcttttttcatggttttattcatcatcccaagctgtctgggctcaaggcgttagtatcccatgcaatgagggcctagaagtttcgtctcctgacatcctccccaggcagtcccatcgctgggtttcagaggccatcaagcccagcaggcttcaaatcccccaacagagtcccccttacctggggctgcctggggaactcccatcccacttcaacttgagcacctttgcytttgtatttttatttatttacatttcctggtaagaatttgttgcaagcacatgaaagattttgtggctgaagtaatgtaaaaccattgatcaaa

SEQ ID NO: 48279 - DNA, 358 bp, Homo sapiens
ccgctcccccccmccctcaccccacgtacctgaccagcccctgctctccagttcaggatgctcagcgcctgcacgggttcctcactcatgaatgcacacgcctggacctggaccgggctgcagggaactctgcgggaaacaggaaaaacaggtccccaggcctggggccacgcccagcctccagcatttttctgggcaggtagtgctgctgccacaaggggctcctgcagacagagggaggtagagaaagtgcggtctcagggtcatggaaacctacccaggtcaatcccccccagggccacctcctttgtggtaaccttaaccagaaggaggcagagaggtggcctggtgtttgtcc

SEQ ID NO: 48280 - DNA, 358 bp, Homo sapiens
ccgctcccccccacccycaccccacgtacctgaccagcccctgctctccagttcaggatgctcagcgcctgcacgggttcctcactcatgaatgcacacgcctggacctggaccgggctgcagggaactctgcgggaaacaggaaaaacaggtccccaggcctggggccacgcccagcctccagcatttttctgggcaggtagtgctgctgccacaaggggctcctgcagacagagggaggtagagaaagtgcggtctcagggtcatggaaacctacccaggtcaatcccccccagggccacctcctttgtggtaaccttaaccagaaggaggcagagaggtggcctggtgtttgtcc

SEQ ID NO: 48281 - DNA, 563 bp, Homo sapiens
tgcattaataattatttatgtgcctctcttatctcccctaatgctcctaatatgcacttgttttaaattatctttgtacttggcaagtactcagaaaccattgaygtgacaaacgaatacatgtgggttctgcaattcataaatggccctgtggccagatcttgtatttccttagtccttcctttatcaatcttctgtcttgctgagataaaacctgtgtctgctcttgtgtctagcattctgaaaccatttgttattcactaaattaaccatagattcttttatattttttgccacgagtttcctgagcttcaacatattattttatatgtgaatgaattaagaaatcatataaatgtgggtgaattcagttgctggcactggaaaattagaaaatgcttgccttcaaagctcctgtcctacgagattagtgccctgtagattttttactttaggagaaaggtaacaatgtaagtgatgagcaagttcacagggtatggtttactcaattattgatgctttgatgacaaggcattggggcaaaaattcatttatttgatgaa

SEQ ID NO: 48282 - DNA, 607 bp, Homo sapiens
cctccctcctcacatacagcctctcatgaagggagcttataagtctggctaaaattctgtttgacagttaaaaatgttctatcaaggcacagatgctattcagttctgtgacagaaaaattgttctttgagtatttccccaaaaccatgggtattctcctggagagccaaaacctgaattattgattcaaaataaaccccacctcaggtgtttctctgtcattgaatgatggtggtactcaacttcatctaagtgaatgaggaacaggcaaacgggtgatagctcctgcaaagggtggaagagtcaggctttggagcttggagccccaaatctggggatgccatctaccaagagcagaacttgacactaggaaaggatggttccatgcggaatcctttcagtctctggaggagagaagagcaagctgcagcaatgggcccattcccacatggtggatttatcagagtcaagatcagatcctgcattgaggtctctcacaccaactgcccagatgaaccttagatttaactgcagtaacagccraagtaagaagggacgtagggtgtttagtagatgtcagttcaggagcagctgatgctgtcactca

SEQ ID NO: 48283 - DNA, 579 bp, Homo sapiens
ccttatgctgggcccccttgatagtatcccttctaacagaatcctccattattgctcacgcatctccactgaatgtcattactttctctattatttgacagtccttaggattatgaagtttcaccctatatgaagccataatctgaaaattcatctgttggtcctagtgttggtgtctatctcttggcatgttatctgttcaacaaaagaaattactctcaaatttagtggcttaaaacartaacaactacaacaacagcaacaacaacaacaaatttattcttatatttcctgtgggtcagattttcagaaatggcttagctgaggggatatggctcaggatttctcctaagtttctaatgaagatgttgaaagcatttacagaatggcagagcaagggctcccaaaatctgcttctccataaaagcaatgagaacactgtttaagattgtaaaaatcaattttttcagaactttgaaaattaattaaaggcttgcaataatccaagaagttctaaagaaaaaggcctgaatctctgtaagaacagtgagctttgtagtgcttaacctgtctcattct

SEQ ID NO: 48284 - DNA, 557 bp, Homo sapiens
atgactgctttctcgtagcatcatttcattcgttcctgtatcctatatttttcgtcaattgaaatttgatctaaagatgtgattagtttcagattagacaatttgggcaagaatagttaatagcaattctatatagttgttttgcatcattggagtcaggtaaaatgtggctgttctacattgtttatagtgatgagtgggctcaaattatagcttttacttacttttatttttgtaactttactttttatacattttcaagtttcagacaagttttgagaataaaacaagtaacayacatacatactctttacccagaatcatcaactgattacattctgcctctttttgtcttatccttctctctttctttacacatacatacatacacacacacatgtgcacacacttagatatttaaaactttgatctcagtcatttgagggtaagttggctctaagtgctttatccctaagtacattactgtgtacttattaacaaggacattctctttcatattctacagtaattacaatcaatctaactttaaagtaata

SEQ ID NO: 48285 - DNA, 557 bp, Homo sapiens
atgactgctttctcgtagcatcatttcattcgttcctgtatcctatatttttcgtcaattgaaatttgatctaaagatgtgattagtttcagattagacaatttgggcaagaatagttaatagcaattctatatagttgttttgcatcattggagtcaggtaaaatgtggctgttctacattgtttatagtgatgagtgggctcaaattatagcttttacttacttttatttttgtaactttactttttatacattttcaagtttcagacaagttttgagaataaaacaagtaacacacatacatactctttacccagaatcatcaactgattacattctgcctctttttgtcttatccttctctctttctttacacatacatacatacacacacacatgtgcacacacttagatatttaaaactttgatctcagtcatttgagggtaagttggctctaagtgctttatccctaagtacatyactgtgtacttattaacaaggacattctctttcatattctacagtaattacaatcaatctaactttaaagtaata

SEQ ID NO: 48286 - DNA, 583 bp, Homo sapiens
ccctcttccctgtgtaggtcctagcgcctcaggaattcctctgactctacaataacccttccattctcagtcatgtgggcatgtaacagtatgataaaagtcaaaaagtcctggggtttttcattcaatttcttaaaagatactagcaacacccagaaatgaatgactcattggatttagcaaaagtgttaaaaatacaagtgtttaaagtgccatgctcagatagatcaggaaaacaggagtatttctgtgactataaatatgggctaggtactactgtgtatctgaattcaaatccttgcttagctactttttagttttgtcaaagattgacacattaattacgctctctgcgcttcagtttatttatctgtgatgatatgctaccccatgtttttgtgcagattaagttacatttcatgaactttttcctttttttttttttycctgtacctgctaaaataggtatccaagtattgttagctctctttctaggaacagggcatggtggctcacacctgtaatctcagcctcttctgaggctggggtgggagaatcatttgagcccgtcactttgaggctg

SEQ ID NO: 48287 - DNA, 583 bp, Homo sapiens
ccctcttccctgtgtaggtcctagcgcctcaggaattcctctgactctacaataacccttccattctcagtcatgtgggcatgtaacagtatgataaaagtcaaaaagtcctggggtttttcattcaatttcttaaaagatactagcaacacccagaaatgaatgactcattggatttagcaaaagtgttaaaaatacaagtgtttaaagtgccatgctcagatagatcaggaaaacaggagtatttctgtgactataaatatgggctaggtactactgtgtatctgaattcaaatccttgcttagctactttttagttttgtcaaagattgacacattaattacgctctctgcgcttcagtttatttatctgtgatgatatgctaccccatgtttttgtgcagattaagttacatttcatgaactttttcctttttttttttttccctgtacctgctaaaataggtatccaagtattgttagctctctttctaggaacagggcatggtggctcacacctgtaatctcagcctcttctgaggctggggtgggagaatcatttgagcccgtcactttgagsctg

SEQ ID NO: 48288 - DNA, 1840 bp, Homo sapiens
aaagagtgcacagtggcttttacaagaatactaagaattatttatttgttaaggtaacactatctgctgtagtaggtaaccctctctacccccaaatctgagtagcttaccatattagaagtcttttcctgttctcatagggttccattgstgctgggggtgaggaggggaggtggtaaaggggtttgttccacacaaccattcagagattcatattgatgaagacggccatcttcaacatatagtttccagagttgttctgggctcagtatttagactccaggtggtatatcagaggagagaaggagagtagagaactgtgtggcagatttttatgaaccagatctagaagggacattcatcactgtcactgggatgctgttaattaaaactcgagcatacaaccattcctaagaataaaagaggcagtgggatgttgcttatttgtgagttcattggaaaatcactagcttgtttttgccacaaaatattttttatgttgttacccaatacccccccccactgagacacacacacacactcaacacaaatacaactagagcaaaaaattcattaaataatcctctgtgtgtgatatagtctcatagtttctattctattttattgttttaaagtgctgtcatgacccattaaactgttattatggctgaatgagttttgacttattgtttggaaaacactgccctaaggtataactgtttctcgtaatcttagacagtgagatattgctaatgaggaggaaaacttctcttttaaaatcattttcaaataattgccatttctaataaataattcgtaatcatccgtgggtagaatattaaaataaagttgttaagaaatggaatattaattaatagaaaaccaggaagacttcagtccaatatggacaagcaagatctgctggcaaacgaggaaaattgtgtagggatttgagacaggccaaataaatagcattacttttttcccatctgagtttggaaccactgagaaatagagaagaaaaagcagatgggcattcaaatactggctttattactgataaagttaataatgaaaaatatggcttcctaatcctaaacctcaaacagagcttacctgcccagccacaggcagtgctaagcaacttcaggcctcctgattgcagcctgcccctgaaaaacttacagtatgaaggagcaaacaggaatgatgagtagaccccccaaaataagaggccagtactgaccacactttgacagcccctcatcccataatcacaatttagatcactcctcctccccctaaggagtttgaatgcgagggtggggaagtgtgacggatgcctctcacaagaagccaagggagagaaagctctcccccataaacaccaccaggcagagatggcatgacagcaatgtcattatcaaatgaagcctatcaaagtgctattcacttttctctgctattttctagaaagacaatacatttgcaatttttagaccatcttaagcaaatggaacaatgatttttcaaaactcacatatctgattccataggcttttgtggttctatgctatttccgagaatgggacatgtcattccttcaggaagataagtagcgtacatgccacattccctcccctaacccaggtgctgtatttatgcctttctgttttagttatggtttaggatttttagtttagggtttctcataatctactggcttacaatgatatctcacagcttctactaacccaagcaattcttacgttggtatctgtgggcatcgagtttcttcttatctaactctgcctcttaatgttcccagcacagcgttttg

SEQ ID NO: 48289 - DNA, 498 bp, Homo sapiens
gtctttttttttaaggatagtcaagtgaagccctgggagtggagaaagaacaaaaaaatctgtaactggttgkgatcaattagttgtaaataccacagcactcacaccagcccagtcaccttttttaaaaaatagtttttggcatcattatgttatatcgtacgtataaccttctccctttaaaacatcttgggatcttttttaaaaagtataatcactgttacatacacatgttgaaccaaatgctgttttaaacattgactattgccagtaggataggcacagaatccgtttcttttggcaaagctgtatgtttctttaacgtgtgctttatttcaaaggtactgtgctcatcttctgttcaaaaggtgtgtttaattaaacacaagaaaagcttcattgttcacttactatgtggtcccttaccagctctcagagcccactacccatgaagttaacatgtatgtaataaatgattgctaaaagttgtttaaaatg

SEQ ID NO: 48290 - DNA, 498 bp, Homo sapiens
gtctttttttttaaggatagtcaagtgaagccctgggagtggagaaagaacaaaaaaatctgtaactggttgggatcaattagttgtaaataccacagcactcacaccagcccagtcwccttttttaaaaaatagtttttggcatcattatgttatatcgtacgtataaccttctccctttaaaacatcttgggatcttttttaaaaagtataatcactgttacatacacatgttgaaccaaatgctgttttaaacattgactattgccagtaggataggcacagaatccgtttcttttggcaaagctgtatgtttctttaacgtgtgctttatttcaaaggtactgtgctcatcttctgttcaaaaggtgtgtttaattaaacacaagaaaagcttcattgttcacttactatgtggtcccttaccagctctcagagcccactacccatgaagttaacatgtatgtaataaatgattgctaaaagttgtttaaaatg

SEQ ID NO: 48291 - DNA, 498 bp, Homo sapiens
gtctttttttttaaggatagtcaagtgaagccctgggagtggagaaagaacaaaaaaatctgtaactggttgggatcaattagttgtaaataccacagcactcacaccagcccagtcaccttttttaaaaaatagtttttggcatcattatgttatatcgtacgtataaccttctccctttaaaacatcttgggatcttttttaaaaagtataatcactgttacatacacatgttgaaccaaatgctgttttaaacattgactattgccagtaggataggcacagaatccgtttcttttggcaaagctgtatgtttctttaacgtgtgctttatttcaaaggtactgtgctcatcttctgttcaaaaggtgtgtttaattaaacacargaaaagcttcattgttcacttactatgtggtcccttaccagctctcagagcccactacccatgaagttaacatgtatgtaataaatgattgctaaaagttgtttaaaatg

SEQ ID NO: 48292 - DNA, 1191 bp, Homo sapiens
cagagcatgttcaattaatgctttgttaaatattagtttggtgcaaaagtaattgtgtgctttttgctattaaacgtaatgagtgaaaatatatgagtgaatctgtgtattgagagagatcagaatatttgacatcttagaattcttgaacatcaaaattattataattaaaaaaactgctaccacattcagttgattcaaataaatggaactatgaagaataaaattttcattttgactctactactactaaaaactcaatgactatttttaggtccctgggaagtaactattgaactgttgcttcatgtgactaatggcttatactgaacaaatcatatgtatataccttcattcaccacgataaggcactgactcttccagaaatgtacctagtttgtttcctgtgtcatttttactcttcttttttcttaactactctttcttcagccttgactaataattctcaatcttgcctaatatcaacctttattttgcaatttttcaattttcagtgaactcagtgggatctcataactagataacccatagaattttccatgtttaaaaatgcataagctggtgttctttacagatattaaaatagatttcattttatctttcctagtaagttttctatatgcgataaagtacccaaagtatctatctacaattgagttatgttcagagacaaagtctatgtagtacaggcttttgactgacagcttagtggcattaggagtcatggtccatgaatagaaagtactgcaagttttaatgtattggatctcagtgttccatagaaggcgaaaaatttaacggacattggtccatgagttgaggaaccaaaatggatttagtcagggatcatgaagaatttagcatgaagtcagtatcagtcagcagaggaggactgcattatttcagtttaggtaaatgccagtcttctaagaagatacttgggaaaaaagccaaaactactttatttattctcattcctttaatttagcattacaacttccagacctaatatgtttttgaaataaaatatttattgagtgaatagatgattgttttctgtgcatatttycttttaaaaaagtaaacaaaaagaagaacacttaaaatttaattagatgccgatacatacccaatatctctaatgcttatttaagttaagcaaggatttca

SEQ ID NO: 48293 - DNA, 1281 bp, Homo sapiens
atgcattttaactgagacataaatccagattcaacaatgtgtttgaagaagccagttggatagagttgcattgctggtgaaatttggataatgatccatgacagttatgccataatgaattttactctctggatagtctctggtgctccacttacatctagttattgaaaaattaataaaagttaaaacctaggataagccatcatgtgttaaaggcctaaaaccttggcctgacattttagaacacctgtgttttcagggagcagcttggtagcagagccatgtgctggcttatgcttgtattgggtagcatgaggtccaatttatattctctttaaattggcaattttggccccatcttcctaagtttgcctttctgaccgtacagaacaattttgctattctaaatagttcagctctaccagtttgagtggataatgccttaactactgtttctacttcctccaacccaccccacacctcaacccatttttctagaatgrtgccagagtgatcttttctaaatacaaatcaatcatgtcacaccttgtataaaaacctggtgtgacatcccatttctcttagaatcaagaaagtattataacttttccttcaaggtctctgtggtaatgcctgtaccgaattctccagcctcatctccttctattctcttctgttactcctttgctatagtcatattaatttatttctgtcactcagatttgttaagctccctcaagagggcctttgaatataaatttccttttgcctggcatgccagtctctcgcttctttgtataattcccgaagaaaaacaccttctgtaagttttcatctaccgcatacaactccttggtaatgtttaccacatttgcaattcagcatttgtttgtggaattattttatcaatcatactctcttcaacttgtttataaacctttaagaccagggaatatatatctcatgataaaacttaactaaagaagttgcttctaatggataagcagagaaaacttcttcctgagatcaaatctagctctagtgaagacgctgtgaacattgttgaaatgacagcaatgaatttaaaatattacgtacactcagttaataaagcagcaacaggttttgagagaatcatctcaaattttgaaagaagttctactgtggattgtcagcctaaaataaccaaaaagaacagaatctagttcaaggagagcttactgaagtgcaaaagttgaggttaaccaactgagagaatagattgaaacagaccaaaatgga

SEQ ID NO: 48294 - DNA, 562 bp, Homo sapiens
tctatgcccccagcactatggccatgacagcctccagataggagaagggtctggcttcattgacatttccacggtagtgcatacagccctcgagacctactcaagagaggacaaaagagaggctcgggtagagcttatctagtggatgaacctgctcctagacacagagcactgcctggcatccctgctgcagaatcgggctaggatagggctgagtattctaattgcctgtgggataggatttcactatatccctgcacagctgttttcatgctgtggttggattttgacgctgtcgtaatttccccygttgtttgatattctcgcatttacattaaagaagtacaggagaagaacagtgttcttgggagaagatttcagcatttaggattcatacaaataaatgcatggactgcccacgcttccctcacatccgtcaaacaactcagttaaaaacaccttttcaaaaggctcttctataattttacttcttttaaaaatagtgatggggttatgtctgatgccccggaacgtccgtcatgcattgattttatccagttca

SEQ ID NO: 48295 - DNA, 562 bp, Homo sapiens
tctatgcccccagcactatggccatgacagcctccagataggagaagggtctggcttcattgacatttccacggtagtgcatacagccctcgagacctactcaagagaggacaaaagagaggctcgggtagagcttatctagtggatgaacctgctcctagacacagagcactgcctggcatccctgctgcagaatcgggctaggatagggctgagtattctaattgcctgtgggataggatttcactatatccctgcacagctgttttcatgctgtggttggattttgacgctgtcgtaatttcccccgttgtttgatatyctcgcatttacattaaagaagtacaggagaagaacagtgttcttgggagaagatttcagcatttaggattcatacaaataaatgcatggactgcccacgcttccctcacatccgtcaaacaactcagttaaaaacaccttttcaaaaggctcttctataattttacttcttttaaaaatagtgatggggttatgtctgatgccccggaacgtccgtcatgcattgattttatccagttca

SEQ ID NO: 48296 - DNA, 750 bp, Homo sapiens
tcagagaatacaacttttgggtgttgtcttccaccccgtgctaacactccttctttgccactggaagaaacttgatctgatggtgatcttattagcaagcaggaccatgtggcccttttagtttctccttatctcccagagccaaggtgttaactgagccagtgttcacttttgtcagaaaagaactggtaagtatctgtctttctagtctcttttttcctgtgtkcgtaggatatgctcttcttcggtctcctgtaccatgtggctgtctggagactatacaatccttctctttgcgatcggcctccagggtgggacactggcctcccataggctctggttctgagccgtgtgtgccaatctgacttgccagaacctctaccccattagagttttggggactgacctcactaaggataccaagcagtttctcattccccatctgcctgcaaagaggggcagccctgcagatgtgagactacaggattccagtgccttgttgccacctttcacctcacgacagctccacctcataccaaatcacaactctaaatgcaagactgtgatctgtaccttttttttttctttctttcttttgagacagggtctcactatgttgctcaggttggtttcaaactcctggggccaactaatgttcctgcctcagcctcctgagtagctgggattacaggtgtattgtcacactgcttgtcttttgaacccaggtataatgaggactttgaagtcaga

SEQ ID NO: 48297 - DNA, 750 bp, Homo sapiens
tcagagaatacaacttttgggtgttgtcttccaccccgtgctaacactccttctttgccactggaagaaacttgatctgatggtgatcttattagcaagcaggaccatgtggcccttttagtttctccttatctcccagagccaaggtgttaactgagccagtgttcacttttgtcagaaaagaactggtaagtatctgtctttctagtctcttttttcctgtgtgcgtaggatatgctcttcttcggtctcctgtaccatgtggctgtctggagactatacaatccttctctttgcgatcggcctccagggtgggacactggcctcccataggctctggttctgagccgtgtgtgccartctgacttgccagaacctctaccccattagagttttggggactgacctcactaaggataccaagcagtttctcattccccatctgcctgcaaagaggggcagccctgcagatgtgagactacaggattccagtgccttgttgccacctttcacctcacgacagctccacctcataccaaatcacaactctaaatgcaagactgtgatctgtaccttttttttttctttctttcttttgagacagggtctcactatgttgctcaggttggtttcaaactcctggggccaactaatgttcctgcctcagcctcctgagtagctgggattacaggtgtattgtcacactgcttgtcttttgaacccaggtataatgaggactttgaagtcaga

SEQ ID NO: 48298 - DNA, 611 bp, Homo sapiens
aacatttttgttacttattagaaatatgttgttagtatgatgtgaatttggaattaaactttctttttttctgaaggaatgaccattttccccagtcttaaaaaaaatcagtctttccccacattttagcttatgctaaattaccatatgtatctcgagttgtttttgtacatcctaatatattttactgctttttcactattcttatttcaggaatagattgctttgattatatcggtgtactctcctccttcattctttcctctattttctgaactgcttttgcacaattttcatttcttttatcactaatggtgctgaatatttttcatatttatacttkgattgttcttgtgttaattctttgatggtgtgctttgccaatgtaaatgtattgactttgagatgcagccttgaaatttctcagaggagacaccaggcaggcactgaaggtgtgggatgaggtcgtgcctggaaagatttaaatgtgtgaatcactctcacagttgacaccaggagtagttgagttctcagaagaaggatgtcaggagagaaatgaatgaagggccaaggtttaggagatgaggatagcagacaagaggaagaagaaa

SEQ ID NO: 48299 - DNA, 535 bp, Homo sapiens
acattgaggattgttatcatttaacagacaagtgtgaagaactgttcatggaaaaggctaagaatgaccatagaggtttagaaaatgaccataagcaatggtgtcacagaattcaagggaagagaccaggtgcggtggctcacgcctgtaatcccagcactttgggaggctaaggcaggcrgatcacgaggtcaggagttcaagaccatcctgggcaacatggtgaaaccctgtctctactaaaaatacaaaaattagctgggcgcagtggtgcgtgcctataatcccagctactagggaggctgaagcaggagaatcgcttgaccctgggaggcagaggttgcagtgagctgagattgtgccactgtactccagccggggtgacagagtgagactctgcctcaaataaataaataaataaacaaataaattcaagggaggatggagtttcaagaagcagaaagtccagagtggcaagtcatgtagaaaagtcatgttacaatagaaaggaaaagtgtccactagatattttgtc

SEQ ID NO: 48300 - DNA, 733 bp, Homo sapiens
taatcatcacaaccgtcctaagaggcaggcttytttttttttttttttgactgagtcttgctgctgcgggtctcggctggaatgcaatggtgcgatctccgctcactgcaacctccgcctcccgggttccagcaattctcctgcctcagcctcccaagtaggtaagattacaggagcccgccaccacgcctggctaatttttgtatttttagtagagacagggtttcaccatgttggccaggctggtctccaactcctgacctcaggtgatccacccccctcggcctcccaaagtgctgggattacaggcgtgagccacagcgcccggcagaggcaggcattataattaatctcttatacagatgaagatgcttaggtgcatgaaattaagaacttacccactatcacccacagaaaaagagaagagttggggtttgaatccacgcaagagcccacgcccttaatcattaagctaccaagatataactctgtagatgggaaaccatatctattaactggctctggaattttaaaaggcaattttataagttacaaaaatagatatggataattatttattcaatggagctgactcacaattcagaacacccaatgtgatttattctttggttggggaaacaattattgatccggtgttgattcatgttctggaaaccacatgaaaatacctaagcagccgcagatgctgagcggagctgggccaagttggtaa

SEQ ID NO: 48301 - DNA, 1918 bp, Homo sapiens
acattagtttattgctacaggatccacacctagtccataaatatccatggtccactgcagtttgaacgccattaccccccagtgcaatccttttctggtgctgccaacttcagccaggctctcacctatgcaattctcttctcctactctagcgaagaccagagtgattgtctcaaagccctctctctcacctgacttcccttctgggaagcttacaacattgacactcttcytcaagcaccctgtggtcaatgccaactttagggatggttatgtggagaaacagtagtggcatttaattataggatagagtatgtatgatccggctttagggctcctagcccagagttgaagggcaagtttcattcccagggaaaatatacaaaaaaggaaaaagtgctgtctttgacacatggttctctctctctctctctctctccctttttttgagatggagtcttgatctctcgcccaggctggagtgcaatggtgcaatctctgctcactgaaacctccacctcccgggttcaagtggttctcgtgcctcagcctctcgagtagctgagattatacgtgcccaccaccaccccccaggctaattttttgaatttttagacagggtttcatcgtgttggctgggctggtctcgaactcctgacctcaggtgatccacccatctcggcctcccaaagtgttgggattacaggtatgagccaacacacccggcctggtgctctctttttatagatcagatagatggctaagggtcggaagctctaggttgagtcaaaagagccacttcccaatgtttgtttgtgctattttctgtcttgttaggccagcagaattgcactcaagactctcatttgagtttaactctaggatctaggtgcaagagaccagatacaaatgtcagcacaagccatgagatacaggatttctttgtcaataataaacagaatggaacaccaggagcgcatgctgtttcttcatgaaacaaataggcaaataggcagttgctagtagggattcccaatattcataaacctcaaaaggtaaaactgtggtacttctgcatgaaaatataaaacataatagaaagtccataaagaaaaatatatacaggaatctagcatacaataaggatgtcatcacaagtaagtgagaaaaatgaagcttttaatttttatatggttaaaatgatcagtgttaattttttcatgactaccggattttgtatgacagttagaaaagtctttcccaatctgaagttataaaaaaactagtccagggtttctgtctcatgttcattaaaaaaaaataaatttattactggtgttagaacaattagctagcatctggagtaagttagcattgcacatcttacaccagaataaatcccaaattgattaaaggttgaatttaaaaaataagaccatgtaagtacaagaaaatatcattgaattcttttatgtccttggaatgaggaagacctttcttaataaaatacaaaatctagaagtcactaaagatgaaaaggataattttaactacataaaaatcaagaaattctgcatggaaaaaatactacaagcaaactcaaaagataaacacaaaatcggtggtggtggtagagggttgattgtaattcatgtcaccaacaaaggctaattcccaaatatataaataacttttagtaattgagataaactaacaacctcccccaaaacagttaagatcatccacagataactacataaacaacccacaaacatagcaaaagaagcaacaccttaacagtaatgtgagaaatgcaaatgttacttaaacagaggtatgatattttacatattttattagcaaaaacccagaggttgacatattcttctggcaaaactgtggggaaactagtatcctc

SEQ ID NO: 48302 - DNA, 543 bp, Homo sapiens
tgcactcctcccagtgcgcaggccagttggagtttctctggggaccccttatcacctggctgtctcaaaggtattggcatctgasgtctggtgagggccttgtggctgcattcttatacggcaaaagttggaagggcaagagagagttaatgcactcctgtaagccctttttatatgaacgtcagcccatttaagggggtggagacctcaagttctaaacaccttccaaaaggtcccacctccaaacatcatgacattgggattaagtttccaacacatgaattttgagggacacatttagaccatagtggtcatcatctttttataatcttcatcattcttttccctggggatggttgatgataatgcagttaggtacctctataacttcttaattaattttgattattttcagcctggaaagaagttcttggtaatgtgtcacagggctccaatggctttatacagtttagataaatttagaaggcatcattagtcagttaaggatgaccacaaatgtaggaagatcagaaaatatagagc

SEQ ID NO: 48303 - DNA, 613 bp, Homo sapiens
agaccagaaagttctgttgacatctggacttgatctcatttagctggggggtgggaaggggggttcttctggaggcaatgactggacctcatttcccagttcactgatggtgactaattccggccatgccagagagaaagaggaacagtattaggcaagtggaacttttagagacaattaagtcagacagtttaagctgcaacttaaatgagttggagagtacttattattccgtgcatgttcacgccttaactgacctgtggccatctcacttcacagccatatgattctcattctcttctctagtgagggaacctkggagacccatgttgctttttttttttttttctgcagagcttatacatttctcttggatatcttccatgactcttttttttttttttttttttttttgggccagaaattatgtcagttatattacggggggtgatttatgtaaaagatgttaatgacttaaatggaagaaattttaatagagatactaacgcagttgtaattactttagttattgcaaagcaaaatgtagcaagacaacgacttgaagtattaaccagtgcattttcacagctgcatgtctttcttattctttagg

SEQ ID NO: 48304 - DNA, 613 bp, Homo sapiens
agaccagaaagttctgttgacatctggacttgatctcatttagctggggggtgggaaggggggttcttctggaggcaatgactggacctcatttcccagttcactgatggtgactaattccggccatgccagagagaaagaggaacagtattaggcaagtggaacttttagagacaattaagtcagacagtttaagctgcaacttaaatgagttggagagtacttattattccgtgcatgttcacgccttaactgacctgtggccatctcacttcacagccatatgattctcattctcttctctagtgagggaacctgggagacccatgttgctttttttttttttttctgcagagcttatacatttctcttggatatcttccatgactcttttttttttttttttttttttttkggccagaaattatgtcagttatattacggggggtgatttatgtaaaagatgttaatgacttaaatggaagaaattttaatagagatactaacgcagttgtaattactttagttattgcaaagcaaaatgtagcaagacaacgacttgaagtattaaccagtgcattttcacagctgcatgtctttcttattctttagg

SEQ ID NO: 48305 - DNA, 1526 bp, Homo sapiens
ctgtgattaactggaacatttttgtttctaaagagattcaaaagaattttaaactcttatttctctttcttaaaaacagcatacttgttctagtttgttgtccagacattataaaacatagtattaattattagtaaactgaagcaaactttaggcaaaatgggacagttttaatctcatctcagtttaaagagaaaagtgaataaatactttgaatagtgtaagtaaaatttaagtagaaatartttcctgaattggaattatttaaaatatgactaatttggtcctctttagaagaagaataaaagtttatccatttaccatctgctgtgaaactaatttgcagacttctctatcattttccctacaaagattcttaactggactacttttaacaataaaatgatggtcaatcatcaccctagaagaacagtcagagtcctatttttcacaaaaattctcatgtgagattgatgaatcagaacacagtgacagatatgagattgagttgaaggaagggtcagttcacttatgtgagcattgcatacatattgctacccttccagaacactaaagacttaaagttatccttcctgatgagctcaatggatagctatcaatagaaaccatatatctaaatataccgcataatttaaaattgggctaaaagagtacaaatagctctacattgtttatatgattctattcagaaaaatcaattaactgaagggaaattgtcataaatggattaagattttccttgttttgtaaaatatactaaggtaaaagaaatcagtagataattcagagaaataaatatattagaggcatactctgtaatatttctgtatctctttactgataatttacaatggaaatagctgaaaccatatgatatcatctaaactcattttatgggaagcagtgtgtactagctagccataaatatactaccatccaaaaatataatttgcttaagaaaagttgcggactgacaaaacttggacaaagatatttctaatcagctggtattactgatgccttccgtaaaaatgagatagaacttgcctatgatgacgacaagttctgtgatgtgaactgtgctttctcagtactgtctgaaactaacgaaagcatttgattttcatggggaggaaactggtgatgccagcccccagtgaccttgtgctctgctgcagctcacctctggatgatgaactccctggcgccatcccacaggtgcccgtgcacgatccactcgtccaccgtctgcaggtaaggccgcaccgtttccacccagagagagaaaaggagggagacctgaggcagagagtgtgcacggtcagctctcagggttccctggtcactaggataaaaggaggtttaaacatttctgaaatgcctttaaaaaagtgatcggatttctatgttttttggggcacaaagaaattaaaaatccaaaaacatacactataaaatccttatgaaaaactcacctaaatgccgggcgtggtggctcacgcctg

SEQ ID NO: 48306 - DNA, 1526 bp, Homo sapiens
ctgtgattaactggaacatttttgtttctaaagagattcaaaagaattttaaactcttatttctctttcttaaaaacagcatacttgttctagtttgttgtccagacattataaaacatagtattaattattagtaaactgaagcaaactttaggcaaaatgggacagttttaatctcatctcagtttaaagagaaaagtgaataaatactttgaatagtgtaagtaaaatttaagtagaaatagtttcctgaattggaattatttaaaatatgactaatttggtcctctttagaagaagaataaaagtttatccatttaccatctgctgtgaaactaatttgcagacttctctatcattttccctacaaagattcttaactggactacttttaacaataaaatgatggtcaatcatcaccctagaagaacagtcagagtcctatttttcacaaaaattctcatgtgagattgatgaatcagaacacagtgacagatatgagattgagttgaaggaagggtcagttcacttatgtgagcattgcatacatattgctacccttccagaacactaaagacttaaagttatccttcctgatgagctcaatggatagctatcaatagaaaccatatatctaaatataccgcataatttaaaattgggctaaaagagtacaaatagctctacattgtttatatgattctattcagaaaaatcaattaactgaagggaaattgtcataaatggattaagattttccttgttttgtaaaatatactaaggtaaaagaaatcagtagataattcagagaaataaatatattagaggcatactctgtaatatttctgtatctctttactgataatttacaatggaaatagctgaaaccatatgatatcatctaaactcattttatgggaagcagtgtgtactagctagccataaatatactaccatccaaaaatataatttgcttaagaaaagttgcggactgacaaaacttggacaaagatatttctaatcagctggtattactgatgccttccgtaaaaatgaratagaacttgcctatgatgacgacaagttctgtgatgtgaactgtgctttctcagtactgtctgaaactaacgaaagcatttgattttcatggggaggaaactggtgatgccagcccccagtgaccttgtgctctgctgcagctcacctctggatgatgaactccctggcgccatcccacaggtgcccgtgcacgatccactcgtccaccgtctgcaggtaaggccgcaccgtttccacccagagagagaaaaggagggagacctgaggcagagagtgtgcacggtcagctctcagggttccctggtcactaggataaaaggaggtttaaacatttctgaaatgcctttaaaaaagtgatcggatttctatgttttttggggcacaaagaaattaaaaatccaaaaacatacactataaaatccttatgaaaaactcacctaaatgccgggcgtggtggctcacgcctg

SEQ ID NO: 48307 - DNA, 615 bp, Homo sapiens
gaagatgtaaagtttttcattttcagcaaatgagttcctttttttttttccttttactttgttttctttttggagacagagtctcgatctgtcacccaggctggagtgcagtggtctggtctcggctcactgcaacttccgcctcctgggttcaagtgattctcctgcctcagcctcctgagtagctgggactacaggtgcatgccatcatgcctggctagttttttgtattttaatagagatggggtttcatcgtgttgcccaggctggtcttgaactcctgagctcaggcaatctgcctgccttgtcctcccaaagtgctagggttacagacgtgagccaccgtgcctggccaaattagttccttttgttacctagcctcctttgtcagttatctatgcattaaacggttttcagtgcctggtcttcagcattggattggatgatggctgatggaagaaaaaaaaacagtggttatacmttggaatttagttttcagttactggtgaattttagatccaaggagactactaaacctggctcagttatttttggacaccaaaacataattttattggaaagcgaacacactctatcaaccaattttaaataaaa

SEQ ID NO: 48308 - DNA, 440 bp, Homo sapiens
ggtttagttattgaaatgttgggggaatctaaaactgttttcttcctttcctgtgatcagcagtatgcatcatttgatgaaatccatccttaaagagaatctagaagcccatctagaggtctgacttttcagaggtgccaaaattcgtctgaattaatctcgtaatttaaatctctataagtttcattagtattatatttcctcaaatatccccatttaaaagccttccctatccagttgaatatattgtctttcaagtaaagatttaaagtactattatttatagataattttaaaaatatatattgaaacttttatgcatgataggaaaattactaaggaagataaaaattaggaaaagagatagtataataaatattttaagctagattatttaagataaggtgctatagctatggtrttcagattaactttataat

SEQ ID NO: 48309 - DNA, 568 bp, Homo sapiens
ttgtattgttcgcagagacggtgctccactatggtgtccatgctggttttgagcatcctgacttcataatccacctgccgtggttctgcccaaagctgtggctattagcagcgtgagccaccacaccctgccaagctgtagtctcctaatctattttagctggcatcttctatttattctatttttttgagatggagtctcgctctgtcacccaggctggagtgcagtggtgtgatctcggctcactgcaagctccacctcctgggttcatgycattctcctgcctcagcctcccaagtagcagggactacaggagcccaccacctacgcccagctaattttttgtatttttaatagagatggggtttcaccgtgttagccaggatggtctcgatctcctgaccttgtgatccacccacctcggcctcccaaagtgctgggattatcaggtgtgagccaccgcgcctggcccacatgctcaaatttttaaaatgatttaatgaaaatagacataactagaaattctggtattccccttccttacccagtgggtcatcccaaacacatg

SEQ ID NO: 48310 - DNA, 554 bp, Homo sapiens
ctatagttatcatgtgagggaggtgcttccagcccattttcctgacaactctaactccatgcttttcttggcagtacttcctctccagacacacctctgcatcaacccaagatgacttaaggaaagaacaagttaacaaatctccaaatatggagggagagcaagaatgaagtatttctaaagagactccacctaaagtttcatgccatagaaatgattataaaaactatgttcccagcttgggcaacattgtgaaaccccgtctctactaaaaactgaaaaatcagccacacatggcagcgtgcacctaatagtcccaarctacgcaggaggctgaggtgggaggatcacctgagcccgggaggcagaggttgcagtaagctgagattgcaccactgtaccccagcctaagagacggagcaagaccctgtctcaaaaaataaaaaataaaaaaccttgtttgatggttctggaagtatttccaaaaagaagctatttgtattgtaaaatgcacacaagtaggcacacatagatactgtaaaggaaaaacaatg

SEQ ID NO: 48311 - DNA, 519 bp, Homo sapiens
tggtttcgaactcctgacctcaagtcaggcccacctcggcctcccaaagtgctgggattacaggtgtaagccaccacacctggccataaccatgtttcttaatacaagtctgcattgcaactagctatatacaaagatacagttttaaactgtgatttttggaattcttgagactcttaacatgccatcactccacttcacactttattggaaaaccagcaaaaaaaaaaaaaaaaaaaaaaggccgtgtcttaaatacagatttataaaatctattcaaaaataatttcctcttaataaaatggaaatcactatatcccaaagtcaattcaatggttgcaacagataaaggatttctttccattttctatactttgctttcacccaaacttagattcaaatttaaacacagatgttttgagtgayacattaaaatactgcttcatatttgctaagatagatataaaatgaatctctgacttcccatatagtactgtgcttgttttatgcaaaaactgg

SEQ ID NO: 48312 - DNA, 543 bp, Homo sapiens
tcccttttataaataaggaattattaggaggcaaaccctcttattcctcatcatgttctctagcaatcaaatactggataatatatctaaaggtagatttttctgagttagttctattccatctatacccctccctgattattcatccatccatccaaatactcattctcagcctgggcaacatggtgagactccatccctacaaaaaaattagctgggcatggtggcacatccctgtagtctcagctactcaggaggctgaggtaggagtatcgcttgaacctgagaggttgaggctgcagtgagccatgaytgtgcagtgcaaatccagcctgggtggcggaacctgggtggcagagcaaaccctgtctcaaaaaaaaaaaaaaaaataaccatcctctgtctcacccatccatgtacccacccacccatcgctacaacccttactattaatgttacagttcataaaatttggggccaaagaactctttccctttggcccctgtcagtagtctcttcctatctctggcaggttttgtggta

SEQ ID NO: 48313 - DNA, 513 bp, Homo sapiens
taatgtgaccctgataatgaaactataaaataaatcattaactttctgaatgagcttttttatttcagtgctgcacagagtaaacttttcagtttattccagatcagtctttttatgcccccaccttctgcctctggcctaaccgactcttctccacccaggttggggacagaggagtgacaggaggcctgggaaaagcctggggaatcttcctggcaggactgaccccagcagacacagctcaggggctggggaagggagagttagccaggaatgggggtccagacatgcaccttaaataagccccataaagttgcccaccygtgagaagaaaggacttttttgaacctgcagaccctctaaagatccccatccactggcaactgggctctgagactgaagcacccaacagagccacctgcagcaacaccccagatgcatcagacccttggggagacaggctacagggcgggtgagagattcacgagaatactgggtcaattttcccagccc

SEQ ID NO: 48314 - DNA, 548 bp, Homo sapiens
ttttactagttcaaccaaaagtaattgtctggccttgggcaagacctttaatgtttctgagctgcagaattctcatctggaaaatgagaaggttttttgggtgacttccatcaagaccttttttgacaagaggctatgttctccattctatggtttggcgttgacactggcctagatttattatttttataatgctatttttgcttgtgtagacacctttctggattcactaatcattctttgaactgatggtaatttattttgactgtattgattactgtaagtgccattcattcttcgtgattaagaaaaaaaaagagcatcctttgcttctattctgtttatatcttttttaaggccatattgctcatctttttaatctcataaatctaatatagcaatgaraattggtgagaaatgcaaacataatgaacaaaacaaaatacaaaaacgaaaggaagctggctgtgtgcagtggctcacacctgtaatctgtaatcccagcactttgggaggctgaggttggtggatcacctgaggtcaagatt

SEQ ID NO: 48315 - DNA, 548 bp, Homo sapiens
ttttactagttcaaccaaaagtaattgtctggccttgggcaagacctttaatgtttctgagctgcagaattctcatctggaaaatgagaaggttttttgggtgacttccatcaagaccttttttgacaagaggctatgttctccattctatggtttggcgttgacactggcctagatttattatttttataatgctatttttgcttgtgtagacacctttctggattcactaatcattctttgaactgatggtaatttattttgactgtattgattactgtaagtgccattcattcttcgtgattaagaaaaaaaaagagcatcctttgcttctattctgtttatatcttttttaaggccatattgctcatctttttaatctcataaatctaatatagcaatgagaattggtgagaaatgcaaacataatgaacaaaacaaaatacaaaaacraaaggaagctggctgtgtgcagtggctcacacctgtaatctgtaatcccagcactttgggaggctgaggttggtggatcacctgaggtcaagatt

SEQ ID NO: 48316 - DNA, 560 bp, Homo sapiens
ccaaattgatttccagraagagcttactctttcatagtttatgagaagtgttggtttttctgcccttttgacaacacagggcatcatttgaaatttttgtgctgtcctggtttattattttaattttcatttattttgttgttaatgcaactggatttttaaaaaatgtgcttaatgtattttactattataatcatattaaattagtgttttgtataaagcgcccacagcaaaaccaagcaaaaaagaatattgtcctgtctctttcttctacttgctggatcatgattctcatgagtggatgagaaggaagctgtgggctttggcaggtctagagagaagcttgaagtgacatctaggaaggagggtctcccttggagtcttggaggggccatcgagggctgagagagaccgtggtggggcagacagcactatccagcctcatccacagaggtggcattttccaggctctggctcctataaaggtgtgggtgacttctgaagctggatctatgggccaccccacaggaacaaatggtcatggttggaaattcagatgc

SEQ ID NO: 48317 - DNA, 560 bp, Homo sapiens
ccaaattgatttccaggaagagcttactctttcatagtttatgagaagtgttggtttttctgcccttttgacaacacagggcatcatttgaaatttttgtgctgtcctggtttattattttaattttcatttattttgttgttaatgcaactggatttttaaaaaatgtgcttaatgtattttactattataatcatattaaattagtgttttgtataaagcgcccacagcaaaaccaagcaaaaaagaatattgtcctgtctctttcttctacttgctggatcatgattctcatgagtggatgagaaggaagctgtgggctttggcaggtctagagagaagcttgaagtgacatctaggaaggagggtctcccttggagtcttggaggggccatcgagggctgagagagacygtggtggggcagacagcactatccagcctcatccacagaggtggcattttccaggctctggctcctataaaggtgtgggtgacttctgaagctggatctatgggccaccccacaggaacaaatggtcatggttggaaattcagatgc

SEQ ID NO: 48318 - DNA, 535 bp, Homo sapiens
gagaatgtttttgccttatcagaatctaagtgctttgagaacaagggccttggcctctagtatatgttgtactctactcatatataaatatgtattttaaaattatgtcccttttccctgtgcctagatagaaagtatctaggcacagttagatttctctcatacatttctatttccttcacccttttgagcatatgtccaatttgatgttgggcaatggataaggacctgtttgggtagaaaaatgagataactgtaggatacacagggactgaaatttgatatttcastgcattgttctgtgatgtcaaacaaatcaatttggcaggctagagaggtccctccctgaggctacaacacttaagagaactctgacctcaggctaggaatttcacgccttgaaccttagttttcttatatcttaaatggtgataactgtacttccttaggtctctaacaggatcttttattaggcttaattgacataatacatgtcaacatataacacaaacagaaacagaaatagtaaaatatc

SEQ ID NO: 48319 - DNA, 535 bp, Homo sapiens
gagaatgtttttgccttatcagaatctaagtgctttgagaacaagggccttggcctctagtatatgttgtactctactcatatataaatatgtattttaaaattatgtcccttttccctgtgcctagatagaaagtatctaggcacagttagatttctctcatacatttctatttccttcacccttttgagcatatgtccaatttgatgttgggcaatggataaggacctgtttgggtagaaaaatgagataactgtaggatacacagggactgaaatttgatatttcactgcattgytctgtgatgtcaaacaaatcaatttggcaggctagagaggtccctccctgaggctacaacacttaagagaactctgacctcaggctaggaatttcacgccttgaaccttagttttcttatatcttaaatggtgataactgtacttccttaggtctctaacaggatcttttattaggcttaattgacataatacatgtcaacatataacacaaacagaaacagaaatagtaaaatatc

SEQ ID NO: 48320 - DNA, 535 bp, Homo sapiens
gagaatgtttttgccttatcagaatctaagtgctttgagaacaagggccttggcctctagtatatgttgtactctactcatatataaatatgtattttaaaattatgtcccttttccctgtgcctagatagaaagtatctaggcacagttagatttctctcatacatttctatttccttcacccttttgagcatatgtccaatttgatgttgggcaatggataaggacctgtttgggtagaaaaatgagataactgtaggatacacagggactgaaatttgatatttcactgcattgttctgtgatgtcaaacaaatcaatttggcaggctagagaggtccctccctgaggctacaacacttaagagaactctgacctcaggctaggaatttcacgccttgaaccttagttttcttatatcttaaatggtgataactgtacttccttaggtctctaacaggatcttttattaggcttaattgacataatacatgtcaacatataacacaaacagaaacagaaakagtaaaatatc

SEQ ID NO: 48321 - DNA, 571 bp, Homo sapiens
cttgaatgggaagaaatgagaagaacttttctttcagtgaatggagtaagaatttccagatgtctaccagtgagtaccatacacaaaaatagaaaattcagcttatttaaaatgtagctcattatagtcttccctgaacatgctgattctcctcttctttccccctttcttgactagtgccatcatgtgcactttctcctttacctccaccattcagttcatgagtcacttagcctcatctctgtaatttttttcatggtattccttcccttgctattttcttagtctttattgtttctcctctggcctgtagtgatcgcctttaaaaacaagtctctttgcttctggtattgtatcctttctaaacttcacactgccatcagttatttttctacaacacagacttgttaatgacaccatccctttttatgagtttaacatgatctaaacctttcttaggatcttacacaggactcttcatgtactgatcctyaaatgacatatccagccacatttcacatcccctacattgcactgtaccctgtactatagttacattaagtttccttca

SEQ ID NO: 48322 - DNA, 607 bp, Homo sapiens
aaattcatcagtgtgggccctacaacttatattaaaggaaattcatcatctctcttccctcactgctgggctctgggggaaagagttgagaagctgtaggcagtggagttaaatcatgtgtagatgacagccctaaacacctgtctggatatccttgtggctgtcagggagggagagggagaacaggagttggatagctttaccarctggagtttcgcctaccaggctggtcttcctttccgttcgagggctccctgtatcctgcaatgtggaacacctggcagaactgcgtgtgctgctctattgattttggctcatttcttcaatttaacaagatcgtcctgaattttaatattgtcatccaaagcattagcaatgtttcccagagctgcattttctgtggattgattagtgcatttgtcataggatcctcagagctattaatagaaaatatggagggagattggacccaggacggttccttataaactccacgcaatagctgctccgattttgaccccaaactattaatacggtttcagtgttcaatatatttaattgactttttacccatattatactcttctcattctgtctcatccatatg

SEQ ID NO: 48323 - DNA, 607 bp, Homo sapiens
aaattcatcagtgtgggccctacaacttatattaaaggaaattcatcatctctcttccctcactgctgggctctgggggaaagagttgagaagctgtaggcagtggagttaaatcatgtgtagatgacagccctaaacacctgtctggatatccttgtggctgtcagggagggagagggagaacaggagttggatagctttaccagctggagtttcgcctaccaggctggtcttcctttccgttcgagggctccctgtatcctgcaatgtggaacacctggcagaactgcgtgtgctgctctattgattttggctcatttcttcaatttaacaagatcgtcctgaattttaatattgtcatccaaagcattagcaatgtttcccagagctgcattttctgtggattgattagtgcatttgtcataggatcctcagagctattaatagaaaatatggagggrgattggacccaggacggttccttataaactccacgcaatagctgctccgattttgaccccaaactattaatacggtttcagtgttcaatatatttaattgactttttacccatattatactcttctcattctgtctcatccatatg

SEQ ID NO: 48324 - DNA, 607 bp, Homo sapiens
aaattcatcagtgtgggccctacaacttatattaaaggaaattcatcatctctcttccctcactgctgggctctgggggaaagagttgagaagctgtaggcagtggagttaaatcatgtgtagatgacagccctaaacacctgtctggatatccttgtggctgtcagggagggagagggagaacaggagttggatagctttaccagctggagtttcgcctaccaggctggtcttcctttccgttcgagggctccctgtatcctgcaatgtggaacacctggcagaactgcgtgtgctgctctattgattttggctcatttcttcaatttaacaagatcgtcctgaattttaatattgtcatccaaagcattagcaatgtttcccagagctgcattttctgtggattgattagtgcatttgtcataggatcctcagagctattaatagaaaatatggagggagattggacccaggacggttccttataaactccacgcaatagctgctccgattttgaccccaarctattaatacggtttcagtgttcaatatatttaattgactttttacccatattatactcttctcattctgtctcatccatatg

SEQ ID NO: 48325 - DNA, 596 bp, Homo sapiens
tatagtcatataaattataaactaagtacagttgaagtgaaaagaaatcattagttctgactgggaggwtggggaaaggtttctataggagaggatgtttgagctgaacctagaagaacaggtttagaaagagaaaccatcataggctgagaacagttcaggcaaagccttggtggcctccaaggacacttgtatgattgatttctcaatcagcaaatgcccttgtctttaatggagagtagtaccaccaatggctagcgaggtcttggaaattatctcaccatgaactatcatcactcagaactctagttatcagaaaaaatggctgctaggtaatgactgatgtcattgtcatcctgtgtcagatcagagggcacagttcaagttgggtaaggtgagcaggtgaaagggagaggaagagagtgagtgaagcaatgtgaaagttgaagagactaaaggataacaggtgaagggagagaactgtgcttttattggttcaatctgcccaattaaagaagttgcagttcctctttaaacaaatcttgtttttaatttatttctgcatctcttctttcctccctgtatcccatactctg

SEQ ID NO: 48326 - DNA, 2005 bp, Homo sapiens
taatgggattactagcatgggatgctaattgggcgtgacataagaaactggcttacttcttagcatacccttgctaatgatgaaattaatgagcattttattaaatgctgtctcatcaaagtgtacttagttagcgttaaaattgttacaaacgatgctgcattctaaagatcaggtgtctgartaagtggttcttcatattttgtttggcaacaatctgaagcattaatagttctctacatcagaaatcaagtttattggagacaaattcaagtaccttacctacagcctcagcatgacaaactcactttatacttacagcaatttagaatatcattttttgaagactattttaagattacttccccccatcaatgttgaaagaacaattctgtgatgacttctggtgtcatattatgcatgttgttctttctatttggaacatatcagacacattcaatagatgctattcagaattgttttaaagctttcattttcacagcttccttccaagtaagcccagaatatgatgtgaatttcctgttaatgtcactgaacatagaatatttaagggataaacatagatcattactggtcactaaaatattatctgatcaagtatattcaaaattgaatttaattaagtgaagaatgggaaaattatagaaaattgttggagataacaataaaaactgtaattaaaagttgcagttaacttttctttattgtatcttttaacaatggcaagtgcccagtttgtaatatacaaacacatttccaattttatgtactatgaagaatctccctttccctaaacatttattcaatagaatgcttcggatagttggatgacaaaccaaatacatttttatatctatagcctctacgttgtattaaattgttttgtaaggaatttaatactcaattttattaagatattttaaaaagagcaaagtacacaatgacttcaagttattttataaatatgtgctagataactactttaaaattccttgaaattctcttcataattcaaaatttggctattttgaatgaattcagtaaaaacaatttaaaaataagcatctcgttttttcctgataaaaatcaaattatctgaaaaacagacaaatttgaacaaggctgggcatggtgtctcatgtctgtaatcctagcactttgagaggccaaggtgggaggattgcttgaggccaggagttcgggaccaacctgagcaaaacagcaagactttttctctaattttttcaaaataaaaaaaaataaaacaaacatcacaaaatatctgtgtaatcattacaaagctagacgttgtaagccagaaaaatggataattttcttcagttatgagtagtagtatcctaccaacagttattgagtcaatcagccaggtaatatgtcaatggtcatttatttactgggcatctactatgttccaaagactgttctaagtcctgaggaagtacctgtgggcaaaagattcatagactttgccctcactggatcatacagtctgataagacagacacactaagtacataattacttgtgtgatgagtataaaaagtattcactagataatctcgtccgcatttaaagattaaaggagaaaaactgacttaaagtggtacccaaagtatttaaaatataaataaatgtaatgccaatagaaggcatatgaaataaacttctatactttttaaaacccagagtagctctaacttcatacaagaagctgcattgatattactttggaaaaagagagcaaataagagaagagtattcaaaattttcaccatccctcagttttaacacttctttgtctaaaaatgagtggggctttcattataaatttagaaaatatgtttagtacctgttttagagtataaattcattggaagtaaggaaggacacagtccttgctagcataagctcgttgtttcatatatagagagcctcatggcccgtgagcacatagtgtaatgca

SEQ ID NO: 48327 - DNA, 2005 bp, Homo sapiens
taatgggattactagcatgggatgctaattgggcgtgacataagaaactggcttacttcttagcatacccttgctaatgatgaaattaatgagcattttattaaatgctgtctcatcaaagtgtacttagttagcgttaaaattgttacaaacgatgctgcattctaaagatcaggtgtctgagtaagtggttcttcatattttgtttggcaacaatctgaagcattaatagttctctacatcagaaatcaagtttattggagacaaattcaagtacmttacctacagcctcagcatgacaaactcactttatacttacagcaatttagaatatcattttttgaagactattttaagattacttccccccatcaatgttgaaagaacaattctgtgatgacttctggtgtcatattatgcatgttgttctttctatttggaacatatcagacacattcaatagatgctattcagaattgttttaaagctttcattttcacagcttccttccaagtaagcccagaatatgatgtgaatttcctgttaatgtcactgaacatagaatatttaagggataaacatagatcattactggtcactaaaatattatctgatcaagtatattcaaaattgaatttaattaagtgaagaatgggaaaattatagaaaattgttggagataacaataaaaactgtaattaaaagttgcagttaacttttctttattgtatcttttaacaatggcaagtgcccagtttgtaatatacaaacacatttccaattttatgtactatgaagaatctccctttccctaaacatttattcaatagaatgcttcggatagttggatgacaaaccaaatacatttttatatctatagcctctacgttgtattaaattgttttgtaaggaatttaatactcaattttattaagatattttaaaaagagcaaagtacacaatgacttcaagttattttataaatatgtgctagataactactttaaaattccttgaaattctcttcataattcaaaatttggctattttgaatgaattcagtaaaaacaatttaaaaataagcatctcgttttttcctgataaaaatcaaattatctgaaaaacagacaaatttgaacaaggctgggcatggtgtctcatgtctgtaatcctagcactttgagaggccaaggtgggaggattgcttgaggccaggagttcgggaccaacctgagcaaaacagcaagactttttctctaattttttcaaaataaaaaaaaataaaacaaacatcacaaaatatctgtgtaatcattacaaagctagacgttgtaagccagaaaaatggataattttcttcagttatgagtagtagtatcctaccaacagttattgagtcaatcagccaggtaatatgtcaatggtcatttatttactgggcatctactatgttccaaagactgttctaagtcctgaggaagtacctgtgggcaaaagattcatagactttgccctcactggatcatacagtctgataagacagacacactaagtacataattacttgtgtgatgagtataaaaagtattcactagataatctcgtccgcatttaaagattaaaggagaaaaactgacttaaagtggtacccaaagtatttaaaatataaataaatgtaatgccaatagaaggcatatgaaataaacttctatactttttaaaacccagagtagctctaacttcatacaagaagctgcattgatattactttggaaaaagagagcaaataagagaagagtattcaaaattttcaccatccctcagttttaacacttctttgtctaaaaatgagtggggctttcattataaatttagaaaatatgtttagtacctgttttagagtataaattcattggaagtaaggaaggacacagtccttgctagcataagctcgttgtttcatatatagagagcctcatggcccgtgagcacatagtgtaatgca

SEQ ID NO: 48328 - DNA, 1477 bp, Homo sapiens
cgatcccattacgggcccctcgacattcccagcctgtgtaaccagtccctagtagtcactttcttctggcagtgttcttgctgaggagtctgggcatgagcagatgctccaggccttctgaggacactctgcaatcatcatcctgatatcattcggctcccatccagaggcagttaactctctccatccccagcttctgttttgccagtcacctcactgagaggtttctgactcccacacggagcacagggcgctttaaacacagcccacctgcactacacatggacacgtgctttaaccatgacttgtctgccctgtccaactcaagcacatcgcctcaggcattctaaccatatccttgtccttctcaacccttttacttctgaatgagactcataacagcaggatttatcatagttaaaaactggaacaaatctagttgttcaacaactggggatctgctagatatattatcatggctcattaacataatggaatataatttgaccaataacaccttctacacagtagaagatgtaataatgaggcctggcgcggtggctcacacctgtaatcccagcactttgggaggtgaggcgggtggatcatttgaggtcaggagttgaagaccagcctggccaacacggtgaaatcccgtctctactaaaaatacaaaaattagagggacgtggtggtgcacggctgtagtcccagctactcgggaggctgaggcacgagaatcgcttaagcccaggaccagagattgcagtgagcagagatcatgccactgcactccaacctgagcaacagagtgagactgtctcaaaatgaaacaaaataaaacaaaaagaagatgtaataatgagaatgatgcccaccatacattaagaaaaaaagaagagttgcagaataggttttcttaacacatgaatgtacatcaagatgctatccagtaacaaatttctagtttgtagggttatggttggtttaccttttcttttttgtttatctctattttataactttttwaaatgagtatgtgttcttttggaaaaatgcaacattggaaagaaaaaattcaacatggcatgttaaaaggtttatctgtttttcaaaggtgttgagcctcaagccagtttgtaccccaccaagacgggtcactctgcctacaaagctgaaactgcccagagcagcagcagtagtcacaagaccttagatgggggctcactttgcctctaggtggtgcagtcatgattgccagggagctgggcctggagagagagttggcaacctatctatctcttcatagaaatggtagtgtcctagaaacaggtgcggttacaatgctgaatgaagccctaggttaatgatttttaaacatttagcagaggaagcttttttttcccccaaatgaaatctcacataaaacatcaactcttaaacacacaaaaatattgttgatcatgatgaagctctc

SEQ ID NO: 48329 - DNA, 1477 bp, Homo sapiens
cgatcccattacgggcccctcgacattcccagcctgtgtaaccagtccctagtagtcactttcttctggcagtgttcttgctgaggagtctgggcatgagcagatgctccaggccttctgaggacactctgcaatcatcatcctgatatcattcggctcccatccagaggcagttaactctctccatccccagcttctgttttgccagtcacctcactgagaggtttctgactcccacacggagcacagggcgctttaaacacagcccacctgcactacacatggacacgtgctttaaccatgacttgtctgccctgtccaactcaagcacatcgcctcaggcattctaaccatatccttgtccttctcaacccttttacttctgaatgagactcataacagcaggatttatcatagttaaaaactggaacaaatctagttgttcaacaactggggatctgctagatatattatcatggctcattaacataatggaatataatttgaccaataacaccttctacacagtagaagatgtaataatgaggcctggcgcggtggctcacacctgtaatcccagcactttgggaggtgaggcgggtggatcatttgaggtcaggagttgaagaccagcctggccaacacggtgaaatcccgtctctactaaaaatacaaaaattagagggacgtggtggtgcacggctgtagtcccagctactcgggaggctgaggcacgagaatcgcttaagcccaggaccagagattgcagtgagcagagatcatgccactgcactccaacctgagcaacagagtgagactgtctcaaaatgaaacaaaataaaacaaaaagaagatgtaataatgagaatgatgcccaccatacattaagaaaaaaagaagagttgcagaataggttttcttaacacatgaatgtacatcaagatgctatccagtaacaaatttctagtttgtagggttatggttggtttaccttttcttttttgtttatctctattttataactttttaaaatgagtatgtgttcttttggaaaaatgcaacattggaaagaaaaaattcaacatggcatgttaaaaggtttatctgtttttcaaaggtgttgagcctcaagccagtttgtaccccaccaagacgggtcactctgcctacaaagctgaaactgcccagagcagcagcagtagtcacaagaccttagatgggggctcactttgcctctaggtggtgcagtcatgattgccagggagctgggcctggagagagagttggcaacctatctatctcttcatagaaatggtagtgtcctagaaacaggtgcggttacaatgctgaatgaagccctaggttaatgatttttaaacatttagcagaggaagcttttttttcccccaaatgaaatctcacataaaacaycaactcttaaacacacaaaaatattgttgatcatgatgaagctctc

SEQ ID NO: 48330 - DNA, 458 bp, Homo sapiens
ggctggtttcaaactcctgacctcgggtgatctgmctgcctcggcctcccaaactgctgggattgcaggcgtgagccattgtgcctggccagattttctttttctagcaaggggacccacttaaacttgaagaggaccgggatggttgaggctgggcagcaaggctttactgcaaatcctttaccactgttttttctggctttctagagaacgttctagcaaaaggtttctagaactttctccttcctggcctgactgacattccctcttaggtgtagcctccttttcacttttcttctgcctggaggaaatgaagctccacggaactttctgttgaaactttccaagaaaaaaaagaaaggctctaagcactgaatgtggaaactgaaggggatgagcttcaactctgaagtgtttccagcgtaaaactgtcctttccagggcccgtgtggctgtca

SEQ ID NO: 48331 - DNA, 606 bp, Homo sapiens
ttcctcagcttttatttccttaactagtcagttctggaatttcagagtttgctctcttgccgggcttcccgcaaacctcaaacttttaggaagcagtttcatagatatatttttctaaagccggcttgctggtatgcacacagtcgggcgataaaggatttaagcaggatttacattttcacaatcctcacccttggcagccagagagccatttctgctgctgctggcagtctcccttgctcctctctacaataattttatcttaaattatttactatttcttgctgcttatttgcagccttttcttttggtattcttggtcacatccacaggcagaaagtaggcagatcacctcattccgtargtcttgatttcctcatcagtacaaggaatactgaatctgtattcccaacatacgctccacaattagaatcatctacgggatttggaattacaacagaaacaacaccacccctactcccagaaattctgattcgattgttttggggtggagtccaggcactggtattttttaaaaaagctctgagaagattttaatatacagttagggttgagcatcactgactttctaaagccttgccactc

SEQ ID NO: 48332 - DNA, 532 bp, Homo sapiens
aggcgggtggatcacgaggtcaggagatggagaccatcctggctaacaaggtgaaactccgtctctactaaaaatacaaaaaattagccaggcgcggtggcaggcgcctgtggtaccagctactggggaggctgaggcaagagaatggcgcgaacccgggaggtggagcttgcagtgagccaagatggcgccactgcagtccagcctgggcgacagagcgagagagactcttgtctcaaaaaaaaaaatagaaaaaagaaaaagaaaaatctttttaaaaactcatttggttgttttgtaataaaagatgccccacccacctamaactcaaactggaataattttaataggtcaagtcttttcgacttgatattggtctaacctgaatagtcttctcctggagattttatttaaatggctggaatggcattcttctaaattaaaaaaaaaaaagcttgtcaggagcttcaaatgctgataaatcctttatgacaatcccatactaatgtcttcacttgtccaatctatgtaa

SEQ ID NO: 48333 - DNA, 620 bp, Homo sapiens
gcagacacatggaaggacagcctctttcagcctcattcagccgcgagccagaaatgctccaattgttcagaagaccctgggcgactcagcaccggatatgagcgcacattctgccaggaggacgttgtcaggagccacgcgtggctcatctgtttttgacacagaggggatattgatgaccagccactgatttcagaagacagagaaggggtgctttcctctctggaaggaggggaaacttcaaagcaaacartgctccaaagaagaaaggaatcggttgttctagaactaaagaagggaaatgacaatccgtctctttagaccttagagaaaaaaaaaaaaaaatgaagaaggcggtatattcccagcagatcagtaaaagctgtaaggaaaagttttggcagacatcccaggaataaatatgaggaaaaggttagaattcttctttatgataaaaagatatttatttccttgacaaatcctcagtgatgaattccttacataaaagatgtcccaggagaccacgggaaataatgccacattgcagactgcaggataaacgtgtcatctctggggactgttatagagaattagatgtgatttttaacatgaaaaaatgc

SEQ ID NO: 48334 - DNA, 1246 bp, Homo sapiens
  misc_feature (1)...(1246): n = A,T,C or G
atgcgaggtttattggcaccacagccccataattgagaaacaacagtccccagctgcacacctcccccgcgggaactacttttaactttttagctggcctgctgctggtctctgcctccatacttctaaatacatcctcatgaggctccttccctctcttcctaagcagatgtctcggaagaagaggctgtacttactttccacctccctcatctccattcagtctttaactcgctacaactgaaggagtaaacccagaaaaagatggcattgactcggggaaatagggaayccaaagtaggagagacgaaagcagttcccaaggtcatcatgaaagaagtcttggtccatagccatacaggggcctggagaactcgtggtccatccgggagcgggaagatgaggggctttccaaagttgtaaaataatggtaattaaccatgatatacaactgactcagctgagatgaatacacaaaatgccatatcatataaatactgattacaggtttgttttttaatgttgccctgggcccagcttgaaaaatgaatggggcggnnnnnnnnnnnnnnnnnnnnnnnnnnnnnnnnnnnnnnnnnnnnnnnnnnnnnnnnnnnnnnnnnnnnnnnnnnnnnnnnnnnnnnnnnnnnnnnnnnnnttttctttttttttcttttttttgagacggactctcgctctgtctcccacgctggagtgcagtgggcgcgatcttggctgactacaacctctgcttcccgggttcacgccattctcctgcctcagtctcttgagtagctgggactacaaggcgtgcgccatcacgttcggctaatttttgtatttttagagacggggtttctccaggctggtcccgaattcctgatctcaggtaatccacccacctcagcctcccagagtgctgggattacaggcgtgagccaccatgcccagcccactcttctgttttctaggaagtcagtggattgtcaaacgttcttttggtctctcctgtgctggagcgttgcgctggatcctgcgtcttaatcttcttgatttcctctctatttttggtggagcttatcttgaagtagtttcctaagaaaagatacaggagagatacagtttgttaggccatgcatgtctgaaaaatcttaattctgcatttttctttttctatttttcttttgagacagggtctccgttgcccaggctggagtgcagtggcgcggtcatagttcactgcaac

SEQ ID NO: 48335 - DNA, 682 bp, Homo sapiens
catgtgtagtgggaaggacccggtgggaggtaattggatcatgggggcaggtgtttcccatgctgttctcatgatagtgaataagtctcatgagatctgatggttttataaaggggagttctcctacaaaaactctattgcctgccaccatgtaagatgtgcctttgcttctcttttgccttccaccatgattgtgaggcctctttatggaactgtgagttcattaaacctctttcctttataaattatgccctcttgggtatgtctttattagcagcgtgagaacagactaatacacaacctaattagcatcatgttttaggaagttatgtgttcagtgaatacacttattttttcttttcttttcttttcttttttctgagacagartgttgctctgtcacccatgctggagtgcaatggcacagtctcggctgactgcaacctccgcctcctgggttcaagcagttctcctgcctcagcctcctgagtagctgggattacaggcacccgccaccacacccagctaatttttgtatttttagtagagagggggtttcaccatgttggccaggctggtctcgaactcctgacctcgtgatccacccaccttggcctcccaaagttctgggattacaggggtgagccactgcacccagccagtgaatacacatttatttatt

SEQ ID NO: 48336 - DNA, 682 bp, Homo sapiens
catgtgtagtgggaaggacccggtgggaggtaattggatcatgggggcaggtgtttcccatgctgttctcatgatagtgaataagtctcatgagatctgatggttttataaaggggagttctcctacaaaaactctattgcctgccaccatgtaagatgtgcctttgcttctcttttgccttccaccatgattgtgaggcctctttatggaactgtgagttcattaaacctctttcctttataaattatgccctcttgggtatgtctttattagcagcgtgagaacagactaatacacaacctaattagcatcatgttttaggaagttatgtgttcagtgaatacacttattttttcttttcttttcttttcttttttctgagacagagtgttgctctgtcacccatgctggagtgcaatggcacagtctcggctgactgcaacctccgcctcctgggttcaarcagttctcctgcctcagcctcctgagtagctgggattacaggcacccgccaccacacccagctaatttttgtatttttagtagagagggggtttcaccatgttggccaggctggtctcgaactcctgacctcgtgatccacccaccttggcctcccaaagttctgggattacaggggtgagccactgcacccagccagtgaatacacatttatttatt

SEQ ID NO: 48337 - DNA, 682 bp, Homo sapiens
catgtgtagtgggaaggacccggtgggaggtaattggatcatgggggcaggtgtttcccatgctgttctcatgatagtgaataagtctcatgagatctgatggttttataaaggggagttctcctacaaaaactctattgcctgccaccatgtaagatgtgcctttgcttctcttttgccttccaccatgattgtgaggcctctttatggaactgtgagttcattaaacctctttcctttataaattatgccctcttgggtatgtctttattagcagcgtgagaacagactaatacacaacctaattagcatcatgttttaggaagttatgtgttcagtgaatacacttattttttcttttcttttcttttcttttttctgagacagagtgttgctctgtcacccatgctggagtgcaatggcacagtctcggctgactgcaacctccgcctcctgggttcaagcagttctcctgcctcagcctcctgagtagctgggattacaggcacccgccaccacacccagctaatttttgtatttttagtagagagggggtttcaccatgttggccaggctggtctcgaactcctgacctcgtgatccacccaccttggcctcccaaagttctgggattacaggggtgagccactgcrcccagccagtgaatacacatttatttatt

SEQ ID NO: 48338 - DNA, 602 bp, Homo sapiens
tcgagaccaacctggccaacatggtgaaaccctgtctctaccaaaaatacaaaaattagctgggcgtggtggcccgtgcctgtaatcccagctactcagaaggctgaggcaggagaattgcttgaacccaggaggcggaggttgcagtgagccaagattgcgccactacactccagcctgggtgatggagctagactccgtctcaaaaaaaaaaggccgggtgcagtggttcacgcctgtaatcccagcactttgggaggccaagacgggcagatcatgaggtcaggagatcaagaccatcctggctaacatggtgaaacgccatctctactaaaaatacaaaaarttagccgggcgtggtggcggccgcctgtagtcccagctacttgggaggctgaggcaggagaatggcgtgaacccggaaggcagagctggcagtgagctgagatcgcgccactgcactctagccgcggtgacagagcaagattccgtctcaaaaaaaaaaaaaaaattggagagaatgccatgcaacccattacagtgatgtaattcactaatgcaaatcaacctacagtctgaaaaacaccactgtagcccagggc

SEQ ID NO: 48339 - DNA, 602 bp, Homo sapiens
tcgagaccaacctggccaacatggtgaaaccctgtctctaccaaaaatacaaaaattagctgggcgtggtggcccgtgcctgtaatcccagctactcagaaggctgaggcaggagaattgcttgaacccaggaggcggaggttgcagtgagccaagattgcgccactacactccagcctgggtgatggagctagactccgtctcaaaaaaaaaaggccgggtgcagtggttcacgcctgtaatcccagcactttgggaggccaagacgggcagatcatgaggtcaggagatcaagaccatcctggctaacatggtgaaacgccatctctactaaaaatacaaaaagttagccgggcrtggtggcggccgcctgtagtcccagctacttgggaggctgaggcaggagaatggcgtgaacccggaaggcagagctggcagtgagctgagatcgcgccactgcactctagccgcggtgacagagcaagattccgtctcaaaaaaaaaaaaaaaattggagagaatgccatgcaacccattacagtgatgtaattcactaatgcaaatcaacctacagtctgaaaaacaccactgtagcccagggc

SEQ ID NO: 48340 - DNA, 671 bp, Homo sapiens
  misc_feature (1)...(671): n = A,T,C or G
gagagaaagagtgagtgagtgagaggcagatgaatgggcagagtgaaggagcctgcaacaggtcccgaggggctgggcctggcatttcccagcgaggggacgccatggcatggggactgagcgtctgcatgaagctcaagccttctgttgagagcacatgtgctgatgcacagaaacctgggcccatctcagaaaacgactgttttgcccagaatgggatgccagctgctctgcagacccttttaaaaaaattaaagtcctcaagatgatacacacttaactctcttagcctgaagttttttttttttttttaaacagatgacagttattacaggcatttcaatataacttctactcacaacttgggtctgctagcagttttaattatccagattcattctggaagccaagatggtaaagaaatatttcaacagatttctagcacccaaatagayctcttagtgagagtaaatacccataactttcagttagcaaagaaagaacgtacaagaaagtagtgtgcagtatggaggaaggtgttttttcttttttggnacggagtcttgctctgttgcccaggctggagcgcagtggcgcgatctccactcaccgcaagctccgcctcctgggttcacgccattctccttcctcagcctcccaagtagctggga

SEQ ID NO: 48341 - DNA, 713 bp, Homo sapiens
aggaggaacttgggagctgctgtcttgctgggaagtgggtgcatgcacaaattgaggctgcttggccgccggtatgggtttacagcagttgggtatgtggggccaggagacggatgccttgtgtaaatctgtactctgcccacttcctagctgtgtgaccagagggcaagttaattaacctctctgtgccttgtttataaaatgcgttttataaaagttcctacttcataggattgtggtaaggataaaatgagttaagccctgtaaagttttttttggacagggcatgttcctgttaagtgcacaataaatattgttaatagattttattgattgattgattgattgagacggagtctcgctctgtcgcccaggctggagggcagtggtgcgatctcggctcactgcaagctctgcctcccggtttcacgccattctcctgcctcagcctcccgagtaactgggactacaggcrcccgccaccatgcctggctaattttttgtatttttttttttttttagtagagacgggtttcaccgtgttagccaggatggtctcgatctactgacctcgtgatccacccgcctcatttatttgtttgtttgagacagagtctcactctgttgcccaggctggagtgcagtggtgtggtcctggcttactgcaacttctccctcccgggctcaagcagtcttcccatttcagccttcca

SEQ ID NO: 48342 - DNA, 713 bp, Homo sapiens
aggaggaacttgggagctgctgtcttgctgggaagtgggtgcatgcacaaattgaggctgcttggccgccggtatgggtttacagcagttgggtatgtggggccaggagacggatgccttgtgtaaatctgtactctgcccacttcctagctgtgtgaccagagggcaagttaattaacctctctgtgccttgtttataaaatgcgttttataaaagttcctacttcataggattgtggtaaggataaaatgagttaagccctgtaaagttttttttggacagggcatgttcctgttaagtgcacaataaatattgttaatagattttattgattgattgattgattgagacggagtctcgctctgtcgcccaggctggagggcagtggtgcgatctcggctcactgcaagctctgcctcccggtttcacgccattctcctgcctcagcctcccgagtaactgggactacaggcgcccgccaccatgcctggctaattttttgtatttttttttttttttagtagagacgggtttcaccgtgttagccaggatggtctcgatctactgacctcgtgatccacccgcctcatttatttgtttgtttgagacagagtctcactctgttgcccaggctggagtgcagtggtgtggtcctggcttactgcaacttcyccctcccgggctcaagcagtcttcccatttcagccttcca

SEQ ID NO: 48343 - DNA, 579 bp, Homo sapiens
atggccataggatgactgccagaaataartaaaaatatgtgatggtaaagttgttttatgttttacataaagtggcacgacaataactaagtagacagtgggaaattacaaactgatgttgctaactttatagcaatcaggaaaaaatgcaaaaagagcttagtagaacaattaaaagatattaaaaaatagaccatatggatgctatcagaaatccggagtggctcagatgatagattaggaacaatgagctgtgtcaaaactgactttctcccaagtcctcattctaccgaaactcttgtacgtattttacaccatcagtcgcttctttcttcttgatgttcttgcctccctgatttcagtggcattccctgcattcgtccatctcttacatgttgggacctccccagggtccttcctgtaatacttttctttctgcactctccaacctgccacgagcccatctatcccaatgactttaaatgctgccttttcatcaaagggtctctaatttcaattttccaaattcccatagtggtgcttccagtgcccagtctaagtccacactgtctgcaatat

SEQ ID NO: 48344 - DNA, 597 bp, Homo sapiens
aaataaagtgtcagctccataggcatagagggaagagtctttaaaaacatgaactcatcaacggatctaaaaataagataaactcagatatcagaataggaaattctgtctttcaaaatattatcctcatcacctttctctgacacagctgtgaatcacgcagaacatccacatatgacaagattttaaaatgaatataaaatattctatatagaaagttgtrtgatatacatatagatagatattttttaaagaatacttttaggtacagtccttgggaagaattttcttgagaaaagacatttgcaacccatatctgtgaaatgacagaatttatgattcccatggaaattttgttcattgaatggagaaatgggttatctggtatctgaagcagatcatttagaattgttgattaataagctagaaatatgtcctgaagactggcatcatggttcagtcaacaaagccagaatagattagggcagatgcactcaatcgtaaaacagtgtgcctttgtaggaaagggcacccagaggaatgtgcagcacggtgggagaggatgtggcccctgcctcgccagctatactaatggca

SEQ ID NO: 48345 - DNA, 2101 bp, Homo sapiens
tcctttaatgtaaataactctaaaagcatgttattttccagtaatgaaagaatcatggtgcctcataagctcttgttcrcttgggagtgttcaggaatctcccagatttgacaccagaagaggcaaggtcaaagcaattaggctgcactggtatcttcagtgaagatgcccttactgccctgtgctgaccgtggtctccccaaggctgagtctagattgctgtcacactgtcaacttatttgtcattgtgaagccaacagggaagtggcaattagtttgggggtagaagagtttgtaggagaatagaagcatttaaaagaatctttgtgggagaataataaagataataaatatgagctccatttctttgcatgagatcagagagacaggaaaatataatggagatgatgtatacaatttctggttgaaggatctgtctacttcatcatttggagagccacatgagtgcatgtcttagatggtctgtctgctgttctttctggccagaagaaggaaagccaggaagcactgggaatcacaggctgtgacaccaaagtcaactctcagacatcccgggactaaggatcggtgaacatttggatgggcctccatttgttcaacatatattaattgcgtaccctcttcaagctgaacgctttgttagatacctggggaaatcatggtgaataaggtggacacagtccttgtccctgtggagctgatgggggtcacaggagagagcaacatgaaacttgtacttacacacctaattattgagttacgtttatgctaagtgctgtgaaagggaaatgagtgtcccagaaggccatatggtgcagagacataacatagtgcacagaaaacatgctggcagagacctgaagtttccatagaagtggccggtgatgatggggaactgcattccattcaggttaatgacatgagttgtttctttgtaaagctagaggtttctcaagccttgctccccttgaaatcttgaactacggctgctaacaattagataccttgtaaatttgaaaatatatgctcccccatttttttccaagccctctatggagaaacttgcaagctgtgaaatggtctaaagacagcatgaaaaaaaaattgcacagaaaattcacagcagtttaattagtctctaattttactgggcagtccagtaaaattcattggaacaatttgaattttggaggggggggcacttgattttaaaaccctaataacctcatcctctattacaaattaagtggctcagggtgctatttagctattgtcattgaaatgtcacagaagaatccaagtaagggaaaagatccatttatctttctctgctatgccttttaaatgctttcatcaaaacaatagcaagaataatattttaggtaattttagataatatggaagacattacaggacatacctatagtgccagaagagaatttataacactcttgtgacccaccttaatattaagccccctgtaggctggtctgaaaccttttgtggatgctcttcaaaagtaggacactaaaaccctaattttcatttaagagcatatacacatattgtatttaaaatgttgcacacctggtattttgcccaccctgcttgtcagccttgaggagctatgggagcttgtccaacagtaattaatgcagatggtcttttggagctgagttttccattgtgattttcaacatttgtatgtttcagaaatctgcctactgtactataaatgcattcttatgcaaattgctaccatcatatggcccaatttcttagtatgaggagcatgaaacttttaattacatgtcactgttttaaaactttccatttcttttcagacttatatattctactagctatattacattgaagaaatgccaaatactaagagtagtatttgatgtgtttgaagtgaagtcttcaaggggtgtattatttgaagacagtagttcttcatggggtgtagtaaaagacgcaagaataagaaggaaatgaatgcaacctaattcatccatggctggattcactagcacagagcttatcatccataggctttatcttagtctattcaagc

SEQ ID NO: 48346 - DNA, 594 bp, Homo sapiens
taaccagatgacctagaagttcccttccagggtctcccactctccttccctgtgcatcctgactctcactggctggtctgaagtagtgctaagtgttaatagccccattgggcctggcttagagactaaccttttattcctggtgagtcctggcacatccagtggattgaaacagytccttggagaggcctccttgctcactgcttcgacttcactggtcagagaaagatgcaagggacattctttggcttgcccttttagtccaaacatcacatgattttatggcactcttccaactggagctgaaaaaagaccagaagcctctgactcccacaatcactgctcgctccaggcagatccagtggcaggcttttgccacagtctctggagtccatgggaaaagaatgtggtctgagagaagatcttccaccaagtggaaacacccaagtgcctgaggcacattcatgagcatgagcaacatggaatttcttttcaaatgtcaaaaatgcaaaccaagtaagcccacttatttgtacatctggttcactgggcttggagaaaaacaaaatgggaaaaaaaaaatcctgaattcca

SEQ ID NO: 48347 - DNA, 585 bp, Homo sapiens
taacaaattaccacaaatgcaagagcttaaaatagcacaaacttattatcctacatttttgtaggtagaactctggtagatgtctcagtgaactaaaataaaggagtcygcaggttgcattcctttctgggggcttgtagaattcaggtcctagcagttgtaggactcctttttccagctattaggagctcatataattacgctgggcccacttgaataacccaggataactgctctctgttaaagtgaactgattggcaactgtcatgtaatgtaatgtatctacaggttctgaaattaggaattgaagatcgttgttggggttgggggtttggtgggagcaggcacagatctgtctattacactaactaagagcaaaaataaccctgccttttaacacatgctcatactctcatctaaaaccaatagtggctgaatatttgggggaaactttccacccttcctcatattttccacataggagagaactctgtttccctccccacagagggaactgtgagcagatacacttctgcatacttttctactctggtacacatcccttgtcttcttccttgcaaaagt

SEQ ID NO: 48348 - DNA, 585 bp, Homo sapiens
taacaaattaccacaaatgcaagagcttaaaatagcacaaacttattatcctacatttttgtaggtagaactctggtagatgtctcagtgaactaaaataaaggagtctgcaggytgcattcctttctgggggcttgtagaattcaggtcctagcagttgtaggactcctttttccagctattaggagctcatataattacgctgggcccacttgaataacccaggataactgctctctgttaaagtgaactgattggcaactgtcatgtaatgtaatgtatctacaggttctgaaattaggaattgaagatcgttgttggggttgggggtttggtgggagcaggcacagatctgtctattacactaactaagagcaaaaataaccctgccttttaacacatgctcatactctcatctaaaaccaatagtggctgaatatttgggggaaactttccacccttcctcatattttccacataggagagaactctgtttccctccccacagagggaactgtgagcagatacacttctgcatacttttctactctggtacacatcccttgtcttcttccttgcaaaagt

SEQ ID NO: 48349 - DNA, 585 bp, Homo sapiens
taacaaattaccacaaatgcaagagcttaaaatagcacaaacttattatcctacatttttgtaggtagaactctggtagatgtctcagtgaactaaaataaaggagtctgcaggttgcattcctttctgggggcttgtagaattcaggtcctagcagttgtaggactcctttttccagctattaggagctcatataattacgytgggcccacttgaataacccaggataactgctctctgttaaagtgaactgattggcaactgtcatgtaatgtaatgtatctacaggttctgaaattaggaattgaagatcgttgttggggttgggggtttggtgggagcaggcacagatctgtctattacactaactaagagcaaaaataaccctgccttttaacacatgctcatactctcatctaaaaccaatagtggctgaatatttgggggaaactttccacccttcctcatattttccacataggagagaactctgtttccctccccacagagggaactgtgagcagatacacttctgcatacttttctactctggtacacatcccttgtcttcttccttgcaaaagt

SEQ ID NO: 48350 - DNA, 584 bp, Homo sapiens
ggactgatgtcaaagccagaaggccactctgaaaacgatgcaggcccgattctgcctcatttacatttcagcccgcctgccttctgacttgtgcagaggaatgcatccttatgtggaaaatgcacatgcagaaaaatagaaaaaagacatgctattggagaacagatgcaatgtgtgatgcctgatcactccyttaatggaatggtcatgatttcgggctccattcaagcaaattctgagcctctgctcatggtctcttgcaatttgagtcactgcctttgttgtgtttctttcttttcctaattcagtctcttcctagtttcttaaattaggtcaacatacacattcaaaaaatgcgaacttctcccaagtgcaggaaatggggcctgaaaagctaacgcaagaatacaaaatcctgctgtttaagatgaagagccttttggttggatcctggagctctgagtccagtatttagtgagatcattgccagattattattctccctttaaggtcactggactttcatgctggatgtatcctctgtgatagagagtttacaaataatgaagctgacttttccagtg

SEQ ID NO: 48351 - DNA, 539 bp, Homo sapiens
cctgcctttcttttaacctctttgcatgctactggcctacgtgctgtctcagatatgctagcgagtaaatgctctaactcattggactgctgaagaataccagcaatgccccatcaatgatagacygaataaagaaaatatggtacatatgcaccacggaatactacgcagccataaaaaggaatgagatcatgtccttttcagggacatgaatgaagccgcaagccattatcctcagcaaactaacacaagaacagaaaatcaaacaccacgtgttctcactgataagtgggacttgaacactgagaacacatggacacagagaggggaacaacacacaacagggcctgttgtgggatggggttgaggggagggaacttagagaatgggtcaataggtgcagcaaaccaccatggcacacatagacctatgtaacaagcctgcacattctgtacctgtatcctgtttgtttctttttagaagaaataaagaaaataaaaaagaacaccagcaatgctttatggagtgccatagtctca

SEQ ID NO: 48352 - DNA, 1587 bp, Homo sapiens
attttttggtattttcctgagtaagcattaagctgatgaaacattaattttacaaaatgtatttgtaaactctggtgataaggagcatctcatcctcaggtttaattttaattttaatttcttcaaatgtaattcattcacaatcctctcaggaatctcatgagtaattatagatacagtattaatcacatattctgggtataaatggtgttatagaaaatgtaatctataaaataaccayagtaaattctgccatgagatgtagataaatgtaaccactgttaatttgaacacaagatggccagtagagtagggagagcagggtgccatttattattcttcagagggcttttggtttctcaaatgaaagttgtgagaaaaataaaaagtgttgcagtcagaaagcaagatgatgcaagatgggagaaagtaaaataataaaatttaatttctgaaactttgtaaacaatttaataactgatttcttgacttttccattttctggggaagaaaaggcagcaataatcatggaggaaaaactgagagcaaaagtttgtagcctacaatttgtaaattagaaatatataaaagtaaaacggtacatcagtgaaaatatatttttgtgttgacattttaattttagtaaaatatatgaagaatataagctttacatttaaacgtcaagacaattttagtcatattaatgattataaatgatgatttaaactttgagaaacatttatttactttcctataccactttcttttctgtccaatttcaactacttaaaaaaattgctatatattagactataagtacagatggattaatctctggggactattttaataacctccttaatactagtgtccctaacactattgtcatttgcctccttgtaatcatcctctattatgctaacagaacgatttatgatttgcagatcagtcactattccttttattctacagaataaagtccaaacactttggcatcaagtacaatttgaccattccctaatttcccactttgatctccagttcctggaaacctcatgttcagtgaacaggaatttctaaactcagaacctttgcttatctttctacctggattgctattctgcaaacctatgctcctgaagaattgctgatgggatgtaatttttttttttaaaaaagtcatctaatagtgcattagaaatagacataagcaaagaaataccaaccttgccaaaaaagctgaccccaaagtacaaggacagtgaaaaaagagtcaagtcagcttaaccccaactggcatttacaagattaacaatatggtttgcaatgcacttggaaagaaaccaaccggctttaagataattaagtgctaccatcaaggaaggattatgcaggtgccaaataaggttgtctgggacaccaaatcccttcgtatcttttaatgctataaaaataatgaagaacttgaagaagtatggccttaatcatatttgtgatactctaactctgactgaagaaagacttaagacaggaagctagatggagtaaagacagcaaacaacaagagagtcacatatttgcttaata

SEQ ID NO: 48353 - DNA, 1587 bp, Homo sapiens
attttttggtattttcctgagtaagcattaagctgatgaaacattaattttacaaaatgtatttgtaaactctggtgataaggagcatctcatcctcaggtttaattttaattttaatttcttcaaatgtaattcattcacaatcctctcaggaatctcatgagtaattatagatacagtattaatcacatattctgggtataaatggtgttatagaaaatgtaatctataaaataaccatagtaaattctgccatgagatgtagataaatgtaaccactgttaatttgaacacaagatggccagtagagtagggagagcagggtgccatttattattcttcagagggcttttggtttctcaaatgaaagttgtgagaaaaataaaaagtgytgcagtcagaaagcaagatgatgcaagatgggagaaagtaaaataataaaatttaatttctgaaactttgtaaacaatttaataactgatttcttgacttttccattttctggggaagaaaaggcagcaataatcatggaggaaaaactgagagcaaaagtttgtagcctacaatttgtaaattagaaatatataaaagtaaaacggtacatcagtgaaaatatatttttgtgttgacattttaattttagtaaaatatatgaagaatataagctttacatttaaacgtcaagacaattttagtcatattaatgattataaatgatgatttaaactttgagaaacatttatttactttcctataccactttcttttctgtccaatttcaactacttaaaaaaattgctatatattagactataagtacagatggattaatctctggggactattttaataacctccttaatactagtgtccctaacactattgtcatttgcctccttgtaatcatcctctattatgctaacagaacgatttatgatttgcagatcagtcactattccttttattctacagaataaagtccaaacactttggcatcaagtacaatttgaccattccctaatttcccactttgatctccagttcctggaaacctcatgttcagtgaacaggaatttctaaactcagaacctttgcttatctttctacctggattgctattctgcaaacctatgctcctgaagaattgctgatgggatgtaatttttttttttaaaaaagtcatctaatagtgcattagaaatagacataagcaaagaaataccaaccttgccaaaaaagctgaccccaaagtacaaggacagtgaaaaaagagtcaagtcagcttaaccccaactggcatttacaagattaacaatatggtttgcaatgcacttggaaagaaaccaaccggctttaagataattaagtgctaccatcaaggaaggattatgcaggtgccaaataaggttgtctgggacaccaaatcccttcgtatcttttaatgctataaaaataatgaagaacttgaagaagtatggccttaatcatatttgtgatactctaactctgactgaagaaagacttaagacaggaagctagatggagtaaagacagcaaacaacaagagagtcacatatttgcttaata

SEQ ID NO: 48354 - DNA, 1587 bp, Homo sapiens
attttttggtattttcctgagtaagcattaagctgatgaaacattaattttacaaaatgtatttgtaaactctggtgataaggagcatctcatcctcaggtttaattttaattttaatttcttcaaatgtaattcattcacaatcctctcaggaatctcatgagtaattatagatacagtattaatcacatattctgggtataaatggtgttatagaaaatgtaatctataaaataaccatagtaaattctgccatgagatgtagataaatgtaaccactgttaatttgaacacaagatggccagtagagtagggagagcagggtgccatttattattcttcagagggcttttggtttctcaaatgaaagttgtgagaaaaataaaaagtgttgcagtcagaaagcaagatgatgcaagatgggagaaagtaaaakaataaaatttaatttctgaaactttgtaaacaatttaataactgatttcttgacttttccattttctggggaagaaaaggcagcaataatcatggaggaaaaactgagagcaaaagtttgtagcctacaatttgtaaattagaaatatataaaagtaaaacggtacatcagtgaaaatatatttttgtgttgacattttaattttagtaaaatatatgaagaatataagctttacatttaaacgtcaagacaattttagtcatattaatgattataaatgatgatttaaactttgagaaacatttatttactttcctataccactttcttttctgtccaatttcaactacttaaaaaaattgctatatattagactataagtacagatggattaatctctggggactattttaataacctccttaatactagtgtccctaacactattgtcatttgcctccttgtaatcatcctctattatgctaacagaacgatttatgatttgcagatcagtcactattccttttattctacagaataaagtccaaacactttggcatcaagtacaatttgaccattccctaatttcccactttgatctccagttcctggaaacctcatgttcagtgaacaggaatttctaaactcagaacctttgcttatctttctacctggattgctattctgcaaacctatgctcctgaagaattgctgatgggatgtaatttttttttttaaaaaagtcatctaatagtgcattagaaatagacataagcaaagaaataccaaccttgccaaaaaagctgaccccaaagtacaaggacagtgaaaaaagagtcaagtcagcttaaccccaactggcatttacaagattaacaatatggtttgcaatgcacttggaaagaaaccaaccggctttaagataattaagtgctaccatcaaggaaggattatgcaggtgccaaataaggttgtctgggacaccaaatcccttcgtatcttttaatgctataaaaataatgaagaacttgaagaagtatggccttaatcatatttgtgatactctaactctgactgaagaaagacttaagacaggaagctagatggagtaaagacagcaaacaacaagagagtcacatatttgcttaata

SEQ ID NO: 48355 - DNA, 565 bp, Homo sapiens
cttcatccgcccagaggaacagttgcctctttcgcatttgctctaaagcattggtgatccagctgcagccctgttactagagacagctgtgtgatttcagcccccatgccacacaatatccaagccarctcaacatctgctgacatctttttaacagagcatccttctcaagaccaagtcaccacacgaaaatttcttcgtgcggggggtctaatcttttttttttttttttgcttaaagaattttactctaggctagaatttcccaaaatatgttctggggaccttcatcctatgtgataaatatcacacatgtgcacatgcacatatgcacaagcccatcacataaatctgagaaaagcagcatattctatttccctctttgacattaacagcacatgttagcacatttttaaaatttttttattatactttaagttctagggtacatgtgcacaacatgcaggtttgttacatatgtatacatgtgccatgttggtgtgctgcacccattaactagtcatttacattaggtacatctcctaatgctatctctccccccctcc

SEQ ID NO: 48356 - DNA, 518 bp, Homo sapiens
ttttaatatctcaaggttattgtatgtgactattttagcagaaattgaattttgggaaattgaactaaccaactgaaaataaattcacaactaaataacaagatgccagaatataattggctccaggctttgttaattcagcagtttatctacctaggcattatatttacacatcttcatgctayttttacagtcaactcccattatgtaagaaatggtcatacaccatttcttacatatggtaagatatctacgatggatattcagaactacgataaacattggatgcatccaggtttgtctgaactcactgagattattacactcagctgctgtttcaatgtgtctgaaggtataaatgacaattcgaatgacttgggtgtgtggatggttttacatgagtctttaagtgtagaacaatattgaccctgttccaaaatctgtccttgatccatgatcacactcatctcccagaacagctccttcaacacatttcctatctggatgaagaggactct

SEQ ID NO: 48357 - DNA, 574 bp, Homo sapiens
acaaattttcctcttacagtcgaagtatcaacaatactaggaactttcctacgagttcctgaatggccccttttttccttcttgattaaaaaaaagttctaatgcttctcaccatctctttatttgtgtcgtcaattgaattgtgccctctttgaaattcatatactgaaatcttgaatccagtggatctatattggaattttaagtatataattaaggttaaatgtggtcatacgtgtgagaccctaaagcaatagacatgttgtctttataagaagaggaagagacaccagagacctctcacttttcacgtgcacatagaaaggaggccatgtggacacacagtggactagaaggtggccctgkgcaagccaggaagaagccgcaccaagaaccaccctgccagcaccgtgatcttggacattcagactgcagaattgtaagaaagtcagtatttgttgtttatgccacccactcctgttgtcttcttgtgaagacccacacagactaatactacataactctgttagctttgtctcctagaaggagaagcaggcccctgaggctgggcaca

SEQ ID NO: 48358 - DNA, 557 bp, Homo sapiens
cacccagggcaggttacacaggaattgcctgaagctggtctcaggtgccctgctgagaccactggttatgcacacgtatgatttcaggtcatgcaggctcttctgcaggacagacctgtgtcctgtagagcacagacacttggtgacccaggscctcctctaataactcatacatctcatgtcagtgtatatccaggtgccccctcagtgcagcacactagggtgattaccctcacaggtggctttttcaggcggtgaacagaaaatggggtgggcacgctggtcattcccatcatcggtgatatccaagtgaattttaaataaatgaaacaaaactaacaacaaaggggaaggatatgtacctgtatctgggaggtagactgggtcccagaactgtactgggagtgggtgtgaaaggcccttttgtgtgggaagccctccagcatgagtgaaagctgaaggaatgatcactgtaggtggagcctgatggagaagctggcagggtacatttcctgaagctgttcccgggtgcgtgatggttcaatggcccatgtaca

SEQ ID NO: 48359 - DNA, 557 bp, Homo sapiens
cacccagggcaggttacacaggaattgcctgaagctggtctcaggtgccctgctgagaccactggttatgcacacgtatgatttcaggtcatgcaggctcttctgcaggacagacctgtgtcctgtagagcacagacacttggtgacccaggccctcctctaataactcatacatctcatgtcagtgtatatccaggtgscccctcagtgcagcacactagggtgattaccctcacaggtggctttttcaggcggtgaacagaaaatggggtgggcacgctggtcattcccatcatcggtgatatccaagtgaattttaaataaatgaaacaaaactaacaacaaaggggaaggatatgtacctgtatctgggaggtagactgggtcccagaactgtactgggagtgggtgtgaaaggcccttttgtgtgggaagccctccagcatgagtgaaagctgaaggaatgatcactgtaggtggagcctgatggagaagctggcagggtacatttcctgaagctgttcccgggtgcgtgatggttcaatggcccatgtaca

SEQ ID NO: 48360 - DNA, 648 bp, Homo sapiens
tttgttttttacagttctgttgtctttaggatatgacatgccagaatatactgttgtttttttaatctctccaaataatttttctctgggtgttgatataacttagaatatacaggtttatttattttcaaagcagtccattttccctgaattttaaagactgctttttcttttcttctttatttttaaattatccaacgtttttatatggctccatagtcaaaactaagatacgttcagaaaagttttgcttccatccatatctgctccacctagttctttcaccctacagatacccatttttgtttttggtttagccctccattatttcttttctttaaatattttatgaatatctgtacacacatatacataaacacacataaacatatctataactcttactgtgacagccacacatctgtaagctaaatagtcacagaggttaaaayggagttgttgtgactgcttatgtgccgtgtcttactggtcctacagtaactgacattatacactagcagagactgtttatcttgtagagtcttgggagattttactggctacattttggccaacacatccttggaatcatgcactgacctggtctaaagctgactagaggaaaaagccaaaatgttacagtaacta

SEQ ID NO: 48361 - DNA, 1630 bp, Homo sapiens
cacatgcaggctccatggtgagtgcagcagctctgagtcggaggccacagttccctccgctcccctcccctcccctcccctctctgctggggcaccaggttacgggaagtaagtgagagaggtcagaggaagtaagtgagagctggcagtccctggtaataaatgctgacctggcttgttgtctgttagcctgatgggaacagatagtgactccagtggtttgtcacaggtgatagggactcacctgtcacaagccccccttggtgtcctaggccctgtcccatgcagcctcgccttctcctggaccctcagctggaggctgcctctgcttgtatgaacttctttgctctgagctgcagcatggctgcaagatcctggagtcctgacatctctgtgtctacctgatcacctgactccagagcacgtggtcaccagaacatacagtggagacacagtctgggccctctttatttctcgaagtcccccaccctgccatcttgtccagagctcttttgccccgggctgatggcataggggcaggctaggagcagttgcgttgcagaacgctgcaacaccctccacattccttggcaagcagttctctgaggccgctccctcgcctttctggagtgaagcaccctcttgccagccttgcaagggaggaggggaaatagtttctcttctggcactgtagtccctcaaaggtgactttagtctctccgagaactctcaccttgaccaggggagagtggtacgtgtgggcagagtccatcccctgcagtggagcttctcagccaccctgtcggggggatcagtagccccgagagtgagctgctctctgaagttagaatttgggttctgtcatgcctcgtgttctcagccatggtgcttattcagcaggccatgccccttacaccctgttaccaaatccctctcacagccctgctccacctcccccagtgttttgctgagcccaccactcttccccactagaaccaagtccctgaatgaaagagctctccatgtccctctccacttcctttcctcccacacactcctttgcccactcccatctggccttctcccttgacttccaccaaaacggctattgccaaggtactcggggacccccatgccattaaagtctgtccctgtcctcctggattccacctcacctgcagggaacagcctctgccctggctccatttttcccagcttcccccacctcccccacagctttctcactcttcttggtcagctcttagccttctatcaactttgaaatgctggtgctcccccaggcacccttctttcccactccttgttctgtccctgggccagcttcacatctgtacactggtaactcccaagtgaacggaagtggccggatctaggagcatcaggtccacgtgtccgccgtccacctcaggtgtgcaatgagatgcttcggggtcctccatcctccgcgtgccatccctggcctcagtgccatcctccctggacctggttcttcctcctcctctgccttggtgatggcactaccttcacccasgggtcaggcctgcggctggaagccaagctaacctcccttctcctcccgatcctttctacttttttcattaaatcactt

SEQ ID NO: 48362 - DNA, 1306 bp, Homo sapiens
atgtcaattattagtttatgtttgtataaagttttctagtgttcattagctgtttactctaaaagagttaacagtaataatttaggagacatatatttttctatttacatataatatttttctatttctaggtagacatggcatttactgaaaatggaaaattttaagctcagcaaagcacagtgtttagacatttagaattacccaagccaggccgggtgcggtggctcacacctgtaatcccaacattttgggaggccaaggcgggcagatcacaaagtcacgtgattgagaccattctggctaacacagtgaaaccccatctcgactaaaaatacaaaaagttagctgggtgtggtggcacctgcctgtactcccagctactcgggaggctgaggcaggagaatcacttgaatccgggaggtggaagttccagtgagccgagatcacgccactgcactccagcctgggtgacagagcaagactccgttctcaaaaacaaacaaacaaacaaacaaaaaaccccaagccaagcccaattatttgtagggggagggaggaggatttaggatgcctcaccatttaaacttttcattactatattggtagaattcgttgcaatagctcatattatatcaaaaagggttctacttcttttcttcacattaaaagcagattagagaatagaaagcatattcgagaatagaaagcatattcatataaaaaattcctgtttgggttaattacgcttataaaatttttcctgaagcaacagtccaaacttgccctaaactattttccatatagctggcaggaaaaaaccaaatttctcatactcttatgtacctaaaatggactcctaactcaaagaagagttaatataaattcaccacattcagaagtacttttaagaaggcattgcctctctcctatagcaaccaaaaaagcatggcactggtctaaaaatagacacatagatcagtggaagagaacagagaacccagaaataaagccacatgcttacagctaattgatctttgacaaagtcagcaaaaatacayacaatggggaaaggacaccctattcaataaatggtgctgggaaaattggaacagagaaactggagacctatctcttatcatatgcaaaaattaagacagatttaagacttaaacgtaagacctgaaaaaataaaaattcctgggtggggggagggaactagaaaaaactcttcacaacattggccgacgcaaggaattcatgactaagatctcaaaagcaaatgcagcaaaaacaaaaatagaca

SEQ ID NO: 48363 - DNA, 599 bp, Homo sapiens
aaggaatcacatagacctccgtttaaatttaggctctaccacttgcagctgcyagaagtttgatttatataatctttcattgccaaaacgggtcagattcagaaccagcctcttcagggtaactgtgaggatcaagaaaatcacaacagccgaagtgctttacagtgtgcctggcataaaacaaactctgagaacattttttaaaaaaccctttcaaggtaggcagtatcattccttccccctcatttcatagatggggcaattaaggctcagaaaggcacgtcgcttgtccaggatcttggagtggtggaattaggatagggcattctggactacaataaacacctgagcgtttagctgctgtgttctgagctcccacagcactttttcttacaacacaaactttatttacatcacactccacttccgcatccttcactaaaatatgagctcttcaagggcagggactatatttttgctaccgcagtagttagcgatacacacacagaatatgaggaaaaagtgtctgaccaacgatcaatgcactcacgactgaacctacggtggcagattgcagtgggatagaagagctttatgtg

SEQ ID NO: 48364 - DNA, 599 bp, Homo sapiens
aaggaatcacatagacctccgtttaaatttaggctctaccacttgcagctgccasaagtttgatttatataatctttcattgccaaaacgggtcagattcagaaccagcctcttcagggtaactgtgaggatcaagaaaatcacaacagccgaagtgctttacagtgtgcctggcataaaacaaactctgagaacattttttaaaaaaccctttcaaggtaggcagtatcattccttccccctcatttcatagatggggcaattaaggctcagaaaggcacgtcgcttgtccaggatcttggagtggtggaattaggatagggcattctggactacaataaacacctgagcgtttagctgctgtgttctgagctcccacagcactttttcttacaacacaaactttatttacatcacactccacttccgcatccttcactaaaatatgagctcttcaagggcagggactatatttttgctaccgcagtagttagcgatacacacacagaatatgaggaaaaagtgtctgaccaacgatcaatgcactcacgactgaacctacggtggcagattgcagtgggatagaagagctttatgtg

SEQ ID NO: 48365 - DNA, 599 bp, Homo sapiens
aaggaatcacatagacctccgtttaaatttaggctctaccacttgcagctgccagaagtttgatttatataatctttcattgccaaaacgggtcagattcagaaccagcctcttcagggtaactgtgaggatcaagaaaatcacaacagccgaagtgctttacagtgtgcctggcataaaacaaactctgagaacattttttaaaaaaycctttcaaggtaggcagtatcattccttccccctcatttcatagatggggcaattaaggctcagaaaggcacgtcgcttgtccaggatcttggagtggtggaattaggatagggcattctggactacaataaacacctgagcgtttagctgctgtgttctgagctcccacagcactttttcttacaacacaaactttatttacatcacactccacttccgcatccttcactaaaatatgagctcttcaagggcagggactatatttttgctaccgcagtagttagcgatacacacacagaatatgaggaaaaagtgtctgaccaacgatcaatgcactcacgactgaacctacggtggcagattgcagtgggatagaagagctttatgtg

SEQ ID NO: 48366 - DNA, 570 bp, Homo sapiens
tcacgcctgtaatcccagcactttgggaggccgaggcaggcggatcacgaggtcaggagatcgagaccagtctggccaacatagtgaaaccctgtctttactaaaaatacacgaaaaattagccaggtgtggtagtatgcacctgtaatttcagctactcaggaggctgaggcaggagaattgcttgaaccctggaggcggaggttgcagcgagccgagatcctgccactgtattccagcttgggtgacagaacgagactctgtctcaaaaaaaaaaaaaaagagtttgaataaaaataccatttataaaagtgcatgtatctgttggcaggagcaaagtactattttagtaattgagtataggtaagactaatttcatatgttttattactggtttattacctaggactacactttcccattttgtggctattttatgggtttgttgtattttttttttttttttggtgtgtgtggctatttacaaatggtaaaacttcacctctagtattttggcagtttttttattktttctggttcctacaagaatttgagagcacagtttgaaat

SEQ ID NO: 48367 - DNA, 622 bp, Homo sapiens
aaaataaaaagaaagaaagaaataaaaacaaagatgaatggagctgttgataaacccagtttttgagcctacagggcagcagttgaggtttctggccgttgggccctaacaaggccagcaggggcactcagggacttcctggtgtgtggtgtgaagtctgtgatgatggcataggcattggtatcccagttgtggttactttctggagagagcatgyggcatgcaggagctggagggggggtcttcctgggcggcctgtgtagcagcagctccaggcacaaaggctgcccctggagaatctgttgtggttctgagttctttcaagtttatatcaagttttccggcttcagtctgcagggctgtttttttcagatcctgggggcaaagggcagctacaagaccacctgagtcccaatagggatttgagttcttggtgacaccaagtcagggaggagacaaattagaaatgtcagtctgaagagagtggtaggtagccagatactgaaggaaagtagatgggaggatttggtaagggctgacgtgtaggaaggcagtgacagtccaagtgacaggcagatcataaaacctcaaggataggccgggcccggtggctcatgcctgt

SEQ ID NO: 48368 - DNA, 622 bp, Homo sapiens
aaaataaaaagaaagaaagaaataaaaacaaagatgaatggagctgttgataaacccagtttttgagcctacagggcagcagttgaggtttctggccgttgggccctaacaaggccagcaggggcactcagggacttcctggtgtgtggtgtgaagtctgtgatgatggcataggcattggtatcccagttgtggttactttctggagagagcatgtggcatgcaggagctggagggggggtcttcctgggcggcctgtgtagcagcagctccaggcacaaaggctgcccctggagaatctgttgtggttctgagttctttcaagtttatatcaagttttccggcttcagtctgcagggctgtttttttcagatcctgggggcaaagggcagctacaagaccacctgagtcccaatagggatttgagttcttggtgacaccaagtcagggaggagacaaattagaaatgtcagtctgragagagtggtaggtagccagatactgaaggaaagtagatgggaggatttggtaagggctgacgtgtaggaaggcagtgacagtccaagtgacaggcagatcataaaacctcaaggataggccgggcccggtggctcatgcctgt

SEQ ID NO: 48369 - DNA, 586 bp, Homo sapiens
atcttattagaataacaccacttattttcttcctttgaactgataatgtttctttttttttttttccaatacaaattttattatggcagcacaggtcactgtgtggtaactgtctgaactctaagcaatcttggaagcagtggttcttaagtatagttccaatgtggtctgtaaggatcttctagatgtttgaaggatttgtccaaaatttaattcatttaaaaatggagatgtatttaaatatataaatcagtttccattgcaaatgtcaacttataaaagacaaaatattatttttttaaatttaatgactataataattctttaccctacccaaagcaccacagaccactcatgcacccaaccctgacaggggaagagagatggagaggcatgggggtggagggaggaatggggtggggaatgaagggagaataagggatttcgyttcaggccaaaaggtatgtaagaataggttgggtccacagtttccaagatcatgacttctaggaagaagcatatgaatcaggaaagaaagacatcagagacagaaagagaatactttttactaatcaaaaaaatctca

SEQ ID NO: 48370 - DNA, 563 bp, Homo sapiens
cacgcccagctaatttttgcatttttagtagagacggggtttcaccctgttggccaggatggtcttgatctcttgatctcatgatccacccaccttggcctcccaaagtgctgggattacaggagtgagccaccgtgcccagccatctttcttttcttgctttctctttcttttctttcgagacygggtcttgctctgtcgcccaggctggactgcagtggcacaatcatagctcactgcagcctcgacctccctggctcaagcgatccttcctcctcagccccccgagtagttggaactacagctccacaccaccatgcctggctgattctttttttccttgtagagatggggtcttgctatgctgtccatcctggtctcaaactcctggccttcccaaagcactgggattacaggcataagccaccacagccagtttccttttcttctttttaactggaatagttgactttttctttattagctgtgtgtcaggagggtatttttggcctttagtatgtcgtctaagttgctagtgcttttctgagattgtagtttgtttt

SEQ ID NO: 48371 - DNA, 1634 bp, Homo sapiens
attttcattaaatgattaggaagaaaaggcatatttattgaactgtgtaatgctgaaaagtttacgtcttcagcagaattgttagacctgttccagactttgagcaatatccacattatcgtcattaactgaaaaataaagacaaaactatgccattgtgtccactatgtgaaaaataaaatctcgtaatatcataggcatggaagttgcttatcatttcacatttagtgctttgtttgaaactgacccatgacccatttgagaccaaagttcatgcaattggcaagtaatggttgctttattgtgtggttctgacatgggaagtgcacaaaaaagggattcataaagtgtgtggaatgaacaaattccctctgagctttatagactttctaaaattcaaatatggaaaaggaatgagagaaataaattattaggtagccagttttattctcccccrcactccaccccaaaataatagtcctgggatccccagttcttgaatattttcatgcctctcagagtgagtttcatggtccaagacctgtgcatttactaaacatgacagaacttttagcagtgggatagtgctatattccagctatgtaatgtgttaaataggcctttatgtctaggcttcaaccctaactatgatttaccatatttggaggctggtgtaaagggaggaaaataaattcagatttggagtgtttcctggaacttgcacacagccaaaactactttcctgtacacctgtgtgccacgcacaggccaggcagatgaggaggaaagtccaatgcttgacaatgtaaagttgaaagggaggcttaccccaggaacaaaaagaaccaattagcagtttagaatttctacctcctgcctcgatgaatcaagcagggcttcccttctttcttcagcatcatttttcaaacggaagaaaagcttcttatatggcttctgggggaaaaactgagggagaagggctgcccagacagatattcaaagttaggagtttgtcactggggtcagcatggctaggaaggggcactattttaggaagccaaagcctttggtttaattcacagctctcctacttagtagagaccttggggaagtctcctgttttcttaattcttgttaaattggaccacagtcacacccatttgtttacatgttgcttctggctgctttcatgatacaagtgttgagttgagtagttgcaacgaaaactgtgtggcttgtgctacggtttgaatgtgtttgactcctctaagtttgtatgttgaaagccaaatctccaatggaacagctttgggagatggggtctaatgggaaatatttaggttggaataatgccattatgaaaagggcttgcaggagaagatttgctcttttttgctcttctgccatgtgaggaacagcgttcctcccctccagaggatgcagcattcaatgtgccatcttggaaggagcaaccagaccctcaccagacaccagatactggtgacttgttcttgagattcccagcctccagaactgtgagaaataaatttctgttctttataagttactcagtctcaagtattatgttatagcagtgcagaatgaactaagtcagcttgcaagagaaaaaatac

SEQ ID NO: 48372 - DNA, 1634 bp, Homo sapiens
attttcattaaatgattaggaagaaaaggcatatttattgaactgtgtaatgctgaaaagtttacgtcttcagcagaattgttagacctgttccagactttgagcaatatccacattatcgtcattaactgaaaaataaagacaaaactatgccattgtgtccactatgtgaaaaataaaatctcgtaatatcataggcatggaagttgcttatcatttcacatttagtgctttgtttgaaactgacccatgacccatttgagaccaaagttcatgcaattggcaagtaatggttgctttattgtgtggttctgacatgggaagtgcacaaaaaagggattcataaagtgtgtggaatgaacaaattccctctgagctttatagactttctaaaattcaaatatggaaaaggaatgagagaaataaattattaggtagccagttttattctcccccgcactccaccccaaaataatagtcctgggatccccagttcttgaatattttcatgcctctcagagtgagtttcatggtccaagacctgtgcatttactaaacatgacagaacttttagcagtgggatagtgctatattccagctatgtaatgtgttaaataggcctttatgtctaggcttcaaccctaactatgatttaccatatttggaggctggtgtaaagggaggaaaataaattcagatttggagtgtttcctggaasttgcacacagccaaaactactttcctgtacacctgtgtgccacgcacaggccaggcagatgaggaggaaagtccaatgcttgacaatgtaaagttgaaagggaggcttaccccaggaacaaaaagaaccaattagcagtttagaatttctacctcctgcctcgatgaatcaagcagggcttcccttctttcttcagcatcatttttcaaacggaagaaaagcttcttatatggcttctgggggaaaaactgagggagaagggctgcccagacagatattcaaagttaggagtttgtcactggggtcagcatggctaggaaggggcactattttaggaagccaaagcctttggtttaattcacagctctcctacttagtagagaccttggggaagtctcctgttttcttaattcttgttaaattggaccacagtcacacccatttgtttacatgttgcttctggctgctttcatgatacaagtgttgagttgagtagttgcaacgaaaactgtgtggcttgtgctacggtttgaatgtgtttgactcctctaagtttgtatgttgaaagccaaatctccaatggaacagctttgggagatggggtctaatgggaaatatttaggttggaataatgccattatgaaaagggcttgcaggagaagatttgctcttttttgctcttctgccatgtgaggaacagcgttcctcccctccagaggatgcagcattcaatgtgccatcttggaaggagcaaccagaccctcaccagacaccagatactggtgacttgttcttgagattcccagcctccagaactgtgagaaataaatttctgttctttataagttactcagtctcaagtattatgttatagcagtgcagaatgaactaagtcagcttgcaagagaaaaaatac

SEQ ID NO: 48373 - DNA, 553 bp, Homo sapiens
ggcctggttgtacttacctcttctatcttatctcctaccctcgatggctttctttctgtttcttaagtactctgagttcttttccaccccagaacctttgcacatcccattcccattgcctggaatgctatttcctcagctcttcaaatgtctggcttctccttagtcaccagatctctgctcaaacatyacctccccaaggaggcattctcaagcagtcctgcacccagcaggattcagtcggcacattcacaatacgaacgttagaggaaggactatttacaaaagcatggggaaccataaggaatagtgaagcaccccaggagcaagagaggggctgttacccctgttaggcctgaagcgaagagggcaggagcattccggaatacgaaaggagagctctatgaagacagctgcccttagaggacgtgtggccgtcaacccagtgattcacccagctcaaggcaactcagaaaggagggggccaaggaggaaagcaccctgacatcactctccaccctccctccattcttctccattctcgaggactctg

SEQ ID NO: 48374 - DNA, 1603 bp, Homo sapiens
ggcttcctcatttggcttccaagaaatgatactattttctgtctcttcctaattctagagtttctccttctcaatcacattggattgtcaacaacttcaagtcaatgtttcaccctcagtaatcttctcttcttaatctataccatctcctttgattcattacatgtcttaattactgcctgtgtgctgtggtagacctttctcagacctactgtaatgcaaatgaaaacctgtagcactgtgcaagttatttaaataagcattcctaagatggatctgaagtcttttcccttattgattctgcttttgtcatttgttttttaaatgaaaacaaatttattatctcatttctgtaggaaaaaatgttcaaatatatatttctaaatctctgtgatggtctttcttagttttctcttatccacatgaatctattgcttttcagttaccatagtgtccaggttgctccaatcaccactggatacttcacaatttgtctatgtcttccttaagatgtgctgctaaaaaaataaaatacagtattccagacataaactgttcagcctagaagtcaagaaactattaatctcatgctcttgactctattcttttaaaggcggattgatgttctatgtgttgtttggcagcaaactcacattgcttgacactggctcacgttaagtttttttttttcctgtgtgaaaaacaacctctttccatactttcaaagcatacattttttaatgaaaaatacaggaattatcatttatttctactgaatttcacgctatagattttaatccagtgttctagctcatagggatactgaattgtaattatgtgatctatggtataagttctttctattgcataaatcatcattcctaattttgacctctgaaatcttgctttctgggagttcaaccaagtcactgatattgttgacttcagtcacttaagtaaaggaagagcctctaacacgctactggagatgcggctctattggcagtgctgtgtgtcaagattcactcaggaagtggcaaacgacatccacatgatgtcattcataagcacctacagtggttgtgaaagctcccatgactcacccatggtactgtcatgtcaacaacccactcatgagactgtcattaaaatacactttaaatatttattagaaatcaagatatatcaaatgtctatgctgtttctctgttctaccaaaccaaaatctcatccaaaagggaaaagactacyataatatgattgttctttctgaactcatttctgtagccaatgagtactatgatttctgttaaataaatactctgttttgtcatgtctaagactttcactttaccttgattttaattttcagagaaattacaatttaactttttattttctttctcatttgcatacttgccttgaataattaggatagatcactggccagagagaattcctccatcaagaattgcttcacacagtcgggagccaagatggccgaataggaacagctccagtctacagctcccagcgtgagcgatgcagaagatgggtgatttctgcattcccatctgaggtaccgggttcatctcactaggga

SEQ ID NO: 48375 - DNA, 1934 bp, Homo sapiens
tttttcctctttattattttatttcctgtaataatcattttatttttattaaaaatacattaaaaatatttgctttgaatataggaaatatggaagacctggaagaataaaataagaaaagttatattttggtaaacaatacacatcgtatcaatggctaatatatgcaaattttagcagatagaagtagctctcagaatctgctgaccacaatgctttcccccataaagtggagaagaaatgtggaagagcctagttccattaccctggttctgtaaaaaacaaacaaacaaacaaaaaacaaattacagttcaccagtgagtccagttcaagttggccagacttgaactgagaagaacactaataatattcatgtagtttcatctaaaagatgttagtaccagaaaataaaaaggaaatgtgtgtgttcaacaattgatgagcgctagcatcaatgctcctgaagatcttgatgttattcgctcttggtctgtgtctatagatagatataagctacttggagcacttggatgacaaaatctttttgattaaaatgaaaacaattgttgtgctaaaacaaatgatcgaaacagttttcatgacactgatattcttatatcatttaatcttaaatgttgaagacctttaaatagttaaaaacatatctgtttttttgaaaagcactaggaattaaatccatgtccaaaaatacaattttttgtatgttaaaataacctctttcactaaataactatttggtacatatagaatgttcatattaatctatttatatgtaccatataaatattatatgtaccatataaataactatttggtacatatagaatgtaaaaattgaaagaatttaagtccctattttataattaattccatttagttttaatgctaattaagagagaacactctatttctcatatttttagtatatcacaagtatatgaaaaaatgcctattttatcttaaaacagctatgctttcaatgtaattttatagattttattagtatattagttatcttttacagaagataaactacatagaatttagtttaaattaggaataaatttcttggcttcatttaaaaggagaaggaggttattattcatgatcattagaggaaatatcctattgccattttaaagttcttttatatggaaacacactgaattaaaaagtgaaggaattaagattgattagaagtgttttaaagtggcttttagatgtatctgcaaaaataaaaagtcagttctatcccaggccattatcagctgtcttgttaagtgcccctagcattctcatattgaagtcctgcagtgccacataaaataagtcctggggaagatctgaccccaccttgtgaatttctctgggctttgccttatttccccttctcattcatcaactgaatgggtttcctgaccccacaggcaagtgaaacttggtttctcactttccttgtttcctttgcatttcaaaacttagctctagactattcaatctcaatgttatcttaaacccctatagtatctggggtttgctcatattttctactggctgcaagctcaaaattggtgtaccagagcgctttctaacatagcccagtcctccaacacacctagaaacacacctgcctaccttctccccctggccttcctgccttccttcctccycccacctttcagggagattgtacattttcatcatctccactgaaatgattactaatattatcaaatgattattgggtccttatttgcagacgttatgagtatatggaaatataagtctagcctttacttaagacaatacctgagattttagtgattttatctccaaagcagtgatgttaatgtttacttttaatgatgaaatgttaaataatctccatgagggtcatgactagacaaccatc

SEQ ID NO: 48376 - DNA, 581 bp, Homo sapiens
tatttttgccaccacttttttttttttttttttttttgagacggagtcgcactgttgcccaggcatgagcggagtggcacaatcttctcggctttttgcaacctccacctcctgagtttaagtgattctcctccctcggcccccgcagtagctgggattacaggcgcccaccaccatgcctggctaatttttgtttagtagagacagggtttcaccacgttggccaggctggtctcgaactcctgacctctagtgatccacccgcctcggcctcccaaagtgctgggattacaggagtgagccaccgcggccagccgccaccactcttttcatatttatttgaaatgatcttgtggtgttgctagctaactttttgtgaacatgtgtgctatctacctaattaaattgtaagtgccctgaggacagagagctgagggaatttgaggtgtcaccataacttasacatgaagaacactccgtgagagtgtgctgacatataggtggggatggctgagtcagccctctaacctgggagtggggatggctggagtgaatgaaaaggatatcaaaacatgcagaga

SEQ ID NO: 48377 - DNA, 598 bp, Homo sapiens
cgggtttagaacaggaaggctgttgtacgtggttggagagggagttcaaagagtcagaaagctggtttcagaagttgagaggtgttagagggagacagggcaggactttgtaaggtgacaaagaagtagagactgaaaccctgtctctactacaaatacaaaaattagccgggcgtggtggcgggcgcctatagtcccagcaagaggagygaataggtggtcaaataaggtcttagaggagctaaaggggcagggagcttatgggcgaacaggaaaggtttacagcaggaccccgcaggattcatagggacgaagtaaaggatattataaaaggaacagtgagagagctaacagaagttttactttggggggcagaggtgggaggatcacctgagcccaggaattcaagaccagcatgggcaacattgtagcaaaaccccatctctaccaaaagaaaaaaattttttttttttttttttttttttgagagagtctcgctgtgtcacccaggctggagtgcagtggcaggatcttggctcacttcaacctccacctcccgagttctgcctcagcctcccaagtagctgggattacaggt

SEQ ID NO: 48378 - DNA, 636 bp, Homo sapiens
tccttttatgcctcatgctctatctgtccccttcatctctgcctgtagcagccacagaccctctctttccttggtgcatgtccctccttcccactttcctaatttcagcctgacttagttctctacctgtcagcttggacttaaggaaaggaagttctcttttcttggggggtcactggggccatgggcgtctttccactccatttcttttccaaagctgcctctggaacgaatctgtaaatcccagggcattgcatgagttttcttttctttctttccttctttctttctctctctttctttccttcttgctttcttgctttctttcttgctttcttgctttctgtcactgaaagcaaatattgtagacagatatgcttgtaggatagaaataaaatgccccattctttgaaacatattttgttttttattttagattcatggagtatgtgtgcaagtttgtcacatgggtatattgcgtgatgctgaggtttaggcawtgaacttgttacccaaatagtgagcatagtacccagtaggtagtttttaaaccgttacccccttctctccctcctttccgagttcccagtgtctgttgtttccatatttgtgtctgtgtataccccttgtttagct

SEQ ID NO: 48379 - DNA, 533 bp, Homo sapiens
tgggagtttctttatcactcctttcctccctcccctctctccttcgctrgcctccctatatgaccatggttttctaatttctgttttgccctgggtaccagctccatttccttctctgcataaaaccatcctccacttagtaatggtgatgtggactactcaccacacattcattcttcttccagatgtttggggatcctctccttcccttttgtcagttcatatgatttggttaaagtcccattgacctacagttaataagatgcagagaggcttttgctggggtattttggaaagcctcgctttactaaggagatttcaagataagggagataggtctgggggctgctggagtcatcttccaatgaccaagacaaatcctgtttgagaataaagccagcacatggagtaggacagggaaatagattgcacgacatcatttgagcccctgtatcaagtgacacctgatgcttacattagcctggattttacagttgcctgagccagtaaatccccttttttgtgtataagct

SEQ ID NO: 48380 - DNA, 557 bp, Homo sapiens
atttcttttacatcatattttccaagtagaatatagtcactaaataggaaaaaactctacggtcaaagctactgaataaacatgagaccaaaaaagtacctctaatgttatgctattcttgactttcatgagaaacatagactaaaaattactccatcccccattcctgtgtgctggaatgttcctattagagaaacagatcttgcatgctgtcctgacctttaatctgctccacttggcagcaacaagatgtaacacctttctactgttcaaaaagaaataagctgggaaaattgaattgtctcttgtttttgtttcctcaaaaacctagcaatcaatacaaactttattgaaggtcatctacgagctggtttctacctaatgaacagtataaatgggctgtatacatgaagaaatttaggttcagatttcttcaggaccatttataatatttatgtcacaaaaacctccaaagcttacatttwaaaaaaaactgtctattctcatccatactactgtttttatttttagttattacctcaaacatatactcttta

SEQ ID NO: 48381 - DNA, 631 bp, Homo sapiens
cgagataggccataatctgataggaatgtggccttacaaaaagaggaatatctgttcctcactctttctgtctctctgccaggtattactagatgggggtagaagctcaagtttttcactctgcttctattgccatttgaggtatgaggcatggagctatttattactgttggatgagagtggaagtccagtctcctcccatggtttccactgacactgtcagggggagggacaggctcatcactatccttacttggccttctctgaccaccayagtgggggtattggagcgttttgttgcagcctgttgaagatagaaatctagactctccactttgccttactggtgggggtgggggtaaggccaccgttttttctgtggagtttgtctagaataggatagatattgtctaaattgttttctgtctttctaggctgccccctttttggtcctttggttagagacagaaggccattttagtctgtgtttgttgatgtttccaggttgctggcttattcagctccaactctgggatattggaagcaaaaagacaagccaaggaatccaccacctagttgctcctcgggccctgatgtccttagcaagttaggctttttctttccttcagag

SEQ ID NO: 48382 - DNA, 1084 bp, Homo sapiens
aaaaaaaaaaaaaaaaagaattaccaatcctgaggagggagttgtgggaaaccccttaatctacagcaggtagatgagaaatactactgataacctgggacttataactgccatctgcagtgggaacaatcttaggggattgagtccttaacttgtctccattctttgtttttgtcgtttatgcctttttagcccttcactgtcattttagtgaacataaaggagagagcagaaataaaggtgtgcattcaatccaatgtttgacctgtaatccagagcttacattttagtcaaactagaagattattcccctgactccaagtgtatgcaccttcccaatctccaaatagcccaataaaatcttatctttcaaaactcagttcaagtgccagctccacataacatattttctaaccttccaaattgtaaataacttatccatcttctgaattttcacagcacattacttgtatctcttctggcatttacttagaccatatgtgctaaattttaatgactaatgctcaaaaatctcctccactgctcaaagttattcacttcactaaaagagtttaaattctatcaatcagggatttatttaataagtcacattttaaaatagaaatattcttcaaaataataaacctattggtatgcattagtttagcaatgctcttttccttctagcccaaactatgatccatgaactsagcaaatatgttatctaaaaggtaaggaaagaaatcttacacaatttcaagaaccaagcatctggtgatgtggtttggctctgtggccccacccaaatctcatattgaattgtcatcttcaatgttggaggaggggcctggtgggaggtggctggatcatgttggcagacatccccccctgttcttgtgatagtcagtgagttctcaagagatttggctgtttaaaagtgtgcagcactttccccttgggcttgctctcttccttttgccagccatgtaagacatgcttgcttcccctttgccttccaccatgattataagtctcctgaggcttccctagaagcagaagaatgtacagcctgcagaaccaggag

SEQ ID NO: 48383 - DNA, 583 bp, Homo sapiens
gaagaaaatagtaatataggtctacagcaggataaaactcacacccttggcatcatgaataaatgtcgtaaggtaaacataaataaatacattctactacttttgtaaaccaaactcaactacacagaggagttaaacayggcaacctattaatttactaaacagttcccttaaacctctactgtctaccccctgttaattttccatttctctctgaatccaactcctaaagcagaactggggaggacaggctaggggaatgtatttgagctcacgatctaccatttgatttcctcactgccaccagctgttacactgttttccagataatgtcacggttggctgtccttcctttattccagatgtagagggaaaggaactccagggcacactttcagtgaaacaccaaaaataaaagacaagtcgagttactagttaactcaaatcagatgacacacaattttatttactgcagaaacttttctcctgagttacacttatggctaatttctgtgccaataggccattcttcatgtgagaatactgacataatactgacatatcaatagggagttgctaccca

SEQ ID NO: 48384 - DNA, 1737 bp, Homo sapiens
tcatagaatagaataaagctgctgcagamaggcagctcaggaaacatctgaggtcctttttccttcaccataattttagagatgagaaaatggatccctaagatccttgggctttcgtagttagacaaagatggtgctaggtccggatcccaagcctcttgtcctctaaggctttcacgctctcccatactgtctcagattagtttgggatcaaaatatttagctctttaccttacccaggatctttttgcagtgttacaaggcccccattcttcttttgttgctttctcttgtatagtcctaacattcattgagacacagtttgcaaaaagtgagggtgtgggtctcaacactgaccctttgcagcagtcacagaaaaacatcttaacagtgaagtttgagatttgtgtgttcagtgtttctaattcaatgctgtcgatgacactggcttctagttatttagcacatatgaatcatgttatagtatcaaaatacttttctatcaatagcaacttcttagcatgaatcaggccagttttattatttcctcctccccaaagcagctttcctggtcacatcagatttaatgaggtgcaataagttgcccagatgcttagctgtcacaactcctaaagtgtacagggtgcaagccaaaagttttagattaagggtagaaattgtcttacctctgggattcctggttactaaggacaaagttggggggtgggtgacaaaggggtttgggaaagggtagaagaatatcttgcgttcatttatagcaagccaggagttcacaggtattttagctcatccctagttgctagagtctttaaagattctgcttcatcctgaaaatctgctgtagtacagggaagggtaaaggtagagagaagggccactgacagagtccagttcatccccaactgaccctaacttcaagaggcaacaactcaaattctcagagggaatgggagcactttagatcagcaatacaccaacactggtctgatcctagttgctgttgacaagagtggacactttgagtgtgccccttggcatggtgattctgaacatgaacccagaggtgattccaaacctggaatgagaataaggctttccttgggcatgactcaagtagaaaagctctttgaatcacatttgaatctgagtcacccaccagtcttttctttgtcccataaaggcaattcaagcattgaggtataaaccaggctttttgattctcagccttcccttctcagccacctcacatctcaaccaccccatggaaacagtaagatttctttcaggcatttattttaaagagagactacttcatacaaccaggtttgggggatttgagggcttaagagagttactagaaattactgtcagttcttgctgtaaagctatctctgcccctgggacgcatggcctgccaaatggcctcataaatctgattattctcctttcctttttctctttccatgttaaaattcttctgatttaccagcaacttcaggagagttaaaacaaatgaaacctaacagaaattctgaccctccactgccaccaatgcactcaagatgcatcatcatgaactgtatttttagagacttgcaagtgttatattgggctaactcatattttggtcatctttgtcacctcctccaaatccctctgatatttattttgaagaccttctgagagtctacaaccacacttgctagaaattcttac

SEQ ID NO: 48385 - DNA, 1737 bp, Homo sapiens
tcatagaatagaataaagctgctgcagaaaggcagctcaggaaacatctgaggtcctttttccttcaccataattttagagatgagaaaatggatccctaagatccttgggctttcgtagttagacaaagatggtgctaggtccggatcccaagcctcttgtcctctaaggctttcacgctctcccatactgtctcagattagtttgggatcaaaatatttagctctttaccttacccaggatctttttgcagtgttacaaggcccccattcttcttttgttgctttctcttgtatagtcctaacattcattgagacacagtttgcaaaaagtgagggtgtgggtctcaacactgaccctttgcagcagtcacagaaaaacatcttaacagtgaagtttgagatttgtgtgttcagtgtttctaattcaatgctgtcgatgacactggcttctagttatttagcacatatgaatcatgttatagtatcaaaatacttttctatcaatagcaacttcttagcatgaatcaggccagttttattatttcctcctccccaaagcagctttcctggtcacatcagatttaatgaggtgcaataagttgcccagatgcttagctgtcacaactcctaaagtgtacagggtgcaagccaaaagttttagattaagggtagaaattgtcttacctctgggattcctggttactaaggacaaagttggggggtgggtgacaaaggggtttgggaaagggtagaagaatatcttgcgttcatttatagcaagccaggagttcacaggtattttagctcatccctagttgctagagtctttaaagattctgcttcatcctgaaaatctgctgtagtacagggaagggtaaaggtagagagaagggccactgacagagtccagttcatccccaactgaccctaacttcaagaggcaacaactcaaattctcagagggaatgggagcactttagatcagcaatacaccaacactggtctgatcctagttgctgttgacaagagtggacactttgagtgtgccccttggcatggtgattctgaacatgaacccagaggtgattccaaacctggaatgagaataaggctttccttgggcatgactcaagtagaaaagctctttgaatcacatttgaatctgagtcacccaccagtcttttctttgtcccataaaggcaattcaagcattgaggtataaaccaggctttttgattctcagccttcccttctcagccacctcacatctcaaccaccccatggaaacagtaagatttctttcaggcatttattttaaagagagactacttcatacaaccaggtttgggggatttgagggcttaagagagttactagaaattactgtcagttcttgctgtaaagctatctctgcccctgggacgcatggcctgccaaatggcctcataaatctgattattctcctttcctttttctctttccatgttaaaattcttctgatttaccagcaacttcaggagagttaaaacaaatgaaacctaacagaaattctgaccctccactgccaccaatgcactcaagatgcatcatcatgaactgtatttttagagacttgcaagtgttatattgggctaactcatattttggtcatctttgtcacctcctccaaatccctctgatatttattttgaagaccttctgagartctacaaccacacttgctagaaattcttac

SEQ ID NO: 48386 - DNA, 554 bp, Homo sapiens
tgttaactgtctcagagtcctaggcctgcatcacaattcatgtcacacttctcgaggaataaatcagtggttgtgctcagctgttccagacataaaaaggcccagggaagaagatgtttttgtcatcttaccccactctggagcacctaccactgacaagcctgtttatttatttattcaatgatttacttaattatctactttttctttwtccagtgatttattcagtattcattccttcattaagaccccaggaactggtatcagaactatagtggatggtttattgacttaattaggtgaaagcttaaaagctcccattgaagaaatcaatagtgcaaataccttttttttgtatataggcagacatttctatatgcagctaatttagttgctgtgacaaaaacaaaaacaaacaaacaaaaaaaaaacaacacccagattttctgcagttgaacacaaaataagttgattctttactcttgcagagtgtagtctgtggtggaagacagtcattcaggaacccaggctgccatcttcaattcagctggcag

SEQ ID NO: 48387 - DNA, 554 bp, Homo sapiens
tgttaactgtctcagagtcctaggcctgcatcacaattcatgtcacacttctcgaggaataaatcagtggttgtgctcagctgttccagacataaaaaggcccagggaagaagatgtttttgtcatcttaccccactctggagcacctaccactgacaagcctgtttatttatttattcaatgatttacttaattatctactttttctttttccagtgatttattcagtattcattccttcattaagaccccaggaacwggtatcagaactatagtggatggtttattgacttaattaggtgaaagcttaaaagctcccattgaagaaatcaatagtgcaaataccttttttttgtatataggcagacatttctatatgcagctaatttagttgctgtgacaaaaacaaaaacaaacaaacaaaaaaaaaacaacacccagattttctgcagttgaacacaaaataagttgattctttactcttgcagagtgtagtctgtggtggaagacagtcattcaggaacccaggctgccatcttcaattcagctggcag

SEQ ID NO: 48388 - DNA, 555 bp, Homo sapiens
tttagcaaattcctattctctaagtaagtgatagcaggtttggcactcaacttttgcaaacgggttccttttaaagtgtgcatttttcttatgaaagaaattacatctcatttgtgaaaatgcacgtaaaaatcattatcaatggctcctaataaagctagtaaaggcataatctgctagctaaataatcaagttatttatttgaagtataaatagattctaattcattatttaactagttattatcttctgcttacctgratatccagatgtttgcttttgtatgagaaaatatatcaaaagacaaacaggttattgccaatagaatagtacctataaattacattacatttgctatttcattttcttcttttttaaaatgttgctaaagccttctctattatggagttttgaaagtaaataaactcaataccatcaagctcaacaatgctaaatgtcagtgcaggaaatagagtatagataattatcatttcagttcataaacataaaatgttcacctaataacattttaatgtctttttaaaatagcttttg

SEQ ID NO: 48389 - DNA, 601 bp, Homo sapiens
tttccagtaactctactttttttttagaattgttttgaaagtagcacattcaggtatagattcatttattcattcattcgrtaaatatctactgggtatcaaccctgtgccagctctagactaagcactgggacatgttataagaaacttttaatgtggcactggacttcaggagagatctcaaggctaaaaatataggattgggggttaggtaaatggtggtaatagtgcctttaaggcatatggaaatggagagagttaagtgaagagacatctgtatattgaggtgaagaggaggggagggtagatgagaccagtttgtagttgattgcttcagaaagtcgttgcatgaatggtatagaaaagatacaaaaggctttgggtaagtgagtaagaatgattgtagagctgttagggagaatgttcccagcaatgaatcagaggattgttgttggcgtttccagcacagtggaagctagcatcagtatgttatagtgagccagggcagtcccaggttttctccagcaatgctcatcagcaaaagcagaaaaattagagagtgtgtatgatgtaagtttgcccactgatatggtgggtaatg

SEQ ID NO: 48390 - DNA, 559 bp, Homo sapiens
aatcgcttgaatccgggaggggaggttgcagggagccgagatcgcaccactgcactccagcctgggcaacaagagcgaaaactccatctccaaaaaaaaacccaaaacggccttcaggatgagaaggtgcctttcagcagcctcagtcagtccccctcctccctatttctttctgttcgccccctcctctgccctcccatctcaacctctccatctttctaatcactgtgattactctccctggttctcagctcttggccaccccttgactgagcctttggcatttccctcatgtggctcttttagatccagattgaagtttttctctgcatgttggttttggtgattgcctttgcctagtctcatgtcawgaccaagtggaacagctgggaagagaaaacagagcccaggaaatctgcttctactttgctggtcttcaaggtcggcctgccagataaactcagtttcatcagacttaatgttctcttaaacgtgtctcattgtatattttttacatttatatgattttgtatttcttttaatctggtttatactgtca

SEQ ID NO: 48391 - DNA, 1028 bp, Homo sapiens
cagttaaaattttttaagataataaatagaaaatgcattcacagtgtaggatacacaaaaagtattccaaaagtaatgaactttatatttgttattattttactacgttttcatgaatggaggaccaagatgttcctattatgttgagttcctctctaggcaaaaaaacacatcatgggataaaatcatcagaatttttagaaatgcctgagaaattattcagtcccactaccctgggaaatttacaatcccttgccaactctttgagggccatgtctaaaatccaaggtttggatgtttcarttaaatctgtcagtactttcacccctcatagtcctccaatctacttcaatagtttgtaaattacatactgcaattttaggttcttcaggcaaaggggcatgctgagtggtttgagctctggatgcttctgtacacacacacacacacacacacacacacacacacacacacacacaccttccttcaagcagaggtgctacacttatttttgttttacatacttgattgtgttcaagatttactttttttttaaagtccttctaatagaaaaattgaaagctatatttcttttttataaagccaagtaagtgaatttttcgggtaaataacgtttaccccctttaagtcacaaaacttattttaaattctcactatgtttgatacaaagcctacacaagctgactctgtctttttttctaaaataggatttcttgagcacagtccaattagtaaggcttggctttgccagagattggcatgtgatggactctatactacatgtataagtttctgtttgctattcaagaaaaatacgatactttgagaccaaaatgaatctaataactaagaagtaggttggtccctcctatcaaacagcttttgggttttcctatgtcaatgcacctgaatcttcatttgccacccagtatcaattcaggttccacaccaccagctccacacacgttgttacctctatttaggacacctgctcttcctttcctaca

SEQ ID NO: 48392 - DNA, 1028 bp, Homo sapiens
cagttaaaattttttaagataataaatagaaaatgcattcacagtgtaggatacacaaaaagtattccaaaagtaatgaactttatatttgttattattttactacgttttcatgaatggaggaccaagatgttcctattatgttgagttcctctctaggcaaaaaaacacatcatgggataaaatcatcagaatttttagaaatgcctgagaaattattcagtcccactaccctgggaaatttacaatcccttgccaactctttgagggccatgtctaaaatccaaggtttggatgtttcagttaaatctgtcagtactttcacccctcatagtcctccaatctacttcaatagtttgtaaattayatactgcaattttaggttcttcaggcaaaggggcatgctgagtggtttgagctctggatgcttctgtacacacacacacacacacacacacacacacacacacacacacacaccttccttcaagcagaggtgctacacttatttttgttttacatacttgattgtgttcaagatttactttttttttaaagtccttctaatagaaaaattgaaagctatatttcttttttataaagccaagtaagtgaatttttcgggtaaataacgtttaccccctttaagtcacaaaacttattttaaattctcactatgtttgatacaaagcctacacaagctgactctgtctttttttctaaaataggatttcttgagcacagtccaattagtaaggcttggctttgccagagattggcatgtgatggactctatactacatgtataagtttctgtttgctattcaagaaaaatacgatactttgagaccaaaatgaatctaataactaagaagtaggttggtccctcctatcaaacagcttttgggttttcctatgtcaatgcacctgaatcttcatttgccacccagtatcaattcaggttccacaccaccagctccacacacgttgttacctctatttaggacacctgctcttcctttcctaca

SEQ ID NO: 48393 - DNA, 1028 bp, Homo sapiens
cagttaaaattttttaagataataaatagaaaatgcattcacagtgtaggatacacaaaaagtattccaaaagtaatgaactttatatttgttattattttactacgttttcatgaatggaggaccaagatgttcctattatgttgagttcctctctaggcaaaaaaacacatcatgggataaaatcatcagaatttttagaaatgcctgagaaattattcagtcccactaccctgggaaatttacaatcccttgccaactctttgagggccatgtctaaaatccaaggtttggatgtttcagttaaatctgtcagtactttcacccctcatagtcctccaatctacttcaatagtttgtaaattacatactgcaattttaggttcttcaggcaaaggggcatgctgagtggtttgagctctggatgcttctgtacacacacacacacacacacacacacacacacacacacacacacaccttccttcaagcagaggtgctacacttatttttgttttacatacttgattgtgttcaagatttactttttttttaaagtccttctaayagaaaaattgaaagctatatttcttttttataaagccaagtaagtgaatttttcgggtaaataacgtttaccccctttaagtcacaaaacttattttaaattctcactatgtttgatacaaagcctacacaagctgactctgtctttttttctaaaataggatttcttgagcacagtccaattagtaaggcttggctttgccagagattggcatgtgatggactctatactacatgtataagtttctgtttgctattcaagaaaaatacgatactttgagaccaaaatgaatctaataactaagaagtaggttggtccctcctatcaaacagcttttgggttttcctatgtcaatgcacctgaatcttcatttgccacccagtatcaattcaggttccacaccaccagctccacacacgttgttacctctatttaggacacctgctcttcctttcctaca

SEQ ID NO: 48394 - DNA, 1028 bp, Homo sapiens
cagttaaaattttttaagataataaatagaaaatgcattcacagtgtaggatacacaaaaagtattccaaaagtaatgaactttatatttgttattattttactacgttttcatgaatggaggaccaagatgttcctattatgttgagttcctctctaggcaaaaaaacacatcatgggataaaatcatcagaatttttagaaatgcctgagaaattattcagtcccactaccctgggaaatttacaatcccttgccaactctttgagggccatgtctaaaatccaaggtttggatgtttcagttaaatctgtcagtactttcacccctcatagtcctccaatctacttcaatagtttgtaaattacatactgcaattttaggttcttcaggcaaaggggcatgctgagtggtttgagctctggatgcttctgtacacacacacacacacacacacacacacacacacacacacacacaccttccttcaagcagaggtgctacacttatttttgttttacatacttgattgtgttcaagatttactttttttttaaagtccttctaatagaaaaattgaaagctatatttcttttttataaagccaagtaagtgaatttttcgggtaaataaygtttaccccctttaagtcacaaaacttattttaaattctcactatgtttgatacaaagcctacacaagctgactctgtctttttttctaaaataggatttcttgagcacagtccaattagtaaggcttggctttgccagagattggcatgtgatggactctatactacatgtataagtttctgtttgctattcaagaaaaatacgatactttgagaccaaaatgaatctaataactaagaagtaggttggtccctcctatcaaacagcttttgggttttcctatgtcaatgcacctgaatcttcatttgccacccagtatcaattcaggttccacaccaccagctccacacacgttgttacctctatttaggacacctgctcttcctttcctaca

SEQ ID NO: 48395 - DNA, 610 bp, Homo sapiens
cggctccccccagcccccgacccggctccccccggccccaggccccaagtccacggctccctccagccctgggaccccagctccctccagccccgggccccaagtccacggctccctcagccccaggccccaagtccacggctccctccatccccgggccccaagtgtcggctccttccagccccgggaccccggctccctccagccccgggacacttctggagaagcagccaggagctggtccaatggcaggtgccacctgcacccagcaccctgcaattctggggagagcatggaggtgcagggagaggagagagcccggacgtgggtaggtaaactccccaaacgtccaccctgtgctgccagtgccttttacatgcagaggctgtggaggctgaaagaccaccggagccctggcttgaccagggctggagrggaggagagcaccggcctgcatccctcggaagccgagttggaactgcagaaggagcctcctgctgcagtctgctggtgttcggtgcagatccaaactgtggatgggctcctgggcacacccaggggtgggtggctgcttctctcgcgggtggtgcccggcgctctgcagcttggc

SEQ ID NO: 48396 - DNA, 629 bp, Homo sapiens
ccctgggaatgcttcccttcccagggttattccttaccaggaaaagaactcagcaatatttctcctactcgttttttgcaataagaaaaatatgactctgttctgcctcgccccacaggcagtcagaccttatggttatctcccttgttgcttgaacgtggctgttatcctgttctttttcagggtgcccagatttcatattgttcaaacatacgtattttacaaacwatttgtggagttaatgcaatcatcacagggtcctgaggcgacatacatcctcagtttatgaagatgatgggattaagggcttaaagaggcataagaaattataagaatattgattggggaagtgataaatgtccatgaaatcttcacaattcatgttcagattgcagtaaagacaggcataagaaattataaaagtattaacttgggaaactaataaatgcccatgaaatcttcacaatttatgttcttctgccatggcttcagccggtccctctgtttggggtccctgacttcccacaacaaaaaatcacctataggagacacattttcaatggcaattaagtgatataactacaaagtgttgatttgggatacaatttaaaacctttaacttatctctt

SEQ ID NO: 48397 - DNA, 1476 bp, Homo sapiens
gaacaatttgtagaggatctctgtgggagttgttgaaaatctaagggcaatggtacacctagacacggtttgagaagggagaagaaaacctgtgatgaattattatcttcctatatataaagggaatggcaagagtggtgtagggaataggaatagaaagaaacatctaaaatatgttgcgttttttgttgggaagatgctctacccctttaatactgctcaacttcctaatgcttgtcacttttgtatttgtcacacaaattgattgtgaattctctagttcttgaaccatatcgtgataactatcaaaatatataataagatcattttgaattgaactatrgatagggttcttctgtgtaatcttcttcgggtgtttatgttatgtcatgtgatgtgacttcatttaaaggaacttcacttaggataatttacatcctgagaaatagctctgacttctagagtttctttttccccccttagacatcattttaagagtttctcaactagtgtgtttttgggagttcacagactcataaagaaatgtgataaggctgggtgtgatggcacatgcctgtaatcccagcactttgggaggctgaggtgggagagttgcttgaggccaggagttcaagaccagcctgggcagcatagtgagaccctctctctctcactgccctctgctctctctctctctatatatatataaaagaaatgtggcacaaatatactatgacatggaaaaatatgtttctaagaagtaagagattgtattacttaccaatgtagataccattcctaactaatgcagtgcctggaacaatatatgtgctcaattatttgttggctgagtagacaaggtacatgttctgttagttccaagcagaataaatgacatgatacgctgtcttggactttttcttttacttttcagggtataatcaggtgagtaaaataaaaataattgtgataccaaattgatttgtaattcagacttggaaactcaggagtttctgggtcattaaatgatggtcagggctgaatctacataatctacattaactgctagtttgaccctgaaaacctgtccagaatgcactgacattaaagaggcaaggaattatgaactgcagccttcctggatacataatttatttcctttcgtataacatttaccttgaatagtgataagtgtattagattatcataaataataagtcagataagcctgttttattttggaattttaaaattaaaaacttaagagagagtacaatagaagaaagggaatgaattggattatgaagtaacatattttataatagtaaaattaaaataaaattttaattatgatcttcatattttctcatataattagaactggggaagttgtcagttgatgatctggggtattttactcttgataatctgctagattaagtttctaaagggtagggataatgtgttacccaaaca

SEQ ID NO: 48398 - DNA, 1476 bp, Homo sapiens
gaacaatttgtagaggatctctgtgggagttgttgaaaatctaagggcaatggtacacctagacacggtttgagaagggagaagaaaacctgtgatgaattattatcttcctatatataaagggaatggcaagagtggtgtagggaataggaatagaaagaaacatctaaaatatgttgcgttttttgttgggaagatgctctacccctttaatactgctcaacttcctaatgcttgtcacttttgtatttgtcacacaaattgattgtgaattctctagttcttgaaccatatcgtgataactatcaaaatatataataagatcattttgaattgaactatagatagggttcttctgtgtaatcttcttcgggtgtttatgttatgtcatgtgatgtgacttcatttaaaggaacttcacttaggataatttacatcctgagaaatagctctgacttctagagtttctttttccccccttagacatcattttaagagtttctcaactagtgtgtttttgggagttcacagactcataaagaaatgtgataaggctgggtgtgatggcacatgcctgtaatcccagcactttgggaggctgaggtgggagagttgcttgaggccaggagttcaagaccagcctgggcagcatagtgagaccctctctctctcactgccctctgctctctctctctctatatatatataaaagaaatgtggcacaaatatactatgacatggaaaaatatgtttctaagaagtaagagattgtattacttaccaatgtagataccattcctaactaatgcagtgcctggaacaatatatgtgctcaattatttgttggctgagtagacaaggtacatgttctgttagttccaagcagaataaatgacatgatacgctgtcttggactttttcttttacttttcagggtataatcaggtgagtaaaataaaaataattgtgataccaaattgatttgtaattcagacttggaaactcaggagtttctgggtcattaaatgatggtcagggctgaatctacatmatctacattaactgctagtttgaccctgaaaacctgtccagaatgcactgacattaaagaggcaaggaattatgaactgcagccttcctggatacataatttatttcctttcgtataacatttaccttgaatagtgataagtgtattagattatcataaataataagtcagataagcctgttttattttggaattttaaaattaaaaacttaagagagagtacaatagaagaaagggaatgaattggattatgaagtaacatattttataatagtaaaattaaaataaaattttaattatgatcttcatattttctcatataattagaactggggaagttgtcagttgatgatctggggtattttactcttgataatctgctagattaagtttctaaagggtagggataatgtgttacccaaaca

SEQ ID NO: 48399 - DNA, 549 bp, Homo sapiens
ccctagaatgtgcttgaaaaatatgktttttttccccacatcctcattctttgtagaagcctctgagcaagcggttcttctaagttaccccttagagtgactcccttgacttccgagttttagttctgtgactctcaaacttgaatgtgtatattttcacctagaggatcttaataagatgcaaattctaattcagaagcactgaggcagggcccaagattttctgcatttctaacaagctcccaggtgacgctaatgctactgagctgtgaaccatattttgagtaggaaggatattcctggatttccctagctgctgctttctgagttgtattttcctgattctttgcatgcttggttacatttgattggatgccagagtgttaccttgttggatgctggattttgcatattcttataaatattcttgagctttgttctgggatgcagctaagctgcttggaaataattcgagccttttgaggcttgtgtttaaactttgttaggtaggtccagagcagtgttaatttaggacttattttactccat

SEQ ID NO: 48400 - DNA, 383 bp, Homo sapiens
atgtggagtggcctagatgaatggtgtgcacacagtgggtctgcatcacagctgaggatccctgggctccagtcttataaagaaacttctggccaatttgccaaaactttgttctgaaaggagacttaaaaaattattctggtcactaaaaaacattctgctctctgccccagagggagacactatctttaacttccaatatgttcactatataatcattcttgggaaagatagtctggatgaaaactgtcacaagacaygttgaacctctctggagaatagctcctcaacactaagctttaaaaatgaactggctgaggtcttttggactgtggttacttcaactactttatttatttattttattttattattattatact

SEQ ID NO: 48401 - DNA, 639 bp, Homo sapiens
tttatttagacagtgatttctatttttctttcaaagattatatttttgtttccaaatgggagaggtgttatggggcgatagagaaaggatccagggaaaattgcatggtaaaattgctcctgggaaagaccagcttagggtatccatgattstcgcttctgtagccctgagcatgtttctccccttggagcatcctctgaagtcttggtcagagtcgttgaagagacatgaaccttttcagcattttctgctttgctttggcaggattgtttactgcctatcaagctgacttacaaaaaatactagttctgttgtttttcatttttaaaagcaaattgcttcagctcttcgtaaataactccttaaaagaaaagccatggatgacagatgaggaagcatagttgggaacagagcgcggcactcactcacgatcatagtgtcaggtcacaggaagccctctgagccccgggggtgggggcagcctctttaaagtgattatggagcaagaggagcttgaacagtggcactctgagcgttgtcttgggccagcttggagatcaggtcctgggctccagaagacatcgaggctggttctacctggatgttgcatccgtaggtatcaaagtaggagatgctttc

SEQ ID NO: 48402 - DNA, 639 bp, Homo sapiens
tttatttagacagtgatttctatttttctttcaaagattatatttttgtttccaaatgggagaggtgttatggggcgatagagaaaggatccagggaaaattgcatggtaaaattgctcctgggaaagaccagcttagggtatccatgattctcgcttctgtagccctgagcatgtttctccccttggagcatcctctgaagtcttggtcagagtcgttgaagagacatgaaccttttcagcattttctgctttgctttggcaggattgtttactgcctatcaagctgacttacaaaaaatactagttctgttgtttttcatttttaaaagcaaattgcttcasctcttcgtaaataactccttaaaagaaaagccatggatgacagatgaggaagcatagttgggaacagagcgcggcactcactcacgatcatagtgtcaggtcacaggaagccctctgagccccgggggtgggggcagcctctttaaagtgattatggagcaagaggagcttgaacagtggcactctgagcgttgtcttgggccagcttggagatcaggtcctgggctccagaagacatcgaggctggttctacctggatgttgcatccgtaggtatcaaagtaggagatgctttc

SEQ ID NO: 48403 - DNA, 639 bp, Homo sapiens
tttatttagacagtgatttctatttttctttcaaagattatatttttgtttccaaatgggagaggtgttatggggcgatagagaaaggatccagggaaaattgcatggtaaaattgctcctgggaaagaccagcttagggtatccatgattctcgcttctgtagccctgagcatgtttctccccttggagcatcctctgaagtcttggtcagagtcgttgaagagacatgaaccttttcagcattttctgctttgctttggcaggattgtttactgcctatcaagctgacttacaaaaaatactagttctgttgtttttcatttttaaaagcaaattgcttcagctcttcgtaaataactccttaaaagaaaagccrtggatgacagatgaggaagcatagttgggaacagagcgcggcactcactcacgatcatagtgtcaggtcacaggaagccctctgagccccgggggtgggggcagcctctttaaagtgattatggagcaagaggagcttgaacagtggcactctgagcgttgtcttgggccagcttggagatcaggtcctgggctccagaagacatcgaggctggttctacctggatgttgcatccgtaggtatcaaagtaggagatgctttc

SEQ ID NO: 48404 - DNA, 639 bp, Homo sapiens
tttatttagacagtgatttctatttttctttcaaagattatatttttgtttccaaatgggagaggtgttatggggcgatagagaaaggatccagggaaaattgcatggtaaaattgctcctgggaaagaccagcttagggtatccatgattctcgcttctgtagccctgagcatgtttctccccttggagcatcctctgaagtcttggtcagagtcgttgaagagacatgaaccttttcagcattttctgctttgctttggcaggattgtttactgcctatcaagctgacttacaaaaaatactagttctgttgtttttcatttttaaaagcaaattgcttcagctcttcgtaaataactccttaaaagaaaagccatggatgacagatgaggaagcatagttgggaacagagcgcggcactcrctcacgatcatagtgtcaggtcacaggaagccctctgagccccgggggtgggggcagcctctttaaagtgattatggagcaagaggagcttgaacagtggcactctgagcgttgtcttgggccagcttggagatcaggtcctgggctccagaagacatcgaggctggttctacctggatgttgcatccgtaggtatcaaagtaggagatgctttc

SEQ ID NO: 48405 - DNA, 592 bp, Homo sapiens
tttgcccttccatgatgggaagacacagtgaaaagagggctgtctatgaactaggaagaaggccttccccagacactgaatctgcctgggacttcccagatcttctggagagaaccgtgagaaataaatgtctgctgtttgtaagccacacaacctatggcattctcttatagcagtctgaatagactaagataataccataaggatctacctttgggactgtgtgctgttataataaaggctctgataagtcctgctagcgccgtttagaccaggggtttctaaactttttgaccacacaagttatttttccctttgcaagcaccttccatggaaatcttttgggaggctgaggcatgagaattgcttgaacccatgaagtgaaggttgcagtgaactgagatcatgccactgcactccagcctgggtgatggagtaagactctgtgtcaaaaaaaaaaaaaaaaaaaaaacagaaaagaaagaaaaaagaaaatattttcaaaatgatgccatggattaaatctgatagtcacaaaggatccttgtctggtgttayctccatttgatgggtgaggaaacaggagtcctga

SEQ ID NO: 48406 - DNA, 638 bp, Homo sapiens
taaataatcttattacctacaaataataatgtgtgtcccctgggtttgaattctctttacactggatttactaatattttatttaggatttctgcatctgtgcttctaagtaatgtcagactgtaggtttatgctttgcttgtttttggcactgtgtttatctgctttttgtacaaggatatgtgaattttattaagtgagttgggaattttccatctttttctatcctccaaaataacttgagtaatatagaagtatttgtttcttaacattgcttgtaaaataatttgacactagtggctttggggaaattgtgttatatttttaaatcattgatacaattttgttcataattatttgtatattgggacatcaaaaatttttttagttatttggtaataacattctataagattatctattctyaaaaatttatcaaatttgctaacatagaatatatatgtgtgtgtgtatgtatgtatgtgtatatatatatatatatatgtattgttcttcatttacatctatggctacatctccttttttaattcccaaagtagtgtatttgtactttctctcaggtttaatctttacctttggcaggagttttaatctttactttttttttttttagacgg

SEQ ID NO: 48407 - DNA, 548 bp, Homo sapiens
tgtggtgcattctttcctgtacacctccatcgataattcgcgtcatatcttactccaattttgctatccctttcatcaagattttaacactctcttctcttcccttcctctccccttatacaactgtttccgttgctctttggtttgaggttaagatgcttcagcctaaattccatccaacaattttgcrcccccctacttccacatgtgccctttaataggaatcccaagtttacatattatttacgactagatctaatgccacctcctccaccatgtttccctagatcaatccaagaagttagctctttttcttttatgatctccatctcctagaggactctgcaccattccttgctgggtacaaatatgcactcctctgctgtaattattcctcccccttgactgtaagttccttgattaatggtaccatgtttctttctcacccacagtgctgacacattgtgaacaatagtaagtgcttgctgaataaatatacaaataaaaaggaaatcgcatgaaatacccaatgtaacccccacttagat

SEQ ID NO: 48408 - DNA, 580 bp, Homo sapiens
gtatgtatatttttaatgaggtgagacataagtactgactaaaaataattctgaaaaaggcatactaaagagagctatagaattgcttgattgcttgaccctcttcactctgagtgtgtgtgtgtgtatatatttgcacctgagactgggcaatttacaaaagaaagtgtacaaaagagagtttaatggactcacagtcccacatggctggggaggcctcataatcacagtggaaagtgaaaggcatgtctcacacagcggcagacaagagaagagaacttgtgcaggaaaactcccctttataaaaccatcagatctcataagacttattcgctatcacaagactagcaagggaaagacctacctcygtgattcaattacctcccaccgggtgcctcccacaacacatgggaattgtgggagctacaattcaagatgagatttgggtggggacacagccaaaccatatcattaattttgtataaatttaaggggtacaaaagcagttttgttacatgtatagattccatagtggtgaagactggacttttagtgtaaccaccacctgaataatatacat

SEQ ID NO: 48409 - DNA, 522 bp, Homo sapiens
tatgcatcaggattcttatagggaagtaagataaatgtacaaaaaaaaaaaaaaaaaaaaaaaaaaaccaccttagaaatatgaaagtaccaagctgggtgccgtggttcatgcctacaatcccagcactttgggaggccgaggagggcggatcacctraggtcaggaatttgagaccagcctgcccaacatggtgaaaccccgtgtctactgaaaatacaaaaattagttaggtgtggtggtgggtgtctgtaatcccagctacttgggaggctgaggcaggtgattgtagtgattgtggtgattgtagtcagggaaacttctgggaagagataaccagaaccctgtctttgggaagaataatggaatgtattggtaagtaagagggccttgtggtttggataattcttaaactctctgagcctggaaataatgtaaaatgccttccacagtgtgcctattattgttagttgttattattaaaaattggaaaaataggatgaaggaagatgagaagaaaat

SEQ ID NO: 48410 - DNA, 1748 bp, Homo sapiens
tgactcacaaatctcctatctatacttccccaccaccccagacggtcatggttcataaatacttgctgagtaggtgtttttcctccaaatgaagatagctttgttttgtatttttgaaataatacattctgagaaaacctagagaatacatacagggaaataaacattttctacgattctgagttaattgtttgtttctgtgtttttttttttttttttttcgagatggagtcttgctctgtcgcccagcctggagtgcaatggtgcgatctcggytcactgcaacctccacctcccaggttcaagtgatcctcctgcctcagcctcacaagtagcagggattaaagacatgtgccaccacgcccagctaatttttgtatttttagtagagacagggttttaccatgttgcccaggctgttctcgaactcctgacctcaggtgatccgcctgcctcagcctcccaaagtgctgagatacaggtgtgtgccactgcgcctggccaagttaattgtttatgcacttaaaaatatattactccataaaataatgtcttttacaacaacttggatggagctggaggccgttattccaagtgaattaactcaggaatggaaaaccaaatattgtatattcccacttataagtgggagctaaactatgagaatacaaaggcataataatgatataatggactttggggacttggaggggaagtgtgggaggggcttgagggataaaagactacatcttgggtatagtgtacactgcttgggtgacagatgcatcaaaatcccagaaatcaccactaaagaatgtatccttgtaaccaaaacccatctgcacccccaaaatattgaagtaaaaattaaaattatatatatatagttctgtatatgtttccctaaaacacaaacacacatacacattttaactactcctccatggtgaaagttttgattatttccttttgattgttctgaaaaatattcttacatctttatacaccagtctaattgttttggagaggttttaaagagctgaaggacctcaaccactttccccagggctgaacaccagcaatattttgcttgtctcaacgcagctctttccttccatttttgtggtgcctatgcctacccacttccaggtccagctttaacatagagaaaagatttgcctggcaataaaccaaaatcaggaatttgcagtgctagaatttgcccacataatcatgtcctcctggtcctaaagctgtattccttgagtacaatagagtataagcaatgtctttcagaaatgcccacataggaacaaatgttccgcaagaaacacttgaaagaaaagtacagggcataggaacagagaaatggaatctgccaccgagaagcaaaaggttgcccgagaagcaaaaggttgccttttttaaactagcagtttttgtttaatgagtacatcaagccagtaagaagcaagcagagaatttccagtttgactggttcacactctacccgcttaaagccacgtaagtctacatgaagctagagctagaactctgcaaaaacaaacaaaaaccaccaccaccaacaaaaaaccaacgaaaaaaacaacctaaaaaagcccaaacccagtcatcacttactcaatggtcattagccctagaaaccctttccagatatggcacagctattctagtttattaaaaaataaattttattgtgtatatttaaagtatacaacatgatgtta

SEQ ID NO: 48411 - DNA, 539 bp, Homo sapiens
tcatgatccacctacctcagcctcccaaagtgttggtattacaggcatgagccaccgcacccaggccccatcatttttattttctacaattctggctgacatcttattgctccatccttgctaatgatagacttcatctcacatagaccagtgttttcagagaccggcttattgattcagtaaagggctgggggaaactgcacacacaaggacatayaaaatctaagcctctgcctgggccacatgacaggattcagaagcacctttgatataatgggtgcccgacctcatgtgaaagtccaagttcaggtgtaatgtgagagcggtaagaattcactggcctaggcttgggaactaatgctgcccaccacgttcagcctcagaggagaagaaatgacttgaagaacataatttgtgaatttgccaattgtttttcattttatagcatcacacagtaaaagtagataaaataattttaatgaaaatacttctgtgggccaggtgcggtggcttacgcctgtaatcccagcactttggga

SEQ ID NO: 48412 - DNA, 1152 bp, Homo sapiens
tacagtggtagagttgagtggttgtgacagagacaatgtgacccacaaagtctaaattttttctgtcttgccctttacagaaaaagtttggcaacctctattctagaggcttgaacttcgtggaactctcaggcggttttaagggcaaggctaataatatgtggctctgccttcacagttggctggaactcaagcatgtatccccagtgtctataagggaggccggtaaatgcagtctagtaaagtgatgcagatgagagaccacagatatagtgaacaagagtcaatgtcagacattttataggaggaatttattgtgtggactcacctttgagtcctgccttcaactatgacttcgtcttattttaagttcagtaaatgcatgagctcttttattccctctccccaagctgtcattatttcagctcatcacactttatttccttaatgtgcatagtcacaaaatgaaagacaactggtttgttttttggtttttatggggctttttatagatcaagataagcaatgtgattaaaacagcaggggtgtccaataattgagttgggtttgccaggctcatttgtgtatttactgaactagtcatgcaataggtgttagaaatattgatcaaggcagtgttttatttttatggatcctgttgtcctttttggtctgattgcacctgccaatgtttgtgagttattttcaaatgggcaccttccaaaagggtaatgtttcattggtgtagtaaatttcatgtgagtgtagttgctcctataaattcaaaggttgtgatcagccagatttttccttcaagacagaagaaagagacaaataacaggaatatggcaataagagatttttatattactaaagggaggcccttcataataaaaaccaataggatccttgakttttgttgggttcctgggaatttctcaatatcagtaataactttttaaaagctggcaacaatagaaattacaaacatttatcagcccaccaaaagcagtgtataaaactgatgtttgactcattacattccaaagatttatctgttttggcttaaaatcaggacaagactgactcagaccttgtccaagtgggtcactttcatgccatcaactttgggtgtatgagagttcttcgagg

SEQ ID NO: 48413 - DNA, 612 bp, Homo sapiens
ccagggtcccgcagatccacctcggcctcctcactgtagtatttaccttcctgtagaggtaaggataaaggctctgtgtgcatggggtaaaagtctccctgctgggatcagggacacttggctgacatctccttttagataaaaacagtaacaatgaagcctcagtcaggtctctaaaagatctggtccttaaattaaatgcttttcttctcttcaaaatagaaacctcttttgctttctgattgcagagtaatgcatgcctggtatcaaagattcagaatatacagaggagtatcaaaaagaaaatggaaaaattgcctataatttcgcctctcagtccgaaactgagtgaagattgtggataaataaacattttatttgtaaacaaaacgggatcatactgtccrtgctgttaagtgcaacttcccatctgcattagtccattttcacgctgccaataaagacacacctgaaactgggaacaaaaagaggtttaattggacttacagtcccacatagctggggaggcctcagaatcatggcgagaggtgaaaggcacttcttatgtggcggcggcaagagaaaaatgaggaggaagcaaaagcagaaacc

SEQ ID NO: 48414 - DNA, 545 bp, Homo sapiens
gcagcgggctagcggacagcgagcggaccgagagcagagctagggtctcagggccactgagccgaccccgctccccgccccgcgcggcagccaatggaaaggcgggggcgggccgggggcggggctgcctctaccattcctcgggatggggcgcgcagctgatgcaagcgaagcgggtggcgctaggtacccccggcccgtggctgccccctggctcgcgcgacgcctccgcgcccgccaccgccctccgcctgtgcggaaagacccggccccgcgaacgcagctcgccttggttgagcccccaatgtgtgcctttgaccccaatgtgaacaggcccgagccagggcgaccctgacctycccggctgatgctccaggtgaagagaccggccgtaaacccaaaagcgagatcatttcggaggtgaaggagatgaacgaggtgacatggatggggcagacggcactgcttttataagtaccatggtcaggaaatgacaagtgagacctgaatgatgacagggaacagcaagggcaaaggccaggaga

SEQ ID NO: 48415 - DNA, 1941 bp, Homo sapiens
tttgtatttttagtagagacaaggtttcaccatgttggccgggctggtctcgaactcctgacctcatgtgatccacccgccttggcctcccaaagtgttgggattacagatgtgagccaccagcacccagctgaagaattttttttttttaaatgactttattttttagggtggtctcaggtttataggaaaattgagaggaagggacaaaggtttcccatatacaccctgcctccacacgtatgtaatctcctttgttatcagcatctcctaccagaatggtacatttgttacaamtggtaaacctacactgacacatcattattaccccaaatccataatttacattaggatgctctgggcgttgtgcattctgtgggtttggacaaatgtataatgacatgggtccaccattgtaatgtcatccagaataatttctctgggacttttttttaagccaaaatacttgataatttgaggtgctcagagttatgtgctcattggacccggtacttggaaactgcctggagttacaaacgcccccagcctgccttgtcagctgccaaaaactgcctggtaaacagagacaccttactgcattttgtattttgagatcactcaccacctggcaccttaccagacgaggctcttgacaaggcaaatgccaggtttcttaatgagaaatccctctttaacttgccctgagctgctgtcagccttgaccctctccgtagagtcctggcctttgtgtgtatgttaaaaattgtttcccgctcaggttctgatgaacagcagtgttttggcaatgttgtgtggccagagctgggcccaggccagcgtcttacaaagcagccattaactagaagtttcttttcatgcggtccttcatgttttcttcctccttaaatagaaattgattcattttagatatcaacatgcacttttttgtttgttttgatttgtttttttagagacagggcctctaaagaaagaggacaggttttttttgttttgttttgtttgtttgtttgtttgttattattattattttttttgagacagggtctcactctgttgcccagaatggagtgcagtggtgcagtaagagttcactgcagcttctacctccttggctcaagcaatcctcctgcctcagcctcctgagtagctgggaccacagtcgtgagccaccatgcatggctaatttgctcagccgtgttgctcaggctggtcttgagcttctagctcaagcaatccacctgccttggtctcccaaagtgcaaggattacaggcatgaaccaccgtgacctgcctcaacatggacttttgattcctagttataaaatgaactagaagaggaaccagaggtgatttggaccaactttcctgttatgtagactagagaactgcagcacagagaggttgagtgacttgtccaatgtcacatggctttcaggcaggaggtcttgctgtactgtaccaaaactcactgtactaacttctttaccccacaagggaggcgatctcatgatagctaagagcatagaccctggagtcatacagacttggcttcaagtcttggctttgccatccactagaggtgtaggctcaggtgagttacttgtcatctctaagcctcaatttccttgtctgtaaatggggattgtgtggtgtgctggctcccagagccaattgttaagttttcaggaattttgcaagctggttaacatcatcacattgatagctggagaccagctattgtatatgaaattgaccagtgtcataagttagaacctctgcccaccccaccccgagaactaaagatttaccaccacaacactgatctcagtagtacttaatttaaagggttattgttggcagtcagacttagtcgttatgaagcatgaagatcagagagcctggcacatgtttacagtggt

SEQ ID NO: 48416 - DNA, 1941 bp, Homo sapiens
tttgtatttttagtagagacaaggtttcaccatgttggccgggctggtctcgaactcctgacctcatgtgatccacccgccttggcctcccaaagtgttgggattacagatgtgagccaccagcacccagctgaagaattttttttttttaaatgactttattttttagggtggtctcaggtttataggaaaattgagaggaagggacaaaggtttcccatatacaccctgcctccacacgtatgtaatctcctttgttatcagcatctcctaccagaatggtacatttgttacaactggtaaacctacactgacacatcattattaccccaaatccataatttacattaggatgctctgggcgttgtgcattctgtgggtttggacaaatgtataatgacatgggtccaccattgtaatgtcatccagaataatttctctgggacttttttttaagccaaaatacttgataatttgaggtgctcagagttatgtgctcattggacccggtacttggaaactgcctggagttacaaacgcccccagcctgccttgtcagctgccaaaaactgcctggtaaacagagacaccttactgcattttgtattttgagatcactcaccacctggcaccttaccagacgaggctcttgacaaggcaaatgccaggtttcttaatgagaaatccctctttaacttgccctgagctgctgtcagccttgaccctctccgtagagtcctggcctttgtgtgtatgttaaaaattgtttcccgctcaggttctgatgaacagcagtgttttggcaatgttgtgtggccagagctgggcccaggccagcgtcttacaaagcagccattaactagaagtttcttttcatgcggtccttcatgttttcttcctccttaaatagaaattgattcattttagatatcaacatgcacttttttgtttgttttgatttgtttttttagagacagggcctctaaagaaagaggacaggttttttttgttttgttttgtttgtttgtttgtttgttattattattattttttttgagacagggtctcactctgttgcccagaatggagtgcagtggtgcagtaagagttcactgcagcttctacctccttggctcaagcaatcctcctgcctcagcctcctgagtagctgggaccacagtcgtgagccaccatgcatggctaatttgctcagccgtgttgctcaggctggtcttgagcttctagctcaagcaatccacctgccttggtctcccaaagtgcaaggattacaggcatgaaccaccgtgacctgcctcaacatggacttttgattcctagttataaaatgaactagaagaggaaccagaggtgatttggaccaactttcctgttatgtagactagagaactgcagcacagagaggttgagtgacttgtccaatgtcacatggctttcaggcaggaggtcttgctgtactgtaccaamactcactgtactaacttctttaccccacaagggaggcgatctcatgatagctaagagcatagaccctggagtcatacagacttggcttcaagtcttggctttgccatccactagaggtgtaggctcaggtgagttacttgtcatctctaagcctcaatttccttgtctgtaaatggggattgtgtggtgtgctggctcccagagccaattgttaagttttcaggaattttgcaagctggttaacatcatcacattgatagctggagaccagctattgtatatgaaattgaccagtgtcataagttagaacctctgcccaccccaccccgagaactaaagatttaccaccacaacactgatctcagtagtacttaatttaaagggttattgttggcagtcagacttagtcgttatgaagcatgaagatcagagagcctggcacatgtttacagtggt

SEQ ID NO: 48417 - DNA, 1941 bp, Homo sapiens
tttgtatttttagtagagacaaggtttcaccatgttggccgggctggtctcgaactcctgacctcatgtgatccacccgccttggcctcccaaagtgttgggattacagatgtgagccaccagcacccagctgaagaattttttttttttaaatgactttattttttagggtggtctcaggtttataggaaaattgagaggaagggacaaaggtttcccatatacaccctgcctccacacgtatgtaatctcctttgttatcagcatctcctaccagaatggtacatttgttacaactggtaaacctacactgacacatcattattaccccaaatccataatttacattaggatgctctgggcgttgtgcattctgtgggtttggacaaatgtataatgacatgggtccaccattgtaatgtcatccagaataatttctctgggacttttttttaagccaaaatacttgataatttgaggtgctcagagttatgtgctcattggacccggtacttggaaactgcctggagttacaaacgcccccagcctgccttgtcagctgccaaaaactgcctggtaaacagagacaccttactgcattttgtattttgagatcactcaccacctggcaccttaccagacgaggctcttgacaaggcaaatgccaggtttcttaatgagaaatccctctttaacttgccctgagctgctgtcagccttgaccctctccgtagagtcctggcctttgtgtgtatgttaaaaattgtttcccgctcaggttctgatgaacagcagtgttttggcaatgttgtgtggccagagctgggcccaggccagcgtcttacaaagcagccattaactagaagtttcttttcatgcggtccttcatgttttcttcctccttaaatagaaattgattcattttagatatcaacatgcacttttttgtttgttttgatttgtttttttagagacagggcctctaaagaaagaggacaggttttttttgttttgttttgtttgtttgtttgtttgttattattattattttttttgagacagggtctcactctgttgcccagaatggagtgcagtggtgcagtaagagttcactgcagcttctacctccttggctcaagcaatcctcctgcctcagcctcctgagtagctgggaccacagtcgtgagccaccatgcatggctaatttgctcagccgtgttgctcaggctggtcttgagcttctagctcaagcaatccacctgccttggtctcccaaagtgcaaggattacaggcatgaaccaccgtgacctgcctcaacatggacttttgattcctagttataaaatgaactagaagaggaaccagaggtgatttggaccaactttcctgttatgtagactagagaactgcagcacagagaggttgagtgacttgtccaatgtcacatggctttcaggcaggaggtcttgctgtactgtaccaaaactcactgtactaacttctttaccccacaagggaggcgatctcatgatagctaagagcatagaccctggagtcatacagacttggcttcaagtcttggctttgccatccactagaggtgtaggctcaggtgagttacttgtcatctctaagcctcaatttccttgtctgtaaatggggattgtgtggtgtgctggctcccagagccaattgttaagttttcaggaattttgcaagctggttaacatcatcacattgatagctggagaccagctattgtatatgaaattgaccagtgtcataagttagaacctctgcccaccccaccccgagaactaaagatttaccaccacaacactgatckcagtagtacttaatttaaagggttattgttggcagtcagacttagtcgttatgaagcatgaagatcagagagcctggcacatgtttacagtggt

SEQ ID NO: 48418 - DNA, 1941 bp, Homo sapiens
tttgtatttttagtagagacaaggtttcaccatgttggccgggctggtctcgaactcctgacctcatgtgatccacccgccttggcctcccaaagtgttgggattacagatgtgagccaccagcacccagctgaagaattttttttttttaaatgactttattttttagggtggtctcaggtttataggaaaattgagaggaagggacaaaggtttcccatatacaccctgcctccacacgtatgtaatctcctttgttatcagcatctcctaccagaatggtacatttgttacaactggtaaacctacactgacacatcattattaccccaaatccataatttacattaggatgctctgggcgttgtgcattctgtgggtttggacaaatgtataatgacatgggtccaccattgtaatgtcatccagaataatttctctgggacttttttttaagccaaaatacttgataatttgaggtgctcagagttatgtgctcattggacccggtacttggaaactgcctggagttacaaacgcccccagcctgccttgtcagctgccaaaaactgcctggtaaacagagacaccttactgcattttgtattttgagatcactcaccacctggcaccttaccagacgaggctcttgacaaggcaaatgccaggtttcttaatgagaaatccctctttaacttgccctgagctgctgtcagccttgaccctctccgtagagtcctggcctttgtgtgtatgttaaaaattgtttcccgctcaggttctgatgaacagcagtgttttggcaatgttgtgtggccagagctgggcccaggccagcgtcttacaaagcagccattaactagaagtttcttttcatgcggtccttcatgttttcttcctccttaaatagaaattgattcattttagatatcaacatgcacttttttgtttgttttgatttgtttttttagagacagggcctctaaagaaagaggacaggttttttttgttttgttttgtttgtttgtttgtttgttattattattattttttttgagacagggtctcactctgttgcccagaatggagtgcagtggtgcagtaagagttcactgcagcttctacctccttggctcaagcaatcctcctgcctcagcctcctgagtagctgggaccacagtcgtgagccaccatgcatggctaatttgctcagccgtgttgctcaggctggtcttgagcttctagctcaagcaatccacctgccttggtctcccaaagtgcaaggattacaggcatgaaccaccgtgacctgcctcaacatggacttttgattcctagttataaaatgaactagaagaggaaccagaggtgatttggaccaactttcctgttatgtagactagagaactgcagcacagagaggttgagtgacttgtccaatgtcacatggctttcaggcaggaggtcttgctgtactgtaccaaaactcactgtactaacttctttaccccacaagggaggcgatctcatgatagctaagagcatagaccctggagtcatacagacttggcttcaagtcttggctttgccatccactagaggtgtaggctcaggtgagttacttgtcatctctaagcctcaatttccttgtctgtaaatggggattgtgtggtgtgctggctcccagagccaattgttaagttttcaggaattttgcaagctggttaacatcatcacattgatagctggagaccagctattgtatatgaaattgaccagtgtcataagttagaacctctgcccaccccaccccgagaactaaagatttaccaccacaacactgatctcagtagtacttaatttaaagggttattgtkggcagtcagacttagtcgttatgaagcatgaagatcagagagcctggcacatgtttacagtggt

SEQ ID NO: 48419 - DNA, 506 bp, Homo sapiens
ataactcctgacaaggtcaggccctagaagatgtcacctgagctgggcgcagtggctcacacctgtaatctaacactttcagaagtcaagtcagggtattacttgagctcaggagttcaagaccagcctgggcaacatggcaaaaccacatctctacagaaaaattagctgggcgtggtggtgtgtgtctgtagtcccaactattcaggaggctgagatgagaggatggcttgagcctgggaggtagaggttgcaatgagctgagatcrtgccactgcactccagcttgggcaacagagccagaccctgactcaaaaaaaaaaagaaaagaaaatgtcacctggagaaagggacagaaccttgggcacagaggcatcataattttggacagagtcaccagtacagaaagcgaacagacctagtgagatccactgggcaaaccacaagtctcatgaccccaaacccttggctgcacggcttcaggactactcagcaagtagggagga

SEQ ID NO: 48420 - DNA, 545 bp, Homo sapiens
aagtttgttaatttaaacatttatcaaccccttcactccagcttttccgcgctcatcaaagaattcctacataggagccttaacattaaagggttttttccaagaaatatgaaacagataaactaatattgtaaggaactacaattatatactatgaaacaataatcaaacatttgaaaagaactttttgctgttccattttctgtcaaaatttactctcctccactyccacttaagttagtaaactctaagttttgaaataaattgcctttggattagccaaaatgttataaagtataattattaaggtgttatatattaacatacttcatatataacatatatgaagtctatataatacctcatatgcattatattatataataatataatatatatcttatatagtatatatcatatataatataaacttccacaatgtagaatatttcttttctccgaagtttattactatattatatattgttatatattatatataatagctcacatataatacattatatatgaagtatatattaata

SEQ ID NO: 48421 - DNA, 634 bp, Homo sapiens
aataggtgtatggcataatacatttgagtatttccctattgattggcatttaggcaatatccgtctttgaaatactacaaatgatattgcaaagaatattctagatgcacctaaagatatgtacagaaagactcgcatttctgtagggtagaaaatatgtagaaatgctgrgccaaagcatatgggatttgtaattttcacaagtaatactaaattttctgcttctctttgattattagtgaggctaaatgtcttatcataactaccttggccatttggttcatctcccatgacttcctacattttgtcctttttattttgaatttatagaaactctttttacctcagtgtttaataactttggagtcagagacatctgaatttgaatcccagttttgcctctttcttgctagatgactggcactttaccaaatgtctccaatctcagactgcttatgtataaaatgaagataataagagtacacatctgatagtttttatttctttaaaaaatttaaaaattgacaaattaatattatatatatatttatggtatgcaactttatgttttgatatatgtatacattgtggaatggctaaatcaagctaattaacatatacaagaaaaaaatga

SEQ ID NO: 48422 - DNA, 552 bp, Homo sapiens
tgtaattacaaaattataaagggaaattaatctcagtggccaatgaagaatagtcataatagacccataartacagcttccaacaatatacaaacaaagacagaaagcattcagtgatattatagaaaattgcccacatttcccattttaattcttattgttgtttggcttctttggaaattccccccaacagggaaaaaaaccaacaaattctatcttacatttcacacttgccttccctaaaaacactatcattgtaatattgtttaagtatagctaaaaatagttatttctgtgctggaaataaggaaacccctgactgcaaagtaatagaccatgagatagtttcaatatctaacttcagcaatatttggtgctcaatgaattctggtagaaattctttaaccatgtattatttcctctgctcaacagcgtctttttctttctcccaccgtatgtaaaacctgtgatctgccatcttgggaagacattcaaatagtactcgtaaatatgtctaccatgatccataagtttttaagacctaagagagat

SEQ ID NO: 48423 - DNA, 552 bp, Homo sapiens
tgtaattacaaaattataaagggaaattaatctcagtggccaatgaagaatagtcataatagacccataagtacagcttccaacaatatacaaacaaagacagaaagcattcagtgatattatagaaaattgcccacatttcccattttaattcttattgttgtttggcttctttggaaattccccccaacagggaaaaaaaccaacaaattctatcttacatttcacacttgccttccctaaaaacactatcattgtaatattgtttaagtatagctaaaaatagttatttctgtgctggaaataaggaaacccctgactgcaaagtaatagaccatgagatagtttcaatatctaacttcagcaatatttggtgctcaatgaattcyggtagaaattctttaaccatgtattatttcctctgctcaacagcgtctttttctttctcccaccgtatgtaaaacctgtgatctgccatcttgggaagacattcaaatagtactcgtaaatatgtctaccatgatccataagtttttaagacctaagagagat

SEQ ID NO: 48424 - DNA, 595 bp, Homo sapiens
tggttgtgaaaatagtcgtactttaacttgggacatgtggaaggatatgaattagtgtgatagattcgggaaagtttagtcacgaaagatgtttgagtcagacaatcagacattagagattatctaatatgaaaccctcatttgaaaatgaagaaaccaagactcagggaggagaaagaacttgtccaaatttacaaagtgtatacacagcaatgggaatcaggtatgtgctggatggtcttctgtgaacatttcactatgtctttctctcccgtcttctcaaccctgtctccttccttcagggaactttgctaaacttcttatctccactataatacgttagaaagactaaatcaagagagaagtagataagccrtgtctacaaaataggataaaaagagaacctctctcgtgcaaaataggaggcaaaatcacgcgcacacacttctttttaccatcccattctagctagaagtttatacaggttaaaaggccacctgggactaggtatgttcaaaatggcggctccaccttcccttctctttgccagccccgtgtacaggaaggagcaggtaacaaggtgccagctaggcaa

SEQ ID NO: 48425 - DNA, 595 bp, Homo sapiens
tggttgtgaaaatagtcgtactttaacttgggacatgtggaaggatatgaattagtgtgatagattcgggaaagtttagtcacgaaagatgtttgagtcagacaatcagacattagagattatctaatatgaaaccctcatttgaaaatgaagaaaccaagactcagggaggagaaagaacttgtccaaatttacaaagtgtatacacagcaatgggaatcaggtatgtgctggatggtcttctgtgaacatttcactatgtctttctctcccgtcttctcaaccctgtctccttccttcagggaactttgctaaacttcttatctccactataatacgttagaaagactaaatcaagagagaagtagataagccatgtctacaaaataggataaaaagagaacctctctcgtgcaaaataggaggcaaaatcacgcgcacacacttcttyttaccatcccattctagctagaagtttatacaggttaaaaggccacctgggactaggtatgttcaaaatggcggctccaccttcccttctctttgccagccccgtgtacaggaaggagcaggtaacaaggtgccagctaggcaa

SEQ ID NO: 48426 - DNA, 1809 bp, Homo sapiens
tatataccacagtgaagcatgcagacatctttctttagatagtagttgctagatatctatgtcttgcctacattaaacaagtaactctaatgttttgctcaaacaattttgatagacccaaacacattttgaaggtccaaattcgctacatttttgagggtaacttttcttttacataaagcaaacatatgactctagagggaccaggtggaatgatttagaagtaaaaactaacatttcattcaatggccatcaactccctttacagggagctgtccatggaatttttcacatattatcctcccttcccctcccttgacttggtggttataaaaatctatgacctctgtcctgtaggatttataatgagctagaaaacaggcttttaataagaaaattacggctaaggcagaatgtgatgggtgacgggtgagtggtacaaggaatcagctggggtcataagcaaacgtgagcctaaacattagctgctgtaacatgatcaactgctcgcattttctttatggtgaaattagctccaggaaagctgggatcctatcaactctatgtactattgtatcccagtacttcttctaatgcctcatataaaataggtgatatcaataaatatttgtgggatgaagggctgaattcttccctatgaaaaagttcctctcctgctgtcctcccaaagcagctgtatacgagagtgtttgaaattgttaggcaatacaacaaatgcaaataactgttcttgcatgcctagagtcacagtgggtgaaatggctctgctcctggccctgtttggtgcaccttcttgaccactaagtgtgccactgtcctcaccaacgagagctatcagaccactcctgaaggcaaatgccccttgcagcaggtctagttcctacaggaggcagataatatcacagcaaggtgcatgtgtacaaaatagcatactgtgtacaaaatagcgtacgccacagacattataatgacctctaagacttgcttttgttgtttttcaatcttttgtatttcttgtacacatttcttagtaagaaaaccatagagaaggaaatgtacacctgcagatgtacactcaacttctgaggtagacaggcagggccaacctacggtattgctctgtgtactagctgtgagtagggtcggcagcttcacaagaaacataagtccagaagtgacaagaaatccacaggcagactctcatcaatccatcctcttggcttaaagttgaaagccaacacctgtcaaagagttagttgttatgcattatcaatcacatttgtatgcatgaaggcatctgctcctctcctgccagagcctaatgtagtgaaaagcagaaggtttactgagtgctggaaaagggaaagagggcractggaggggagaaggatcacagaaagacaatctcaggagcactaggagataaaagctattaaaagataaaattatgttaattccagttattgtgccactacatatataaaatcatggtcaattacaaacttattttcaacatgataagaaaaacctgcatgttgaacacatctttttatatttctaaaaacagaggaggaatgtaagtcacatcataaacgtgaatagctaaattttttcaacacaattccttgattggtcaaaatcccttcctgctctgtagtgaggactccagattgactttttgataaattattctcctgtttttgtggagtgcacattgtagaaaagactgttggtggctgcttagatgaccaaaacattaattgttcttccaagtacctgtggcagagt

SEQ ID NO: 48427 - DNA, 641 bp, Homo sapiens
tctaagaaaatatcagccaccatggcaagctggaggagaaagagtttggggctgatggccacctagtccattgaagtttagtactggctcacagatcagcttggtaagactgtcaataacttaatctagaagaatctatgtagagatagctagatcttacctgccctaactcaacccacaaaggatttgcagcagctaattccaagtaatcactgtgagagccccagctctgagaggctctagggattctyttgcatttggcctgatcagtgcctgtgtgttcatttttcttggggaaacatctgccgcccacaggaagagcacctgacgccagcccacctggcccattcgagtgcctgcaaccctgccctgcttcaggaatgaacatatcccgggacggtctggtgagacccagtcctaggcccccctcacccctggagttgcagcaaatcaggagcaagcctggagctgccagcaccatagggagagcccatctgagagggcatcaacccagggaaagcagctccctatatatcctcaaggcctggatccagcagtgactggagccagtttccccaagtgtttcagctacatgagccaatacactcttgctcatttaagacaacgtgagttgggtttct

SEQ ID NO: 48428 - DNA, 641 bp, Homo sapiens
tctaagaaaatatcagccaccatggcaagctggaggagaaagagtttggggctgatggccacctagtccattgaagtttagtactggctcacagatcagcttggtaagactgtcaataacttaatctagaagaatctatgtagagatagctagatcttacctgccctaactcaacccacaaaggatttgcagcagctaattccaagtaatcactgtgagagccccagctctgagaggctctagggattcttttgcatttggcctgatcagtgcctgtgtgttcatttttcttggggaaacatctgccgcccacaggaagagcacctgacgccagcccrcctggcccattcgagtgcctgcaaccctgccctgcttcaggaatgaacatatcccgggacggtctggtgagacccagtcctaggcccccctcacccctggagttgcagcaaatcaggagcaagcctggagctgccagcaccatagggagagcccatctgagagggcatcaacccagggaaagcagctccctatatatcctcaaggcctggatccagcagtgactggagccagtttccccaagtgtttcagctacatgagccaatacactcttgctcatttaagacaacgtgagttgggtttct

SEQ ID NO: 48429 - DNA, 657 bp, Homo sapiens
tgtttacaaagcagggagtgcastcttgattcagggactggaaatagcgatgtcagggtgaggttagtggcacttcacaaaacagcggggctggtcccactgcttgtgtgactcatttcctctgtgtacacagccacttagagttggcccagccagcttccttgcctctgcccttccatgttgaggcacagaatgccagggaggacttgaaatactggagaaaaggaaccagaatccactcccacaagcccactcaccccagatgctccccgcaaccccatcttccccagccaatgagcagcttcagattcaaaagagaacaacgaagggaaggggcagggcctggctgcctggggtcgcaggggcctgcacagaagtgggcggcagagacagaggcggccaatgaggaccctgaggcctgctcgccaggactccctcatctcaaacccaaaagcaggactgagaaaccctacatgctgggacagctgaatacccacatgcaaaataataacaccccttccttacaccttacacaaaaactaactcaaaatggaccagaaacctaaatgtaagagctaaaactatatagctcttggcagaaaacacagaagtgaatctttgtgatactgacttaggcaatggttttttaagatgcaa

SEQ ID NO: 48430 - DNA, 657 bp, Homo sapiens
tgtttacaaagcagggagtgcactcttgattcagggactggaaatagcgatgtcagggtgaggttagtggcacttmacaaaacagcggggctggtcccactgcttgtgtgactcatttcctctgtgtacacagccacttagagttggcccagccagcttccttgcctctgcccttccatgttgaggcacagaatgccagggaggacttgaaatactggagaaaaggaaccagaatccactcccacaagcccactcaccccagatgctccccgcaaccccatcttccccagccaatgagcagcttcagattcaaaagagaacaacgaagggaaggggcagggcctggctgcctggggtcgcaggggcctgcacagaagtgggcggcagagacagaggcggccaatgaggaccctgaggcctgctcgccaggactccctcatctcaaacccaaaagcaggactgagaaaccctacatgctgggacagctgaatacccacatgcaaaataataacaccccttccttacaccttacacaaaaactaactcaaaatggaccagaaacctaaatgtaagagctaaaactatatagctcttggcagaaaacacagaagtgaatctttgtgatactgacttaggcaatggttttttaagatgcaa

SEQ ID NO: 48431 - DNA, 657 bp, Homo sapiens
tgtttacaaagcagggagtgcactcttgattcagggactggaaatagcgatgtcagggtgaggttagtggcacttcacaaaacagyggggctggtcccactgcttgtgtgactcatttcctctgtgtacacagccacttagagttggcccagccagcttccttgcctctgcccttccatgttgaggcacagaatgccagggaggacttgaaatactggagaaaaggaaccagaatccactcccacaagcccactcaccccagatgctccccgcaaccccatcttccccagccaatgagcagcttcagattcaaaagagaacaacgaagggaaggggcagggcctggctgcctggggtcgcaggggcctgcacagaagtgggcggcagagacagaggcggccaatgaggaccctgaggcctgctcgccaggactccctcatctcaaacccaaaagcaggactgagaaaccctacatgctgggacagctgaatacccacatgcaaaataataacaccccttccttacaccttacacaaaaactaactcaaaatggaccagaaacctaaatgtaagagctaaaactatatagctcttggcagaaaacacagaagtgaatctttgtgatactgacttaggcaatggttttttaagatgcaa

SEQ ID NO: 48432 - DNA, 657 bp, Homo sapiens
tgtttacaaagcagggagtgcactcttgattcagggactggaaatagcgatgtcagggtgaggttagtggcacttcacaaaacagcggggctggtcccactgcttgtgtgactcatttcctctgtgtacacagccacttagagttggcccagccagcttccttgcctctgcccttccatgttgaggcacagaatgccagggaggacttgaaatactggagaaaaggaaccagaatccactcccacaagcccactcaccccagatgctccccgcaaccccatcttccccagccartgagcagcttcagattcaaaagagaacaacgaagggaaggggcagggcctggctgcctggggtcgcaggggcctgcacagaagtgggcggcagagacagaggcggccaatgaggaccctgaggcctgctcgccaggactccctcatctcaaacccaaaagcaggactgagaaaccctacatgctgggacagctgaatacccacatgcaaaataataacaccccttccttacaccttacacaaaaactaactcaaaatggaccagaaacctaaatgtaagagctaaaactatatagctcttggcagaaaacacagaagtgaatctttgtgatactgacttaggcaatggttttttaagatgcaa

SEQ ID NO: 48433 - DNA, 657 bp, Homo sapiens
tgtttacaaagcagggagtgcactcttgattcagggactggaaatagcgatgtcagggtgaggttagtggcacttcacaaaacagcggggctggtcccactgcttgtgtgactcatttcctctgtgtacacagccacttagagttggcccagccagcttccttgcctctgcccttccatgttgaggcacagaatgccagggaggacttgaaatactggagaaaaggaaccagaatccactcccacaagcccactcaccccagatgctccccgcaaccccatcttccccagccaatgagcagcttcagattcaaaagagaacaacgaagggaaggggcagggcctggctgcctggggtygcaggggcctgcacagaagtgggcggcagagacagaggcggccaatgaggaccctgaggcctgctcgccaggactccctcatctcaaacccaaaagcaggactgagaaaccctacatgctgggacagctgaatacccacatgcaaaataataacaccccttccttacaccttacacaaaaactaactcaaaatggaccagaaacctaaatgtaagagctaaaactatatagctcttggcagaaaacacagaagtgaatctttgtgatactgacttaggcaatggttttttaagatgcaa

SEQ ID NO: 48434 - DNA, 1564 bp, Homo sapiens
tttttttttcttttttgagacaaagtgtcaatcttgttgctcaggctggagtgcaatggcgcaatcttggctcacggaaacctccgcctcccgggttcaagcaattctcctcctcagcctcctgagtagctgggattacaggcatgtaccaccatgcccggctaattttatatttttagtagagaccggttttctccatgttgttcatgctggtctcgaactcctgacctcaggtgatccgcctgccttggcctcccaaagtacagggattacaggcgtgagccaccgcgcccggcctagtttaactttttaaagtgcattttcttgttgtcactgccatagtatttaaatcttttcctttgctggaacacaaagaccttcagtaattttcttttcaccacaatttctcatccagtaactaagccccttcttgccctctccttaggcccagcactgacggggcaatgacaccgttgttctcaccgggggccatgatgaagtgaaaagagaatgggcctagcagacatgagactgaatcgagcctttgccagttcactaactgtcaatcagaaaatgtgcaaatgtacttcactctagttttctcatctgtacattgaggcaatgagtaaccacctcataggtggtaagggttagataggaaagaacacagtagaatgcctagcacacctaagtactcaatcaatgttagttctggacctttcatttgaatactgcttgagctctgtgcccaatctccctttcctggatcaaataagatttttctttgttagtgatttctttctagatacttccttggccagaactatagatcctctgtctttcactaactcttgttgatctatggttctcattcaagtttgtgtagaacatccagagatttcagaggcattgtttactcctgatgaacagggaacattgcgtgtccaggaaccagcacactgcctgagttatgggggatattcaggaagcatgctgaaccaatgaatgaatgaacaaatgaatgaatagctgattctgactagtcaaccaaaacttaattagcgccattgcttccagatgttattgcttctcaagggagtatgcaatgtgaaagaagaaagaaaaaaaggcgcctctcaatcgtcaaatatcrgtagatgcattggttttattaactgatattttctcttcaaaggaaaggctgattcagtcttgcacaggcgaaagatccagtgggtcccattggttctctgtgtctcctgctacacaaattactgacggaaagatttgagccttcattgtgaccacatccacagagaccatagtccagagagagcaattggggcctgaatcaactgctggtgtttgttgagcagaaacagtgagtctctgacttcccaccaacagctaacctgatatggaagagccaagaggcatctcagatttgtcaacattgctttaatgagctgaggaacttctcatggtaaactcagcagctgagtaacaggatgatggcaccacaacaggtagataatcaaggcaggaggtcaaagcactggagcca

SEQ ID NO: 48435 - DNA, 1011 bp, Homo sapiens
tgtgttctttggttcaaaacttgaccaagaattgttgaccatttcataaaattacagcaccaatggcaacactaatcatgacattagagttgtcgatatagtatacctgtattgcctaccactgtagttgtctcagccctgtgattttttgataagatgcaaacatctgacatttcattttgtgttctagtgaagttgtgcccaargtatttgcacactgaaatacacactgtattattttctctcttttttataatatagtcaaggcattttattttaattatgtatataggtaatttgtattatttatgaatttcatgataataaaaaagacattacaaaatatgtgttttaaaaggagcattaggtctgagaatcactgctctaggacaatgagacagaggctggtgcaagatatttgagagttgactacatagaagtatagctgccgggcacggtggctcaagcctgtaatcccagcactcagggaagctcaggtgggtggatcacttgacgtcaggagtccaagaccagcctggccaacatggtgaaagcccatctctactaaaagtacaaaaaagttagctgggcgtagtggtgtgcacttgtagccctagctacttgagaggctgtggcaggagaatcacttgaacctgggaggtggagagtgcagtgacatgacctcagctcactgcagcctgggtgacagagcaagactccgtctcaaaaaaaaaaaaaaaaaaaaaggaagtatagctgaagccacagggaagactcagctgcttatgagatgtctagtttggagtgccatgcttttaaaaatgatacaggggccaggcgcggtggctcacgcctgtaatcccagcactttgggaggccgaggcgggtggatcatgaggtcaggagatcgagaccatcctggctaacaaggtgaaaccccttctctactaaaaatacaaaaaattagccgggcgcggtggcgggcgcctgtagtcccagctactggggagg

SEQ ID NO: 48436 - DNA, 1011 bp, Homo sapiens
tgtgttctttggttcaaaacttgaccaagaattgttgaccatttcataaaattacagcaccaatggcaacactaatcatgacattagagttgtcgatatagtatacctgtattgcctaccactgtagttgtctcagccctgtgattttttgataagatgcaaacatctgacatttcattttgtgttctagtgaagttgtgcccaaggtatttgcacactgaaatacacactgtattattttctctcttttttataatatagtcaaggcattttattttaattatgtatataggtaatttgtattatttatgaatttcatgataataaaaaagacattacaaaatatgtgttttaaaaggagcattaggtctgagaatcactgctctaggacaatgagacagaggctggtgcaagatatttgagagttgactacatagaagtatagctgccgggcacggtggctcaagcctgtaatcccagcactcagggaagctcaggtgggtggatcacttgasgtcaggagtccaagaccagcctggccaacatggtgaaagcccatctctactaaaagtacaaaaaagttagctgggcgtagtggtgtgcacttgtagccctagctacttgagaggctgtggcaggagaatcacttgaacctgggaggtggagagtgcagtgacatgacctcagctcactgcagcctgggtgacagagcaagactccgtctcaaaaaaaaaaaaaaaaaaaaaggaagtatagctgaagccacagggaagactcagctgcttatgagatgtctagtttggagtgccatgcttttaaaaatgatacaggggccaggcgcggtggctcacgcctgtaatcccagcactttgggaggccgaggcgggtggatcatgaggtcaggagatcgagaccatcctggctaacaaggtgaaaccccttctctactaaaaatacaaaaaattagccgggcgcggtggcgggcgcctgtagtcccagctactggggagg

SEQ ID NO: 48437 - DNA, 608 bp, Homo sapiens
cccaatgtgggacttgtccaaagtcccacatttgctccagatctccccattgtctttgatgagacttttttcagctctgcaacacagtctgactttcttcttgcctagtcctgattccttccctttttgctttcataaatatcagattcgtattctggcctcaagcttcacccacatcaattccgtttctttcccctttatatttcacaagatttaccatcccacctcccacccttcccaaatctcttgtattcctgacttgctcttaagtcttagtatcttattcatgaagtatctgaatggagacagttgttactgggagcattctaagtaagtagtagtttggggttagggattgggttatccgccctccacccygcccatggctgacactgagaatctcatcctggatggtgggtagaatgcagatagtccctggcacaaagatgtggtacatttgctaaaaatttcactagggtgactggaaaggatgtttgagtggagggaattatactaggtggtgtaataaaagtgtggaggacacaaaggataatgatattgactgattgttaataaaccacaatgatgtcctaatgaaaaatagtgaa

SEQ ID NO: 48438 - DNA, 608 bp, Homo sapiens
cccaatgtgggacttgtccaaagtcccacatttgctccagatctccccattgtctttgatgagacttttttcagctctgcaacacagtctgactttcttcttgcctagtcctgattccttccctttttgctttcataaatatcagattcgtattctggcctcaagcttcacccacatcaattccgtttctttcccctttatatttcacaagatttaccatcccacctcccacccttcccaaatctcttgtattcctgacttgctcttaagtcttagtatcttattcatgaagtatctgaatggagacagttgttactgggagcattctaagtaagtagtagtttggggttagggattgggttatccgccctccaccccgcccatggctgacactgagaatctcatcctggatggtgggtagaatgcagatagtccctggcacaaagawgtggtacatttgctaaaaatttcactagggtgactggaaaggatgtttgagtggagggaattatactaggtggtgtaataaaagtgtggaggacacaaaggataatgatattgactgattgttaataaaccacaatgatgtcctaatgaaaaatagtgaa

SEQ ID NO: 48439 - DNA, 552 bp, Homo sapiens
gcagattgtgtgtgaaatgagatacagtggcaaaaacgttgacttggaaatcaggattcctgagctacagaattcactatgtggtactgaacaagtctgtcctatcttccagactcacttgtctcctctataacacctttatatataccaaaaaaagggtttagttagatgtatggtcacacggtcccattaattgtaaaattaattatattatttcaagaataatgtcttgggagttgaacatctattagctactcatctggtagatcaataacttatttaaatttatttgaaaagtgtgaattaataggatcagataggatttcctaargctatttgttgaattcattttttaagtctcctggaatcaccagaagtataactactcaaaatttcaagactcattaatagactatttgtgcattttaaaacatcataaggaaattacggtaatcatcctcattattatatctcagtattattgttatttgttgttatctgtaagaaacaaacattcctggagtcatttcatttcacttccttgttttaaat

SEQ ID NO: 48440 - DNA, 624 bp, Homo sapiens
attactcctttgcctcttgcatcaaaaccactcacattgacactgagcaaagcccagcacacttagcctgtgattcttggcaggccggcttcccttttaataggcagggtagcacaagagggcggggcagccggtgctgtctgcaggaggagggtggtaggtggcaagaggtgcttgtgctgctctcttcttggaactagaaagacccagggctctgggttgctttctgggagtgtaactgggcggatcccggggcttttattctaggccctacctstccccagacctggaaataattagaggcaagcatgcctgcggttgtctactgtgtggtgaaagcctggtgggctgttggcttccttttgtcatgtatgcccattttacttcatgtacttggttgttgagatagccagcaacagttttattgcattcagtgcttttgagtttctcatggtgccttcttaaaaggcctgatgctcctaggcgcagaggaagggagcattcttctaagcccctttgaagtggcaggcgtggactttgttctctgcagacacatcttctgagaatcaagctgtggatctccccagcagggtggactggggtagctggaggtcacgcatagcc

SEQ ID NO: 48441 - DNA, 645 bp, Homo sapiens
ggtaaccaaatattgactcaaaagaagtttatatttttctaaatatttcaagaagaaataatgattgatatataatattatcattttgcaacatttaattaattaataaatatattccagggattgagcatcagtggccacaagcrggacaaagtaagagaccaccagacatatgtgcctcccagtccaagaatacaagaccgacttgtgacaaagaaattggacatgatttggaccaagcatattgaaaaaataccaatgtacaagtaacacagaggcagagaaacttgttaactaccctgtagtatgcaatgagcaaaacccagtttgcgaggaatcctacaggtgcaaagaccaagtttttttcttttcttttttttttttttttaaaggcgattcactgaaaaagaagggaggcggaggagaatacgtaaattaaaagaagcttagaaaaatattaaaaatagaacaggacaactacactagtgttttgtgggctctgtgagtgataaatcaagaaattattatcattaaatcaggatagtgttacatttagaagggtgggaacgagttgtgatagggatgagttgaatgcaagacttatgagatggctggcaaatttcaattttttggcctggatggtgg

SEQ ID NO: 48442 - DNA, 590 bp, Homo sapiens
tcacctttgtgaaatactctcaagaattatcgtgaaatgactcttacatacaattccctactgatccacagcaactggactatcacactccacagtgttgtggagttaagaagaggctaacacaaaggtgaagaatttacttcaagtaaaggtaacactatacacagacatggaggattcctagtttccatttctgtaaatagggaaaggtctatgtgaacccgsctatggcaggatggaggcagccaaactaagcccacttctgccatttcttttgatacatttggcagagttgatgtggacattttaaggaataaggaaatatattgaaaaggaaagggataaaataaaaatcagttaacttatgaccttggcaaaatagcaactttaaaggaggcagcatctttccgttgtcaagttgctacaaaattatctctgtgacctgaacactagcacattaactctaataacatctctgctcactgggcctggaatgggcatccacctcccatctccccagctccagccaccattcaagtttattctttgggattctgtttattcattcaacgaatatttgaatgcttact

SEQ ID NO: 48443 - DNA, 547 bp, Homo sapiens
gtatagtggctcatgtctgtaatcccagcatcttgggaggctcacgtgggctgacagcttgagccctggactttgagaccagcctaagcaacatggtgaaaccccatctctagcaaaaaatgcaaaaattagacaggcatggtggtgtgtgcctgtagtctcagctactcgggaggctgaggcatgagtattgcttaagcctaggagtttgaggctgcagtgagccatgattctgcctgccacttcactccagtttgtrgggtggagtgagacccagcttcaaaaaaaaaaaaaaaaaaaaaatcactctggcttcagagtagagaagggcttatagtaagagcaatggtggctcctggtctgttgcaattttccaggcaagaaacgatggtggtttatactacagtggtgatgttagtggatatggagatgggaaatgagggggaattcacaaaggtcttctgggttactctataaaaaaggaaacatactcgaaagcataacacataacgactttttctgccaacatatttgttggagatttgga

SEQ ID NO: 48444 - DNA, 547 bp, Homo sapiens
gtatagtggctcatgtctgtaatcccagcatcttgggaggctcacgtgggctgacagcttgagccctggactttgagaccagcctaagcaacatggtgaaaccccatctctagcaaaaaatgcaaaaattagacaggcatggtggtgtgtgcctgtagtctcagctactcgggaggctgaggcatgagtattgcttaagcctaggagtttgaggctgcagtgagccatgattctgcctgccacttcactccagtttgtagggtggagtgagacccagcttcaaaaaaaaaaaaaaaaaaaaaatcactctggcttcagagtagagaagggcttatagtaagagcaatggtggctcctggtctgttgcaattttccaggcaagaaacgatggtggtttatactacagtggtgatgttagtggatatggagatgggaaatgarggggaattcacaaaggtcttctgggttactctataaaaaaggaaacatactcgaaagcataacacataacgactttttctgccaacatatttgttggagatttgga

SEQ ID NO: 48445 - DNA, 587 bp, Homo sapiens
tttttattcttctcttcaaggacttaattatgctagtttaaaaggtgtttttgtttgcttgcttttatttttgttttttgattttttttggtttttgttttggtttgggtttttttgagggggcatcaagattgatagagacctaagtttttttagatttgtagtttttttcctggactttccccttccttttattgtgcagttgtatgaattaattttataacrtttatttgatagtgctaaaaaagaaactttttatactgctatggtagatcttgataaactaaaaagaactttttaatgtattagaaaattgataaagcaaattaggaatctcggcagctgtatcttctgggatggattcttatagcacctatttggcaactgtcaaagtcagtggctcgtggttagaagagcaagatgaagacatttatgaggttgaatctcgcgtgcctttaccacatccttttcctctttgtgaacatttggatgaaaataactcagtaattgttaatacttctattttccattttattcataaaagaaacgggcatatattaaagcttatttctaaaatttcactgcct

SEQ ID NO: 48446 - DNA, 556 bp, Homo sapiens
accgtggcccaggctgccaaggaggttttaggactgttaacagagtttgtatcttctgctctgtgttcctctcctccctgaaatttaaaaacaccctctaaataaattgtggcttcctgtggcaatcaatcaaactaggaattaaaaactatttacacttgaaaatgaataacattggccgggcayggtggctcacgcctgtaatcccagcactttgggaggctgaggcaggaggatcacgaggtcaggagatcgagaccagcctggctaacaaggtgaaaccccatctctactaaaaatacaaaaaattagccaggtgtggtggcaggcgcctgtaatcccagctagtcaggaggctgaggcaggagaatggcgtgaacccgggaagcagagcttgcagtgagccgagatggcaccactgcactccagcctgggcgacagagcgagactccatctcaaaaaaaaaaaaaaatagaaagtgaataacatcatctaactcgtaggacacagccaaagcagacctcagaggaaaatgcatagcctttagggaagctcc

SEQ ID NO: 48447 - DNA, 556 bp, Homo sapiens
accgtggcccaggctgccaaggaggttttaggactgttaacagagtttgtatcttctgctctgtgttcctctcctccctgaaatttaaaaacaccctctaaataaattgtggcttcctgtggcaatcaatcaaactaggaattaaaaactatttacacttgaaaatgaataacattggccgggcatggtggytcacgcctgtaatcccagcactttgggaggctgaggcaggaggatcacgaggtcaggagatcgagaccagcctggctaacaaggtgaaaccccatctctactaaaaatacaaaaaattagccaggtgtggtggcaggcgcctgtaatcccagctagtcaggaggctgaggcaggagaatggcgtgaacccgggaagcagagcttgcagtgagccgagatggcaccactgcactccagcctgggcgacagagcgagactccatctcaaaaaaaaaaaaaaatagaaagtgaataacatcatctaactcgtaggacacagccaaagcagacctcagaggaaaatgcatagcctttagggaagctcc

SEQ ID NO: 48448 - DNA, 556 bp, Homo sapiens
accgtggcccaggctgccaaggaggttttaggactgttaacagagtttgtatcttctgctctgtgttcctctcctccctgaaatttaaaaacaccctctaaataaattgtggcttcctgtggcaatcaatcaaactaggaattaaaaactatttacacttgaaaatgaataacattggccgggcatggtggctcacgcctgtaatcccagcactttgggaggcygaggcaggaggatcacgaggtcaggagatcgagaccagcctggctaacaaggtgaaaccccatctctactaaaaatacaaaaaattagccaggtgtggtggcaggcgcctgtaatcccagctagtcaggaggctgaggcaggagaatggcgtgaacccgggaagcagagcttgcagtgagccgagatggcaccactgcactccagcctgggcgacagagcgagactccatctcaaaaaaaaaaaaaaatagaaagtgaataacatcatctaactcgtaggacacagccaaagcagacctcagaggaaaatgcatagcctttagggaagctcc

SEQ ID NO: 48449 - DNA, 556 bp, Homo sapiens
accgtggcccaggctgccaaggaggttttaggactgttaacagagtttgtatcttctgctctgtgttcctctcctccctgaaatttaaaaacaccctctaaataaattgtggcttcctgtggcaatcaatcaaactaggaattaaaaactatttacacttgaaaatgaataacattggccgggcatggtggctcacgcctgtaatcccagcactttgggaggctgaggcaggaggatcacgaggtcaggagatcgagaccagcctggctaacaaggtgaaaccccatctctactaaaaatacaaaaaattagccrggtgtggtggcaggcgcctgtaatcccagctagtcaggaggctgaggcaggagaatggcgtgaacccgggaagcagagcttgcagtgagccgagatggcaccactgcactccagcctgggcgacagagcgagactccatctcaaaaaaaaaaaaaaatagaaagtgaataacatcatctaactcgtaggacacagccaaagcagacctcagaggaaaatgcatagcctttagggaagctcc

SEQ ID NO: 48450 - DNA, 556 bp, Homo sapiens
accgtggcccaggctgccaaggaggttttaggactgttaacagagtttgtatcttctgctctgtgttcctctcctccctgaaatttaaaaacaccctctaaataaattgtggcttcctgtggcaatcaatcaaactaggaattaaaaactatttacacttgaaaatgaataacattggccgggcatggtggctcacgcctgtaatcccagcactttgggaggctgaggcaggaggatcacgaggtcaggagatcgagaccagcctggctaacaaggtgaaaccccatctctactaaaaatacaaaaaattagccaggtgtggtggcaggcgcctgtaatcccagctagtcaggaggctgaggcaggagaatggcgtgaacccgggaagcagagcttgcagtgagccgagatggcrccactgcactccagcctgggcgacagagcgagactccatctcaaaaaaaaaaaaaaatagaaagtgaataacatcatctaactcgtaggacacagccaaagcagacctcagaggaaaatgcatagcctttagggaagctcc

SEQ ID NO: 48451 - DNA, 1458 bp, Homo sapiens
cgagctcagggccctggacagaggaggcccaccaggctgagccctgggcaaggggaaggctgaggtcggctaggctgaagacgggcagcacaggctgaggtctaagctaaggaattttacccctccctaaccctccttcccgcctacccaagacatttttgacatcagaaagaaaaatgaatctgcaacttcaatagtcaggtcctgtctctgcaaataatgatgctttcgaagtttcagttgaacygtccctcgcgaaaaagtttctttaaatgtaagagcaggtcctttacaaactgggccacctcgattttggtgtctcggacatgcaagctggaaaactgctgcaggacaaagaggtcagcacatgagtagaacgccagaggccgggacgactcgcacaaaccaggggctttccagggactgtctcattcagtcctcacggaagtccccatgaggtgggtactgttagtacctctactgtacagatgtggaaattgaggcccaggtaggagttaggagcccttgagcccagatcctgtaaatcccgaaggccacgtccctgctgccacaatggccccacccctgggtggacacacaccatggatattcagccagcttcccttcagcgagcccagggttggcaggagggggtgcagggtgggtgtgagagggtgggggatgccttaccccagctgagaccttgtgcgggcagaatccgctcagcatcctctgggtcttctcgatggcactgcagcctgacacgttgatcagggattccagggctgcacagtactgtggggaggggacaccgaggggtcaggccctgcttgggcagctgccttttgtgagtctgcaggaagatggggctgagatgcctggcgcaggtgagtctgggtggtgggcgggaaggggccagattatggcgggagggaggagagcacttgaagcttgcttggaaccccagccatggaagggaggctcagagaagataagcccaaggcctggagcctctgccccatcctccctgcacccaaaggtccttaccatgccagctgtcaggttgatgctccataccatgctgccattgcagagcggagcctgtgggagcaaagtgacagtgagcagagtgctggcaggggttgtgggcctgccctggcagcccaggccaggtctgccccagcacaggccccacaagcatccctggtgtggcacagaggcaggcctggcagcccctcagcattcctgagcttcgttttctgctttgaacagcaggcataggggtgaggtcccactgtttagggtcttggagctgagagaaaaaaattgacaccactagtaagggacaagctgcatgcaaggcttgccatagtcagggcaggaggacaggggcctgcgggaagggccagggtggggacgagtgaagtaggagtggcctgggccactgttgaccaagac

SEQ ID NO: 48452 - DNA, 1458 bp, Homo sapiens
cgagctcagggccctggacagaggaggcccaccaggctgagccctgggcaaggggaaggctgaggtcggctaggctgaagacgggcagcacaggctgaggtctaagctaaggaattttacccctccctaaccctccttcccgcctacccaagacatttttgacatcagaaagaaaaatgaatctgcaacttcaatagtcaggtcctgtctctgcaaataatgatgctttcgaagtttcagttgaactgtccctcgcgaaaaagtttctttaaatgtaagagcaggtcctttacaaactgggccacctcgattttggtgtctcggacatgcaagctggaaaactgctgcaggacaaagaggtcagcacrtgagtagaacgccagaggccgggacgactcgcacaaaccaggggctttccagggactgtctcattcagtcctcacggaagtccccatgaggtgggtactgttagtacctctactgtacagatgtggaaattgaggcccaggtaggagttaggagcccttgagcccagatcctgtaaatcccgaaggccacgtccctgctgccacaatggccccacccctgggtggacacacaccatggatattcagccagcttcccttcagcgagcccagggttggcaggagggggtgcagggtgggtgtgagagggtgggggatgccttaccccagctgagaccttgtgcgggcagaatccgctcagcatcctctgggtcttctcgatggcactgcagcctgacacgttgatcagggattccagggctgcacagtactgtggggaggggacaccgaggggtcaggccctgcttgggcagctgccttttgtgagtctgcaggaagatggggctgagatgcctggcgcaggtgagtctgggtggtgggcgggaaggggccagattatggcgggagggaggagagcacttgaagcttgcttggaaccccagccatggaagggaggctcagagaagataagcccaaggcctggagcctctgccccatcctccctgcacccaaaggtccttaccatgccagctgtcaggttgatgctccataccatgctgccattgcagagcggagcctgtgggagcaaagtgacagtgagcagagtgctggcaggggttgtgggcctgccctggcagcccaggccaggtctgccccagcacaggccccacaagcatccctggtgtggcacagaggcaggcctggcagcccctcagcattcctgagcttcgttttctgctttgaacagcaggcataggggtgaggtcccactgtttagggtcttggagctgagagaaaaaaattgacaccactagtaagggacaagctgcatgcaaggcttgccatagtcagggcaggaggacaggggcctgcgggaagggccagggtggggacgagtgaagtaggagtggcctgggccactgttgaccaagac

SEQ ID NO: 48453 - DNA, 597 bp, Homo sapiens
tcatgcatttttattttggcaaacttttttcttgccrtttaaaattcgtaaattttattgtatataacccagtaaagttgattttagaaatctctaaaagttaaaaaaaaacccaaagaatgtcactatttgcaaccacttaagatctaagtattaagcatctgtggctgctaacatcacaaaaagagagacaactagacactatgtgccttttgctgaaagatcgtaccactacctagggtcatacccaaaacagatacttgcctctgatcaatcatctggatccaacaacgaatttacaagttacatagcagccagaagatacatggaactactctatgggaattcaatcagccaaacccatatcgtgagaacatttatagaaaaacaaccttcatcaagtaaattttaaggataaaatagaagagatagagggcaagatagaagagatagagggaaaacttgcacattcaaagagatttaggtatctatcacattgaagagattataattcctcatcttgttgatgttcatgccttttgctgtctaatgttacagtacccctccaccataggaggggttacctgttctacccct

SEQ ID NO: 48454 - DNA, 597 bp, Homo sapiens
tcatgcatttttattttggcaaacttttttcttgccatttaaaattcgtaaattttattgtatataacccagtaaagttgattttagaaatctctaaaagttaaaaaaaamcccaaagaatgtcactatttgcaaccacttaagatctaagtattaagcatctgtggctgctaacatcacaaaaagagagacaactagacactatgtgccttttgctgaaagatcgtaccactacctagggtcatacccaaaacagatacttgcctctgatcaatcatctggatccaacaacgaatttacaagttacatagcagccagaagatacatggaactactctatgggaattcaatcagccaaacccatatcgtgagaacatttatagaaaaacaaccttcatcaagtaaattttaaggataaaatagaagagatagagggcaagatagaagagatagagggaaaacttgcacattcaaagagatttaggtatctatcacattgaagagattataattcctcatcttgttgatgttcatgccttttgctgtctaatgttacagtacccctccaccataggaggggttacctgttctacccct

SEQ ID NO: 48455 - DNA, 1941 bp, Homo sapiens
tactctcagggctaggcactgtagaacattttcatattggaatatgacctccttcatgtcattatgcgggatgagtttgtacagtgcactataagaatattcctggaagccattccttttctttaatcttgttcctacactgcaaagtattacattctaggttgtttgagacattaaattgcttacttaaaaatcacaaaactaagtggcataactagacttcaaattcaaaccgattatataacccttgtacttactaacttggctctgaaccttgctgaatataaaataaaagttctgggtattatgtatgtgagttcatactcaatatgtggggtttagaagagtccatgttggatctattccatgtatattatagggcaaacctacaaatgaaggcccccaaacctacaaaggaaggacccatggaagaggcccatgtagcccctggaatagacttggagtcatttacataaggaattccagatatggggcacctggattgtggtggctgggggcacaggcttcaggtggcatgtctctttgctccatggactccttgcctcgtagagaggttcagtagggaagagccagtagaagacctgcctccaattacccacgtctaagagtaatagtggtatatggtaagtatttaaattatcaaattttcatgaaatggaaggaaatgagacaacaccagatgaaaaggcaccagatgaaatgggacgtagaatattttaacttgcatctgtcttatttggaaatttgacaatcagagattgaacattctccatacacaaataatcattaaaataaattaacctcactactaatgaaataattactaattatttcatttattacttattaatcagtaataagaagccatttttcatcttttatatcaacaaggtctccgttaaaataagaccaagctaaatgctggtgaggtgcaagtgaagttattagtcaaatgtaaagctagggagaatgatcttttacaagcttttttggaaagtaatttgggaatttgaacaaaatgtctaaaattgctttattatttggcccaataattttgttttttgaatctacctgaataaaataatctgaaatgcttaaatccattacatatgtacatatgtgcacagcagtatcatatgtaatgatttaaaatgggtgtagcctaatatgctttataagtaaagggtgaatataaaggatttagtaaatatgtctaattgacaattatgtatcattaaaatctgacttacaaaaatttaatagcacaaggaaatattggataataaatttacatttcagaagtaatgatagcttattgtatgtacaataactactccataaagatatgcataaagactaaaagcaattatatcaaaataataagtaaacatatcaaaatatatattatattataattatatttaatttatatatttgttatatataattaatataatatatattataatcttatattttattattatattatataatatatcaaaataataagtaaatatatcaattatatcaaaataataagtaaatgataataactaagatagatcctgatgttgggggttattaagtctctatttttcactgttagatctccataagataaagaacatgttgagattgtgattttgtgaataagcaaacaaagaaagcaatgatacaaatgaggaaccaaaagcaatttaacatttgtttccttatattaatgtatgtgttaccttccrtagcaatgaaaaagagagcacatttggattttattttttaactaaaaatttttttgctcaaattttgaggacatacttggcatttttttctggtattactgtattctaaacaaatagttataaatcaagatctagttcattccagaggagacacccagattttttttcccagcaagaa

SEQ ID NO: 48456 - DNA, 1941 bp, Homo sapiens
tactctcagggctaggcactgtagaacattttcatattggaatatgacctccttcatgtcattatgcgggatgagtttgtacagtgcactataagaatattcctggaagccattccttttctttaatcttgttcctacactgcaaagtattacattctaggttgtttgagacattaaattgcttacttaaaaatcacaaaactaagtggcataactagacttcaaattcaaaccgattatataacccttgtacttactaacttggctctgaaccttgctgaatataaaataaaagttctgggtattatgtatgtgagttcatactcaatatgtggggtttagaagagtccatgttggatctattccatgtatattatagggcaaacctacaaatgaaggcccccaaacctacaaaggaaggacccatggaagaggcccatgtagcccctggaatagacttggagtcatttacataaggaattccagatatggggcacctggattgtggtggctgggggcacaggcttcaggtggcatgtctctttgctccatggactccttgcctcgtagagaggttcagtagggaagagccagtagaagacctgcctccaattacccacgtctaagagtaatagtggtatatggtaagtatttaaattatcaaattttcatgaaatggaaggaaatgagacaacaccagatgaaaaggcaccagatgaaatgggacgtagaatattttaacttgcatctgtcttatttggaaatttgacaatcagagattgaacattctccatacacaaataatcattaaaataaattaacctcactactaatgaaataattactaattatttcatttattacttattaatcagtaataagaagccatttttcatcttttatatcaacaaggtctccgttaaaataagaccaagctaaatgctggtgaggtgcaagtgaagttattagtcaaatgtaaagctagggagaatgatcttttacaagcttttttggaaagtaatttgggaatttgaacaaaatgtctaaaattgctttattatttggcccaataattttgttttttgaatctacctgaataaaataatctgaaatgcttaaatccattacatatgtacatatgtgcacagcagtatcatatgtaatgatttaaaatgggtgtagcctaatatgctttataagtaaagggtgaatataaaggatttagtaaatatgtctaattgacaattatgtatcattaaaatctgacttacaaaaatttaatagcacaaggaaatattggataataaatttacatttcagaagtaatgatagcttattgtatgtacaataactactccataaagatatgcataaagactaaaagcaattatatcaaaataataagtaaacatatcaaaatatatattatattataattatatttaatttatatatttgttatatataattaatataatatatattataatcttatattttattattatattatataatatatcaaaataataagtaaatatatcaattatatcaaaataataagtaaatgataataactaagatagatcctgatgttgggggttattaagtctctatttttcactgttagatctccataagataaagaacatgttgagattgtgattttgtgaataagcaaacaaagaaagcaatgatacaaatgaggaaccaaaagcaatttaacatttgtttccttatattaatgtatgtgttaccttccgtagcaatgaaaaagagagcacatttggrttttattttttaactaaaaatttttttgctcaaattttgaggacatacttggcatttttttctggtattactgtattctaaacaaatagttataaatcaagatctagttcattccagaggagacacccagattttttttcccagcaagaa

SEQ ID NO: 48457 - DNA, 567 bp, Homo sapiens
ggtccctctgtgtctttgctcttgctgtgccccacatctcaccacatctgtctgatgtgcatctcttcacactgccatccacccctgctcctcagagcctayccctttcacttccactgtctggagtcctacccatctttcaatgtcctagtcggtcttctaagcaaagcgtatcttaactaaacctcctttccctgtataaaaaatcattatttttttcctcaaagtggtaaattaaactacaaatcacaatcattctttgcccattctttgcttggaattttgctatatctgagcagattcagtcttttatttcagacctatttgcctgtcatctctagtaaaccctgagccctaaaattccagaactatgtctaattcatccttatatcaccttacagatcctggcacatagcaggtatccagaaaattttggttaatttgcattattggtgccacaaatcttaatctttaacaatttgatttttttgaaaagcatggaattggtaatacacaggctatacgttttggacaacatagaacacacaaaaaataaatgtatgtcaa

SEQ ID NO: 48458 - DNA, 567 bp, Homo sapiens
ggtccctctgtgtctttgctcttgctgtgccccacatctcaccacatctgtctgatgtgcatctcttcacactgccatccacccctgctcctcagagcctacccctttcacttccactgtctggagtcctacccatctttcaatgtcctagtcggtcttctaagcaaagcgtatcttaactaaacctcctttccctgtataaaaaatcattatttttttcctcaaagtggtaaattaaactacaaatcacaatcattcyttgcccattctttgcttggaattttgctatatctgagcagattcagtcttttatttcagacctatttgcctgtcatctctagtaaaccctgagccctaaaattccagaactatgtctaattcatccttatatcaccttacagatcctggcacatagcaggtatccagaaaattttggttaatttgcattattggtgccacaaatcttaatctttaacaatttgatttttttgaaaagcatggaattggtaatacacaggctatacgttttggacaacatagaacacacaaaaaataaatgtatgtcaa

SEQ ID NO: 48459 - DNA, 567 bp, Homo sapiens
ggtccctctgtgtctttgctcttgctgtgccccacatctcaccacatctgtctgatgtgcatctcttcacactgccatccacccctgctcctcagagcctacccctttcacttccactgtctggagtcctacccatctttcaatgtcctagtcggtcttctaagcaaagcgtatcttaactaaacctcctttccctgtataaaaaatcattatttttttcctcaaagtggtaaattaaactacaaatcacaatcattctttgcccattctttgcttggaattttgctatatctgagcagattcagtcttttatttcagacctatttgcctgtcatctctagtaaaccctgagccctaaaattccagaactatgtctaattcatccttatatcrccttacagatcctggcacatagcaggtatccagaaaattttggttaatttgcattattggtgccacaaatcttaatctttaacaatttgatttttttgaaaagcatggaattggtaatacacaggctatacgttttggacaacatagaacacacaaaaaataaatgtatgtcaa

SEQ ID NO: 48460 - DNA, 534 bp, Homo sapiens
agcctatcttttacatttaccaccagtaatataatagaagattctcatgatctggaaatattgtgtgtgggaaagacattaaggcactgtggttagggaagttatgtcagtaatagcccttctagaattaaggttgggcagtgctgggctaccatttccattttcttttgttattttttgatcagtagggattgagtgaggaaaataagaaatttgcctgaaacaagcagtttgtagactctatcagcttttccttttgattttctcttgatttctgccataccgatgtcctgaccatcattgaaaagttagcttctcagttatccaagtagacatccaagtctatttcagtgaagtgaggtgaaagtcttatctttcattgattaaaagcaactaaccctatgaagagagacaaatgttaacaatatagtaaattaaaacagttctctatatrttactgatccaatgtatatctaatccattgtatttcttaaatcaaatcattgccaatatgtgattcctgattgtggcctg

SEQ ID NO: 48461 - DNA, 652 bp, Homo sapiens
tctgyggttttaagtgaatatttggaagaaaagttatttaaactgaatagataggaaaaaatatatgtatacacacatatggacattactatgtctaattttgaggaatgatagaaattttagcatataattaaccagtcatttatagattaaagaatctaaattgataagctatattttaatattactaaaatatgatacttttacaattaagatgttgctttttctagttccaaatggttgtcatggtaacaaaagtacattattggttttcttacatttatgtccttgcccattcattatgggatttagctgttttacagggtcgtgaaaattaatcagtagcattttcttcttgtaatggcaagcacccacattaaaattattgcattccatgtaacttatcttttgatatcactgtcttatttctcctccttaaaaaaaagccagagcaactactagactatatataaagtaattttatacttgccaattgatcttcccttgggagctactgtagtttttataaatagcttgctgacttcgaagaaacatatttctgttcttaggaactcatctggaaagaacatttctttgggggatatggagaccatgtgtggaattccagctacaagaaaaattctgggattta

SEQ ID NO: 48462 - DNA, 652 bp, Homo sapiens
tctgcggttttaagtgaatatttggaagaaaagttatttaaactgmatagataggaaaaaatatatgtatacacacatatggacattactatgtctaattttgaggaatgatagaaattttagcatataattaaccagtcatttatagattaaagaatctaaattgataagctatattttaatattactaaaatatgatacttttacaattaagatgttgctttttctagttccaaatggttgtcatggtaacaaaagtacattattggttttcttacatttatgtccttgcccattcattatgggatttagctgttttacagggtcgtgaaaattaatcagtagcattttcttcttgtaatggcaagcacccacattaaaattattgcattccatgtaacttatcttttgatatcactgtcttatttctcctccttaaaaaaaagccagagcaactactagactatatataaagtaattttatacttgccaattgatcttcccttgggagctactgtagtttttataaatagcttgctgacttcgaagaaacatatttctgttcttaggaactcatctggaaagaacatttctttgggggatatggagaccatgtgtggaattccagctacaagaaaaattctgggattta

SEQ ID NO: 48463 - DNA, 652 bp, Homo sapiens
tctgcggttttaagtgaatatttggaagaaaagttatttaaactgaatagataggaaaaaatatatgtatacacacatatggacattactatgtctaattttgaggaatgatagaaattttagcatataattaaccagtcatttatagattaaakaatctaaattgataagctatattttaatattactaaaatatgatacttttacaattaagatgttgctttttctagttccaaatggttgtcatggtaacaaaagtacattattggttttcttacatttatgtccttgcccattcattatgggatttagctgttttacagggtcgtgaaaattaatcagtagcattttcttcttgtaatggcaagcacccacattaaaattattgcattccatgtaacttatcttttgatatcactgtcttatttctcctccttaaaaaaaagccagagcaactactagactatatataaagtaattttatacttgccaattgatcttcccttgggagctactgtagtttttataaatagcttgctgacttcgaagaaacatatttctgttcttaggaactcatctggaaagaacatttctttgggggatatggagaccatgtgtggaattccagctacaagaaaaattctgggattta

SEQ ID NO: 48464 - DNA, 652 bp, Homo sapiens
tctgcggttttaagtgaatatttggaagaaaagttatttaaactgaatagataggaaaaaatatatgtatacacacatatggacattactatgtctaattttgaggaatgatagaaattttagcatataattaaccagtcatttatagattaaagaatctaaattgataagctatattttaatattactaaaatatgatacttttacaattaagatgttgctttttctagttccaaatggttgtcatggtaacaaaagtacattattggttttcttacatttatgtccttgcycattcattatgggatttagctgttttacagggtcgtgaaaattaatcagtagcattttcttcttgtaatggcaagcacccacattaaaattattgcattccatgtaacttatcttttgatatcactgtcttatttctcctccttaaaaaaaagccagagcaactactagactatatataaagtaattttatacttgccaattgatcttcccttgggagctactgtagtttttataaatagcttgctgacttcgaagaaacatatttctgttcttaggaactcatctggaaagaacatttctttgggggatatggagaccatgtgtggaattccagctacaagaaaaattctgggattta

SEQ ID NO: 48465 - DNA, 652 bp, Homo sapiens
tctgcggttttaagtgaatatttggaagaaaagttatttaaactgaatagataggaaaaaatatatgtatacacacatatggacattactatgtctaattttgaggaatgatagaaattttagcatataattaaccagtcatttatagattaaagaatctaaattgataagctatattttaatattactaaaatatgatacttttacaattaagatgttgctttttctagttccaaatggttgtcatggtaacaaaagtacattattggttttcttacatttatgtccttgcccattcattatgggatttagcwgttttacagggtcgtgaaaattaatcagtagcattttcttcttgtaatggcaagcacccacattaaaattattgcattccatgtaacttatcttttgatatcactgtcttatttctcctccttaaaaaaaagccagagcaactactagactatatataaagtaattttatacttgccaattgatcttcccttgggagctactgtagtttttataaatagcttgctgacttcgaagaaacatatttctgttcttaggaactcatctggaaagaacatttctttgggggatatggagaccatgtgtggaattccagctacaagaaaaattctgggattta

SEQ ID NO: 48466 - DNA, 652 bp, Homo sapiens
tctgcggttttaagtgaatatttggaagaaaagttatttaaactgaatagataggaaaaaatatatgtatacacacatatggacattactatgtctaattttgaggaatgatagaaattttagcatataattaaccagtcatttatagattaaagaatctaaattgataagctatattttaatattactaaaatatgatacttttacaattaagatgttgctttttctagttccaaatggttgtcatggtaacaaaagtacattattggttttcttacatttatgtccttgcccattcattatgggatttagctgttttacagggtcrtgaaaattaatcagtagcattttcttcttgtaatggcaagcacccacattaaaattattgcattccatgtaacttatcttttgatatcactgtcttatttctcctccttaaaaaaaagccagagcaactactagactatatataaagtaattttatacttgccaattgatcttcccttgggagctactgtagtttttataaatagcttgctgacttcgaagaaacatatttctgttcttaggaactcatctggaaagaacatttctttgggggatatggagaccatgtgtggaattccagctacaagaaaaattctgggattta

SEQ ID NO: 48467 - DNA, 610 bp, Homo sapiens
gggggaggggaggaagaggaggtcatggtcagactagcagcacatgccgccatcagacttcagacactctctgaaggtgtttcacacctcaccctccatttctccaaatcactgcaaaagcactaaacctgaagattgaattctgtatgaattcaacatttggaaatttaaaaawaaacaaatgaataattatagaattgctccaattttcagtccagtttgatttttaagaaaactttacttatctcattcttaaatggcttagaaatgttgatcagaaatttctcagtcattccagtgattttacagcctttttcttcaggatggtgatcagagtacttaacctaccttcctcttattgcaaattaaacttatttcctgttcaatctgtagttgaaggaaagtaactgtttgaattatttgcatttcccctgggctatcttcatatatttgaggactactgtgaagctctctattccttctagcaagccccaagatgcctcatctattgaataaggcctttcgtatcctgaaatgataaaaaatggacatgatgctctactgtaattgtaccctaatataaaggagagattatatgaaaataatttta

SEQ ID NO: 48468 - DNA, 610 bp, Homo sapiens
gggggaggggaggaagaggaggtcatggtcagactagcagcacatgccgccatcagacttcagacactctctgaaggtgtttcacacctcaccctccatttctccaaatcactgcaaaagcactaaacctgaagattgaattctgtatgaattcaacatttggaaatttaaaaaaaaacaaatgaataattatagaattgctccaattttcagtccagtttgatttttaagaaaactttacttatctcattcttaaatggcttagaaatgttgatcagaaatttctcagtcattccrgtgattttacagcctttttcttcaggatggtgatcagagtacttaacctaccttcctcttattgcaaattaaacttatttcctgttcaatctgtagttgaaggaaagtaactgtttgaattatttgcatttcccctgggctatcttcatatatttgaggactactgtgaagctctctattccttctagcaagccccaagatgcctcatctattgaataaggcctttcgtatcctgaaatgataaaaaatggacatgatgctctactgtaattgtaccctaatataaaggagagattatatgaaaataatttta

SEQ ID NO: 48469 - DNA, 610 bp, Homo sapiens
gggggaggggaggaagaggaggtcatggtcagactagcagcacatgccgccatcagacttcagacactctctgaaggtgtttcacacctcaccctccatttctccaaatcactgcaaaagcactaaacctgaagattgaattctgtatgaattcaacatttggaaatttaaaaaaaaacaaatgaataattatagaattgctccaattttcagtccagtttgatttttaagaaaactttacttatctcattcttaaatggcttagaaatgttgatcagaaatttctcagtcattccagtgattttacagcctttttcttcaggatggtgatcagagtacttaacctaccttcctcttattgcaaattaaacttatttcctgttcaatctgtagttgaaggaaagtaactgtttgaattatttgcatttcccctgggctatcttcatatatttgaggactactgtgaagctctctattccttctagcaagccccaagatgcctcatctattgaataaggcctttcgtatcctgaaatgataaaaaatggacatgatgctctactgtaattgtaccctaatataaaggagarattatatgaaaataatttta

SEQ ID NO: 48470 - DNA, 633 bp, Homo sapiens
gattgcaaaaatattctcccattctgtaggttggctgtttactcttgatagtttcttttgctgtgaagaatctctttagtttaatatgatcccttttgtctatttttgctttygctgcaattgcttttggaaactttgtcataaaatctttgcccgtgcctatgtcttgaatggtattgcctagattgtcttccagggtttttatggggttttgcatttaagtctttaatccatcttgattaatttttgtatatggtgtaaggaaggggtccagtttcaattttctgcatatggctaaccagttatcccagcaccatttatgaaatagagaatcctttccccactgcttgtttttatcaggtttgtctaagatcagatagtcttagatgtgtagtcttatttctggattctttattctgaagaaccacttttaacacactatatttgtttgtctttgtctgcatcttgtctctatagctgtttttcttcctgtgttaatttcactattatatttaatataggttaggataacttaggttgactgtctactgcatctgacattatctagctctttgaatatattgtgttatgtagtgtaattttaacgttatgatagtgttatgtttgttattt

SEQ ID NO: 48471 - DNA, 558 bp, Homo sapiens
tggcatcatgctgtccctatcctaggtttatataaatgttaaacagcaattccttctattctatggtttcatttttttacatacaatgattacatttggaatttaattatttagtagatctgaagtttattttctttgaaaagaaagaaaagttggaagytagcagaggttggttcatgaggttaaaggaaagaagccatcttcataacataaaagtataaggtgaagcagcaagtgctaatgtagaagttgcaacaagttatccagaacatctagctaagataattgatgaagttgactccactaaacaacagattttcagtgtatatgaaacagccttacattggaagaagataccatctagaactttcatagccaggaaggagaagtcaacgcatggtttcaaagcttcaaaggacaggctgtctttttagttaggggctcatgcaactggtgacatcaagttgaagccaaagctcatttaccattctgaaaatcctagggcctgttagaattatgctatatctactctgcctgtgctctataaatggaacaata

SEQ ID NO: 48472 - DNA, 599 bp, Homo sapiens
aggacttagaattttacataaagttagttgataaagcagcagcaggacttgagagagttgactccaattttgaaagagcttctattgtagggaaatggaaatgctatcaaacagcatcacatgcaacagagcaatcttttgtgaaaggaggaggcgattaatgcagcaaacttcattgttgtcttattttaagaaattgccaccacctccccaatcctcagcaaccaccatcctgatcagtcagcagtgatcaacatggagtcgagacccttccccagcaaagattatgacttcctgagggctcagatgattgttagaacttttaagtactattttaaaattaaagtatgtacatgtttgatatataacattactgctcattaatagaccgaagtagaatgtaaacataacttttatatatactggggaatatgtctgccataatattcatgtgatttgctttatttgtgatatttgctctattgctgtagcctggaatcaaacttgcagtatcttctagcattatgcatacatacacacatatctggagagagaggttgaaacagagagggagagttttttttktttttgtttttttt

SEQ ID NO: 48473 - DNA, 599 bp, Homo sapiens
aggacttagaattttacataaagttagttgataaagcagcagcaggacttgagagagttgactccaattttgaaagagcttctattgtagggaaatggaaatgctatcaaacagcatcacatgcaacagagcaatcttttgtgaaaggaggaggcgattaatgcagcaaacttcattgttgtcttattttaagaaattgccaccacctccccaatcctcagcaaccaccatcctgatcagtcagcagtgatcaacatggagtcgagacccttccccagcaaagattatgacttcctgagggctcagatgattgttagaacttttaagtactattttaaaattaaagtatgtacatgtttgatatataacattactgctcattaatagaccgaagtagaatgtaaacataacttttatatatactggggaatatgtctgccataatattcatgtgatttgctttatttgtgatatttgctctattgctgtagcctggaatcaaacttgcagtatcttctagcattatgcatacatacacacatatctggagagagaggttgaaacagagagggagagttttttttgtttttktttttttt

SEQ ID NO: 48474 - DNA, 520 bp, Homo sapiens
gggagcatgaacgcccctccagccttcgagtcgttcttgctcttcgagggcgagaagtaagtgacgccggctgcggagggccgaggtgcgcgggcctgcggctgtcgcattctggggtgtctcctgcccatctcttgccccgggagggaaacagcttttgcttgatcgtctgctcggcctgtgtcagccaaatttaaggccgttccgcgaggyagtcgcgagtgtgttcattttgcagatgaggacactgaggcttggaggcgagcaagttgccccggacacaggaagtggcggcgcttgtattcgaacccagagtgtctggttctccatagcccttttcctctgggatctggcagcttcctctttttgtctctcgcccgccacctccatccttcatcccctccgatctgtcagcggcctgcgtaaaagccgcagtggctcctcgctgcctgcgggttgaaggagtccaggggagagagcttgggctcactctgtatctgtgggcgagtggcttgatctg

SEQ ID NO: 48475 - DNA, 560 bp, Homo sapiens
ggttcaagtgattctcctgcctcagcctcctgagtagctgggattacaggtgcatgccaccacactggctaatttttgtatttttattagagacagagttttgccatgttggccaggctggtcttgaacttctgatctcaggtgattcgcctgcctcggcctcccaaagtgctgggattacaggcgtgagcactgtgcccggccaggtgcacttaattcttcctggctgtgagggtgaaggaaagctacaaaagttaagtgccctggagccaatctttgaagtaaagagactggcgggtagaaaggcrtaggatagagtcatagagtcactcagcagaagcaaaggcacagagggaactgcctgatggatcctaagagtgcgaaggaattcctcactggctagagtgtgggtgtcatgtagttggatagagtaatggccccccaaagatatccatgtcctcaccctggagcctgtgaataatcctcatatagcagaagagactctgcaggtgtgatgaaacgaatgatcttaggatggggaggttaccctgcattatcca

SEQ ID NO: 48476 - DNA, 2239 bp, Homo sapiens
tttatcggtattttagtaaagacattcatctcagttgtttctctctcccagcttgaccttaggttaatatttcatttgggtcaagaaaagaatatctaggagaggtatgttaacaaacaggaaaatggacaaaaattgatagtttgcctacattaaagtaagttaaattcatgtattttgatataattaaatcatgtaagaactaagagttctatatacatttccattgttttacttggggctcattctaaacttaaatgctagtgaacaagtgttaggaatatacacaggatgcttctctggagttattaccaactaaaagagctcagcgagcagttaccaccaataaaacagtctgaagctgcctccaaatataatattgtaggagttttcaaggaaatgtttatactgtatgcttcttttgtctgtgactatgcttttaaagatgtgtttaactgtcacattaaaaaagatgccgggcggggtggctcacgcctgttaagtccagcactttgggaggccgaggcgggtggatcacaaggtcaggagttcaagatcagcctggccaagagggtgaaaccctgtctccactaaaaacacaaaaaattagccgggtgtggtcgtgggtgcctgtaatcccagttacttgggaggatgaggcagagaatttcttgaacccaggaggtagaggatgcagtgagctgagatcacaccactgcactccagcctgggagacagagtgaaactccgtctcaaaaaaaaaaaaaaaaaaaaaaaaaaaaaaaaaaaaaaaaaagctcatacacaatacaaaaatacaaaaactaacaccctacaatatacaaatctcacaaagtatatgtggtgagattccaaaaaaatgtttgaagatgcattttctttccttctactccagtatctaaaatgtgctttttgagaggccattggtcaacatgtatacatttaaaatcaaccatgtaattttactagtaagaaagctggggctggcacggtggctcacacccgtaatcccagcactttgggaggccaaggcaggcggatcacgaggtcaagagtttgagaccagcctggccaacgtggtgaaaccccatctctactaagaacacaaaaattagctgggcatggtggtgcatacctgtaatcccagctactcaggaggctgaggcaggagaatcacttgaacctgggaggcataggctgcagtgagccgagactgctccaatgcactccagcctgggcgacagagcaagactccgtctgggtcggggcggggtgtgggggaagccagtagttaagttcaatttaaattggattcacaagttagtaatttaaatcctcagacaaagttacagaaagtgtatcttcttgttttccatcttcatacaatgttaaattttttttttttggtgtttatactttttaaaaaaataaaaatagtcaaatgcttaatatgtacatttaattttttggtggtggtttgtattttaaaaraaacagcttccttatgatttggctcaagttctggtggaaatgcttacagcaactagctaataaacaaaaaacaagagaagcacattcgaaatactgatttactttggtagcaaatggtttttctttgaagacaaatgaagatacacaagacccattaaggtgaagtgggctatttcaaatattcaacagtttacattaaaaagaattctttttttttttttttaatttgttttttttgagacagagtctcgctctgtcgcccaggctggagtgcagtggcacaatctcggctcactgcaagctccgcctcccgggttcacgccattctcctgcctcagcctcccgagtagctgggactacaggtgcccaccacaacgcctagctaattttttgtatttttagtagagatgggttttcaccatgttaaccaagatggtctcgatctcctgacctcgtgatccaccctcaacctcccaaagtgctgggattacaggcgtgagcaactgcgtctggccaaaaaaaattcttttaagagctaagcatctgtatccactgatagcaatgcaatacctactttatgatgacttgaaccaaaacaaatgcctataaggaaaaaagctgcattttaatttaacctaaatttacgttcagccaatagttaagtaacgttttcctcccataactcccggcctctagaaggcggttcctgggaccaagacaagtttag

SEQ ID NO: 48477 - DNA, 1274 bp, Homo sapiens
cgtaaatacttgaaacagtttcggatttcttgatttgattttgaccgagacaccagctaagttgactgcttcttttagccttgatttccctatccgtaaaatggagataataatagtaccttctacctaaggtatttgtgaggatcaaatgagttaattttagttaaacccttggctcagtttctggcatataataaaaagttttcccagcttggagaccttaggcatgcatttcccgcaacaatttaagcagcataatgaattctatagttagccagagagctttattttgtttcacttttttgaaaagtgttggttctgggtatgcatattaatgaatatcaccagaaaaatacactccagtgactaagcctgggaacttagtctaacagcttttgcccttctctcttcctcctctctttcacctcaaggagtgggcaagccagcaccttttctcagcaccatgcatagccaagtggatgcagagaaaatgctgaactttcagaatttcttgaggttcctgaaagcctctgtgtcatcatgaaacagaagctcatcttacaaatctgtctttcatagaagcttcagttactgatgccaaatgtcaacatatcaaattgttggctaattttagccttatcaatgtcttgcagacatgtaattaacaccacagttcagcagcaattcaggcgcggagttccattttgcatcatgattttcgagaccttgaccattagtgctaaggttcaaagtctgaaagtgccatctccatatgggatgtctcctgttcctccacacctccacttgtccttttaaaatcagaatcaaaatggtccaagctcccatttcatgtattgtaggatgtccagtgccttcttggatatacctgggaatctcagagggcttttgcactcccagtcacttctcgtgtggaattctagatgggtccatgtggtggatggtgtcttgcctcctgaagctgttgtttcctcttcatcttactttaaacattgcccaccccctgcctcagaacatccccagatgttctggcaacttctgtgtagtaggcttttactgaaggcttgaaaatggctgagctggacmatggctcaaaacaaaacagaaaacaagttaaaatggaatagtcaacactgtacatttccttagcctctcccaccgtaggaattttctcatcaattgcctttcctgttgggctcccctgtgctgccatatggctggggcttttcacttcctccagctctcttatctcagct

SEQ ID NO: 48478 - DNA, 1274 bp, Homo sapiens
cgtaaatacttgaaacagtttcggatttcttgatttgattttgaccgagacaccagctaagttgactgcttcttttagccttgatttccctatccgtaaaatggagataataatagtaccttctacctaaggtatttgtgaggatcaaatgagttaattttagttaaacccttggctcagtttctggcatataataaaaagttttcccagcttggagaccttaggcatgcatttcccgcaacaatttaagcagcataatgaattctatagttagccagagagctttattttgtttcacttttttgaaaagtgttggttctgggtatgcatattaatgaatatcaccagaaaaatacactccagtgactaagcctgggaacttagtctaacagcttttgcccttctctcttcctcctctctttcacctcaaggagtgggcaagccagcaccttttctcagcaccatgcatagccaagtggatgcagagaaaatgctgaactttcagaatttcttgaggttcctgaaagcctctgtgtcatcatgaaacagaagctcatcttacaaatctgtctttcatagaagcttcagttactgatgccaaatgtcaacatatcaaattgttggctaattttagccttatcaatgtcttgcagacatgtaattaacaccacagttcagcagcaattcaggcgcggagttccattttgcatcatgattttcgagaccttgaccattagtgctaaggttcaaagtctgaaagtgccatctccatatgggatgtctcctgttcctccacacctccacttgtccttttaaaatcagaatcaaaatggtccaagctcccatttcatgtattgtaggatgtccagtgccttcttggatatacctgggaatctcagagggcttttgcactcccagtcacttctcgtgtggaattctagatgggtccatgtggtggatggtgtcttgcctcctgaagctgttgtttcctcttcatcttactttaaacattgcccaccccctgcctcagaacatccccagatgttctggcaacttctgtgtagtaggcttttactgaaggcttgaaaatggctgagctggacaatggctcaaaacaaaacagaaaacaagttaaaatggaatagycaacactgtacatttccttagcctctcccaccgtaggaattttctcatcaattgcctttcctgttgggctcccctgtgctgccatatggctggggcttttcacttcctccagctctcttatctcagct

SEQ ID NO: 48479 - DNA, 649 bp, Homo sapiens
tatcagggatcagagtgtcctcatcttcctcatgttcctgagtcaaggagacccctgcaggggggctttgcctgcctcactgctcctctcyggccatgcagctgtccacagcagaagcagccgggacacctccttgcccagctcttccaccccccaactgtcagaggagtgagttccattcagttccttaaatgccctgcccctgcctggagaccccaatgatctgacactcagaaccaagcccggcaggtgttgccagagtgctggaggagactgtatgcccctctgccctgctccagtcccccttggcttgccttgcctcctaagctcttgtccccagctggagggatcactctccagtgccgattggatcatatcctagtctagcctgaaatacttcagagggtgatctcaggttttcaccagagagagggagatgtgttttagaggaggcctttgggtggcccccagacatttggaggcactttgtcaacctcagcatcagatgggctctggcccagaaccccctactcccacatgagctcaatttgtcattgtcattatacatggtgtgcagaggcccagaggagactcctgaaattttcagaagagcctggtgtggcgatcgctgttgggaccctgtctcctt

SEQ ID NO: 48480 - DNA, 649 bp, Homo sapiens
tatcagggatcagagtgtcctcatcttcctcatgttcctgagtcaaggagacccctgcaggggggctttgcctgcctcactgctcctctccggccatgcagctgtccacagcagaagcagccgggacacctccttgcccagctcttccaccccccaactgtcagaggagtgagttccattcagttccttaaatgccctgcccctgcctggagaccccaatgatctgacactcagaaccaagcccggcaggtgttgccagagtgctggaggagactgtatgcccctctgccctgctccagtcccccttggcttgccytgcctcctaagctcttgtccccagctggagggatcactctccagtgccgattggatcatatcctagtctagcctgaaatacttcagagggtgatctcaggttttcaccagagagagggagatgtgttttagaggaggcctttgggtggcccccagacatttggaggcactttgtcaacctcagcatcagatgggctctggcccagaaccccctactcccacatgagctcaatttgtcattgtcattatacatggtgtgcagaggcccagaggagactcctgaaattttcagaagagcctggtgtggcgatcgctgttgggaccctgtctcctt

SEQ ID NO: 48481 - DNA, 560 bp, Homo sapiens
caaaaaacaaaacccaagaacaaaacgtccacgtctacacttaagatttcccaaagatatacgtatctatatgaggaaaccaattagtttatgtcactttacttcatttggtctgtttcctcatctataaaattcttagacaatataaatctcaaaataccttaattagacaaacccaatgtacactctttgctggtttgttatgtaaggaattctgcccccttaaatgttttgsctatactttagtacagagttgaggccgttattaccagaactaggcaaactggctaacaagaactgtaaggagagtaggtcaaactgctacaagattgaaatcctcctatgttgcagtgaatgacacgatttcattcttttttaaagccaaatagggctgggcatggtggttcacacctgtggaccagcactttgagaggctgaggcagaaggatcactggagctcaggactttcagcttggacgacatggcaaaatcccgtatctaccaaaaatacaaaaattaggcgtggtggtgcacacctgtagtcccagctactccagagg

SEQ ID NO: 48482 - DNA, 560 bp, Homo sapiens
caaaaaacaaaacccaagaacaaaacgtccacgtctacacttaagatttcccaaagatatacgtatctatatgaggaaaccaattagtttatgtcactttacttcatttggtctgtttcctcatctataaaattcttagacaatataaatctcaaaataccttaattagacaaacccaatgtacactctttgctggtttgttatgtaaggaattctgcccccttaaatgttttgcctatactttagtacagagttgaggccgttattaccaraactaggcaaactggctaacaagaactgtaaggagagtaggtcaaactgctacaagattgaaatcctcctatgttgcagtgaatgacacgatttcattcttttttaaagccaaatagggctgggcatggtggttcacacctgtggaccagcactttgagaggctgaggcagaaggatcactggagctcaggactttcagcttggacgacatggcaaaatcccgtatctaccaaaaatacaaaaattaggcgtggtggtgcacacctgtagtcccagctactccagagg

SEQ ID NO: 48483 - DNA, 631 bp, Homo sapiens
tcccctccatgagggctattacttagaagttgtcctgtgcaataaagacatttgctaactgcatgggggcwgacttctgctcggccccgaaacccacacccttgggtgtctccctgacagtgcttagcctcatttcccagtgctcctggcagtcaggttggggccatgtgaccatctccagccaatgacacgggagaagaaatgagcgagccccctgggaggtggtccagcctgtgccctccccccgactacctctgccgcagtgaccttagaggctgtgtgacttccagagggcgtagccacaggtggacgaggtcaagccaccctgagtcagactgagatgcagcgagaaagacgcctttatgccatgagccactgagacgtccctgcttgttgtaaatgacccgagccctgggatgtgcagggaggacctgggagtgcagcggccacaggacataccttatcactcgagaggctcctcttccttgtgggcctgggagggggcaggagcacgtacagatcggccaaagtgggcagccccggcttcaccacagtcaccagaagctcctgagggacgctggtctcctgcggggagagttaagccactttggtccgcctgtcttcctcattc

SEQ ID NO: 48484 - DNA, 631 bp, Homo sapiens
tcccctccatgagggctattacttagaagttgtcctgtgcaataaagacatttgctaactgcatgggggctgacttctgctcggccccgaaacccacacccttgggtgtctccctgacagtgcttagcctcatttcccagtgctcctggcagtcaggttggggccatgtgaccatctccagccaatgacacgggagaagaaatgagcgagccccctgggaggtggtccagcctgtgccctccccccgactacctctgccgcagtgaccttagaggctgtgtgacttccagagggcgtagccacaggtggacgaggtcaagccaccctgagtcagactgwgatgcagcgagaaagacgcctttatgccatgagccactgagacgtccctgcttgttgtaaatgacccgagccctgggatgtgcagggaggacctgggagtgcagcggccacaggacataccttatcactcgagaggctcctcttccttgtgggcctgggagggggcaggagcacgtacagatcggccaaagtgggcagccccggcttcaccacagtcaccagaagctcctgagggacgctggtctcctgcggggagagttaagccactttggtccgcctgtcttcctcattc

SEQ ID NO: 48485 - DNA, 631 bp, Homo sapiens
tcccctccatgagggctattacttagaagttgtcctgtgcaataaagacatttgctaactgcatgggggctgacttctgctcggccccgaaacccacacccttgggtgtctccctgacagtgcttagcctcatttcccagtgctcctggcagtcaggttggggccatgtgaccatctccagccaatgacacgggagaagaaatgagcgagccccctgggaggtggtccagcctgtgccctccccccgactacctctgccgcagtgaccttagaggctgtgtgacttccagagggcgtagccacaggtggacgaggtcaagccaccctgagtcagactgagatgcagcgagaaagacrcctttatgccatgagccactgagacgtccctgcttgttgtaaatgacccgagccctgggatgtgcagggaggacctgggagtgcagcggccacaggacataccttatcactcgagaggctcctcttccttgtgggcctgggagggggcaggagcacgtacagatcggccaaagtgggcagccccggcttcaccacagtcaccagaagctcctgagggacgctggtctcctgcggggagagttaagccactttggtccgcctgtcttcctcattc

SEQ ID NO: 48486 - DNA, 631 bp, Homo sapiens
tcccctccatgagggctattacttagaagttgtcctgtgcaataaagacatttgctaactgcatgggggctgacttctgctcggccccgaaacccacacccttgggtgtctccctgacagtgcttagcctcatttcccagtgctcctggcagtcaggttggggccatgtgaccatctccagccaatgacacgggagaagaaatgagcgagccccctgggaggtggtccagcctgtgccctccccccgactacctctgccgcagtgaccttagaggctgtgtgacttccagagggcgtagccacaggtggacgaggtcaagccaccctgagtcagactgagatgcagcgagaaagacgcctttatgccatgagccactgagacgtccctgcttgttgtaaatgacccgagccctgggatgtgcagggaggacctgggagtgcagcggccacaggacataccttatcactcgagaggctcctcttccttgtgggcctgggagggggcaggagcacgtacagatcggccaaagtgggcagccccggcttcaccacagtcaccagaagctcctgagggacgctggtctcctgyggggagagttaagccactttggtccgcctgtcttcctcattc

SEQ ID NO: 48487 - DNA, 648 bp, Homo sapiens
tttcatttgtttttttcattcttgttttttttttttccttactaagtttgttcgttagttttagaactatggccaacacaggtctcaatggcttaatatgttttcttagtcaaatttctttttatttcctaggacagagatatggatttactttcccatttttgggactttcctgaaagaataccctggtatttttcaggaaacctgttttggctactgttgctctgtagtatagcttgaagtagggtaacatgatgcctccaaatttgttctttttgcttagaattgcttggctattcaggttcttttttggtttcacatgaattttaaagtgtttttctagaataaactagtttattctagtattctaaactttagtttagaaactaccaagaatgtctttggtagtttgatagaaatagcattgaatctgtaaattgctttgggcagtatggccatttaaacaatatgattcttactacccatgaacaagaaatctgtttccatttgtttgtattatctctgatttctctgagtagtgttttgtagttcttattgtagagacctttcacctgccttgytagctgcatttcttggtattatattctttctttggcaattgtgaatgggattgtgttcctgatttgt

SEQ ID NO: 48488 - DNA, 555 bp, Homo sapiens
ttaaaatgtttaaggtgtgaaattaatgttttaaaaatggttacccactttaacaaattttttcattgaggaaccaataggtacaggtcccagttgtctcagattagtagactgaatttttaagctaacagcatttttagtactaatttgacggtgtgacattgcatttcctccagctaatatggcatgcttcaggtggaaagactccacttaaacatagtgagcagaatgattatgaaaataaacaatgaaagttttatccataagctctattttaaggcaaattctttggaatttgagttactaaaccaattaccatcatatagagagatactgttttagattgaggaagacagagctaaggggaaacatattgctgttttaaaatagaaaagatatgaaacttttgtgctttgtccctccagagactaaaattaggatctctgaatggaaaatctacagaggcagattttagtttaatgtatatcattagtatattaacacaatttcatttgccatttatggaatactagctttgcatyagagagcagtata

SEQ ID NO: 48489 - DNA, 543 bp, Homo sapiens
ttacaggcatgagcccccacgtccggctaattttgtattttcagtagagatgcggtttctccatgttggtcaggctggtcttgaactcccaaccttaggtgatccgcctgcctcagcctcccaaagtgctgggattacgggcgtgagccgccgtgcccggcccaagagccacatttctaacaagctccccggtaataatggcgctggtccaggctccgaactttgagtacygagagatgccactcctgctattcccccgctagccacacctcatgtaggggaagtggggaaatgagtctagtgtttgtgcaggagctggaggaactgggatcagtaaacacaggtagggagtgcagctaggaagcaggcaggaggaacacagctgtcccaggaagggggacaggacaaagtatcattgctgctgaggatgggtgaggtcacaactgggacttgcagcccctcagcaggggcctctttctgaacccctgggaaggccccgaaagatcccccagggctgctctcagggtctcagaggggcccacg

SEQ ID NO: 48490 - DNA, 1297 bp, Homo sapiens
acaactctgtgtttaaccttttgaggaactgtcaggctgtgaaagctgccgtaccattttactttcccaccagcagcatatgaggtttccagttcctgcacattcttgccaacatttactattatcttgtctgaatatatccatcctagtgggtatgaagtggtgtctcattgtgattttgatttgcatgtttctgttggctgatgattttgagcaacttttcacatgcttattagtcatttgtatagcttcagagaactgtctattcagatcctttgtccatttttaaattgggctgtattttatcatggaattatyggagttcttattttctggatgcataaattttatttttttaattttttaagttgatgtaggcgtgttttataggtgccaggcaccgtactaagtgcctttttgtacattaactggcagtcctatgatatatgaactaaattttaactccattttatacatggcttttttctctatttattttaacatatttataaccatctttttcttgaggttgcactactgtcacatgagcacgtagtaagggcagtactgctaacacctataaaacaccactgataatatagataaggtaggcagcaaatatagtgtctgtgagatttgaggctgcctttcttctctgggatagaccatcttttgattcttttcattgcgattagttggaaatttcacagtaccgggaatcagaaattggtcaaaggtttgcatagccccctttgttccgtgtcaaacaagatttagatgttacctttactgctccagcctctgcctgaaggtagaaatcttcaacaattcagatgcttttgggtttttgagctaaatatgcatggttatggactcagggttcacaaatagagggagtaccttaaatctatagctgagcctctgtaggaaatatgtgattccagaaaatgcaggcaaggctctgaataggtgtttcagaggaatctcacaggttgagttgggtggagggacacatatggtgaatgttacttaaactttcttcctactatgaaatccttttagatctccattatggtggaatctcattcctattttctcttcctgtatttaggaaagaaagatgccacatacagttatttgcatactttattcattctttcttagtgctgacatggaaagcgcctaatgactttgggtttagccatgatttagttatctcttttctcatgaggaggaaaaattgttacttggtaactgccaggaagttcaagccccagaatctcctcctaacagcaag

SEQ ID NO: 48491 - DNA, 1390 bp, Homo sapiens
aagttagatgattcttttgtcttaaaaagtaatcctcaacaaaggttttgcaaccccagtctaaaaaatcacagcttgatggagatataaaggaaaattcttcctccacaggcaactcagtcagcacttgtgaaaaataatgttttatcttattaaagagtgatcatcgctatgtgataaaagctctgtaattaaaatgtgtggttctttctgtaaaaggcaaaactacagggggaaaaacagacagtgtttgctgcattgagtggttggtgttcactacaaagaaaaacatgagggaagttttgtatcttgattgtagcaatggataacaagactttatttgcttgacaaaatttgtacaactgtacattaaaagaagcaaattttactcagtttgcatctcatctatttatttatttatttattttgagacagggtcttatgtcgcccagactcagctgcagtgrcacaatcatggcttactgcagccttgacctctggggctcaagggatcctcccaactcagcctcccaagtagctaggactacaggcactcaccaccattcccgggtaattgtttttactttttgtagagagagggtctcaccatgttactcaggctggtctcgaattcctgggctcaaacgatcttccttccttggtctgtcaaagtgctgagattacaggtgtgagccacaacacctagaccaactcagtttacattttaaaaagatggtgtataatattttgtaaaccctcaaggttgtcaagtttcttaataaatttgaaaaaagaaactgtggaaattattaactaaggtcacttcaatgaaattcatcagttttagaaaatagccaggagctgttctagtaaaagacattttgaacatatttttatgtattaaataccatcatcaatatgaacattttaaactggattgaatgtattctcccttaacttattctgattctctgactcccaccatatccataatgttattgattataggggtgaaacagctaaaagggagtagataatttcttcacttctaacaactgtatacagcttcaattctctattgagaataaaagggattttcttcctaattatattccaggacatttggaaacattttgaaaccagccttaagtaacttaagttatatctttcttttatctctttctttctctatctccaactgtctctttctctctttatctgcctatgttctcagatttataaagaacaaaacaatcacaatattcatgaggtatcactttaagcaaaactcacagaaagccgcacagaaaaaacaaaagaaagaaaagaaaagaaaccactgttaaactaagatctgtttctaagtatcttatagttttaaaatgggatt

SEQ ID NO: 48492 - DNA, 1390 bp, Homo sapiens
aagttagatgattcttttgtcttaaaaagtaatcctcaacaaaggttttgcaaccccagtctaaaaaatcacagcttgatggagatataaaggaaaattcttcctccacaggcaactcagtcagcacttgtgaaaaataatgttttatcttattaaagagtgatcatcgctatgtgataaaagctctgtaattaaaatgtgtggttctttctgtaaaaggcaaaactacagggggaaaaacagacagtgtttgctgcattgagtggttggtgttcactacaaagaaaaacatgagggaagttttgtatcttgattgtagcaatggataacaagactttatttgcttgacaaaatttgtacaactgtacattaaaagaagcaaattttactcagtttgcatctcatctatttatttatttatttattttgagacagggtcttatgtcgcccagactcagctgcagtgacacaatcatggcttactgcagccttgacctctggggctcaagggatcctcccaactcagcctcccaagtagctaggactacaggcactcaccaccattcccgggtaattgtttttactttttgtagagagagggtctcaccatgttactcaggctggtctcgaattcctgggctcaaacgatcttccttccttggtctgtcaaagtgctgagattacaggtgtgagccacaacacctagaccaactcagtttacattttaaaaagatggtgtataatattttgtaaaccctcaaggttgtcaagtttcttaataaatttgaaaaaagaaactgtggaaattattaactaaggtcacttcaatgaaattcatcagttttagaaaatagccaggagctgttctagtaaaagacattttgaacatatttttatgtattaaatrccatcatcaatatgaacattttaaactggattgaatgtattctcccttaacttattctgattctctgactcccaccatatccataatgttattgattataggggtgaaacagctaaaagggagtagataatttcttcacttctaacaactgtatacagcttcaattctctattgagaataaaagggattttcttcctaattatattccaggacatttggaaacattttgaaaccagccttaagtaacttaagttatatctttcttttatctctttctttctctatctccaactgtctctttctctctttatctgcctatgttctcagatttataaagaacaaaacaatcacaatattcatgaggtatcactttaagcaaaactcacagaaagccgcacagaaaaaacaaaagaaagaaaagaaaagaaaccactgttaaactaagatctgtttctaagtatcttatagttttaaaatgggatt

SEQ ID NO: 48493 - DNA, 1390 bp, Homo sapiens
aagttagatgattcttttgtcttaaaaagtaatcctcaacaaaggttttgcaaccccagtctaaaaaatcacagcttgatggagatataaaggaaaattcttcctccacaggcaactcagtcagcacttgtgaaaaataatgttttatcttattaaagagtgatcatcgctatgtgataaaagctctgtaattaaaatgtgtggttctttctgtaaaaggcaaaactacagggggaaaaacagacagtgtttgctgcattgagtggttggtgttcactacaaagaaaaacatgagggaagttttgtatcttgattgtagcaatggataacaagactttatttgcttgacaaaatttgtacaactgtacattaaaagaagcaaattttactcagtttgcatctcatctatttatttatttatttattttgagacagggtcttatgtcgcccagactcagctgcagtgacacaatcatggcttactgcagccttgacctctggggctcaagggatcctcccaactcagcctcccaagtagctaggactacaggcactcaccaccattcccgggtaattgtttttactttttgtagagagagggtctcaccatgttactcaggctggtctcgaattcctgggctcaaacgatcttccttccttggtctgtcaaagtgctgagattacaggtgtgagccacaacacctagaccaactcagtttacattttaaaaagatggtgtataatattttgtaaaccctcaaggttgtcaagtttcttaataaatttgaaaaaagaaactgtggaaattattaactaaggtcacttcaatgaaattcatcagttttagaaaatagccaggagctgttctagtaaaagacattttgaacatatttttatgtattaaataccatcatcaatatgaacattttaaactggattgaatgtattctcccttaacttattctgattctctgactcccaccatatccataatgttattgattataggggtgaaacagctaaaarggagtagataatttcttcacttctaacaactgtatacagcttcaattctctattgagaataaaagggattttcttcctaattatattccaggacatttggaaacattttgaaaccagccttaagtaacttaagttatatctttcttttatctctttctttctctatctccaactgtctctttctctctttatctgcctatgttctcagatttataaagaacaaaacaatcacaatattcatgaggtatcactttaagcaaaactcacagaaagccgcacagaaaaaacaaaagaaagaaaagaaaagaaaccactgttaaactaagatctgtttctaagtatcttatagttttaaaatgggatt

SEQ ID NO: 48494 - DNA, 1199 bp, Homo sapiens
tggggacgttcggggcggttccttgcacttcagtcccccccgggtcccctcctgctcccgggttttctgccccgttcccccgggtggctgtgggctcccgagccccgtgtcggccagccggccccagggccccacgaccccatggtgtctcccaagaaggtacatgaagcacaagcgcgacgatgggcccgagaagcaggaggacgaggcggtggacgtgacgccggtgatgacctgcgtgtttgtggtgatgtgctgctccatgctggtgctgctctactatttctacgayctcctcggtgcgcggccccgggcgggtgggccgcggcgtggagatgcagcccgccccgtgcggagggagggtggcgtgcgggcctggcccccggcctcacggccctgcccctgcagtgtacgtggtcatcgggatcttctgcctggcctccgccaccggcctctacagctgcctggcgccctgtgtgcggcggctgccttcggcaagtgcaggtgagtctgccctgctggccccgacgtgcctgactctgtgcggtgatggccacggcccctttgccgccccatagccccccatggtgcaatattgctcagagtctacagcaggcgctccctcagtgctggcctggggctcctaggcccaggagcagggcggagtctgggcgagctatcaatggagcccaccagcagccaggcgccaggggtggcggggggagggtgcccttgtccccaggaaccctgccccaggtcgcaggccgaaccctgggttccccagggttctccggggaacccagaaggttccccacagcccagagcttggcctggctcttaggggtaaagggagctgctggggggtctccaacaaagtcagacctgggtctaggaagcggggctagcccagggggagacctttttgtgttgccgtccctgggtgaggaggtgggaggtctggagcaggcagggcctcgggcgaaggggcgcagcgcaggcgaggggctctgtgggtacagcccgtggcccccagcgcctgcccgggtcgggctctgccctgcccttggggtgcctactgttgtcatcgtgtgggatgtggagtttaatgaggacaacagagtgggggctgccactctgcagggggtgcctgggccggtcccaagggtggtgggcagtgggatgaggccgggagctggtgg

SEQ ID NO: 48495 - DNA, 1199 bp, Homo sapiens
tggggacgttcggggcggttccttgcacttcagtcccccccgggtcccctcctgctcccgggttttctgccccgttcccccgggtggctgtgggctcccgagccccgtgtcggccagccggccccagggccccacgaccccatggtgtctcccaagaaggtacatgaagcacaagcgcgacgatgggcccgagaagcaggaggacgaggcggtggacgtgacgccggtgatgacctgcgtgtttgtggtgatgtgctgctccatgctggtgctgctctactatttctacgatctcctcggtgcgcggccccgggcgggtgggccgcggcgtggagatgcagcccgccccgtgcggagggagggtggcgtgcgggcctggccccyggcctcacggccctgcccctgcagtgtacgtggtcatcgggatcttctgcctggcctccgccaccggcctctacagctgcctggcgccctgtgtgcggcggctgccttcggcaagtgcaggtgagtctgccctgctggccccgacgtgcctgactctgtgcggtgatggccacggcccctttgccgccccatagccccccatggtgcaatattgctcagagtctacagcaggcgctccctcagtgctggcctggggctcctaggcccaggagcagggcggagtctgggcgagctatcaatggagcccaccagcagccaggcgccaggggtggcggggggagggtgcccttgtccccaggaaccctgccccaggtcgcaggccgaaccctgggttccccagggttctccggggaacccagaaggttccccacagcccagagcttggcctggctcttaggggtaaagggagctgctggggggtctccaacaaagtcagacctgggtctaggaagcggggctagcccagggggagacctttttgtgttgccgtccctgggtgaggaggtgggaggtctggagcaggcagggcctcgggcgaaggggcgcagcgcaggcgaggggctctgtgggtacagcccgtggcccccagcgcctgcccgggtcgggctctgccctgcccttggggtgcctactgttgtcatcgtgtgggatgtggagtttaatgaggacaacagagtgggggctgccactctgcagggggtgcctgggccggtcccaagggtggtgggcagtgggatgaggccgggagctggtgg

SEQ ID NO: 48496 - DNA, 1199 bp, Homo sapiens
tggggacgttcggggcggttccttgcacttcagtcccccccgggtcccctcctgctcccgggttttctgccccgttcccccgggtggctgtgggctcccgagccccgtgtcggccagccggccccagggccccacgaccccatggtgtctcccaagaaggtacatgaagcacaagcgcgacgatgggcccgagaagcaggaggacgaggcggtggacgtgacgccggtgatgacctgcgtgtttgtggtgatgtgctgctccatgctggtgctgctctactatttctacgatctcctcggtgcgcggccccgggcgggtgggccgcggcgtggagatgcagcccgccccgtgcggagggagggtggcgtgcgggcctggcccccggcctcacggccctgcccctgcagtgtacgtggtcatcgggatcttctgcctggcctccgccaccggcctctacagctgcctggcgccctgtgtgcggcggctgccttcggcaagtgcaggtgagtctgccctgctggccccgacgtgcctgactctgtgcggtgatggccacggcccctttgccgccccatagccccccatggtgcaatattgctcagagtctacagcaggcgctccctcagtgctggcctggggctcctaggcccaggagcagggcggagtctgggcgagctatcaatggagcccaccagcagccaggcgccaggggtggcggggggagggtgcccttgtccccaggaaccctgccccaggtcgcaggccgaaccctgggttccccagggttctccggggaacccagaaggttccccacagcccagagcttggcctggctcttaggggtaaagggagctgctggggggtctccaacaaagtcagacctgggtctaggaagcggggctagcccagggggagacctttttgtgttgccgtccctgggtgaggaggtgggaggtctggagcaggcagggcctcgggcgaaggggcgcagcgcaggcgaggggctctgtgggtacagcccgtggcccccagcgcctgcccgggtcgggctctgccctgcccttggggygcctactgttgtcatcgtgtgggatgtggagtttaatgaggacaacagagtgggggctgccactctgcagggggtgcctgggccggtcccaagggtggtgggcagtgggatgaggccgggagctggtgg

SEQ ID NO: 48497 - DNA, 526 bp, Homo sapiens
tttactgttgtttctcaaattagggctgaaggatcatggggggggagaaagctgggaacgtttgctgctttgaaagggtgtgtaaacaacaccctccaaaacaaccaagagttccgaggagaaactttggccggatacggtggctcacgcctgtaatctcagctcctcgggaggctcaggggggcagatcacgaggtcaggagtttgagaccagcttggccaacacggtgaaamccccgtctctactcaaaatacaaaaattaatcgggggtggtggcgggcacctgtaactccagctacttaggaggctgaggcaggataatcacttgaacctgggaggtggaggtggccatgagccgagatcgcaccaccgcactccaacctagtaacagggagagtatgtcccagaaaacaaataaataaacaaacaaaaagaaaacggcaagggaaattggaaaatactccagatgaaccacaacgaagatgggtgggatacatctaaagctgtgctcagagggaatgcggc

SEQ ID NO: 48498 - DNA, 832 bp, Homo sapiens
gcatcattcttcctctgtacctcagtactattttctagaaatagaattctatcaagtttttaatatttttaattatgctagtgataaccttgaattatcagtttgaacagttagctcctgcccacttgattatttgagctcattcttgccatcatgttcttctacatattctcctttaaatgttgttttttctaggattatttatattastattacaatagtaattttaagtaactgatttaaatctctgctcttgttcaattaactttcaacaatatcccttgcctcctattttttaacaacttatttttccctccaactttcccgccaatttccactgtcatgccccatccttggtgagctcttattccatgacatcagtgttaatacatgaatctcttttgcaattccaaccaagtcttacaagatttgttcactctaaaggttggaaataaataaacaggatcagtgaattatgtgactataaaaatattgttgactgctggccaaaaaatatacaaggattatatttcttttcctgtgtcccaatgtcaggaaccctggactatacaaataaaatgttactaacactattttttaagacacaaactccactctttaaaatcatgccacattttagtttgcttcatatttggagtataatttacttgtgcagcttttagaagtttgttcccctggtgttttagattctttgttgtgtactatttgcctttattataacctcatttttttttcgtatttttcagttgtgtcatgatttccaatggttctcaaagtgtggcctgcaaaatcttgtggttctccaataccc

SEQ ID NO: 48499 - DNA, 651 bp, Homo sapiens
cggggagtatgaaggacaaagacctgctgagggccagctgggcaacctgaagggagacgtagcaaaaggagacacagataaggaaatacctactttgctggtttgcagagcccctgtggtgtgtggacgctgaggtgcccctcactgcccttagctctgccttgcagagtgtgcaggcgattcgtaggggggattctgaggaactagataagcagggttcctggggccacagacaggcctgcrcattcccaatactcaggctctgctcttgcgtgaactgggctcaacattcctgttatttgaggtttcttgcgggcagggtacaaaactttggagcctgagagatggttctgcctatatagtttacctgattgattttggaggcaatgtgcagtgacccttgacctcttccgctggttagaggtgagaagagggagaaaaggccgaagaggaagttattgtgaccttggggacatgatgtcggtgatgaggtccaaagaggggcggccctgcctcagcctgtgctagtggcctgtgcccagggatgctttcctggactggaggctcaaggaatggagatgggctcctctacccctgcccagccagccttctctcattcattcatccacttagcaacaatttattgagcac

SEQ ID NO: 48500 - DNA, 536 bp, Homo sapiens
attctcattcccattccactattgctagctggttatccctgtgcaaagtacttcatctttgaaagtctgagtatattcttctataaaaaagagacaataattcttatcttgcaaggttgttgagagaatcagtgatgaaaactatttgtgtctagatgatgcccaactctgtccttagcatgagtggctactgaattaatatcagaattttctttcattaattttgttaatttactaagagcaaggtgcctggcacagtggctcacacctgtaatcccagcactttgggggaccgaggcaggcagatcacgaggtcaggagtttaagaccagcctgaccaacatgrtgaaaccccgtctctactaaaaaatacaaaaattagccagacgtggtggtgcatgcctgtaatcccagctactcaggaggctgaggcaggagaatcgcttgaaccagggatgcagaggttgcagtgaaatgagatcgcgccattgtactccagccagggtgacagagtgagactccatctcaaaaaaaaa

SEQ ID NO: 48501 - DNA, 536 bp, Homo sapiens
attctcattcccattccactattgctagctggttatccctgtgcaaagtacttcatctttgaaagtctgagtatattcttctataaaaaagagacaataattcttatcttgcaaggttgttgagagaatcagtgatgaaaactatttgtgtctagatgatgcccaactctgtccttagcatgagtggctactgaattaatatcagaattttctttcattaattttgttaatttactaagagcaaggtgcctggcacagtggctcacacctgtaatcccagcactttgggggaccgaggcaggcagatcacgaggtcaggagtttaagaccagcctgaccaacatggtgaaaccccgtctctactaaaaaatacaaaaattagccagacgtggtggtgcatgcctgtaatcccagctactcaggaggctgaggcaggagaatcgcttgaaccagggaygcagaggttgcagtgaaatgagatcgcgccattgtactccagccagggtgacagagtgagactccatctcaaaaaaaaa

SEQ ID NO: 48502 - DNA, 1277 bp, Homo sapiens
gtgagggtgtgagggtcgcgctccygctgtctggactttttctgtcctactgagacacggccggtaggtccgcaggccagtcttcccaggggttgaagtgtgagtgagtgtgaggaggagccagcggccgtctggagcatggggcagcgtggtccgtggcctcagaggccgatgggtctcaaggtgatcgtccttctcctcgtgaggtggcaccgccatgggccttgttgtagtggggtcagaacgagggaagaaggtgggccgcgtagttgagaaggctcaggtgaagatggggtaagtgctgggggtgctggagcaggtatcggagtccgtggaaccctcgacagaggacagattctggactcctccgtggcgacccaggaaggagcggggtgggcattaaggaagggaactggaaacgctgcaggttggtgatcgcggccctgaggtctgtagagtgccccgcagaggtgtccagtgaggagtgcccagcaatgtgtggcaacttctcaacttcaccgtggaggtttgaatgagcggggctctgcgttccaacgaaacttgattttatgggggaaatgggcctagcaaatgggtgtgtgataaaagccttgatcactgcagttttaattctctggctgtattttcctaaatgtctccacggaggagagttcagttctgaaaccaaaccttatcagaaatatcctgtatcttttgccaggagccttaagacatatctagtcaaaaaatgtcattgttacaagaaaaaagtatttaaatggtataagtgatctaagatataggtcccagaaaagttcagttcataagtcctgaatttcattattggttgaaacttctggacagattatctaaggatttctttgattttctcttgtacagctctgaattacagccttcactcccagaaatttgtctcctaacctcctccatattgtgagctgtagggagatctgtattttataaatgtttgggtctcccacaattcctgactcagaataataataaataatgaatgcttatagtatagttatatgaccatattatatatcataaaatacctttttttcccctaggaatgaaaggtcaggtttcagtggcagtgaaggtaataggcaactacccagataaagtaaatagaaaataatttataaagtgtaaaaaccagattgttgagttatctcaattatttatttattttttattatactttaagttctagggtacatgtgcacaacgtgcaggtttgttacacatct

SEQ ID NO: 48503 - DNA, 1277 bp, Homo sapiens
gtgagggtgtgagggtcgcgctcctgctgtctggactttttctgtcctactgagacacggccggtaggtccgcaggccagtcttcccaggggttgaagtgtgagtgagtgtgaggaggagccagcggccgtctggagcatggggcagcgtggtccgtggcctcagaggccgatgggtctcaaggtgatcgtccttctcctcgtgaggtggcaccgccatgggccttgttgtagtggggtcagaaygagggaagaaggtgggccgcgtagttgagaaggctcaggtgaagatggggtaagtgctgggggtgctggagcaggtatcggagtccgtggaaccctcgacagaggacagattctggactcctccgtggcgacccaggaaggagcggggtgggcattaaggaagggaactggaaacgctgcaggttggtgatcgcggccctgaggtctgtagagtgccccgcagaggtgtccagtgaggagtgcccagcaatgtgtggcaacttctcaacttcaccgtggaggtttgaatgagcggggctctgcgttccaacgaaacttgattttatgggggaaatgggcctagcaaatgggtgtgtgataaaagccttgatcactgcagttttaattctctggctgtattttcctaaatgtctccacggaggagagttcagttctgaaaccaaaccttatcagaaatatcctgtatcttttgccaggagccttaagacatatctagtcaaaaaatgtcattgttacaagaaaaaagtatttaaatggtataagtgatctaagatataggtcccagaaaagttcagttcataagtcctgaatttcattattggttgaaacttctggacagattatctaaggatttctttgattttctcttgtacagctctgaattacagccttcactcccagaaatttgtctcctaacctcctccatattgtgagctgtagggagatctgtattttataaatgtttgggtctcccacaattcctgactcagaataataataaataatgaatgcttatagtatagttatatgaccatattatatatcataaaatacctttttttcccctaggaatgaaaggtcaggtttcagtggcagtgaaggtaataggcaactacccagataaagtaaatagaaaataatttataaagtgtaaaaaccagattgttgagttatctcaattatttatttattttttattatactttaagttctagggtacatgtgcacaacgtgcaggtttgttacacatct

SEQ ID NO: 48504 - DNA, 1277 bp, Homo sapiens
gtgagggtgtgagggtcgcgctcctgctgtctggactttttctgtcctactgagacacggccggtaggtccgcaggccagtcttcccaggggttgaagtgtgagtgagtgtgaggaggagccagcggccgtctggagcatggggcagcgtggtccgtggcctcagaggccgatgggtctcaaggtgatcgtccttctcctcgtgaggtggcaccgccatgggccttgttgtagtggggtcagaacgagggaagaaggtgggccgcgtagttgagaaggctcaggtgaagatggggtaagtgctgggggtgctggagcaggtatcggagtccgtggaaccctcgacagaggacagattctggactcctccgtggcgacccaggaaggagcggggtgggcattaaggaagggaactggraacgctgcaggttggtgatcgcggccctgaggtctgtagagtgccccgcagaggtgtccagtgaggagtgcccagcaatgtgtggcaacttctcaacttcaccgtggaggtttgaatgagcggggctctgcgttccaacgaaacttgattttatgggggaaatgggcctagcaaatgggtgtgtgataaaagccttgatcactgcagttttaattctctggctgtattttcctaaatgtctccacggaggagagttcagttctgaaaccaaaccttatcagaaatatcctgtatcttttgccaggagccttaagacatatctagtcaaaaaatgtcattgttacaagaaaaaagtatttaaatggtataagtgatctaagatataggtcccagaaaagttcagttcataagtcctgaatttcattattggttgaaacttctggacagattatctaaggatttctttgattttctcttgtacagctctgaattacagccttcactcccagaaatttgtctcctaacctcctccatattgtgagctgtagggagatctgtattttataaatgtttgggtctcccacaattcctgactcagaataataataaataatgaatgcttatagtatagttatatgaccatattatatatcataaaatacctttttttcccctaggaatgaaaggtcaggtttcagtggcagtgaaggtaataggcaactacccagataaagtaaatagaaaataatttataaagtgtaaaaaccagattgttgagttatctcaattatttatttattttttattatactttaagttctagggtacatgtgcacaacgtgcaggtttgttacacatct

SEQ ID NO: 48505 - DNA, 609 bp, Homo sapiens
ccttttcccaatttttttctgagactcactgggacctgcttacaaataactgtgagtcagttattttagaagaaacagaaattcatacctttggtgtggatcctactgaagctgatacccagataactttatctgtcaggtacatccagtcaggtgcttaccagttcattgaagcccaatctctgtaagtcactgtgagcagcctcaagtgccccaggagattcatagagataaggcttacttaaaatttgtttctcccwgtccttttgcttcccttgctgatttcatcactatcaccactatcttttgcactagttttgtccacccatgaggtttcatctcagtgacgaggagaacatgtctttcctcagtgtaacactcaggagggagagacctaggataaaactacttgggccctaatttttaatagttacaatagtttaactctctggatactgttgtagtcagttcaggatgctataacaaagtaccatagactgatggcttataaacaacagaaatttatttcttacactcctggaggctggaatttcaagttcagggttccagcgtggttgagttctgttgagggtcctcttcaggtctgca

SEQ ID NO: 48506 - DNA, 609 bp, Homo sapiens
cagacatttcaggaaagctgtgcatcagaaaattctgatctcaactgaattgtaagcacagatggaatgaatctgctggcctaagtggggattcaaatgactcgctgcgacttggaacacctgcacatggcagtgtgagggtacctctcattttattgctttctttatgggagttccaaatgtaaggacagcttaaaaaggaaacaatttggtctcaggggatctataattgtattggggctgtcaagaaaggacaagggaggcaatgggacacccccagtactttccaacctccctctcttggttagtccctgaacaacctgcyttgttggagctgggacaccacctacatcttcaaagtcctctttctgtggtgtgaagagaggttggggcatcctaaaggtggccctgaaatgtagccggaggtcagggaaaagccaatgacctctagcttcttcttcttggttcctctcccaaccccctgcacacctggatttcctggatggctacttattgggctgacccaggcacagctttgctccttgtggtgatggatgggggatttcccatcaaatcagcccttggtactgtgatttgctctggagttat

SEQ ID NO: 48507 - DNA, 542 bp, Homo sapiens
aggaacagttaaagagtgttagctaattcttttttattccatttgagaataggtaggtagatttgtaatataccaaagaagatgtttttgttttgaggtatgtatgtttcaatgtgggtccttaaactgtgcttaaatacaaggcttactatctgaggaactcctggaaatgtagaagaaacatatttaaaacctgaaattgaaagtggtactatagctctcttttactatgtgatgcatatgatactttcctggtcctacttttttaaatcagaggagacaagcaaggaatgcatgtagtraagtaggaaggcttttgtgaaaaaatatgatactttaagtatgactcactcacatgtatgaatttggcctggggccttttgagtacgttataactttgtagtagatttctgtgaatgacttattttggtggtcttttgatgagtttataagaaaaagcaaaatatagtatatttcttttgcaacatttaggtcagttagcaaaatgatgtgtataactttagtctttgttggcttttaaa

SEQ ID NO: 48508 - DNA, 542 bp, Homo sapiens
aggaacagttaaagagtgttagctaattcttttttattccatttgagaataggtaggtagatttgtaatataccaaagaagatgtttttgttttgaggtatgtatgtttcaatgtgggtccttaaactgtgcttaaatacaaggcttactatctgaggaactcctggaaatgtagaagaaacatatttaaaacctgaaattgaaagtggtactatagctctcttttactatgtgatgcatatgatactttcctggtcctacttttttaaatcagaggagacaagcaaggaatgcatgtagtaaagtaggaaggcttttgtgaaaaaatatgatactttaagtatgactcactcacatgtatgaatttggcctggggccttttgagtacgttataactttgtagtagatttctgtgaatgacttatkttggtggtcttttgatgagtttataagaaaaagcaaaatatagtatatttcttttgcaacatttaggtcagttagcaaaatgatgtgtataactttagtctttgttggcttttaaa

SEQ ID NO: 48509 - DNA, 1427 bp, Homo sapiens
tcttccaattcactagctctctcttcagctatgtgtaatatgctattaaacacatctattctctccttaattttgatttctgtatttttgaattcaggtgttggtatttttgatttttataaggttttcatcttttgacaacttttataattctgactatgacattcaacttactagctactacaactaataattagggaccactcctcctagcccctccaagtcttctacaaatttaatgagcaaattgtttttggacttttcaagtaaatataacaaatacatattcaacggctctgaggtccaggtgttgtgggaaatacataaacaccccgaggagctgacagcaatgacattagtgagaccaatatttcaacaacaaaaatggaattcakaaggaggccagagtgaaactacttcaggggaatctaaagaacaagagcaaaggatgttgaaacccttggaatgtctgacaaatgcaccacacacattttcttttccttccaaatatgaaattgggcttaattatcaggtgatgtgattcctaattatattgcactatattattaatactactaaaattctaatttgtttaattgcctatataaacaattatctcaaagttaataaaaagcatcaaagaaaaaacatccttttgaatgaggtcatgtcctttgcagggacatggatggaactggaagccattatccccagcaaacaaacacaggaacataaaaccaaacactacatgttctcactcataagtgggagctgaacaatgagaacacatggacacagggaggggaacatcacacaccagggcgtgtcaggggtcggggggcaggggggcggagagcatcaggaaaaatagctaatgcatgctgggtttaatacttagatggtaggttgataggtgcagcaaactaccatggcacatgtttacctatgcaacaaacctgcacatcctgcacaagtaccctagaacttaaaagaaaataaatcatttccccattttgattgctttgtcatttagatcaattatgaaagtcctgttttattttgggaaagacattactcagaagtacttatgtggattaatctttatagaaaatatttagttattaccaatatgcactgagaaaaagctgcaaaagaagagatgtggagagtatttagatgcttccaggataataactgagaggaaaagccacactctccagttcatcagaaaagagtttgattattccttcatgaatcttccttgtgaatctcccaggaagcttcgtgaagctccctgagtttggtaccgcagaagaagccctccaaagtaacgcatacagtagaaaacaatggatttgaaaacaaatgcaaattttactatttgagcggggctctagaggacattccagtctaagattatcctttca

SEQ ID NO: 48510 - DNA, 1427 bp, Homo sapiens
tcttccaattcactagctctctcttcagctatgtgtaatatgctattaaacacatctattctctccttaattttgatttctgtatttttgaattcaggtgttggtatttttgatttttataaggttttcatcttttgacaacttttataattctgactatgacattcaacttactagctactacaactaataattagggaccactcctcctagcccctccaagtcttctacaaatttaatgagcaaattgtttttggacttttcaagtaaatataacaaatacatattcaacggctctgaggtccaggtgttgtgggaaatacataaacaccccgaggagctgacagcaatgacattagtgagaccaatatttcaacaacaaaaatggaattcagaaggaggccagagtgaaactacttcaggggaatctaaagaacaagagcaaaggatgttgaaacccttggaatgtctgacaaatgcaccacacacattttcttttccytccaaatatgaaattgggcttaattatcaggtgatgtgattcctaattatattgcactatattattaatactactaaaattctaatttgtttaattgcctatataaacaattatctcaaagttaataaaaagcatcaaagaaaaaacatccttttgaatgaggtcatgtcctttgcagggacatggatggaactggaagccattatccccagcaaacaaacacaggaacataaaaccaaacactacatgttctcactcataagtgggagctgaacaatgagaacacatggacacagggaggggaacatcacacaccagggcgtgtcaggggtcggggggcaggggggcggagagcatcaggaaaaatagctaatgcatgctgggtttaatacttagatggtaggttgataggtgcagcaaactaccatggcacatgtttacctatgcaacaaacctgcacatcctgcacaagtaccctagaacttaaaagaaaataaatcatttccccattttgattgctttgtcatttagatcaattatgaaagtcctgttttattttgggaaagacattactcagaagtacttatgtggattaatctttatagaaaatatttagttattaccaatatgcactgagaaaaagctgcaaaagaagagatgtggagagtatttagatgcttccaggataataactgagaggaaaagccacactctccagttcatcagaaaagagtttgattattccttcatgaatcttccttgtgaatctcccaggaagcttcgtgaagctccctgagtttggtaccgcagaagaagccctccaaagtaacgcatacagtagaaaacaatggatttgaaaacaaatgcaaattttactatttgagcggggctctagaggacattccagtctaagattatcctttca

SEQ ID NO: 48511 - DNA, 1427 bp, Homo sapiens
tcttccaattcactagctctctcttcagctatgtgtaatatgctattaaacacatctattctctccttaattttgatttctgtatttttgaattcaggtgttggtatttttgatttttataaggttttcatcttttgacaacttttataattctgactatgacattcaacttactagctactacaactaataattagggaccactcctcctagcccctccaagtcttctacaaatttaatgagcaaattgtttttggacttttcaagtaaatataacaaatacatattcaacggctctgaggtccaggtgttgtgggaaatacataaacaccccgaggagctgacagcaatgacattagtgagaccaatatttcaacaacaaaaatggaattcagaaggaggccagagtgaaactacttcaggggaatctaaagaacaagagcaaaggatgttgaaacccttggaatgtctgacaaatgcaccacacacattttcttttccttccaaatatgaaattgggcttaattatcaggtgatgtgattcctaattatattgyactatattattaatactactaaaattctaatttgtttaattgcctatataaacaattatctcaaagttaataaaaagcatcaaagaaaaaacatccttttgaatgaggtcatgtcctttgcagggacatggatggaactggaagccattatccccagcaaacaaacacaggaacataaaaccaaacactacatgttctcactcataagtgggagctgaacaatgagaacacatggacacagggaggggaacatcacacaccagggcgtgtcaggggtcggggggcaggggggcggagagcatcaggaaaaatagctaatgcatgctgggtttaatacttagatggtaggttgataggtgcagcaaactaccatggcacatgtttacctatgcaacaaacctgcacatcctgcacaagtaccctagaacttaaaagaaaataaatcatttccccattttgattgctttgtcatttagatcaattatgaaagtcctgttttattttgggaaagacattactcagaagtacttatgtggattaatctttatagaaaatatttagttattaccaatatgcactgagaaaaagctgcaaaagaagagatgtggagagtatttagatgcttccaggataataactgagaggaaaagccacactctccagttcatcagaaaagagtttgattattccttcatgaatcttccttgtgaatctcccaggaagcttcgtgaagctccctgagtttggtaccgcagaagaagccctccaaagtaacgcatacagtagaaaacaatggatttgaaaacaaatgcaaattttactatttgagcggggctctagaggacattccagtctaagattatcctttca

SEQ ID NO: 48512 - DNA, 1024 bp, Homo sapiens
taccgcatttacctgttgattgtattccaagctagcccataagcaccgtgcactagagaccccactcaatcttgctaactgctcactccctagtccccagcacaggcttggccctgccaatacttgctgagtgatccattagcgagcaggtgggtggcctgggtcgactctgagagccctccccaaccccctgccccaggcctggagaggccaccgatgcgtggggagggcaggcaggaaaagagccttccatagcccacgtctacttggagagaaaaggatgggcacaagcaatggccaaggtgctctgccaaggagacggggtcagcaggcactgctcattcccagccaagagccactggacgtgccgggcaatggagggtagggagggcacttcaacctccttagagccttccagccacagtccaaggccacacaggagagaagcctttgagacagaagtaccaaccctcactgctcccagcacaacgccaattcctggctcatcaccaggcgttatttcctctctggtcagtccaagccacaaggatggtatcgagtcactgtcaatggatttttttttttttttttttttttgagacagagtcttgctctgtagccctggctagaatgcagtggcaccatcttgtctcactgcagcctctgtgtcctgagttcaagcaattctcctgcctcagcctcctgagtagctgggactacaggcatgcaccaacatgcctggctaattttttgtatttttagcagagacggggtttcaccgtgttgcccaggctggttttgaactcgtgaactcaggcaatctgcccrcctcggcctccttgggattacaggcatgagccacagtgcctggcctgtcactgcatcttcgtatcaaggaggctgcagggaatgaagcagactacagtgaaatagaggggccacaccctgttacaagagggcagctctgacttaggtccaagtcataggaggatggggaccaagggttgtcagaccttcagatttc

SEQ ID NO: 48513 - DNA, 502 bp, Homo sapiens
taatcagttatgggctcacttgctcattccactcttaacagcaatagcatgtttgttgtccactcttctattatagattatggcatggaaatcatagctatgatttttattttgaagacaaatccagagaaaatatattacttgtttcttaggtatgtctgtttctgtaagcttyattagacctttctgattaaaattataataatccacaaagatcctttctctattataaactgaggagcaggtggtaggattctacacaccagaagaaatgcataccactcagaaaatgtaatcttttcctgaggaacttttctgtacatgttatgtacaaaatgtacgatgacaaaatcttgaacagtactgatgtgagctagtgcttcaagttattattaatggttttacatagtaagtgtcatagggatttgcaatagagggccctatttttggcccagattctaagcagaaatagctgcttattagatgttggacactggtctaa

SEQ ID NO: 48514 - DNA, 502 bp, Homo sapiens
taatcagttatgggctcacttgctcattccactcttaacagcaatagcatgtttgttgtccactcttctattatagattatggcatggaaatcatagctatgatttttattttgaagacaaatccagagaaaatatattacttgtttcttaggtatgtctgtttctgtaagctttattagacctttctgattaaaattataataatccacaaagatcctttctctattataaactgaggagcaggtggtaggattctacacaccagaagaaatgcataccactcagaaaatgtaatcttttcctgaggaacttttctgtacatgttmtgtacaaaatgtacgatgacaaaatcttgaacagtactgatgtgagctagtgcttcaagttattattaatggttttacatagtaagtgtcatagggatttgcaatagagggccctatttttggcccagattctaagcagaaatagctgcttattagatgttggacactggtctaa

SEQ ID NO: 48515 - DNA, 524 bp, Homo sapiens
ggaaagtaaaagacaaattagttctacagaaaaaaagtctgttcctctctctccagacactttcttttttgagggggaagggaaaaaggaaatcagaaaacaatagaaagtctaaacaaaacatggaatgcaaaaaaaaaaaaaaaaaaagaaaaggaaaaagacctatatggccaaaattttacatataatttcaagaaatgtattagccccatattaggaacccatatattgcattctggtgagagaaagtcactattattatagacagtttcagagctgacatataaagctacatcacataatatcaaatgaattaacttttagcatagcaacccaaacttctcaattcacgaaggtaaaggtagacaagcrcactgtaacacaaagaacttccactttgagatgaaacattctggatttaaaaccctgactgatcactaattctagcccataagtacatcatgaaggccgagacaatgtattgtattttaacaaaaagggtatactatacacataaacat

SEQ ID NO: 48516 - DNA, 303 bp, Homo sapiens
ccatgggacagggccccgcagagctgaatgcctcgctgaagaccccataactgaggcggaaagcttcaggagggaccaggtaatggtcaatggggtggggtctcttcaggccgagaaarccccctgagcaaacatgactgccagacagtcactggcccggccaggcctggcatggagggaggggtgggaatatggctggatgtggggtgggactgcaagtggaggtgtggtgggagctgggcactgggcgaagccatgtggtgccccaggcagcaccggaaggcgctacatgatcagatcact

SEQ ID NO: 48517 - DNA, 585 bp, Homo sapiens
caacttagcaccataatttacagacataatgttttctagttttgatctgacaacttaaatctaacaattaataagataatttataaataatcaggcccattaggacagaaatgctttccatagcaattatgtgcagctaaatgtttcctcaaggaaacatttgactctatgtccatgtgcatgcatatggaaatatagtgttatttagatataaactaatatctattgtttaagctaatattatataatagatatctgagtattcagaaacaacttaaaaatgtgcttttagtcaaaaggataattcctgaaatttattacmttcatttaaaaaatataaatttccttatgtacttcaaaaagaataaagttatggagctgtgtaaatttctctattgagaaaaatcaatattttataaatatttttaaattatagaaaaagtaaggttaatatttgatgttttatacctaaactttcaaaaatataatgttctcttgcgtctgttttcttttaaaatctggttacactgacttcagatataattaagaactctgctttgttatatttggaaaatcaaaacatac

SEQ ID NO: 48518 - DNA, 543 bp, Homo sapiens
atttttgtatggattttattgatctctyagcgatatctgtcacattttctactgtggttcctaaaacctttgatacccagtgtctccagtacagtgtcactgtaataacatatcttctatcgtaggtctgcacttactctttacagtttcagtgtacaatttacagtttcagtgtactttcaaaataagtatcttaaagaataagatatcttattcttacaggaatctgagatatgtagcacatactttaactattttggagaagggagaaatgctgagtgttccagcagctatcataataacccttgcatatttttcagtagcataagattagaattatgggaacaagaaggagatgcagccatgtgggatggaggagaagcaagagaagtgaatgctgtgttggggctggggggacccaatgctaaggacaactgacaatcacttcaacatctcccatctgccaacctcactagcaacatcacttctatagtaaactaccatctggcatggctaagaaatgagatgttttactaaataacg

SEQ ID NO: 48519 - DNA, 1902 bp, Homo sapiens
attatgcttttctccattttattttgtcagaccacacttactttttgcatgtcaaataaaaaaaaattatcttccgatgtcccccttctcattttctattttgtatcacttttatttatcatcattttatggggtctcaggaagaagagrcagtaaatacatgtgctcggttagctagctttaatcaaaaatcctaaacgtaggttttaaaaaagataactggagcagggcaggaaataatattttttgccagtgtggtggcaaaaaataaaaaacaaaaatctgaatctgtgttaggacagtatttccgtgtataacatagcgcttagcaacttaattctccagatccacatattttaaggacatgatgtatctcagacacctacttcaaacctcactttacagttaagtaagaccacaagtagaatgaattgcctgaggccacacaagtagacagtgggagaatgagaacagaaatatctattgactcctagttgaattttctcttaccttaccacactgctagggagtaacaagatgggcagatcacgagtcagatgagaaaggtcatgaaaaatagtcaaaggatgacttttcctgggtaaatagccggatgtccaagaaatgaaaggctggtctggcagcagcacatcgtctaacagttggtagtcatatgtgggaagtactgaagggggagatgacagcaggcccagaaactgcaatgatccaagtgcatgtcgatcctgggagggaacagttaagagtccgggcaggatgaaacagtagaaactggtgagtgaatgaatgtgaaggctgaggagcgactgcaatttgttaatgggattatgaggcagtataaagtggttaattacggtggcggaggtaagcaggagtaaaatgatggcttttaactcctctcaaggacaccgaaaattattttaataaacactggaaggctgggaataaatataattcacaccattcttactttcttggtttagagatagcttatctacatccttaaattaatggctgtagctaccctctgcatggctccaaaaaaaaaacaaaaaacaaaaaacaaaaccaaagccggctgcgagtctgcacgagaaaatcgggttgcaccaggccccagccgcccgccgattcgcttagctgtcggaggctaaataaacagctcccgaagcagcgtttggcacagcgcagggtcggaacgtggacactaatttccgcccacgctccccgcgtcctggcgggatcaccacagacacgacgtccattgctggggtcctcggcgatgcccgtgtgcgcagccccgcgagtctcaggtcagaagaccactaatttcgcggccgcgttccacgaagctaaggggcaaaaaaccagctttcttgggacaaagcgtccccccagcagccagggtcgatcccggcgctgctcccgcggcgcttggctgccccgggcgtaacgggccacgagaagtagggggtggggcgccgcttaggtttgggaagacacgaagcggctcctcgggcttccagcgtccacttcctacggcaagcaggaggagacaagcgccaccctgcgctcgcggagccgaccccggctctcccctcccgtggccgcaggggtcgtgtgtgtgtgtgtgtgagtgtgtgtgtgtgtgcagggacgctccgcgcccatcactctgtttcggtgctaatcgaccgccgtggcgccgatttcccccgcttcccagttcctcacccgcgtgccccggaaggcgcccggaggcccccgggccgccgcgtcacgctcccgggaggctgagggaaagggaggcagccgagccgggagcccggggaggcgcgctgcgccccgcggcggggctgggggcggggctaggtgtctcgcgca

SEQ ID NO: 48520 - DNA, 2524 bp, Homo sapiens
gaaagaaagaaagagatacccaagacaggaaaaacaaaaaggaaaactaaggtaccctaggaaagaccaaaatgtaaatcataatatactacgtgcctcagttttaaaaatgtagacctagatataattatattggaaggacagaaagaagkaagtgtgtgtgttggtttgtgtaaaaacactaattcctcatcatctatgataagatgtcaacagacaacgcccaaataagaaaaataatacaacaataatataagaatgtcatttggaaagataaaaataaacaacagtagaaacaaccaaaagagatgaaagtggtcatctcagaggaagaggaatcagagttagaaaagaataagagaagtgactattattctaagacatgtaagtattatttgtgtaaataatataaaatacatagttctgatataaaatcaaaagaaaattgaaaaatatgttaaaagagtatcttgcactatgaagaaatcaatagggatctaaagaccttctggaaatagttacaagtgtcattgtttagataactgatatctaaatatgtaagttaactgtttactgtgaaaagagaaaagcagaccaggcaaacacatcttcaggcagtgctcatgatcagaaaaaagaaaggtaaagagaacaaaacatgtatggattatacatcattgtgctcttcagctttttattcaaaagtcctatgaatttcttcacggcaatattttacagaagtgggtcagaattatgataagaaattcctttcaagtcttttgataaccatgggatgttctaaataacaacattttttaaaagggacaatattatcacagtaagttcttccataaatcctgaagattctgaagatttaaaaatctctaatctgtcaatgccagactttgagttgaagaagtgacagttgtcaccagcttccttgaaagtgagtgagccaataagatgtcatattagacttgagaatcatgaaatgcaacagacttcacatacttctgctctgaggaccacatcgatgaagtaaggggatgtgctaaaacccctggaaagtgcttcctggtggcccaagtgtaagagtgattctaccatgtgtagcctgaggcttggaatacatgctttacatgctaaagtacattttctccttcaaaaagtccatattcaccaaccttcatgataaactatgagacagtaagagccattctgagtctgtaatgctgaagaaatctacatatactatgtactatccctaattcctcctatccctatattccttaggtttgaaggatctgaagcatctggaaattaggaagttgacttactggaactaaatgtagctagagattaagataggacatgccacacttaatttgagaaaatcatacctgttgtttataggcattcttaatctgccgctagcttagaagaaaatattcttctttagctaatatactatttgtactgtccaatgcagaagccactagcaacaactagctactgggtgattaaacgtggctagtccaaactgagatgtgctataaacacacctaaatttcaaaaacttagtcttaaaaaaaggaggtacaacacttctttaataattttcatattgattatatgttgaaataatattttggatatatttgattaaagaaaacattattaaaattaatgtttccttttagtttttttaatgagactattagaaaattcaaaattatacgtgtggctcacattgtatttctactggagaatgtggcactagttagagcagttttttacataggaaataaatctataaaaggctatatgacacatcatgttttacatacatttgtaactcttttcccagcttacaggctgtcagcagacaaatatgagttatataggtaataaacaccaacaaaagctccaatgttacccaaccctgataattaccatggtgataatatgaataaaacaatttaaaatagcatttattactctaacagagaaaaccaaactgtggatttagaggggaaaaatcagactatggtagatcaccttaatactaaaaatataaaatatctgtaatcattgttcattgttgtattaatgagttacttcgaaacttagcagcttaagaaaacagtgaatactgattatctcacacagtttgtgtgggtcaagaactcaaaagcagcttagctaaacagttctggtgccagggtctcttatgaggtggtagtcaagatgtcaaccaggattcagtcctttgcttccacttacatggctggcaaggtggtgcagctagtggcaagaggcctctgttcctctccaccgggctgcttgagtgtcattacaacacggaggctggctctcaccagggcaagtgattcaggagtgcaaggcagttgcatcagtatcttttgtgatgtagcttcagaagccggcgccatcacttctgccttcttgtacggttcatacagaccaatcctgacagggtgcgggagaggactacacaagggca

SEQ ID NO: 48521 - DNA, 2524 bp, Homo sapiens
gaaagaaagaaagagatacccaagacaggaaaaacaaaaaggaaaactaaggtaccctaggaaagaccaaaatgtaaatcataatatactacgtgcctcagttttaaaaatgtagacctagatataattatattggaaggacagaaagaagtaagtgtgtgtgttggtttgtgtaaaaacactaattcctcatcatctatgataagatgtcaacagacaacgcccaaataagaaaaataatacaacaataatataagaatgtcatttggaaagataaaaataaacaacagtagaaacaaccaaaagagatgaaagtggtcatctcagaggaagaggaatcagagttagaaaagaataagagaagtgactattattctaagacatgtaagtattatttgtgtaaataatataaaatacatagttctgatataaaatcaaaagaaaattgaaaaatatgttaaaagagtatcttgcactatgaagaaatcaatagggatctaaagaccttctggaaatagttacaagtgtcattgtttagataactgatatctaaatatgtaagttaactgtttactgtgaaaagagaaaagcagaccaggcaaacacatcttcaggcagtgctcatgatcagaaaaaagaaaggtaaagagaacaaaacatgtatggattatacatcattgtgctcttcagctttttattcaaaagtcctatgaatttcttcacggcaatattttacagaagtgggtcagaattatgataagaaattcctttcaagtcttttgataaccatgggatgttctaaataacaacattttttaaaagggacaatattatcacagtaagttcttccataaatcctgaagattctgaagatttaaaaatctctaatctgtcaatgccagactttgagttgaagaagtgacagttgtcaccagcttccttgaaagtgagtgagccaataagatgtcatattagacttgagaatcatgaaatgcaacagacttcacatacttctgctctgaggaccacatcgatgaagtaaggggatgtgctaaaacccctggaaagtgcttcctggtggcccaagtgtaagagtgattctaccatgtgtagcctgaggcttggaatacatgctttacatgctaaagtacattttctccttcaaaaagtccatattcaccaaccttcatgataaactatgagacagtaagagccattctgagtctgtaatgctgaagaaatctacatatactatgtactatccctaattcctcctatccctatattccttaggtttgaaggatctgaagcatctggaaattaggaagttgacttactggaactaaatgtagctagagattaagataggacatgccacacttaatttgagaaaatcatacctgttgtttataggcattcttaatctgccgctagcttagaagaaaatattcttctttagctaatatactatttgtactgtccaatgcagaagccactagcaacaactagctactgggtgattaaacgtggctagtccaaactgagatgtgctataaacacacctaaatttcaaaaacttagtcttaaaaaaaggaggtacaacacttctttaataattttcatattgattatatgttgaaataatattttggatatatttgattaaagaaaacattattaaaattaatgtttccttttagtttttttaatgagactattagaaaattcaaaattatacgtgtggctcacattgtatttctactggagaatgtggcactagttagagcagttttttacataggaaataaatctataaaaggctatatgacacatcatgttttacatacatttgtaactcttttcccagcttacaggctgtcagcagacaaatatgagttatataggtaataaacaccaacaaaagctccaatgttacccaaccctgataattaccatggtgataatatgaataaaacaatttaaaatagcatttattactctaacagagaaaaccaaactgtggatttagaggggaaaaatcagactatggtagatcaccttaatactaaaaatataaaatatctgtaatcattgttcattgttgtattaatgagttacttcgaaacttagcagcttaagaaaacagtgaatactgattatctcacacagtttgtgygggtcaagaactcaaaagcagcttagctaaacagttctggtgccagggtctcttatgaggtggtagtcaagatgtcaaccaggattcagtcctttgcttccacttacatggctggcaaggtggtgcagctagtggcaagaggcctctgttcctctccaccgggctgcttgagtgtcattacaacacggaggctggctctcaccagggcaagtgattcaggagtgcaaggcagttgcatcagtatcttttgtgatgtagcttcagaagccggcgccatcacttctgccttcttgtacggttcatacagaccaatcctgacagggtgcgggagaggactacacaagggca

SEQ ID NO: 48522 - DNA, 1238 bp, Homo sapiens
tggtggattgcctctccttttcctccctggccgactgccctccctctgccacttcttcagtcctctcccacctcatcccccgagaccgggctagagcccatcctcctacttctgtggcatctggggctcacctctagcaaacactgtggttgatctacttctctgtcccacccactcaaccatgaactctctgaggacagggaccgtgttttgtgatacttgcatcccttgaactagattgtgggaaggagggacctgggcgatatttaatagctggtgaaacctgtgtaccggccaatcagaactgataccagcctagggtctggaacagggtcttggaaaccccctgccagagtcaagccagtagtcgctgtgtcatgaggagctgtggttggcatcctctaagttgggccctaatgatccctgcttcctagttccacaccctgcatacttccctccccttgagcatggatagcatttgactctctcctaataaatagagtatggctgatgtgacagcacatccactccacatyaggctatcgaaaggctgcgattccttccttaggtgctttccctagaatcttgaggcatccctgttgagggacccgtgtgacgagggacaagccctgccaccaaccaagtgatctcagaagccgaacgccacctaggcaagccttgacatgatgcaggtccagctgctggcttgctggtagcctcatggaaacctcaaggaggaggcacccggctaagccatgtccagattctggacccacagatgaagatgtatcctctggggaggggagtggtgaaaactgacctgctgatgagacttcgccctgtcagttaacattgctaatggtaagaacccagttgcaagacatacaggttgtgaatcttttctatactttattttttttatgttttctttttctgagacagagtctcgctctgttgcccaggctggagtgcaatgacgtgatctcagctcagtgcaacctctgtacccaggttaaggtgaatctcctgcctcagcctcccgagtagctgggactacaggtgtgcaccaccatgcctggctgatttttgtagttctagtggacacgggggttacaccgtgttggccaggttggtctcaaactcctgaccttgagtgatcggccagcctcagcctcccaaagtgctgggattacaggcgtgaggcaccatacccggcccttttctgtactttatgaaat

SEQ ID NO: 48523 - DNA, 538 bp, Homo sapiens
gatgtcggctcactgcaagctccgcctcctgggttcgcgccattctcctgcctcagcctcccgagtagctgggactacaggcgcccgccaccacgcccagytaatattttgtatttttagtagagatggggtttcgctgtgttagccaggatggtctcaatctcctgacctcgtcatccgcccgcctcggcctcccaaagtgctgggattacaggcatgagccaccgcgcccagcccggattttctttaaaaggccttctacagcctagtcccatgccattttccatccttgtatgctactctattcctccaatttataccaaccattgctgtttccaggacacacaatgccatttcacacttttaagtctttcctcatcctgttcttcccagtggaagctcctctctgtccatttctatccttaaaaccctcctcatgtttcaagaaccagttctgactacaccatgaagccttcacggatccctgcctctcatctcccactcccacctcctttcagatgaagtgctccctcatcag

SEQ ID NO: 48524 - DNA, 538 bp, Homo sapiens
gatgtcggctcactgcaagctccgcctcctgggttcgcgccattctcctgcctcagcctcccgagtagctgggactacaggcgcccgccaccacgcccagttaatattttgtatttttagtagagatggggtttcgctgtgttagccaggatggtctcaatctcctgacctcgtsatccgcccgcctcggcctcccaaagtgctgggattacaggcatgagccaccgcgcccagcccggattttctttaaaaggccttctacagcctagtcccatgccattttccatccttgtatgctactctattcctccaatttataccaaccattgctgtttccaggacacacaatgccatttcacacttttaagtctttcctcatcctgttcttcccagtggaagctcctctctgtccatttctatccttaaaaccctcctcatgtttcaagaaccagttctgactacaccatgaagccttcacggatccctgcctctcatctcccactcccacctcctttcagatgaagtgctccctcatcag

SEQ ID NO: 48525 - DNA, 1333 bp, Homo sapiens
gtggaagagaatgaaaccagaatgaggccaaacaagtaaagaggagcatgagatagagatggatcccatggcactgtgcctttgaggccctggtcctgaagtttttttccttgtttctacgcagcatctcattatcctgtgagccatyaaattctgatttttgggctgggtgtggtggctcgcacctgtaatcacagcactttgggaggctgaggcaagacgattgcttgagcccaggagttggagaccagcctgggcaacgtagggagacttgtctctacaaaaaataaaaaaattagccaggtgtggtagcacacgcctgtggtcccaactacttgggatgctgacatgggagggtcccttgagtctggaaggtcaaggttgcagtgagccatgatcacgatactgcagtccagcctgggtgacagagtgagactgtgtctcaaaaaatttttttttaattttgtgtaaaatagcttgatttgggtttttttttttttacttacaactgagaattttgaccagtatatttaatgttagtctgaccatttctccagtgggctttctacgtatttaaaaaatagtttggactttaatctcagggtaaacaatatatataggtacactcagtttatatatgagataatattcaggatcagtggagtgaaaatagtaaagtatcttccatttttcaatggcttagagggaaaagtgttcataatgggtatagaattaatcagtattcctttcccattatttatgcctatacagtgtagaagtttcccttaaagagcttatcaccataataagtacaatagcaaagatataaagtcagtacttttcactgattaggcataaatatcctctttattgttttcttacaaagtagctatgataaacatataaaagggtcagaaagagaggggagaaaaactcggtgaaaagtcagacaagaggaaatgaagaggtgaggtatgtatagtaagcattagtgaacttgtagtaattgctttaggtttcatggattgcccacttgtggattaaatgttagacttctgcaaaatgagttgatggtagagatgaagaaaagtcttaatttgttttttttatgctaaggttaaagttgatgtggctaattaggtattaagatcagttttcctgtctttttattatttatttatgtttatgaatgaatgaatgaagaaatgaatgacaaagtctcgctttgtcacccaggctggagtgcagtggcatgatcatagcacactgctgcctcaaactcctgggctcaaaggatcctcctgcctcccaagtagctgggattacaggtgtg

SEQ ID NO: 48526 - DNA, 1333 bp, Homo sapiens
gtggaagagaatgaaaccagaatgaggccaaacaagtaaagaggagcatgagatagagatggatcccatggcactgtgcctttgaggccctggtcctgaagtttttttccttgtttctacgcagcatctcattatcctgtgagccattaaattctgatttttgggctgggtgtggtggctcgcacctgtaatcacagcactttgggaggctgaggcaagacgattgcttgagcccaggagttggagaccagcctgggcaacgtagggagacttgtctctacaaaaaataaaaaaattagccaggtgtggtagcacacgcctgtggtcccarctacttgggatgctgacatgggagggtcccttgagtctggaaggtcaaggttgcagtgagccatgatcacgatactgcagtccagcctgggtgacagagtgagactgtgtctcaaaaaatttttttttaattttgtgtaaaatagcttgatttgggtttttttttttttacttacaactgagaattttgaccagtatatttaatgttagtctgaccatttctccagtgggctttctacgtatttaaaaaatagtttggactttaatctcagggtaaacaatatatataggtacactcagtttatatatgagataatattcaggatcagtggagtgaaaatagtaaagtatcttccatttttcaatggcttagagggaaaagtgttcataatgggtatagaattaatcagtattcctttcccattatttatgcctatacagtgtagaagtttcccttaaagagcttatcaccataataagtacaatagcaaagatataaagtcagtacttttcactgattaggcataaatatcctctttattgttttcttacaaagtagctatgataaacatataaaagggtcagaaagagaggggagaaaaactcggtgaaaagtcagacaagaggaaatgaagaggtgaggtatgtatagtaagcattagtgaacttgtagtaattgctttaggtttcatggattgcccacttgtggattaaatgttagacttctgcaaaatgagttgatggtagagatgaagaaaagtcttaatttgttttttttatgctaaggttaaagttgatgtggctaattaggtattaagatcagttttcctgtctttttattatttatttatgtttatgaatgaatgaatgaagaaatgaatgacaaagtctcgctttgtcacccaggctggagtgcagtggcatgatcatagcacactgctgcctcaaactcctgggctcaaaggatcctcctgcctcccaagtagctgggattacaggtgtg

SEQ ID NO: 48527 - DNA, 1333 bp, Homo sapiens
gtggaagagaatgaaaccagaatgaggccaaacaagtaaagaggagcatgagatagagatggatcccatggcactgtgcctttgaggccctggtcctgaagtttttttccttgtttctacgcagcatctcattatcctgtgagccattaaattctgatttttgggctgggtgtggtggctcgcacctgtaatcacagcactttgggaggctgaggcaagacgattgcttgagcccaggagttggagaccagcctgggcaacgtagggagacttgtctctacaaaaaataaaaaaattagccaggtgtggtagcacacgcctgtggtcccaactacttgggatgctgacatgggagggtcccttgagtctggaaggtcaaggttgcagtgagccatgatcacgatactgcagtccagcctgggtgacagagtgagactgtgtctcaaaaaatttttttttaattttgtgtaaawtagcttgatttgggtttttttttttttacttacaactgagaattttgaccagtatatttaatgttagtctgaccatttctccagtgggctttctacgtatttaaaaaatagtttggactttaatctcagggtaaacaatatatataggtacactcagtttatatatgagataatattcaggatcagtggagtgaaaatagtaaagtatcttccatttttcaatggcttagagggaaaagtgttcataatgggtatagaattaatcagtattcctttcccattatttatgcctatacagtgtagaagtttcccttaaagagcttatcaccataataagtacaatagcaaagatataaagtcagtacttttcactgattaggcataaatatcctctttattgttttcttacaaagtagctatgataaacatataaaagggtcagaaagagaggggagaaaaactcggtgaaaagtcagacaagaggaaatgaagaggtgaggtatgtatagtaagcattagtgaacttgtagtaattgctttaggtttcatggattgcccacttgtggattaaatgttagacttctgcaaaatgagttgatggtagagatgaagaaaagtcttaatttgttttttttatgctaaggttaaagttgatgtggctaattaggtattaagatcagttttcctgtctttttattatttatttatgtttatgaatgaatgaatgaagaaatgaatgacaaagtctcgctttgtcacccaggctggagtgcagtggcatgatcatagcacactgctgcctcaaactcctgggctcaaaggatcctcctgcctcccaagtagctgggattacaggtgtg

SEQ ID NO: 48528 - DNA, 1333 bp, Homo sapiens
gtggaagagaatgaaaccagaatgaggccaaacaagtaaagaggagcatgagatagagatggatcccatggcactgtgcctttgaggccctggtcctgaagtttttttccttgtttctacgcagcatctcattatcctgtgagccattaaattctgatttttgggctgggtgtggtggctcgcacctgtaatcacagcactttgggaggctgaggcaagacgattgcttgagcccaggagttggagaccagcctgggcaacgtagggagacttgtctctacaaaaaataaaaaaattagccaggtgtggtagcacacgcctgtggtcccaactacttgggatgctgacatgggagggtcccttgagtctggaaggtcaaggttgcagtgagccatgatcacgatactgcagtccagcctgggtgacagagtgagactgtgtctcaaaaaatttttttttaattttgtgtaaaatagcttgatttgggtttttttttttttacttacaactgagaattttgaccagtatatttaatgttagtctgaccatttctccagtgggctttctacgtatttaaaaaatagtttggactttaatctcagggtaaacaatatatataggtacactcagtttatatatgagataatattcaggatcagtggagtgaaaatagtaaagtatcttccatttttcaatggcttagagggaaaagtgttcataatgggtatagaattaatcagtattcctttcccattatttatgcctatacagtgtagaagtttcccttaaagagcttatcaccataataagtacaatagcaaagatataaagtcagtacttttcactgattaggcataaatatcctctttattgttttcttacaaagtagctatgataaacatataaaagggtcagaaagagaggggagaaaaactcggtgaaaagtcagacaagaggaaatgaagaggtgaggtatgtatagtaagcattagtgaacttgtagtaattgctttaggttycatggattgcccacttgtggattaaatgttagacttctgcaaaatgagttgatggtagagatgaagaaaagtcttaatttgttttttttatgctaaggttaaagttgatgtggctaattaggtattaagatcagttttcctgtctttttattatttatttatgtttatgaatgaatgaatgaagaaatgaatgacaaagtctcgctttgtcacccaggctggagtgcagtggcatgatcatagcacactgctgcctcaaactcctgggctcaaaggatcctcctgcctcccaagtagctgggattacaggtgtg

SEQ ID NO: 48529 - DNA, 1333 bp, Homo sapiens
gtggaagagaatgaaaccagaatgaggccaaacaagtaaagaggagcatgagatagagatggatcccatggcactgtgcctttgaggccctggtcctgaagtttttttccttgtttctacgcagcatctcattatcctgtgagccattaaattctgatttttgggctgggtgtggtggctcgcacctgtaatcacagcactttgggaggctgaggcaagacgattgcttgagcccaggagttggagaccagcctgggcaacgtagggagacttgtctctacaaaaaataaaaaaattagccaggtgtggtagcacacgcctgtggtcccaactacttgggatgctgacatgggagggtcccttgagtctggaaggtcaaggttgcagtgagccatgatcacgatactgcagtccagcctgggtgacagagtgagactgtgtctcaaaaaatttttttttaattttgtgtaaaatagcttgatttgggtttttttttttttacttacaactgagaattttgaccagtatatttaatgttagtctgaccatttctccagtgggctttctacgtatttaaaaaatagtttggactttaatctcagggtaaacaatatatataggtacactcagtttatatatgagataatattcaggatcagtggagtgaaaatagtaaagtatcttccatttttcaatggcttagagggaaaagtgttcataatgggtatagaattaatcagtattcctttcccattatttatgcctatacagtgtagaagtttcccttaaagagcttatcaccataataagtacaatagcaaagatataaagtcagtacttttcactgattaggcataaatatcctctttattgttttcttacaaagtagctatgataaacatataaaagggtcagaaagagaggggagaaaaactcggtgaaaagtcagacaagaggaaatgaagaggtgaggtatgtatagtaagcattagtgaacttgtagtaattgctttaggtttcatggattgcccacttgtggattaaatgttagacttctgcaaaatgagttgatggtagagatgaagaaaagtcktaatttgttttttttatgctaaggttaaagttgatgtggctaattaggtattaagatcagttttcctgtctttttattatttatttatgtttatgaatgaatgaatgaagaaatgaatgacaaagtctcgctttgtcacccaggctggagtgcagtggcatgatcatagcacactgctgcctcaaactcctgggctcaaaggatcctcctgcctcccaagtagctgggattacaggtgtg

SEQ ID NO: 48530 - DNA, 1333 bp, Homo sapiens
gtggaagagaatgaaaccagaatgaggccaaacaagtaaagaggagcatgagatagagatggatcccatggcactgtgcctttgaggccctggtcctgaagtttttttccttgtttctacgcagcatctcattatcctgtgagccattaaattctgatttttgggctgggtgtggtggctcgcacctgtaatcacagcactttgggaggctgaggcaagacgattgcttgagcccaggagttggagaccagcctgggcaacgtagggagacttgtctctacaaaaaataaaaaaattagccaggtgtggtagcacacgcctgtggtcccaactacttgggatgctgacatgggagggtcccttgagtctggaaggtcaaggttgcagtgagccatgatcacgatactgcagtccagcctgggtgacagagtgagactgtgtctcaaaaaatttttttttaattttgtgtaaaatagcttgatttgggtttttttttttttacttacaactgagaattttgaccagtatatttaatgttagtctgaccatttctccagtgggctttctacgtatttaaaaaatagtttggactttaatctcagggtaaacaatatatataggtacactcagtttatatatgagataatattcaggatcagtggagtgaaaatagtaaagtatcttccatttttcaatggcttagagggaaaagtgttcataatgggtatagaattaatcagtattcctttcccattatttatgcctatacagtgtagaagtttcccttaaagagcttatcaccataataagtacaatagcaaagatataaagtcagtacttttcactgattaggcataaatatcctctttattgttttcttacaaagtagctatgataaacatataaaagggtcagaaagagaggggagaaaaactcggtgaaaagtcagacaagaggaaatgaagaggtgaggtatgtatagtaagcattagtgaacttgtagtaattgctttaggtttcatggattgcccacttgtggattaaatgttagacttctgcaaaatgagttgatggtagagatgaagaaaagtcttaatttgttttytttatgctaaggttaaagttgatgtggctaattaggtattaagatcagttttcctgtctttttattatttatttatgtttatgaatgaatgaatgaagaaatgaatgacaaagtctcgctttgtcacccaggctggagtgcagtggcatgatcatagcacactgctgcctcaaactcctgggctcaaaggatcctcctgcctcccaagtagctgggattacaggtgtg

SEQ ID NO: 48531 - DNA, 636 bp, Homo sapiens
tttctgcttcctctaagcagtttctctctgataatagttatgtctgtgttctaggtaagttgaacgtgcaagtggccagcagcaaggccatgaagttgttcccctttcatgcagtgatttaacacatttgtctttccccagctgactagttttattagctatggagctgattgccacccacatttttctccctcactttcccatactggcagcccgacagcttgcttttctcccagaggtatgactacraaattcttcatttggattatactttcctgaggccacatcaaagaaggctgaaccatccccagcaatgcccaaacacagtccaacttgcttttccaacaagatatggaggttttgcaatttacttttataggctgtgtacagagctctcatccatcctcagttttctcactcccaaaaccagacccaactgtcatagcctttgccagcctcatgtcatctttggctcaggaatacattttttcccctaattttatgcttttatggctttcttattactgtcagtttataacgcaaaaaaataagtacattattttctaaattttaacacaaacatcacttttattggtttgggagtttttcctcaagctcagtcttccagctaatgtt

SEQ ID NO: 48532 - DNA, 636 bp, Homo sapiens
tttctgcttcctctaagcagtttctctctgataatagttatgtctgtgttctaggtaagttgaacgtgcaagtggccagcagcaaggccatgaagttgttcccctttcatgcagtgatttaacacatttgtctttccccagctgactagttttattagctatggagctgattgccacccacatttttctccctcactttcccatactggcagcccgacagcttgcttttctcccagaggtatgactacgaaattcttcatttggattatactttcctgaggccacatcaaagaaggctgaaccatccccagcaatgcccaaacacagtccaacttgcttttccaacaagatayggaggttttgcaatttacttttataggctgtgtacagagctctcatccatcctcagttttctcactcccaaaaccagacccaactgtcatagcctttgccagcctcatgtcatctttggctcaggaatacattttttcccctaattttatgcttttatggctttcttattactgtcagtttataacgcaaaaaaataagtacattattttctaaattttaacacaaacatcacttttattggtttgggagtttttcctcaagctcagtcttccagctaatgtt

SEQ ID NO: 48533 - DNA, 1829 bp, Homo sapiens
gaaacctatgccaagctttcagttaatgaggtttctcaatcaatcctcaatagttgctgagtgcctgctctagggtactccaggtaaactgtgccattagattctttttatgtagtactacataagaacttggaggaaaaggaaatgagtttgccttaagagacaaactttgaaaatcaatgtataaagcaccagtaagcaaatttgcctcagactgaatagctcccctggctaatggtaatctgattgaatgaaacatattaaaggaagaatgtgttaatggatggaaaagtgagtttgctggtgacgggtggggtgtggttgtgagagactgaaaagcaaaggtagaaagtaaaaatccaaacatctagaaggaaatccagccaactcaactatgatgcaaattcagcatcggaatatcccaactctaagggcaaatacaaattaaaagtaagaggcttaattctccctgttaagagaggagactactctccccttcccttttcttcaagcatttacttttaaaagcttgtaaactctttctcttctttttaaaatatatgtgaatcctttcacaaatttaataagcctcttgccagcctaatgacccaaaaatgtctttctcaaggacctcagaaccatcgtttgaaatataatcatcaaggaacatagcaccctatctcccagtttctgtaggagaatgggagctaacatcagtggaagcctcattccaagttgcaaaattatctcctgtcataaataagtgagaaattgatttttcttttgaataaagccaataagctgacacagagtcaccccaattaccaagtgaaatgaggacaaactaggtgtgacaaatggtgctgttaagttttcccactggaaacctagttattcttcatcttgagaacatgtatgaaatggactgtatctgttggctataggagggtgaaatgtctttttgcctttgcagtctctttaacagattgcctgtgattcacatcacattgtggtttaatgcattttcaataataaaacttttatttctcttttcatctttgcagtaacgttttctgaattgggcagaggttttgtttccaattatatttcaccaacacaagttcctttgctatggttccatgtttattccaaactcctgacgataaatgatttttccaaaaatgattgtgtccaatgcattaaacaggtgcaaaaatgttgatttgtacgattattcttttcactggacaataacaagcatttgattatacagatcagcctctatgagtttgattattattaatctattcttaaagaagagtttgttcttgatatgctatcaagtttctacgtttgtaggtctgagaaccaacctccagtttctgatgaattgccaagattaatgctattctgtgaggaataaacagccaacaggccttccctagtaaattcagacatgcacattttcatacaaaatttcttcagaaacaagaagatatgagattgaaaaaattgtctccctatcaagaattgataaatgttcaaacaaatgttgtccaggtgttgctcttagctttggactgaaaaaaggtaaatattggtgagccttcgaatttcaatctgggacatccagctgaattcatcaaggtagaaacaggtattatactaaggaataaagaaaaaataaactcattattgtacagtgtccccttcctaacatctcagacacagggattggtagacagcaaatggaggataccactttattttgacrttagcattagtgtccactgtctcacgtgtacagcagtgtagtgcttttggttttg

SEQ ID NO: 48534 - DNA, 655 bp, Homo sapiens
agttgcccaccccagagtaaaaacgattttgtcttatctccttttttctacaagtttcacaggcttaaatgtgatatttagtgttttccaaatttcacgtacacctggaacttcagattgtaatcttctttggaaatagtgtttgcagatataatttaggtaaagatcaatgtgggatcctattggattagggtttgtcctaagtctgatcagagcgtcctcataagagatagaaaagggtacatggagatatggaaaagtcaatgggacgttggaggctgaaattggagtggttcatctacaagcgaaggagctctgggattgctggcggctactggaagccatgagagacatgagatggtttcccaaaaggcttccaggtggaggcaaaattcctgacaaaatctgtgactcctggcctcttgaaatgtcagataataacttaatgttgttttaagccastcagttagtggtaatttgttacggtaaccacaggcaactaatacaccctataattgacttggacttaattttggtatacgtatatttggtatatgtataagggtagatgaatcttgtttctatattcatttcaaattgttccagttaaaccagaatcatttatctagattagctttcttgaatttttagattc

SEQ ID NO: 48535 - DNA, 655 bp, Homo sapiens
agttgcccaccccagagtaaaaacgattttgtcttatctccttttttctacaagtttcacaggcttaaatgtgatatttagtgttttccaaatttcacgtacacctggaacttcagattgtaatcttctttggaaatagtgtttgcagatataatttaggtaaagatcaatgtgggatcctattggattagggtttgtcctaagtctgatcagagcgtcctcataagagatagaaaagggtacatggagatatggaaaagtcaatgggacgttggaggctgaaattggagtggttcatctacaagcgaaggagctctgggattgctggcggctactggaagccatgagagacatgagatggtttcccaaaaggcttccaggtggaggcaaaattcctgacaaaatctgtgactcctggcctcttgaaatgtcagataataacttaatgttgttttaagccactcagttagtggtaatttgttayggtaaccacaggcaactaatacaccctataattgacttggacttaattttggtatacgtatatttggtatatgtataagggtagatgaatcttgtttctatattcatttcaaattgttccagttaaaccagaatcatttatctagattagctttcttgaatttttagattc

SEQ ID NO: 48536 - DNA, 566 bp, Homo sapiens
tttgccagtgatcatgcagcatagctagaattggaacccagatttaatattaagaaaaaaactttttagtgcagtattagagaacaatcctagatttaatatgcccataaacatttatggctacctactgtcaatgtcaggcacttttctaagccttagagatacaaaggtgaataagaatggttcattccctcagggagtttataatctagtggagactgatacatgaagataggtatttacagtggtgtataattattgcattaacatacttatgtacacaatgcagtaagaacacaagaagtgattcacttcagcaggcaagtggtgtgtatgtgcaggtaagacttctcmgagatgtttaacatttcttgaaggatgtgtaggattgtactggggtggggttaatggtggtaaaaaaacattctggacagagccacagtgtatgtaaaggctcggtcatagtcattgtgtatttacttgcgaggtactatactaagctggatactgggaatattacaataaataagatgaatatcatttctgccttaacaaggcttatactc

SEQ ID NO: 48537 - DNA, 651 bp, Homo sapiens
tgacataatattaaaaacacattttctaagtggatttttttagctaaaattttacttggatgaagattatcaatattaccttgaacttctcagagccaggaaaagaggcaaaatagagtgttttatttctccctttatacttgcaggactgttgcccagtccacctccaaaagtcaagcctttcttggtggagtcttatttactgtgtcaaaaggcataaatattgcatctcatcctgaatttgagggagttgacacctcttaaccaaaaccagcccttagtcagaattatgactaactcataatgggcacattctgtgctcactgcrtgtcttaactcacttaactttcatgaatatctcaagagacaggtactatcgttatacccaactcacagatgagagaagcaaggcacagaaggtgaagttaatgtctggcctggaaggcaatcttaaagactttggtttatattctgggggaaataagaaactgctgtagggttctgagtctgagagtaacacaacgtgatttaagtgtcatatgcccactccagatgcttcgttgagtctggactgtggtgagttgaagaaaaaggtaggaagactactcacgcctgtaatcccagcactttgggaggccgaggcgggcggat

SEQ ID NO: 48538 - DNA, 568 bp, Homo sapiens
ttttttataaatctatgtattcttcactgttaggccacaaagtagagcttttcttgacatctgatggcagcacaatagtaagctgcaccgcttctgtggacattgcagatgaacacataaaacctctccctcaaccagatcctgtacgtgacaatgaagaaacacatgctcaagtgctgaaaaatagattagcaaaaaaaaggtcagtaccttaagcaaggaccacgatagaacaacttagcaaaatgttcttcatcactcagtactggtatcsttgtgggcagtatcagtctcacagtcatggtaagaatgtagatggtctgaaagacaaacaatattgaagatctcaggaatcaaagagaaatgttatcgtgtaatttatgggccatttgagaaaatgcaatctggtgtattcactaatatattatacactgaaataataataaaatgtattttcatatattttaaaaaaagaagatgcaaattccagatgcaaaattctagtaagcagcagagctgagatttgaaacccatttgggcgcttctaaagggcttattctctgtatta

SEQ ID NO: 48539 - DNA, 547 bp, Homo sapiens
gttagcctgaggataaactgatgaagggtatgggaccaaaaaacatataggtggaaaccccaaatcccaagcgctggccatgggtttaccttgacatgtgtgcaggggaggtgggaaggggacagtctggaccactggcatttggaccacacatcataatgacagcygagaagggaacctatttggtatagaccgagcttcccttctgtttgacatgtttgttggtggtttccagacaagtgtccctaatctatgtggttgtttgcctttaacagatggttccaggttacagtggggcccccaatgcctgaggccaccgggaaattgagaaatcagatctagtgagttgccaatttctttgactggtctcactagccactgacgagtccaccagctcctttcaaatttaatttcaggggtcaaatgcccccttctatttggggctcttcctatcagaccaaatgccttgtttgtagttctgatgatttaggctggaaaacaccgttttctgccaacgatgcagtcagctgcatagaacaagctgcca

SEQ ID NO: 48540 - DNA, 547 bp, Homo sapiens
gttagcctgaggataaactgatgaagggtatgggaccaaaaaacatataggtggaaaccccaaatcccaagcgctggccatgggtttaccttgacatgtgtgcaggggaggtgggaaggggacagtctggaccactggcatttggaccacacatcataatgacagccgagaagggaacctatttggtatagaccgagcttcccttctgtttgacatgtttgttggtggtttccagacaagtgtccctaatctatgtggttgtttgcctttaacagatggttccaggttayagtggggcccccaatgcctgaggccaccgggaaattgagaaatcagatctagtgagttgccaatttctttgactggtctcactagccactgacgagtccaccagctcctttcaaatttaatttcaggggtcaaatgcccccttctatttggggctcttcctatcagaccaaatgccttgtttgtagttctgatgatttaggctggaaaacaccgttttctgccaacgatgcagtcagctgcatagaacaagctgcca

SEQ ID NO: 48541 - DNA, 547 bp, Homo sapiens
gttagcctgaggataaactgatgaagggtatgggaccaaaaaacatataggtggaaaccccaaatcccaagcgctggccatgggtttaccttgacatgtgtgcaggggaggtgggaaggggacagtctggaccactggcatttggaccacacatcataatgacagccgagaagggaacctatttggtatagaccgagcttcccttctgtttgacatgtttgttggtggtttccagacaagtgtccctaatctatgtggttgtttgcctttaacagatggttccaggttacagtggggcccccaatgcctgaggccaccgggaaattgagaaatcagatctagtgagttrccaatttctttgactggtctcactagccactgacgagtccaccagctcctttcaaatttaatttcaggggtcaaatgcccccttctatttggggctcttcctatcagaccaaatgccttgtttgtagttctgatgatttaggctggaaaacaccgttttctgccaacgatgcagtcagctgcatagaacaagctgcca

SEQ ID NO: 48542 - DNA, 533 bp, Homo sapiens
ggtcaaattttaaaccagcagaactggtcatggtagagtcctgagtgggaatttagaaaccaagtctgatggttaatactgggtgtcaacttgattggattgaaggatacaaagtattgtttctgcatgtatttatgagggtattgtcaaaggagattaacatttgagtcactggactgggagaggcagacccaccctcaatctgtttgggcaycatctaatcagctgccagcgtggctaggataaaagcaggcaggaatgtggaaggactagattggctgagtcttctggcctccatctttttcctgtgccaaatgcttcctgcccttgaacatcagactccaatttcttcagcttttggactcttgggcttacaccagtgaattgccaggggctcttggaccttctgccacagattgaaggctgcactgtcaacttccctactttagaggttttgggattcagacaggtttctttactcctcagcttgcagacggcttattgcgggacttcaccttgtgatcatgtgagtc

SEQ ID NO: 48543 - DNA, 651 bp, Homo sapiens
tcaggtaatcattggtttctagtgttgacatctcatttcaaatcagtgtctgactccgggctctggatcctctttgccaaccccagcagatgctggggagcccaacttcyagcacattccttgttctctggtgtgtgtgctgaactctccacccgccccaaggtcccgcccaaatccctccatagccctgtagtctgggattactgtccctgatgagaaaaggggatagtgaggcccagttgtcaaagccacacagcagtcagtgtcagatccagaatgagagcccagagctctggacgaggccactgctggcctgggtggtggaggtccaccgttgagctgggagcagagaggaaaggctgggcaggtgtcatgcagccgggactggctccagctccgctttgtgtcacagagctgcccgtgtgccctggccctggctgtggggctgggaactgttcctggacctcctgggccccgtgggaaccttgctcccgcagctgcggagtgggccagcagcgccgcctgcgggcataccgtccccctgggcccggcgggcactggtgccccaacatccttactgcctaccaagagcgccgcttctgcaacctgcgagcctgcccaggtgaggcggctgggggagaccagggcatg

SEQ ID NO: 48544 - DNA, 651 bp, Homo sapiens
tcaggtaatcattggtttctagtgttgacatctcatttcaaatcagtgtctgactccgggctctggatcctctttgccaaccccagcagatgctggggagcccaacttccagcacattccttgttctctggtgtgtgtgctgaactctccacccgccccaaggtcccgcccaaatccctccayagccctgtagtctgggattactgtccctgatgagaaaaggggatagtgaggcccagttgtcaaagccacacagcagtcagtgtcagatccagaatgagagcccagagctctggacgaggccactgctggcctgggtggtggaggtccaccgttgagctgggagcagagaggaaaggctgggcaggtgtcatgcagccgggactggctccagctccgctttgtgtcacagagctgcccgtgtgccctggccctggctgtggggctgggaactgttcctggacctcctgggccccgtgggaaccttgctcccgcagctgcggagtgggccagcagcgccgcctgcgggcataccgtccccctgggcccggcgggcactggtgccccaacatccttactgcctaccaagagcgccgcttctgcaacctgcgagcctgcccaggtgaggcggctgggggagaccagggcatg

SEQ ID NO: 48545 - DNA, 651 bp, Homo sapiens
tcaggtaatcattggtttctagtgttgacatctcatttcaaatcagtgtctgactccgggctctggatcctctttgccaaccccagcagatgctggggagcccaacttccagcacattccttgttctctggtgtgtgtgctgaactctccacccgccccaaggtcccgcccaaatccctccatagycctgtagtctgggattactgtccctgatgagaaaaggggatagtgaggcccagttgtcaaagccacacagcagtcagtgtcagatccagaatgagagcccagagctctggacgaggccactgctggcctgggtggtggaggtccaccgttgagctgggagcagagaggaaaggctgggcaggtgtcatgcagccgggactggctccagctccgctttgtgtcacagagctgcccgtgtgccctggccctggctgtggggctgggaactgttcctggacctcctgggccccgtgggaaccttgctcccgcagctgcggagtgggccagcagcgccgcctgcgggcataccgtccccctgggcccggcgggcactggtgccccaacatccttactgcctaccaagagcgccgcttctgcaacctgcgagcctgcccaggtgaggcggctgggggagaccagggcatg

SEQ ID NO: 48546 - DNA, 1260 bp, Homo sapiens
tctttattttgttttcaaatagtctttcttgagaaaygaatttagcaaaaactgtgggatttcatggttctgataattttacttttgttctaagagcactttgaatgtgttattcttgctgccataaacttttatccagaaattgccacgtgtaaactgtttttatatttgtaataaaattgtgaatgacccttgtcccctatgtaatgtttcacatgggaaagaatttaacatatggccaggactacaatatatctctttggtacttaacatatttattactttctataattttgttttgagtactgacttccagaatatacagtaaattttgttaatcaattacagcaataattttaatcctagtcattgcatgtaaatttctttctttctttcctttttgctttaaattcttcataaaaggacatttaaacatgctacacatgctacatgtactttaacacaataatattccaaggtttagataggctattttatggcatatactagagaagggtgtctctaaaccattcttctctgtaccagaaaaaagacactttctacaagtgagctctactatgtctcctgtatctgattgtggtgatttcaggagtctggaaatttttcactcagccaaaaactaaaggttaaagacaaagatggtaaccacaagaaagcaggaacaagcaggggatgacaacattcacagatctgctcttcatgtaacccacgaaagatctgtcccatgagtgagcaagctacaggctttccccccaaagaatatataattgagaacaaaaataatcagcaagaccttctcacagcaattttagggaaaactttttcaaaatttttgtgactttcatgttggggaaatgagtttgtacactcttcctgagcagctgtggcaagatttttcagggataagacatagacccgagagaagttttccacaccactcaccaagcaatgggtgaagttaagtttcgagatcagggcagtaatttccaagagagacacagaaattagtacagtagataagagaggggaaacactacatagcttatatgggtcaagaacactgcttgagttaggcagtccaaagggagaaacacaagaaaccctccactactaaagttctcctagggccctcaattacacttaccctcatagaagagttgtttgcatgttgagtctgcctctctccctggatcctgagcacctactgggcaggcaccacttagctaaataacacccgtt

SEQ ID NO: 48547 - DNA, 625 bp, Homo sapiens
actactataaggacttaggctaaatactcgttatcccttcatatacacattaaagggtcacaagtactctctctaatctgcggtctctcttatatttattatcttccttccatagtagaactttctctgcataagctcaaggtgaaagcaccatagatgcgtctgccactgaagaactccatcaagtgttgccaaatctttagaagactaaaatatgaaataattagggaatccaaagaataacaggatgtatagcatgaggctaaaatactatcaatcatgacttcatatactgacagttttctcatattttccttttgaataagaagcagctagggtttgtctgaaaattgtatgccatgataaaataaatatcatattcctagtacatgtttcttcagttgtagaacaagtgaggtagactggaataayatttgttgatgacttaagactgctttctaagctttaaatttatcccactgactttaagaattaaatctcaatataattatggtgtgtgtttggttttgaagttgttgaaatgacctggctcagagaaaaaagaaaaggaccctaacattttagaggatatacaagctttaaaatagggaagagaatctaaaat

SEQ ID NO: 48548 - DNA, 563 bp, Homo sapiens
ggtgacagtatcctgaagctgtaagatttaaaagaggacaatcaactaataaagataaacagaaaataagatgttttacttcgtgttacattgatgtctgttgcatcctgcctttttwaaaaaaaaatatatatatacacacatatacacacacacacatacatatatatatatatatatatatatatatatatcaggaaaacgactatgtctttaggatataaagaaatttcacggctatgtccaaataaattcaatccatttccaaagtcaactaaaaagtttttttttaatgaaagagaaatagaaaatgtcaagtagaactataatttcagcagttatacagcagtcattatactgttgccaaaaactgaagatctatcaacattcatggcacagtttcacacacacacacacacacacacacacacaatctttatcatcataattggtataggtctaacttaatttaaaataaaaacaaaaataaatttaaggttattaaaattcagaatagtttcaggggtaaaatataccactaatactccattttgaaaactact

SEQ ID NO: 48549 - DNA, 630 bp, Homo sapiens
tttgtgcaactgagaccatctggaacttaccttctaatatgaaataagcccagtataaacaggacttaaaaacaggttctggcaacatttttgattaggctgccacttcctgtgcccttgagctcaatttataagtctgtataatacataccctgtgatcatccgtgttgacatggaagatattagaaaccaaagatgtctcagaaacctggcattaaaggctaaactgtagagaagcctaaaaaggaataggagaaaaacacagaacagtaaagcaattacttattcaaaacatttcttaaaaaaaaaaaaaaaaaaaaagcgatacactgaagatcaacgtacaatttagcaaatctctgtactaataccacaaaaagctgcctcagacaaccagccatttgatgakacaccgagacacggctcccaaaggtgtaaatctgtgctgttaccaagctaggaaagcccgccctccctcccctgtggctgtgagacctaccccaaaagataaagatataagctgttttcatgcacaagttgaacctgctccccctctgctacatatcgtattaatatatcacaatattataattactattgttattactgcttatacttttctttttattt

SEQ ID NO: 48550 - DNA, 563 bp, Homo sapiens
gaagctgaacaataaaatcagaatccctccaaaggtctccaacaggctgaaattataggtcagaacccctgaaaatgagtaagaagcagcataaaatcctgtacaaaatgggagagacctagttgatgcagaaaagcttgaagttaaccaaaaatttaatatgtcagcagttcgccaagcctgccaaaaaggcaatgcaaaactttagtctgcgttgtgatgaatatagtgcttagaatcagggatatctagttgtgatgaaccccacactaaatatgtggcttcctagaatgactgagaggttcctctatgaccatatgtaccttctaacaccaagattctaccatcctctgcttataacagtcctctttgtgaccaatctagtaattttatcaaaaaaaaatgagtttgttttattatttttgtatgcattcaagcaatatttatcaggaaaaaaaagtkagccagttactattctggaatctagggacacaaagatgactgggacacagaccctgagggttagagtctggggaataaggacgctatggtctgaatgagtt

SEQ ID NO: 48551 - DNA, 608 bp, Homo sapiens
ccctagacactgccatgggactggagcccatgctccccaccacctgcccatctgcatgctctccctaggggtttgagctgcagagaaccacagaagcaagccacttctccgtcacacatcctgtgaggatagaagggaacttttcccatttcactgtcagagtccattctcagcaggaccctgaacagtgtcccagatgccagtgaagacccaaggagctccttggagatgggactgccatctccaagctctgaacactactgtcccagctaagtgtgcaagaatttaagggtaggggggctctaggcccttcaacaatctataataaaagttacagaaactggggctaggcacggtgtctcgcgccggtaatctcagcactttgggaggctgaggcaggaggatcacttgagaccaggagttcaagaccagcctggccaacatgatgaaaccscatctctactaataatacaaaaattagttgggcatggtggcagttgcctgtaatcccagctagtcaggaggccaaggcaggagagtcacttgaacctgggaggtggaggttgcagtgagctgagatcgcaccactgcactctagcctgggtgac

SEQ ID NO: 48552 - DNA, 538 bp, Homo sapiens
cagtgagaatatgtgacaatggcggggactgtgtgactcagatgtctctaagtctgagtttacagtcaaggggttaaacctttacagcgcccaagggactcagtgcaccagcatgagctcgaagggttgtgaattcagtgataggtctcaaggggagatgggatgccacattcctgagatttctccctaaytgccatttttggtttctgctccttcctcccctctgtccttttttttttttgagttagggtctcgctctgttgcccaggctagagtgcagtggtgccatctcagctcactgcaacctccacctccagggttcaagcaattcttgtgcctgaacctcccaagttgctgggattacaggtgtgagccaccatgcctggctaattttttgtatttgagtagacagggtttcaccatgttggccaggctggtcttgaactcctaacctcaagtaatccacccacctcagcctcccatgctgggattacctgcatgagccactgctcctggcccgctctgtccttaaatagtg

SEQ ID NO: 48553 - DNA, 538 bp, Homo sapiens
cagtgagaatatgtgacaatggcggggactgtgtgactcagatgtctctaagtctgagtttacagtcaaggggttaaacctttacagcgcccaagggactcagtgcaccagcatgagctcgaagggttgtgaattcagtgataggtctcaaggggagatgggatgccacattcctgagatttctccctaattgccatttttggtttctgctccttcctcccctctgtccttttttttttttgagttagggtctcgctctgttgcccaggctagagtgcagtggtgccatctcagctcactgcaacctccacctccagggttcaagcaattcttgtgcctgaacctcccaagttgctgggattacaggtgtgagccaccaygcctggctaattttttgtatttgagtagacagggtttcaccatgttggccaggctggtcttgaactcctaacctcaagtaatccacccacctcagcctcccatgctgggattacctgcatgagccactgctcctggcccgctctgtccttaaatagtg

SEQ ID NO: 48554 - DNA, 538 bp, Homo sapiens
cagtgagaatatgtgacaatggcggggactgtgtgactcagatgtctctaagtctgagtttacagtcaaggggttaaacctttacagcgcccaagggactcagtgcaccagcatgagctcgaagggttgtgaattcagtgataggtctcaaggggagatgggatgccacattcctgagatttctccctaattgccatttttggtttctgctccttcctcccctctgtccttttttttttttgagttagggtctcgctctgttgcccaggctagagtgcagtggtgccatctcagctcactgcaacctccacctccagggttcaagcaattcttgtgcctgaacctcccaagttgctgggattacaggtgtgagccaccatgcctggctaattttttgtatttgagtagacagggtttcaccatgttggccaggctggtcttgaactcctaacctcaagtaatccacccacctcagcctcccatgctgggattacmtgcatgagccactgctcctggcccgctctgtccttaaatagtg

SEQ ID NO: 48555 - DNA, 1015 bp, Homo sapiens
cctgcaaaggacataatctagtccctttttatggctgcatagtattccatgccatatatgtaccacattttctttatccagtctgtcattgatgggcaccagttttttttttaatggattttctaccaactgtgtctgtgaaattttgagtcaaggtgcagacagagggcaacagagtgaattctaaaaggagggagggcctgatgagtgggcaaagagagtaacgaccaagaagggctgagagcttctgctcaaaggtcttcttctcctctccttttgggtgactcacagaatctcatcactgagtttccttccttgagtgtaagattccgaccttgttggagaatacttgccccaagcatagcaaatactcaaaggcactgcaaattagtaggtttccttcccctggcactttatagctgtgtgatcttgggtacattgcctaacctcactgagtctagttcctcatctgcaaaaatgaaaataatacctcccttgaagagtcgtgacaaagattagaaacaaaatatgcaaaacacttggcacagaaagcagggagtggtgtaaacatggtagttgtcctctggagggatccrtcctcccaggctggtttggactactggaatcattctcttctcttttcttgttcctcagggacaactccccattggagccatctgttcttgcctcatcatgttaacattgcttcctttctttcatctgttctttcatatttatctcctcagtcacctcctagttcaggtgttgctacttgtcacctggaatatggttgtcatcttccttcttgagaaaaaagactatagcctaagcatctttgtagtcttaggactttgatagtgcctgacacccaggtgtactaaagaaagttctttgaaagagcttcctggcctcttttcttttcttttgagacaggatctcattctgtcacccaggctggagtgcagtggcatgattacagctcactgcatccttgccctcctgggctcaaaccatc

SEQ ID NO: 48556 - DNA, 550 bp, Homo sapiens
atgcagcaggagtagggagccatggacctagtcactgtcccatgctgactgttgggtgggacagatctgcctgtgcctgcatccaggcttaaagacacaaggtgctcctttacccaaatctcagacaaaaatgttcctggggcccacactccctggaatcgtgttttagctcagggagtcaattaaatttggcagagaggctcagaggggtgaaggggccactcacaggccttcctggcctcaaaggctgagcctgtcaaatgtggggaagagctactagttcagagccaaccctggaggctgttggccccaccctcagggacatgccaatgagcaggtgaagagctcagcatcctcctgcttgcccacaccctcctcccaggagaatcagtgagcacccttggaccaggggcccctgactagatttgggctgctttgggrtttggagggacaagtacttggggccaggaagggccttgatgcaggaattcatgccccttgaggcccactagggagctatagtcaagggcgggggtcccagccatgggga

SEQ ID NO: 48557 - DNA, 631 bp, Homo sapiens
tggagtttcccttatagaaaggctttccctgcccatttccctcctgccttttttaattattartttggattatcaccaaccgtcttattggggatccctcaaaagcaaaagttggaaagaaaatgatttgggtgccagtgatttatttgctctttctttcctgactgctttgatagatattagtctgtagtttatttatttgtttttttacttgtgatgtctttctctggctctggtgtcatagtgtcactggcctcatagactgagttgagaaatggtcctttcttgattttctgaaagaatttttgaagggttgctattatttcttcttaaatatttagtagaatttatgagtaaaatcatctcagttggggattttatttgtagaaagatttcaaattatgaattcaattttattaccccttgtaggtattacttgcatcttcaattttttcatgagttggttttcgttatttgtgcttttatacgaatttgccaatttcatctaagttatctaatttaatagaagaaagttattaataacattctctcatgtaatagataattttgagtgtcaacttgcctgggtcaaggaatacctgacattcatctagcaagaaaaacattattt

SEQ ID NO: 48558 - DNA, 573 bp, Homo sapiens
cagcagagcgttctgtgctcctgcaggctcatcaattctttgcatcttccctggcagtccaccctactgccaaaaaggaaaagcaagaggattttaacattatcatagaaatcatggtggaagtcagtgtttccccaggctcttgggcctgcagcagagagaagtggctggctgttgactgccttctgagaaggctgccaggactacaaggcaaagtcctgtgggtaaaggagaaaattccagtagcagggaaaggccgtttacagaagaagagtttkccagctcctgtgacaagagcagaagtagggccttggcacagctgaggaggtgaaaaggtataacccaagtgttactccaagtattctttctaggtgggatggggctctgtctgtcatcagaaaaggtcacatgggatgctggaagcagtggctcatgcctgtcactccagcactttgggaggccaaggaagaagggtcacttgaggccaggagtttcagaccagcctaggcaacatagtgagacttcatctctacaaaaaaataaaaaagattagctgggtatgggggcacccac

SEQ ID NO: 48559 - DNA, 1453 bp, Homo sapiens
gcattgaactagaccctgaatgtggagagtcaatcttcttttctcatataaacaaaaaatggagttttctgaataggcctgggccagtacaccctggagcctagtggcctgacccctgaaccccagtgccttatctaatgatggtacaatttattgaaaacatttgtgtctctggttggctgtggagcagtctttgtaaatcaaggaaactggagagcaaagccaggtgcataaaagacaagcsaactgagctgggggaagagcaagcattcagccttggtgagtctaaaggaaatacagtattgtcacttggagtctcttctccttgggtcagctcagtctccaatgtgtatgtcagggagtacaagaaggactgacataaggattctcaacatggaagagcaaaccagggagcagagaaaagttttcttagggaaaaaacaaaaatcctgccccataatgttggcctggttctgtgtccacagatcaaaagccaggctggaagcatggagtcagatacacagctcacagcacacagaacaggcaactgcaggcaaacccaggcaagctctgggaggcggctgccacttgagagggcaaacctcgcttcaaatccccaactctactcaccagctgtgacctcggtcaaatgatgggcatacgaataattatatacatatatatatatatatgtatatatatacaaacatgtgtatatatgacatggttcccatgaaaatgaaatgagacactgtataaaagtgacctggcacatattgagtgtttgactaacgttagttctcttctggggacttttggaagggataaggcagcaaaggggagggtgggttaatggatcagagtgagtgtggtaaatacagtgaccattgacaaaaatcagtttcttagtgaaattgatttttaattaagtctggctgttaaactatgtttgaatgggacactgctctgagactgagccacatatgtctctggtttatatgggttacaaaactcacagctttttgatcaggtgtgaacttagtgatcatctggtgaacacacattcacaacttgcaaaagattagatgccttccaaggtcatgcaccggttagcagctgcctcctgcctcctgcctcccttcagatgggtggaggctatagaacacctgtgactaagaaggcccaggcccccaaccactcctcacatggcgaggtttcccaatcacttaccatccttttcatcctgccttaaccttctccactgttactatgttctttttaaaacgaggtgctcaaaaccaaataaaatagcccaaatacatctgactctggcaaaacaaaggggaacagtgaccacttttgttttggagaagtctatgattaaagcagcctattggcagccaccccatagtcccctgacagtcacctgagatccccaggactcttttttaca

SEQ ID NO: 48560 - DNA, 1453 bp, Homo sapiens
gcattgaactagaccctgaatgtggagagtcaatcttcttttctcatataaacaaaaaatggagttttctgaataggcctgggccagtacaccctggagcctagtggcctgacccctgaaccccagtgccttatctaatgatggtacaatttattgaaaacatttgtgtctctggttggctgtggagcagtctttgtaaatcaaggaaactggagagcaaagccaggtgcataaaagacaagcgaactgagctgggggaagagcaagcattcagccttggtgagtctaaaggaaatacagtattgtcacttggagtctcttctccttgggtcagctcagtctccaatgtgtatgtcagggagtacaagaaggactgacataaggattctcaacatggaagagcaaaccagggagcagagaaaagttttcttagggaaaaaacaaaaatcctgccccataatgttggcctggttctgtgtccacagatcaaaagccaggctggaagcatggagtcagatacacagctcacagcacacagaacargcaactgcaggcaaacccaggcaagctctgggaggcggctgccacttgagagggcaaacctcgcttcaaatccccaactctactcaccagctgtgacctcggtcaaatgatgggcatacgaataattatatacatatatatatatatatgtatatatatacaaacatgtgtatatatgacatggttcccatgaaaatgaaatgagacactgtataaaagtgacctggcacatattgagtgtttgactaacgttagttctcttctggggacttttggaagggataaggcagcaaaggggagggtgggttaatggatcagagtgagtgtggtaaatacagtgaccattgacaaaaatcagtttcttagtgaaattgatttttaattaagtctggctgttaaactatgtttgaatgggacactgctctgagactgagccacatatgtctctggtttatatgggttacaaaactcacagctttttgatcaggtgtgaacttagtgatcatctggtgaacacacattcacaacttgcaaaagattagatgccttccaaggtcatgcaccggttagcagctgcctcctgcctcctgcctcccttcagatgggtggaggctatagaacacctgtgactaagaaggcccaggcccccaaccactcctcacatggcgaggtttcccaatcacttaccatccttttcatcctgccttaaccttctccactgttactatgttctttttaaaacgaggtgctcaaaaccaaataaaatagcccaaatacatctgactctggcaaaacaaaggggaacagtgaccacttttgttttggagaagtctatgattaaagcagcctattggcagccaccccatagtcccctgacagtcacctgagatccccaggactcttttttaca

SEQ ID NO: 48561 - DNA, 1170 bp, Homo sapiens
cctgttaagatattagggaggaaacttagactcgttgagctctgcaagagctcatttttgtcaaatgtcattatttgcccctcctatcttatagtgtgagttctgtgggtgtgtgtttgtgtgtgtgttcatgcaacaattacttataattaagtagtgctgcaaattcacatcagtcttttactcctaggaaggtctgtgtgcattgtgcatttcctccagtatacaatcatcatggaacttgcagatcacctaataaattttaggattaccccaataatattaggtcattaggatctttgttacatctgaaactccaaattggacaattagattccagatgaacaggaattgaattattctgcttattttaagccaacaacccaaataattttgaatactcccatttcaattcaataaatatatatagatagcccactgtgtgctagtgtcctattttgtggatgagaagctgaggttcagagaggttaaataacttccccaagacaattagcagggtgggtagtcagtagcctagtcctaactttaaacaaaatccatcagattctcaagttcatactcttcctatcaccctgtgtacctcaatgatcagttaaacctctgtgtttcaacaaatattgaatgtctcagactggcctcttttcttggtggtgtccatgaatctgatagaaacaagcaactgaccctttcccagtccaagagaagcagcagttggcagggatgtggccaaattcttccccataccatggtgagcggggtgcttcaaagtayttctcggtcccccgatgtgtctgcctcctctttctctcacagaccagcatttgactttggtcactttgtaagcccaacagactgagattggattcccagagaccctgggaggaccacggggtggaaaggaagagaaagagagagtgagagtgagcaagagagagagcttgttctctttctgtcttttccaacccttttccccctcctgctggcccattttagagccacgttgtcacacattggcaccccatctgagggcagagagagggaatgacaggagatgaacaaaatcacagctgtattagagacttctgatttttaaaaaggatgtggaaagaggttgaaactaagctgctttctcttggaagatggttgcag

SEQ ID NO: 48562 - DNA, 620 bp, Homo sapiens
agaccagattatttttgcagtacaactctcaaaaattttgttggtttcttatctacttaactttagtcagcttcgtgtgtcaatagccagacctaaaatttttgctagatgtaattcttagatttcctgtatttcttatctttttcacctctgtgcatgcccccctcttctctttatttatttgaggatatcttggctccacaaggcttcagttggagacccacacccttagtctcttttttctgaaccgttttatcccaagagaaagaatttactgagtgccacattagtctacactgaggttttaatatcagctatataccctttatttgatccttagctgaggctgagttttaattagctgttgttccttaaaggccttctcagttttgtttttaactgttcgaggttgaaaagtagttgccttttccaattgtgtaagtcrtttaatttgaaatctattgtcttacatttctgcttgcaaaccaattcttttctgacctcattttttccttgtgggggtttccctttatcttattcagttactttttttcatttgattccttgtcttttcatccttttcttttgctttttcatctaatcttgtttttcaccagttt

SEQ ID NO: 48563 - DNA, 633 bp, Homo sapiens
tggtttccactttgctttttcacagtgtagcaaataagagggaactattgactaatgaatagaagtgatagccaaaggagaggaaaccatagaatcatctttatacmagggcaggcatatcactatgcacctgagtcatcaggaaaatcaattaatttctctttattgagaggaaaattatcagagtcctttcggtgttatataaacaagccacaaactaccaaaggagttttccttaatgttgattggtcatgtttgcccagtaaacatcactatgagcacaaagtattattggtgtccttatacttagtggcataaatattaaaagatgccgagggttgggtttggtggctctcacttacagtcccagcactctgggaggccaaggtgggagaatcacttcagaccaggagttccagaccaacctgagcaacatgatgtaacttgaggtcaggagttcgaaaccagcctggccaacgtggtgaaaccctgtctctactaaaaatacaaaaattagccggtgtcatggcacacacctgtaatcccagctactcggaaggctgaggcaggagactcgcttgaacccaggaggtggtagggttgcagtaaactgagatcatgccactgcactcc

SEQ ID NO: 48564 - DNA, 593 bp, Homo sapiens
tgtttttgtttgagacagggtctcgctttcacttgggctggagtgcagtggcctgatcatagctcactgcagcctcgagctcctgggctcaagccatctccccacctcagcctctggagtggctaggactacaggtgtgtgccacaatgactggctgtttttattattattattatttagagatgggagtctygctgtgtggctcacattggtctcaaacttctgggctcaagtgatcctcccacctgggcctcccaatgtgctgggattacaggtgtgagccaccatgcccagtcttattcccttttaatgaacctcagctatattgctacaaatgcccgcagtcaaatatcgtggctgggagcagtggctcatgcctgtaatcccagcactttgggaggctaaggtgaggaatgcttgagcccaggagttcaagaccagtctgggaaacatggtgaaacaccatctctacaaaaaatttaaaaattagcggggcatggtggtgcacacctgtagtcccagctactcgggagactgaggagtgggagggtcacatgagcccagggaagtcaaggttgcagtgagcctgggca

SEQ ID NO: 48565 - DNA, 593 bp, Homo sapiens
tgtttttgtttgagacagggtctcgctttcacttgggctggagtgcagtggcctgatcatagctcactgcagcctcgagctcctgggctcaagccatctccccacctcagcctctggagtggctaggactacaggtgtgtgccacaatgactggctgtttttattattattattatttagagatgggagtcttgctgtgtggctcacattggtctcaaacttctgggctcaagtgatcctcccacctgggcctcccaatgtgctgggattacaggtgtgagccaccatgcccagtcttattcccttttartgaacctcagctatattgctacaaatgcccgcagtcaaatatcgtggctgggagcagtggctcatgcctgtaatcccagcactttgggaggctaaggtgaggaatgcttgagcccaggagttcaagaccagtctgggaaacatggtgaaacaccatctctacaaaaaatttaaaaattagcggggcatggtggtgcacacctgtagtcccagctactcgggagactgaggagtgggagggtcacatgagcccagggaagtcaaggttgcagtgagcctgggca

SEQ ID NO: 48566 - DNA, 677 bp, Homo sapiens
aggaagtaaaccaaattcctttccatgggcttgaatcattatgcacacccactaggacgcatgagatgccacagagtgagttgtcaggctcttgggcttttgcatttctcaggggtaaagatgggtcagtggacttcagtttgctctctcttaggagtgaggttgaatattatttctaacatgtaagtgccatttttgcttctttttctgtggactgttggtctttttatccatttttctatcaactttctggtatttttcttaaatatcaagagccttttatctattagggaggttggccctcgttttgttatataaatggcaaatattttctcttagtttgttgtttgccttttgactttgcctgtgaagtattttaccataaatatatatytcttattattttagttaaatgtatcagtgtcttactgattctggatttagagttttggttgattatgaccctcctatttctggaagtcattttttattcttttcctatacaaagcctaccctagacaaggtttggaaaagtctctctgctttctgagagtagatctctcttattctaatttagtttttagggggccacaagaagatgccaaatgtccaaactaaaagtgattcagactaagatatgggtgatttggggtctcctgtaagcggagtgtcacaca

SEQ ID NO: 48567 - DNA, 572 bp, Homo sapiens
gggggatagaaaataggtgttccaaagggcatcttcagggccttaagccccctacctcttgttaaatatgagaagtctgtgcttcttttctcaaaaacatacacaaaaaaaaatctgcctggtgtccaattcatcagcctgggagatgggtaagaaatgtagttagatcccaaacatgrctaaatcctttaaaaacaaatttttaaattactaggagcttttaatggatatttatccgtcttgccatatgactaagcagatgaacaaatacctatcactcacacactagaaatgaaacaagatttaatgcacacagcaccaatcatacatttcactctattgttatcaaaattacaaaacagctgggaacctgacaatgacaacctaacactcatgattttagatattgtccttgctttacttcccaaataggaggctaatattctctttaaagggaaacaaccatgagataaaatataacctttgaatatgaactgtgtatttttctcacagtaagtaaacaatagatattccaaaacagcaggcatcttattaattcagtagggtcagca

SEQ ID NO: 48568 - DNA, 572 bp, Homo sapiens
gggggatagaaaataggtgttccaaagggcatcttcagggccttaagccccctacctcttgttaaatatgagaagtctgtgcttcttttctcaaaaacatacacaaaaaaaaatctgcctggtgtccaattcatcagcctgggagatgggtaagaaatgtagttagatcccaaacatggctaaatcctttaaaaacaaatttttaaattactaggagcttttaatggatatttatccgtcttgccatatgactaagcagatgaacaaatacctatcactcacacactagaaatgaaacaagmtttaatgcacacagcaccaatcatacatttcactctattgttatcaaaattacaaaacagctgggaacctgacaatgacaacctaacactcatgattttagatattgtccttgctttacttcccaaataggaggctaatattctctttaaagggaaacaaccatgagataaaatataacctttgaatatgaactgtgtatttttctcacagtaagtaaacaatagatattccaaaacagcaggcatcttattaattcagtagggtcagca

SEQ ID NO: 48569 - DNA, 575 bp, Homo sapiens
aaattatgagaggaattattttggctttttctccctaaattgaaatatttgcctccttctttctgggtcaaggtatactccctcaccttcccctgcataatggaaggatttgatcatcttactccttgacacttgaaatattgattggcccatgaatactaataatcaagagtcactgtgattagaggttaggaaccctttaaaggacagatctttttcttgcactttctgccccttgccacatgatcataaggcctcgactgaaacgttcccaatctctttctcttcctggtccaaagaatttgcatagagaggaaagcccaagtccccttgtgaacctagctttttctttctacrgttgatgttaaaaacaaaacaaattcctaaaggtcatctaagtcaaaccttcatccaaaggatgtagtctaaatatactacattttggctttatcttctcacttgggagttcaggtctccagagtcagaactgggattcctatcatgtatggcctgtatgatcctgggcaggatgctttgtctccttaaatttgtattttctttcctgtaaaatatag

SEQ ID NO: 48570 - DNA, 575 bp, Homo sapiens
aaattatgagaggaattattttggctttttctccctaaattgaaatatttgcctccttctttctgggtcaaggtatactccctcaccttcccctgcataatggaaggatttgatcatcttactccttgacacttgaaatattgattggcccatgaatactaataatcaagagtcactgtgattagaggttaggaaccctttaaaggacagatctttttcttgcactttctgccccttgccacatgatcataaggcctcgactgaaacgttcccaatctctttctcttcctggtccaaagaatttgcatagagaggaaagcccaagtccccttgtgaacctagctttttctttctacggttgatgttaaaaacaaaacaaattcctaaaggtcatctaagtcaaaccttcatccaaaggatrtagtctaaatatactacattttggctttatcttctcacttgggagttcaggtctccagagtcagaactgggattcctatcatgtatggcctgtatgatcctgggcaggatgctttgtctccttaaatttgtattttctttcctgtaaaatatag

SEQ ID NO: 48571 - DNA, 575 bp, Homo sapiens
aaattatgagaggaattattttggctttttctccctaaattgaaatatttgcctccttctttctgggtcaaggtatactccctcaccttcccctgcataatggaaggatttgatcatcttactccttgacacttgaaatattgattggcccatgaatactaataatcaagagtcactgtgattagaggttaggaaccctttaaaggacagatctttttcttgcactttctgccccttgccacatgatcataaggcctcgactgaaacgttcccaatctctttctcttcctggtccaaagaatttgcatagagaggaaagcccaagtccccttgtgaacctagctttttctttctacggttgatgttaaaaacaaaacaaattcctaaaggtcatctaagtcaaaccttcatccaaaggatgtagtctaaatatactacattttggctttatcttctcacttgggagttcaggtctccagagtcagaactgggattcctatcatgtatggcctgtatgatccygggcaggatgctttgtctccttaaatttgtattttctttcctgtaaaatatag

SEQ ID NO: 48572 - DNA, 543 bp, Homo sapiens
aacaaacatacaaacaaaggaggagaacggctcctgctggacaagcctcttgggctccagtagggaggacgctgtggttcggagccctgaggtgggcacagcccctggtgccagccttgcctacaggggtgagcaccacggtactggacgttaccctggagcccatacgccattttctagtgcttgagtgtttgctacaagctatctrtccttggaaatgctgctaaaacttgatgtcctcattaagcacaacttcttagatctcataatggtgaataaacagctggtaaatgctggaaatattttaagaaagataaaggcaatccaggggctcatggccagatctgttttatatactgtttattatttttattttatttttattacctgtaagaaacctgtacatatacagatctgttttaaataacactgaaccacagatttattatgaaatctttttttgtaaacagaaaagccccaaaaagtttagtatgattccatcacagaaaatgattgactcttatcatgatggtcagtcaatat

SEQ ID NO: 48573 - DNA, 543 bp, Homo sapiens
aacaaacatacaaacaaaggaggagaacggctcctgctggacaagcctcttgggctccagtagggaggacgctgtggttcggagccctgaggtgggcacagcccctggtgccagccttgcctacaggggtgagcaccacggtactggacgttaccctggagcccatacgccattttctagtgcttgagtgtttgctacaagctatctatccttggaaatgctgctaaaacttgatgtcctcattaagcacaacttcttagatctcataatggtgaawaaacagctggtaaatgctggaaatattttaagaaagataaaggcaatccaggggctcatggccagatctgttttatatactgtttattatttttattttatttttattacctgtaagaaacctgtacatatacagatctgttttaaataacactgaaccacagatttattatgaaatctttttttgtaaacagaaaagccccaaaaagtttagtatgattccatcacagaaaatgattgactcttatcatgatggtcagtcaatat

SEQ ID NO: 48574 - DNA, 615 bp, Homo sapiens
aatttttttttttttggagacagagtctctctctctgtcacccaggctggagtgcagtgacacaatcttggctcactgcaacttccacctcctgggttcaagtgattttcgtgcctcagcctcctgagtagctgggattacaggcgcatgccattacacctggctaatttttgtattttttgtagagacagggttttgccacattggccaggctggtctcaaactcctaacctcaagtgatctgcctgcctcgggctcccaaagtgctgggattacaggcrtgagccatcgtgcctggcctaaaccctgatttttaatgtttaaataaacttgttttcctcgcagccatcagtaaaacgttttctgttatttatgtataggacagtctcaaatttaggagataaaattttgttactttagtggtacataacatgcataaatatattttacttcgttttcagagatatattaaaaatttatatgtaaaactcataagttaaaacccatgctgacatcatattgcttatttgataattctgataatcaactgtagcatagttatcaataaaaagatctctaagcagaaaaaatatgtgatacaataaccatgttctt

SEQ ID NO: 48575 - DNA, 615 bp, Homo sapiens
aatttttttttttttggagacagagtctctctctctgtcacccaggctggagtgcagtgacacaatcttggctcactgcaacttccacctcctgggttcaagtgattttcgtgcctcagcctcctgagtagctgggattacaggcgcatgccattacacctggctaatttttgtattttttgtagagacagggttttgccacattggccaggctggtctcaaactcctaacctcaagtgatctgcctgcctcgggctcccaaagtgctgggattacaggcatgagccatcgtgcctggcctaaaccctgatttttaatgtttaaataaacttgttttcctcgcagccatcagtaaaacgttttctgttatttatgtatrggacagtctcaaatttaggagataaaattttgttactttagtggtacataacatgcataaatatattttacttcgttttcagagatatattaaaaatttatatgtaaaactcataagttaaaacccatgctgacatcatattgcttatttgataattctgataatcaactgtagcatagttatcaataaaaagatctctaagcagaaaaaatatgtgatacaataaccatgttctt

SEQ ID NO: 48576 - DNA, 615 bp, Homo sapiens
aatttttttttttttggagacagagtctctctctctgtcacccaggctggagtgcagtgacacaatcttggctcactgcaacttccacctcctgggttcaagtgattttcgtgcctcagcctcctgagtagctgggattacaggcgcatgccattacacctggctaatttttgtattttttgtagagacagggttttgccacattggccaggctggtctcaaactcctaacctcaagtgatctgcctgcctcgggctcccaaagtgctgggattacaggcatgagccatcgtgcctggcctaaaccctgatttttaatgtttaaataaacttgttttcctcgcagccatcagtaaaacgttttctgttatttatgtataggacagtctsaaatttaggagataaaattttgttactttagtggtacataacatgcataaatatattttacttcgttttcagagatatattaaaaatttatatgtaaaactcataagttaaaacccatgctgacatcatattgcttatttgataattctgataatcaactgtagcatagttatcaataaaaagatctctaagcagaaaaaatatgtgatacaataaccatgttctt

SEQ ID NO: 48577 - DNA, 597 bp, Homo sapiens
aaaggagaaacccgctagagacagcagaagtggtaaaacgatcttccggaagacacgcctgtgtgtcccgggcacagttcacgccggagcgaagccttacaagtgttgggagtgtgagaaaacctcccacaagtcgcgcctcatcgagcaccttcgctcccacacgggggagaagccctgcggctgcagggaatgcggaaaggcctttttccagaagtcacacctcatcctgcgtcagaggactcacacgggggagaagccctgcgactgcgcggagtgcgggaaagctgctcccaggactcctgcctcctgacccacaggcggactcgcggggaagaaaccgtacgagtgctcsgactgcgggaagacctcccggaaggcgaacctcatccgccaccacgggatccacacgagggagaagctgcatgggtgaagagaccgtgggatcgtcacaaagtcacatcacgaggtcgccgaacctctaggagggacatcgccagggaaacagccctcaaccaaaactacgacgccaccctaggcagaggtcccatatcggggtgaaattcggccactttggtggcttaaggaaggcatggt

SEQ ID NO: 48578 - DNA, 516 bp, Homo sapiens
caaaaaggactgagtccaaagttccacatagctaggctgacttcataccattggtattctgaatacagtactgacagaaagcttcaggaataaaagagagaagagaggaactcaggaagcatgagtgttccccacgagggggtgccaggccctcctagacacacctgtgaacataccccttccccaaggccattggcagctggagtcttaaaatatttcctgcagctctggctgggcacggtggctcatggctgtaatcccagcactttgggaggccgaggcaggtggatcacttgaggtcaggaggtcgagaccagcctgaccaacatggtgaaaccctgtctctactgaaaatacaaaaattatccaggcatggtggtgtgtgcctgtagtcccmgctactcaggagggtgagacagaagaatcacttgaacccaggaggtggaggttgcagtgagccgagatggcaccactgcactccagccatggcaacagagattccatctaaaaaagaaa

SEQ ID NO: 48579 - DNA, 588 bp, Homo sapiens
aaggccatttagcctgttgaaatccagtgattgcatttccccctaccaattagamcagggatgctgggggctcagccacacagcctgtaaagtgggccagggggagggggaggcacagaagagatgaggagggaaaaggaaaatggacaaaaccaagtggaggagggaagactggggcggaggggacatgggatgccatcacagagccatcaagtcttggctgtcccaaaatcttggaccagttgagcatccccgtagctcagggatattgttgaagtgtttttaattatctgtgtttttagtaccttggccccaacatagaatgtgatccaacaagcgtcagaataaccaattctctgttcttcagacccagacacttttgaaccccaaaaattcttccagacatcaggcctctccaagatgtcagccaatcaggtgaaggatgttttccggttcatagacaacgaccagagcgggtacctggatgaagaagagcttaagtaagctttgtcctgagtctgtctggtacccggcactgctgagtgggcctggggtgcagtgggggccaggttgctcagtatttcttca

SEQ ID NO: 48580 - DNA, 1097 bp, Homo sapiens
aacraattcatctttccatgtttgggagtccatgtgacatggagttggggtatggagcagccaaggcagaggtttaggggactccaagggccccccaagtcacccagagctcaaggggcaaaagcaaaaagagatggggcactcaccccaaagcttggcccatggaagaaacacctaccttttccagcaacacagcatgtgcagccctgaacattctagaaaatggctacaccagtcctttcacacagaatatgcagactacccaaaacacttccaaagagtacctctaaagtctggataacacaacccagaattaattaatagtccagtacatggacttctgacttacaaatccctgattcatggactccagaaaggggaagggtagaaaagtctccccgacgggtgagggagaagatgtttcccaactccactcttagccactgtgattttgaccacatcaagggtgcaattggctagaatgggaaccacacatgatttccaaataattaattcacttttgttattattttctttttcttttgcaatttaggacacattgaaaatctctgacacaaatcaacctgatggacaagagacccctttcctgtatttccaggaggaaataggtaatcttgtccaagtgcaattcccataaaattcgtctaattcatccctgagttgcaggttttctttgacctcatggtttttctttcacaaattttcattagatcccttgctctctctctccaccgctcttttatgaggggggagggggtgaaaagtggtggatagtattcaaccttcttagctgcccacgtcccatctgtccctcgaatagtcttaaatctgggtccttttatggttcccaaaatgtggcagagaggtgggtgctggctttctggcggtggggaagtgggggcagtagacacacaaccctgcttcccccactcccccacccacacacacaccccaggaacctgtcagctccgggtccattttggaaatcaccaccagagaggaaatggcagcctggcctcctgggctctaaattcgcatctccccaaagccagcaccaacacggtgggaaacccctc

SEQ ID NO: 48581 - DNA, 426 bp, Homo sapiens
aaaatacaaaattagccgggcgtggtggcgcatgtctgtaatcccagctacttgggaggctgagacaggagaattgcttgaacccgggaggcggaggttgcagtgaggcgagatcacgccattgcactccagcctgggcaacaagagtgaaactccatctcaagaaataaaaataaaataaataaataaaatccctctgagtcccagttccagaaattatattaatgcaaggcatgttcacggcaggtggtagtgggagaccttgggggccatcttagaattccatctaccacaggcagtagaacctaaggtaactttttaaaatcttaaaacacctatacacattttacatcttatgttaaaatatagccacgtttattttactattaaaccttccctactccaactctttwaaaaaaaaaaaaa

SEQ ID NO: 48582 - DNA, 615 bp, Homo sapiens
aataaaaaatattgaagaaacagctttgttttccaatccctagttttcttcatttggtaaataaatgtttgctgaacatgtataaaatgtcaagtattgtgtgtgytttgatagttatgtataagcatgagatatgaactgttcatagaatattaatcttttttgcatatttgcttatttcatgttcttttttcagtaagactttgtgccttataattgcatataacccaacagaatgaaatacaataaaattaattagatgaggacatcaaaatgaaagaaaaataaaaattctttgaaaccagggactaagttagtatacaaagtccatgccaagaagaattagtttctagcaatgtattccacatgtggctctaagtgttctgtctatccacaaatagaaaaaaacagatacaattacatgattcagatcttccagaagttaaatgaacatacacacaattgttttgttcaataaaaggcaaaactattccttttagctgcataataaaaaaatctctcattatcctttttctaagagtactgaaaataatggccatcaacaataactttaagtaaataatctgatgtttcacagaatattttcttgtaatt

SEQ ID NO: 48583 - DNA, 615 bp, Homo sapiens
aataaaaaatattgaagaaacagctttgttttccaatccctagttttcttcatttggtaaataaatgtttgctgaacatgtataaaatgtcaagtattgtgtgtgctttgatagttatgtataagcatgagatatgaactrttcatagaatattaatcttttttgcatatttgcttatttcatgttcttttttcagtaagactttgtgccttataattgcatataacccaacagaatgaaatacaataaaattaattagatgaggacatcaaaatgaaagaaaaataaaaattctttgaaaccagggactaagttagtatacaaagtccatgccaagaagaattagtttctagcaatgtattccacatgtggctctaagtgttctgtctatccacaaatagaaaaaaacagatacaattacatgattcagatcttccagaagttaaatgaacatacacacaattgttttgttcaataaaaggcaaaactattccttttagctgcataataaaaaaatctctcattatcctttttctaagagtactgaaaataatggccatcaacaataactttaagtaaataatctgatgtttcacagaatattttcttgtaatt

SEQ ID NO: 48584 - DNA, 615 bp, Homo sapiens
aataaaaaatattgaagaaacagctttgttttccaatccctagttttcttcatttggtaaataaatgtttgctgaacatgtataaaatgtcaagtattgtgtgtgctttgatagttatgtataagcatgagatatgaactgttcatagaatattaatcttttttgcatatttgcttatttcatgttcttttttcagtaagactttgtgccttataattgcatataacccaacagaatgaaatamaataaaattaattagatgaggacatcaaaatgaaagaaaaataaaaattctttgaaaccagggactaagttagtatacaaagtccatgccaagaagaattagtttctagcaatgtattccacatgtggctctaagtgttctgtctatccacaaatagaaaaaaacagatacaattacatgattcagatcttccagaagttaaatgaacatacacacaattgttttgttcaataaaaggcaaaactattccttttagctgcataataaaaaaatctctcattatcctttttctaagagtactgaaaataatggccatcaacaataactttaagtaaataatctgatgtttcacagaatattttcttgtaatt

SEQ ID NO: 48585 - DNA, 615 bp, Homo sapiens
aataaaaaatattgaagaaacagctttgttttccaatccctagttttcttcatttggtaaataaatgtttgctgaacatgtataaaatgtcaagtattgtgtgtgctttgatagttatgtataagcatgagatatgaactgttcatagaatattaatcttttttgcatatttgcttatttcatgttcttttttcagtaagactttgtgccttataattgcatataacccaacagaatgaaatacaataaaattaattagatgaggacatcaaaatgaaagaaaaataaaaattctttgaaaccagggactaagttagtatacaaagtccatgccaagaagaattagtttctagcartgtattccacatgtggctctaagtgttctgtctatccacaaatagaaaaaaacagatacaattacatgattcagatcttccagaagttaaatgaacatacacacaattgttttgttcaataaaaggcaaaactattccttttagctgcataataaaaaaatctctcattatcctttttctaagagtactgaaaataatggccatcaacaataactttaagtaaataatctgatgtttcacagaatattttcttgtaatt

SEQ ID NO: 48586 - DNA, 695 bp, Homo sapiens
cggagtccgcaggccgcaggtgttgtgaagaccactcgttctgtggttggggtcctgcaagaaggcctcctcagcccgggggctatggccctgaccccagctctccactctgctgttagagtggcagctccgagctggttgtggcacagtagctggggagacctcagcagggctgctcagtgcctgcctctgacaaaattaaagcattgatggcctgtggacctgctacagtggcctggtgcctcatactcctcaggtgcaggggcagggacaagagaagggggaagtaaccccatcagggaggagtggagggtgcctgagccgccatgtgggcattgggggagtgatgggaatgccagcagtgatgacrttgactactgactgagcacccactactatgactgagcactcactcgctagatactatcttgaactgctctgtgaggttgttgatattttcatttttatctgtgctttacaaatcaggaaactgggaggccgggcatggtggctcacgcctgtaatcccagcactttaggaggccaaggcaggtggatcacaaggtcaggagtttgagatcagcctggccaacatggtgaaactccatctttactaaaaatacaaaaaattagccaggcatggtgttgcatgcctgcatgcctgtaatcccagttacttgggaagctgaggcagga

SEQ ID NO: 48587 - DNA, 695 bp, Homo sapiens
cggagtccgcaggccgcaggtgttgtgaagaccactcgttctgtggttggggtcctgcaagaaggcctcctcagcccgggggctatggccctgaccccagctctccactctgctgttagagtggcagctccgagctggttgtggcacagtagctggggagacctcagcagggctgctcagtgcctgcctctgacaaaattaaagcattgatggcctgtggacctgctacagtggcctggtgcctcatactcctcaggtgcaggggcagggacaagagaagggggaagtaaccccatcagggaggagtggagggtgcctgagccgccatgtgggcattgggggagtgatgggaatgccagcagtgatgacattgactactgactgagcacccactactatgactgagcactcactcgctagatactatcttgaactgctctgtgaggttgttgatattttcatttttatctgtgctttacaaatcaggaaactgggaggccgggcrtggtggctcacgcctgtaatcccagcactttaggaggccaaggcaggtggatcacaaggtcaggagtttgagatcagcctggccaacatggtgaaactccatctttactaaaaatacaaaaaattagccaggcatggtgttgcatgcctgcatgcctgtaatcccagttacttgggaagctgaggcagga

SEQ ID NO: 48588 - DNA, 590 bp, Homo sapiens
gcgggggtgtctgatgagatggagaggagagagggtgaactgtggggatgtctgatgagatggagaggagagagggtgaactgtggggatgtctgatgagatggagaagagagaggggtgaactggaggggcgtcttctgggatggagaggagagagggtgaactgtgggggtgtctgatgagatggagaggagagaggggtgaactgtggggcgtctgatgagatggagaagagagagcggtgaactggaggggcatcttctgggatggagaggagagaggtgaactgtgggggcatctgatgagatggggaggagagagggtgaactgtggggrcatctgatgagatggagaggagaaaggggtgaactgtgggggcatcttctgggatggagaggagagagggtgaactgtgggggcatctgatgagatggagaggggagagggtgaactctgggggtgtctgatgagatggagaagagagaggggtgaactggaggggtgtcttctgggatggagaggagagaggtgaactgtgcgggcatctgatgagatggggaggagagagggtgaactgtgggggcatctga

SEQ ID NO: 48589 - DNA, 590 bp, Homo sapiens
gcgggggtgtctgatgagatggagaggagagagggtgaactgtggggatgtctgatgagatggagaggagagagggtgaactgtggggatgtctgatgagatggagaagagagaggggtgaactggaggggcgtcttctgggatggagaggagagagggtgaactgtgggggtgtctgatgagatggagaggagagaggggtgaactgtggggcgtctgatgagatggagaagagagagcggtgaactggaggggcatcttctgggatggagaggagagaggtgaactgtgggggcatctgatgagatggggaggagagagggtgaactgtggggacatctgatgagatggagaggagaaaggggtgaactgtgggggcatcttctgggatggagaggagagagggtgaactgtgggggcatctgatgagatggagaggggagagggtgaactctgggggtgtctgatgagatggagaagagagaggggtgaactggaggggtgtcttctgggatggagaggagagaggtgaactgtgygggcatctgatgagatggggaggagagagggtgaactgtgggggcatctga

SEQ ID NO: 48590 - DNA, 549 bp, Homo sapiens
ttctgccaaactcgatttatacgtgccccaatcattctttttccctaaatctgacgccgtgttgtagataataaagcagagaaagcagccatgtgatgggtctggacagcgacctgcctgccagggacctgctaacttgaaagtcctcgaaactcctctgagtcactctttgggggttaatgtaatgaaagtttctgcaaaaaaaaaatattatgttaccaggaggtatcaacacatttttgctgtwgcctattcgcatcttagtttatcttatattccttcacgttttatggattccaacgtaattcatttatttccattttagatgacattgctgaagctcagctttgtaactcagggaagctctcatgatgcctgttttatggacagaaacatgactcagggaaatgaggtgctggaggctgcacaagccaccaaggctctcagctgaaggtagctcagccccaagccccgtggccttcagcccatggcactgctctgtggagggcagggtagatcttcaccctgtggcactgttctgcggagggc

SEQ ID NO: 48591 - DNA, 549 bp, Homo sapiens
ttctgccaaactcgatttatacgtgccccaatcattctttttccctaaatctgacgccgtgttgtagataataaagcagagaaagcagccatgtgatgggtctggacagcgacctgcctgccagggacctgctaacttgaaagtcctcgaaactcctctgagtcactctttgggggttaatgtaatgaaagtttctgcaaaaaaaaaatattatgttaccaggaggtatcaacacatttttgctgttgcctattcgcatcttagtttatcttatattccttcacgttttatggattccaacgtaattcatttatttccattttagatgacattgctgaagctcagctttgtaactcagggaagctctcatgatgcctgttttatggacagaaacatgactcagggaaatgaggtgctggaggctgcacaagccaccaaggctctcagctgaaggtagctcagccccaagccccgtggccttcagcccatggcactgctctgtggagggcagggtagatcttcaccctgtggcactgytctgcggagggc

SEQ ID NO: 48592 - DNA, 566 bp, Homo sapiens
ctagctaattaccaattagccaattgccctctgtttcaagtcagtaagtggccaatagtatatgcaattagttaattgctattataattagctttatgaacagttgctttttttaattgtatgctaaaaagaaagagcccaggttggtcttgctaaaatttgaaccagatcatttaggcagtatcccaaaataccactcttaaattgtattaacttggctgattactgagatcttgccattttgcttaattgtatgattatstgaaagtaggaatagaatcctttgaactctgagattctaaggtgatttggaataaaatctgcctttttgaaattataatttattacttttgatcaaaattttcagagcatctatgccaagagaattctgctttaaaaataaaattacaagcgacaataattaccaggtatacaaattctggttttagggttgtatttgcattttctcctggcttcttgtgctcctcctgcatgtaaggatgtgattgtagagtgctggtttcaaggaatttctcttaatcaatcctgaacctaattacacctga

SEQ ID NO: 48593 - DNA, 649 bp, Homo sapiens
tgagcttcatttttaaaacttttggcctgttatttctgcaggttaaatgtctcttgtaaaacaactttataggtattaccgtcataaacctgagtgactaagaaatgggagaggaaaaaaaaaaacaccttttattgagaatgaagaaggaggaaggagtgaagtgcatgagggaaagcattaggtgtccagacatataaagaaaagagtcaggtgtagaaatttcacaaggtgctgtgtgtctgccttatgaatagaaataaagctctatgtgtgggggtctccaagccttagatgttgctgagtcccacacagaccttgcaaggactctataagcatagtaaaactttttaataaagtgctttgccactcaggatttccttctaatgtaactgtatggtaatgcacaagcaactctcactatctcacacacacacagtgtgacagggctcagtgctgcttcaggcatcaatttaatgctttcaaaggcccagcttcccaatcacctagaaagctctcctggatctcctttcaccctggtgagcgctctgaggggcaggcaggcccggctggagtrtgcaggtccagctagtcctctgcattaagaactgtgtaatagtcaaaataggatttcatctgctttcctggc

SEQ ID NO: 48594 - DNA, 1954 bp, Homo sapiens
gtatctttgctaccctccctcagtttccataagcaagatgaagaacatacactccttccccttgtattcaagtgtatggggtgtggggacaggtagggctggctggtgtgaggacaggtagttactagaggcaacttttcccagaacagaggagacgtccagcccaaaagcactcatgtgcaytcttgcaattctaagactgctggtgaggatactctcaatataagcctttggtttctgaaataaaaaagctgtgtctgagaagcagcttatgtgtttgtggtcctggaatagactgggggagggattttcaggtggtgcctatagatatacgtacagttgtgacatggggtgaaggctttcattgatggtgatgtcatgggttccctctgggaggatggaagccccagggaaatatattggtagtatgggattgaagtcctgggagcccattgctttttgtgggaaagcaatcctatggctcaccattgctctcatcagagggactttgtccccagtgcccacatgcaacatggattgaggccagggaagtttgggtttgactagactaggactgccctgctctgcagtcttttccagccttctaagggagggcatcagtggctcactctagacttggaaaaacagaatgaaaagggaatattttgattagagttgacttaggaaatattattatagggaattcatggaaaaacattgctttccaatttcagaactactcgaaatatctggtaggctaaatatagaacactattcacagccttgcaggtcctgaggtctggctaaatgtgagctctggggtggtgccttcctccctctcctcctccctctctctctctcttccccctttagctctctctatgtctctcactgtttctcattttctttatctctctttccttgctagccctggatgcttaaccatgaatgattatcaaccaagaaccttaattgtggtcccagtacaaactgttacttagtttgaaaataagtaatattaatgaaatttccctctgaaaaataacagctgaaacgagagagggaacgtttcacaaactaatagagctcacaaatgcatctttcagaatatgttttataaagtttatgataatctaagaaacagtgtaatcaccctgtaactccaggagtgagttacagaggaggtaattcaaaggatttttcatgctgggctgaaagaccttgctctttgtgacccctaaaggagatctatgacaatggaagagacagaattgagattagtgtaaaggaaaacttctcagctggaaggggtgtgaggcctgaaattcccttctaagtagaatcatcaaagtatattttttggtgatttaactttcccttcctttccttccttccttccttccttccttccttccttccttccttccttccttcctttccttccttcctgcctgcctgccttcctgccttcctgccttcctgccttccttctttctccttccttccatcctttctcccccttttcctgagggaattgaaaacaataaaaattcgaagaaaaaaatgtggacacctataatcatgcaaccattctctttcctcttccttctctcattttctatgaatgtacaggcaaataccatcatctgcagtggttatgttctataaagtcactgcaaacactgaattagcaaatattgagccattgctcctgggagaaatacagagttagggattgtgaacctcaggtcacaacattttcaccaacagatcaatccataactttattttaagtatatttctgtttaatggcatctcatctaacatatactgttgatgcattagcattgaactcatgacctatagcactgtgactcattcccaaatgaagcttatttaacacctgtattttctccagaaggtacttcacagctttgttgtgtttaggatcacc

SEQ ID NO: 48595 - DNA, 547 bp, Homo sapiens
tatttccaagggcccaggcttatcctctcctcttgaacgtcaccacacaggctctctctgggctcaaacaagttcctggttctaatgaagcagataactgcaaaatccagaagaccctggagaaatatcattagtgaggaatccatggcaactgggagtttcaggcaggacaatggttatggttaattgaccttgtggatattaaaatgggttttaggatttgggacttccttatttgaactttgccactgaccccatcctacagtgcatgtgcataagacatgctgtgagaagtggtttctattcactggagtgcattttacmcccacaagatttttcagttaatgttggactaagcatggatgtttggacttaggtaagtgtgacatatttggcttcatttgtagtgttaactttggaatgcaaagggtagtatatcaaaatataaaataagcctcttcaaggtgtttttgtggattctttcatactgcaaaagtaaaacgatttgccttctggagaattgaactaaattctaatctagtcttta

SEQ ID NO: 48596 - DNA, 538 bp, Homo sapiens
ttcacttgaggaaggcgattctgggccttcttacttcttcccctcagtgcattaaaagtaaataccttctccagaaatgaaaacacttggaaaacctttagctccagggtaatgaatacattttccaggaaggaaaattgggagctgccatctgcttactggcctcaaatcagtgagcttcagtcactcactagaggtaacagattggattgaaaaaggaaagctttgtccagcagccaatagcagcaaggattttggaaggagccaatatctattgagatgcctttaggaaagaagaaacagatatcacaattcaagctaacttaaacctgaagtgcgtgtggtgggtcttgggcctgaatggccagcgccatgtaatcctgaggctctggaccagcttcctgagatcctcttggggaccaccctatgtgctggmtttatcccacagcagcagcagggtctagacctctccaccctccacaaagacttcagaggaacagaaagtggccatgtcttctgtattagttcattttcacac

SEQ ID NO: 48597 - DNA, 528 bp, Homo sapiens
tgccacttttatctcatcaagaaggactttaggagtgatgacagctttgaactgaggagtcatttactaaaggattcaacatgtgttctgggagtcacaaaggaaaagtcagaaaagtgattccacaagcagacagcattctgtctttcttccctgcttttatggaattatcctagcttcctcctctctggaggttttctaagaacagatattcacaccggatttcagaggctacatgctgtactgggtctatggcacgacctcgaacagaacaaacccaaataaagaggacaaacrcaacatgttcttgctgctgaatacctcattccttcccagcagactactatggtgttgggaaataattgggaaagaaagtccatttttgagtacatgaagcttgctcaatgaattcagagtgttctctctgggaagactcaaggccacagggaaacatctgtctattctctcagcagtcacttacactatctgttccagatgttctgactctgagccaggaacagagaccaa

SEQ ID NO: 48598 - DNA, 571 bp, Homo sapiens
ccacgaggaaatcagatctttagagcaccagagatggaaataaagagaaatggaacagtagggaagaggagctctgtgcacttcaaaaatgagtatataaaaacaggttcaccaatttattttatttatttttttgagatgaagtcttgctctgttgcccaggctggagtgcagtggtgtgatcccagctcactacaacctccgcctcctggtttcaagcaattttcctgccttagcctcccgagtagctgggattacaggcatgtgccaccacacccagctaatttttctattatttttagtagagatggcgtttcatcatgttggccaggctagtcttgaactcctgacaagtgatccacctgcctcagcctcccaaagtggtgggattacaggkgtgagccattgtgcccagcctattttatttatgattttaaaaaattttagagatggggtcttgctggtctcaaactcatgatctcaagcattcctcctgccttggccacccaaagcactgagattacaagtatgagtcatcacacctgaccaggctcatcaatttagacttcca

SEQ ID NO: 48599 - DNA, 548 bp, Homo sapiens
tttaacattctagtactaactaccaaagttcaaatgctaactgttaaagttggtcactggccaggtgcattggtgcctataattccagtaccttgggaagccaaagaggattatttgaggccaggagtttgagaccagcctgggcaacgttagctgaaacaccaaagcctgtcaacacaattggatagactttagtcacaagccattgtctgctctgcaaacccaacaaacttcrtctcagaccattgtatgttcttcaagttcattgaattcccctaaaaattatttgctattcccctaaaattatccatctcccttcccctaagaaaaactgtataaccatccgtacctcattgtgtgatggggtaatcatgctatgattgttccctccatgcatatttataaatgtgtatgtcttttctcctgttaatctggtttttgtcagttaatttttcactgtaccttcagagaccaaaggagaagttgtcccttggtccctacacctctgtcacaaaatacagattcaggagagaaatgtagggtccagc

SEQ ID NO: 48600 - DNA, 600 bp, Homo sapiens
agcctagggatcttgcagtgtatatgtgaaggaaatgggtaacggactgttgagtgaatacagtgtatagattgtagcacatatggtgatctgtgaaacgggggtgtcatgacacaccccttcctgcatcccaaaattgtgggggtcagggtggataacgggcatttctgcagcctgcacagcagtgccgaatgcaggctgcaatccagcaatgtcactgctgggtatttatccaaagaaaggaaatggctgtgttgcaggcatrcctgcactcacacgtttatcacagcgctgttcacacagcagcctaggtgaggaagtgacctatgtgcccagcttcagatgaatggatgaagaaaatgtgtagatccacagtggaatatgatggagccttacaaaaggaaatcctgccatttgcaacaacaacgtggattcatctgggggatgttacattaagtgaaatgaaccaggcacagaaagacgaataccacaagatctcactcatgtaaaacgttgatcacataaaagttaagaagaatggtggttaccagggggtgaggagaggttggttaaatgatacatatttataggtagacagga

SEQ ID NO: 48601 - DNA, 1352 bp, Homo sapiens
tatttggacttatttctaacttctaatttatatttccgtttacattgctttttgtttgcttctttgttctccttttctgccttccattagattagtacaattttccttaacctgtccccatttttccccctggtatcttggtcacaatagattttatttctaaaatctatatgtttaatgattgccattrcgtttttaacatgcatacagaactttagtttttaaagactaaagttatccacaatctctgtcttctcagataacacaaaaatctttgcatactttacccacttacagtcaactggtaattacaataaagaattgaaatcatggcccaaaacactggcaatgcttctcagcctactaattcataggggattagaggcaccctgattaatttgtgaagcatgaacttttggctgattcactgttttacaccctgagatgctttggggcacatctcaagttcaagtgatacttcattcacagctcataatctctctctcaagttcccgaaagtgttctgaagtaggattggacaaaggggaactcagaatcctatgatccactactaggacctattttcataaatcagatttgtcatttgtcataattttcagtgagaacatcagggggctcctcctccctgcttgacacctgcttccctgtcctttgattctcaaaactttactgtgcatatacatcgtccaaaaaatcttgtaaaaatgcagattctgattcaattcagtaggtctgtattattattattattattattattattattattattatcagagacggagtcttgctctgtcgcccaggctggagtgcagtggcgcgatctcggctcactgcaacctctgcctcctggcttcaagcaattctcctgcctcagcctcttgaatagctaggattacaggtgcccaccaccacacccagctgatttttgtatttttagtagagacgggatgtcaccatgttggtcaggctggtcttgaactcctgacctcgtgatccgcctgcctcggcctcccaaagttctgggattacagacatgagccactgcacctagcccaggtctgtatttttaacatgatccttggtgatgctggtgcttttggtccacagaacccactttgagaagcaagagcttggagaatagaatttagctaggaaatttaagtttcagctctaggtcatggttccttgatgcttacagaataacagataaagaaactttctctttgaaggggttggggttcaggattattttaattctaaaggtctccttaaggtctggcagggtctctccatccctccttgggctcagatcagactggctaaaagtg

SEQ ID NO: 48602 - DNA, 1352 bp, Homo sapiens
tatttggacttatttctaacttctaatttatatttccgtttacattgctttttgtttgcttctttgttctccttttctgccttccattagattagtacaattttccttaacctgtccccatttttccccctggtatcttggtcacaatagattttatttctaaaatctatatgtttaatgattgccattacgtttttaacatgcatacagaactttagtttttaaagactaaagttatccacaatctctgtcttctcagataacacaaaaatctttgcatactttacccacttacagtcaactggtaattacaataaagaattgaaatcatggcccaaaacactggcaatgcttctcagcctrctaattcataggggattagaggcaccctgattaatttgtgaagcatgaacttttggctgattcactgttttacaccctgagatgctttggggcacatctcaagttcaagtgatacttcattcacagctcataatctctctctcaagttcccgaaagtgttctgaagtaggattggacaaaggggaactcagaatcctatgatccactactaggacctattttcataaatcagatttgtcatttgtcataattttcagtgagaacatcagggggctcctcctccctgcttgacacctgcttccctgtcctttgattctcaaaactttactgtgcatatacatcgtccaaaaaatcttgtaaaaatgcagattctgattcaattcagtaggtctgtattattattattattattattattattattattattatcagagacggagtcttgctctgtcgcccaggctggagtgcagtggcgcgatctcggctcactgcaacctctgcctcctggcttcaagcaattctcctgcctcagcctcttgaatagctaggattacaggtgcccaccaccacacccagctgatttttgtatttttagtagagacgggatgtcaccatgttggtcaggctggtcttgaactcctgacctcgtgatccgcctgcctcggcctcccaaagttctgggattacagacatgagccactgcacctagcccaggtctgtatttttaacatgatccttggtgatgctggtgcttttggtccacagaacccactttgagaagcaagagcttggagaatagaatttagctaggaaatttaagtttcagctctaggtcatggttccttgatgcttacagaataacagataaagaaactttctctttgaaggggttggggttcaggattattttaattctaaaggtctccttaaggtctggcagggtctctccatccctccttgggctcagatcagactggctaaaagtg

SEQ ID NO: 48603 - DNA, 1352 bp, Homo sapiens
tatttggacttatttctaacttctaatttatatttccgtttacattgctttttgtttgcttctttgttctccttttctgccttccattagattagtacaattttccttaacctgtccccatttttccccctggtatcttggtcacaatagattttatttctaaaatctatatgtttaatgattgccattacgtttttaacatgcatacagaactttagtttttaaagactaaagttatccacaatctctgtcttctcagataacacaaaaatctttgcatactttacccacttacagtcaactggtaattacaataaagaattgaaatcatggcccaaaacactggcaatgcttctcagcctactaattcataggggattagaggcaccctgattaatttgtgaagcatgaacttttggctgattcactgttttacaccctgagatgctttggggcacatctcaagttcaagtgatacttcattcacagctcataatctctctctcaagttcccraaagtgttctgaagtaggattggacaaaggggaactcagaatcctatgatccactactaggacctattttcataaatcagatttgtcatttgtcataattttcagtgagaacatcagggggctcctcctccctgcttgacacctgcttccctgtcctttgattctcaaaactttactgtgcatatacatcgtccaaaaaatcttgtaaaaatgcagattctgattcaattcagtaggtctgtattattattattattattattattattattattattatcagagacggagtcttgctctgtcgcccaggctggagtgcagtggcgcgatctcggctcactgcaacctctgcctcctggcttcaagcaattctcctgcctcagcctcttgaatagctaggattacaggtgcccaccaccacacccagctgatttttgtatttttagtagagacgggatgtcaccatgttggtcaggctggtcttgaactcctgacctcgtgatccgcctgcctcggcctcccaaagttctgggattacagacatgagccactgcacctagcccaggtctgtatttttaacatgatccttggtgatgctggtgcttttggtccacagaacccactttgagaagcaagagcttggagaatagaatttagctaggaaatttaagtttcagctctaggtcatggttccttgatgcttacagaataacagataaagaaactttctctttgaaggggttggggttcaggattattttaattctaaaggtctccttaaggtctggcagggtctctccatccctccttgggctcagatcagactggctaaaagtg

SEQ ID NO: 48604 - DNA, 602 bp, Homo sapiens
ggagtctcgctctgtcgcccaggctggagtgcagtggcgggatctcggctcactgcaagctccgcctcccgggttcacgccattctcctgcctcagcctcccaagtagctgggactacaggcrcccgccactacgcccggctaattttttgtatttttagtagagacggggtttcaccgttttagccgggatggtctcgatctcctgacctcgtgatccgcccgcctcggcctcccaaagtgctgggattacaggcgtgagccaccgcgcccggcctgaacaaagggttctgatgttaaaatgcatgcaaaagcataccaagtttcctcctaattttattattctaccattctaagatggagagtggtggctgctatggtttggatatgtgtccccacccaaatctcattttagttgtaatcccccatgttggagatagggcctggtaagaggtgattggatcatagtggtggatccttcgtgaacggtttagcaccacccctttggtgctgttctcatgatagagttctcacgagatctggttctttaacagtgtgtgatagctcccctctctccctccctcctgccctggccatgtgaag

SEQ ID NO: 48605 - DNA, 617 bp, Homo sapiens
tggagatgttcatctgctagaaacaaaagctcttccaccatctaacatcaaagcaagaggtgatttgtcatagggatcattggacatacctcattattcctctgcattatttcttatctaattagccaatagagacaagatgctttattcaaattaccctccctttgagggatatcactgtaaagtgcacrtaagaattctagtaaaccaggccaaggagagaaatgcctgagataacactcccctgcttgtttcttctgttctcctattcagactggaagcattggctgggatcacattatgttttcatctattcagtaatgtgaaagcttggatcttggaataacaaatgtgcttaactacccatggcataccacaaagaacattattttgacatatatatgaaaactggaaatataaattgctctggcacaaggaggacactttatctctcctagaagttaacagtagactactccaagataacttttcagagcactgcattttaataattctccagagtccttggcattagtcagaaattatcttttcttgcagtggcatgtctaatgtcagtgtactgcaaagagcttgcaccactgctggaacttgtatgc

SEQ ID NO: 48606 - DNA, 546 bp, Homo sapiens
tgcctcctgtgccctctgtacacaaaacrttagcccccactgcccagcagggcccagggatgccaaccctttggggactgtgccggcccaatggcaaaggagttgccttcttcccaaaaggtccgtcctgccccacccttccagaattcactctcaggcttggaactgaaaagaagccccatgctgtgatggaaaaacagggtagctgttccaccaattcatactctttattacataccatgttacacccaacaccaggacacagtttgacctgcagctgagggcatttcccctagcccactttccttcccagggcccccagtcccctgacgttgcctgagaagttcctgctcagggcaaccgaccagcaacagtgtccccttagctccctgaatgtcccaaagagacaactcctggactcagcagcgggctgtcttgtttccaaagcccaccctctgagaacggaagctctgccttggttctatgaaaacacagtcagtcctggcattttgaaaatgaaatttccctggaggatacttcacatca

SEQ ID NO: 48607 - DNA, 546 bp, Homo sapiens
tgcctcctgtgccctctgtacacaaaacattagcccccactgcccagcagggcccagggatgccaaccctttggggactgtgccggcccaatggcaaaggagttgccttcttcccaaaaggtccgtcctgccccacccttccagaattcactctcaggcttggaactgaaaagaagccccatgctgtgatggaaaaacagggtagctgttccaccaattcatactctttattacataccatgttacacccaacaccaggacacagtttgacctgcagctgagggcatttcccctagcccactttccttcccagggcccccagtcccctgacgttgcctgagaagttcctgctcagggcaaccgaccagcaacagtgtccccttagctccctgaatgycccaaagagacaactcctggactcagcagcgggctgtcttgtttccaaagcccaccctctgagaacggaagctctgccttggttctatgaaaacacagtcagtcctggcattttgaaaatgaaatttccctggaggatacttcacatca

SEQ ID NO: 48608 - DNA, 546 bp, Homo sapiens
tgcctcctgtgccctctgtacacaaaacattagcccccactgcccagcagggcccagggatgccaaccctttggggactgtgccggcccaatggcaaaggagttgccttcttcccaaaaggtccgtcctgccccacccttccagaattcactctcaggcttggaactgaaaagaagccccatgctgtgatggaaaaacagggtagctgttccaccaattcatactctttattacataccatgttacacccaacaccaggacacagtttgacctgcagctgagggcatttcccctagcccactttccttcccagggcccccagtcccctgacgttgcctgagaagttcctgctcagggcaaccgaccagcaacagtgtccccttagctccctgaatgtcccaaagagacaactcctggactcagcagygggctgtcttgtttccaaagcccaccctctgagaacggaagctctgccttggttctatgaaaacacagtcagtcctggcattttgaaaatgaaatttccctggaggatacttcacatca

SEQ ID NO: 48609 - DNA, 593 bp, Homo sapiens
atcttgccatctttcaaaatcaaactcaacaccacctcttccaggaagaccttcctgattcttccagtaggaattgatctctctctctctctctctctctctcccgaactgctacaggcccttgttgtctctgctcctttcgcktgattcctctcacattgctttgtgttatgtttgctttccaaacaggctgtgctcccaaggagtgagttgtattttggattttctgtactacaaattttctggtatctcacagtacttagcattacacctcacatgtaatatagacttgcagcctttagactgcaaggggcctgctatggactaaattgtattccccctcaaataattaatattttggagctgcaacccccaatgtgatggtatttgaatattagaccttggggaaataattaggtttagatgagatcatgagggtgagatcctcacgatgggactgctgtcctttcaaaaagagacaccagctgggtgtggtggctcatgcctcaaatcttagcaatttaggaggccaaggcgggtggatgacttgagtcaaggagttcaagaccagcctgggcaacatgatgaatccc

SEQ ID NO: 48610 - DNA, 593 bp, Homo sapiens
atcttgccatctttcaaaatcaaactcaacaccacctcttccaggaagaccttcctgattcttccagtaggaattgatctctctctctctctctctctctctcccgaactgctacaggcccttgttgtctctgctcctttcgcgtgattcctctcacattgctttgtgttatgtttgctttccaaacaggctgtgctcccraggagtgagttgtattttggattttctgtactacaaattttctggtatctcacagtacttagcattacacctcacatgtaatatagacttgcagcctttagactgcaaggggcctgctatggactaaattgtattccccctcaaataattaatattttggagctgcaacccccaatgtgatggtatttgaatattagaccttggggaaataattaggtttagatgagatcatgagggtgagatcctcacgatgggactgctgtcctttcaaaaagagacaccagctgggtgtggtggctcatgcctcaaatcttagcaatttaggaggccaaggcgggtggatgacttgagtcaaggagttcaagaccagcctgggcaacatgatgaatccc

SEQ ID NO: 48611 - DNA, 593 bp, Homo sapiens
atcttgccatctttcaaaatcaaactcaacaccacctcttccaggaagaccttcctgattcttccagtaggaattgatctctctctctctctctctctctctcccgaactgctacaggcccttgttgtctctgctcctttcgcgtgattcctctcacattgctttgtgttatgtttgctttccaaacaggctgtgctcccaaggagtgagytgtattttggattttctgtactacaaattttctggtatctcacagtacttagcattacacctcacatgtaatatagacttgcagcctttagactgcaaggggcctgctatggactaaattgtattccccctcaaataattaatattttggagctgcaacccccaatgtgatggtatttgaatattagaccttggggaaataattaggtttagatgagatcatgagggtgagatcctcacgatgggactgctgtcctttcaaaaagagacaccagctgggtgtggtggctcatgcctcaaatcttagcaatttaggaggccaaggcgggtggatgacttgagtcaaggagttcaagaccagcctgggcaacatgatgaatccc

SEQ ID NO: 48612 - DNA, 593 bp, Homo sapiens
atcttgccatctttcaaaatcaaactcaacaccacctcttccaggaagaccttcctgattcttccagtaggaattgatctctctctctctctctctctctctcccgaactgctacaggcccttgttgtctctgctcctttcgcgtgattcctctcacattgctttgtgttatgtttgctttccaaacaggctgtgctcccaaggagtgagttgtattttggattttctgtactacaaattttctggtatctcacagtacttagcattacacctcacatgtaatatagacttgcagcctttagactgcaaggggcctgctatggactaaattgtattccccctcaaataattaatattttggagctgcaacccccaatgtgatggtatttgaatattagaccttggggaaataattaggtttagatgagatcatgagggtgagatcctcacgatgggactgctgtcctttcaaaaagagacaccagctgggtgtggtrgctcatgcctcaaatcttagcaatttaggaggccaaggcgggtggatgacttgagtcaaggagttcaagaccagcctgggcaacatgatgaatccc

SEQ ID NO: 48613 - DNA, 555 bp, Homo sapiens
tcactcctgtaatcccagcactttgggaggccaaggagggcagattacgaggtcaggmgatcgagaccatcctggcaaacacagtgaagccctgcctctactaaaaatacaaaaaattaagtggcacgtgcctgtagtcccagctactggggaggctgagacaggagaatcacttgaacccaggaggcggatgttgcagtaagccgagattgtgccactgcattccagcctgggcaacaaagtgagattccatctcaaaaaataaataaatataaataaattaaaaaaaaataaatataaataaattaaaagaaccatctctcagtcacctgtctcagttgattgatttaattataattatctgagtcttagctccaaagttagtccatttataaataatatcattttttgcaagctaactcattttattgcccttcaaaattgatgttcatagatttctcggtttagaaagaaaaagtaaactcctcatccatctaatcacttggctcctttagccatggtttcactatttaatattatccaaagacacatcac

SEQ ID NO: 48614 - DNA, 549 bp, Homo sapiens
ggtgtctcagagtcagaccccacctcatatcccccagctccaacataacaacagtcagggctacctctcaagcatgacttgaggataagaaaagagatgagattaaaaacaactttgaaattaaggctttaatttgaactaaactttaatagccaaaagtggccacaaagctatgaaatcttcaccggatcatattgctggactggaaaaggaagatctaacagtctgagagaagacagtarttggaagcactgcagccattttatctttgatcccaccgagctgaaacttctcaacaaatataaatttgaggtgaacacattcagtctatagcaaggatctcttgccacgttgtaaaaactgtttacacaatggggtagagaagatgaggctaaaaaatggttttccattccatgccagaatgagagaattataatttcaaatgtaaacaattttcatacttccattgaatcttggttgtctggtcatgattaagactaaaggaactaaaaaactgattggaaagtcagaggctccaccctttgtccc

SEQ ID NO: 48615 - DNA, 534 bp, Homo sapiens
tagtttgcctatatatttttctttcacagtttaattctaaggattcaaatttactctttgctcccaataaagagtacattgaaggatataatgccatcttagacattcctgagaagatgcttacttggtgccaggcatacttctagtacatcatacacatatatttttaaaattcaagttttactctagatacatgtgcaggtatgttacatgggtattttgcatccaggcagtgagcatagtaaccaatrggtagtttttcaacccacacctctctccatacctcccccctccactagtccacagtatctgtggttcccgtgtttatgtccatgtgtgctcaatgtcattcctgagaagtaatgtctaagggacattatataatgtaagaagaattatagtacattatacattacaatttttcttatattatgtaattatgtattttatatataatgtaaatatataatgtaagaagaattatataatgggagaaaaagttttcagatatattttcaaaggagttatattaaa

SEQ ID NO: 48616 - DNA, 2037 bp, Homo sapiens
tgtcacataaaatcaaaaccaaacatgtagtctaagaaattatggtagacattgttgattggatactcaaagtatatttctctcttcttttctgcatatagaatgtcagttccattcaggtgtctcaccttcagcatggtctaagccaatcatgaagctcttttccagtggtgatcagggagcccagtgctggctgaggagaggtgagagagtgtcagctggggagacaaagaggtacacaggaagaggtggtacctcttttccctcttgatactttcattaagtataagacacccctagacccacagccaccaacttgtgaccctgtaaatggctaagttggctcatggaggatggtggaacagggagagaaaaagaacctaggtccttaatgagctgcgcaaataacccattctaaagctgtcctacctcaggatttattttccttcctacttaaatcaattgagttgggtttttctgttactcaaagttgaaaacacatcaaatgaaaaagaagtcgaaatgtaaataaaaacccgatgcattatttgaatggcttcaggcacacagcatgggaggcaaatgctattaatatgggcatcatccccactttccatgtcgagatgcgttttgtacattatttgccaagaaccccaagctggtcagcagttgaagtctcctgactccaacccagtgctgagacatatggtaattttcagttatggagaacatttaattaactaagaccctccatttcctaattgcagtaaataaaaacagtgggcatataacaactgacatgaacaggatgctttaaagctgacaaatgcatgcacatacatcagcattgcctagccatatgtgacctgcaagcctttcactacaaccctcttcaaaacattttaaaatagtcttaccattttggtgtagtatataacaaataagtgatttgaagtttaaacaaattatttcagagtatcatattaaatgttatcttctaaaattggctttaatgcaatcattaataacattcttaaaatacagtcattacagataagttccattttgtatcatttaacaagtatataatatttaatttctatttaattaaatgaaataaagcatcattgtctgacgcatatgctaaaaaatgatgtcatatctagttaggggatagaatgtatacaaaaaagtgttttaggactaaaatccttgacagtgcctcaagtgtaggcaaaaaactgtctttcaagaattggtgcctaaaattctggaatttcatgctttaaaacactgccattttatttatatattttctatgttttgtttataaatggcaggaggggaaagatttcaggccactatttccaagcactctgcaaataacatattgtgggtgtggatacagcctttattctcaacacatgaaaaaccaaactgaatataattgtcactctatttttctctttttaacactgtttttgaagtatgaaagacagcttgatagtctatatataaggatttttatcagatgaatgcaatttacagattggtgaaggtaattttgaagcaaaattgtagacttaacattttttgctcttaattagcttgtatttcatcatcaggttccttatgtttctagtctttaaacacagcctattatgggcacaaatcaaaatatatgactaagaaaaacaccaatttaaaattataacagtctcaagcatcccagcagtcagtgatgttcaaccaagagataaactgagtaaaggaatcatcagtgtcctcatctgccttcctccacctaaccactgtgtgtgcttgcttgttacataccaacaggctttcagtcttttmttataaatggaaaaaactgtggtgatcagggaacacttctacactgctggtgggaatgtaaactcgtagagccactatggaaaacagtgcggagattccttaaagaactaaaagtagaactaccatttgatccagctacaggttatctacccagaggaaaataagtcattattcgaaaaa

SEQ ID NO: 48617 - DNA, 1508 bp, Homo sapiens
ttgaatccttaccacgtgccaggggacacataagtgatcaagagaaacagtcttgggccgggcgcaatggctcacgcctgtaatcccagcatgttgggaggccaagttggttggtcatttgaggtcaggagtttgagaccagcctagccaacatggtgaaaccccatctctaccaaaaatacaaaaaattagccaggcatggtggcagacacctgtggtcccagctacttgggaggccgaggcacaagaatcacttgaacccaggaggcggaggttgcagtaagccaagatcacaccactgcactccagcctgggtgacggtagtgaaactctgtttcaaaacaaaaaaaaaagaaagaaaaaaaagagagagacacagtccctgctgtcacacagtttataatttaactagggtgtatcaatttaaaagtttaatgtttcaagtgaaagaaaacaatctcaaataggcttgagtaatacaggaatttattgtctcactggagatccaggcacaatttgatccaagattcaaacagcatggatccatttcttggctctgcttcctttgagttggattcattctttagccaccacatgttggaacccctctctcctggcagcttcaagttttccacgacggctgcagcagatctaagacataccatttaccaggctgacaagagtccaagttccagcaatccctggaggtccatcctgagaaggccatctcaggttatagaccagcataaatcgggagctcacaggacagaagacactgattggctcacgcccagtggggcccaccccctgatatgggaaagttgggccctttccacttccagaaatttgggcacctatttggaagggagaaagggccacaactaataactgtttatgatagaaggaaaaacaataaatatgcttatacttctgctctgagggaatcattcagcctgcagaaaatggagacatctcattactacctggcgagtcaaacacaggcctggggatccagagatgtatttggattccaaattctgtgtgggcccctatacacagctgacccttggggacactgtaaaggttgatacatgatagactttgctccttgatctggcccttcagtagttacccttggactgtattctgctgtgtgatagcttttcccttattgattgattgattgattgattgattgattgatttgagatggggtctcacccaggctgaagtgcaatggtgcagtctaggctcactgcaacctctgcctcctgggttcaaatgattctcctgcctcagcctctcgagcagctgggattacaggcgcatgccaccatagccggctaatttttgtatttttagtagagatggggtttcaccgtgttggccaggctggtctcgaactccttgcctcaagtgatctgcccgcctcggcctcccaaagggctgggattacyggcatgagccaccacagaggagagtatgtgcctgagagagatgctaaaagg

SEQ ID NO: 48618 - DNA, 542 bp, Homo sapiens
ggctcggtctcggctcactgcaagctccacctcctgggttcacgccattctcctgcctcagcctcccgagtagctggggctgcaggtgtctgccaccatgcccggctaattttttttgtattttttttagtagagaggggatttcaccgtgtcagtcaggatggtctccatctcctgcctcatgatctgcccgccttggcctcccaaagtgctgggattacaggcatgagccaccgcacccrgccgacttttaaactttttaactagcgatataatattttcagtcttttggccttctgcagctacctttccaaaaaaattgtggaatcttagttaagtgtttcggttgcagtttcctttactgttaccagttacccaaaatagatatatcaatcaggggcctttgttactgtagcagtgttacctcaaataaattcatttaaggccaggggtgttggctcactcctgtaatcccagtattttgggaagctgaggcaggtggattgcttgagcccagttcaagaccagcttgggcaacaaag

SEQ ID NO: 48619 - DNA, 560 bp, Homo sapiens
tatttgcatgtyttctttgattattaatgaggttaaatctgttttcagagatataaatatttgtgatggtcatttgagtctttaattattattttttgagatggagcctcattctgttgcccaggctggagtgcagtggcacgatcttggctcactgcaacctccgcctcccgggttcaagtgattctcctgcctcagcctcccaagtagctggaattacaggcccctgtcaccatgcctggctaattttttgtgtgtgtttttagtagagacagggtttcaccatgttggctaggctggtttcgaactcctgacctcgagtgatccaccttcctcggcctcccaaagttcttaagttttttattgctagtatctttcctgtttatttttaaaaagttctttatatagtcagtatattaattctctcacatttatcataggcatttttccaaatttgttatttagctcaattttgggatgctctttaaactttaaaaaatgtgtatatctaagcctcccccatatgaaaacaattaattagtatatataatatactgttg

SEQ ID NO: 48620 - DNA, 560 bp, Homo sapiens
tatttgcatgtcttctttgattattaatgaggttaaatctgttttcagagatataaatatttgtgatggtcatttgagtctttaattattattttttgagatggagcctcattctgttgcccaggctggagtgcagtggcacgatcttggctcactgcaacctccgcctcccgggttcaagtgattctcctgcctcagcctcccaagtagctggaattacaggcccctgtcaccatgcctggctaattttttgtgtgtgtttttagtagagacagggtttcaccatgttggctaggctggtttcgaactcctgacctcgagtgatccaccttcctcggcctcccaaagttcttaagttttttattgctagtatctttcctgtttatttttaaaaagttctttatatagtcagtatattaattctctcacrtttatcataggcatttttccaaatttgttatttagctcaattttgggatgctctttaaactttaaaaaatgtgtatatctaagcctcccccatatgaaaacaattaattagtatatataatatactgttg

SEQ ID NO: 48621 - DNA, 619 bp, Homo sapiens
atgacagttcttcattttctccttttctcctcctgtgtcatcccttactggtaatttacctgtcaaaaacggcagaaaacaccattattactaatattcaatacatttcatgatgaaaaatttatctattattgagcacatttatttgtgatgttaaaataaatagaaagtatggggatgcacttggaccctcagagtctttataaaggttattttaagrtgaaaacatttgagctgcaggagatgcagaaagaagtcttatctgaacttcccttatctgactatagcagagcctcccaaaaatacagctgccattaactcccctcaaaggcagtttcctcctaattcagctgccatgaagacatatttcctattcccattatcactgaaaagcccaagagcaccttcatgccttccccctgaatccctaattgcccccttcacctttgttaagttggtatataaacccttatctctggctagtcggtgggttactcattactgagcagctctcccatgcatgggtaaataaatattgtcttttctcttgttaatatggctactgtcagttaatgtgtagcccctcaactactgaatccaatttgagagagaaagaact

SEQ ID NO: 48622 - DNA, 668 bp, Homo sapiens
gaggcaggtgacacaaatgaaagaggagaacatgcagtaccattttacaggraatgagggaagggaggctcattctgtgtgaagggaatagttactgcttggttagaagcaatttttggtaattgggactcaattttgccaaaacttccaaatttttgagggaaactggaactctgtatttttatgtacagtctcctgataaatgttggcaactctttcaattatctccaaaaatcctgtgcctgtcaatcaaaatatatctgcaagaaaaatttggtccaagctctgacagttcgtgctcattaagctaaaaaagaacaatgccactaaactctgcccctgtccacaccgtcaaaagaacaaatgccccctgcctgatggcatgaaggcacggggagtgctagtgttcagcagataaacaatagtggcacctgccacatgtccacacgacttcacccctttcaggggacagagaaaaagcaaggacaggagcctattatcttagccaagaggccagggaaatgaaattacaggaaatgctgtgacatcaaggtaccagagggctctgagagaagggtccagagggttcaaagaggacctccaggaggacaggggtcccaaaccagaccccgaggatgggggcggttttggaaaacatggagggggtt

SEQ ID NO: 48623 - DNA, 535 bp, Homo sapiens
tgtttttggatagaataggctaggtagaaagggaatacaaaagaccaataaacaagccaaaaaaaaaaaaaaactaagaaaaatattatcaagtttagattttgcttctctctttaatgggtgataaggtgtagttgctctttatcgagcctcaactatgtgtagagttcttgcattacatattatttttatctcattcccacagaaaccaaatcaggatattattattttgtattatagactaagacttggcaaataagttctgtaaagggccaggcagtaagtattttttggctttatgaaccagagggtctttgtctcaactatgcaaattcagccttgtaatgtgaaagcagttacagacaatatgaaaacaaatggtatggctgtgtttcaaaacaattttactaacatctacagccagtgggctagatttggcttatggccagtagtgtgttgwcccctgttttgggtgaagaaactgagtatgaattttaaagctaatgaatcagtgaggtagtatttggattctggt

SEQ ID NO: 48624 - DNA, 535 bp, Homo sapiens
tgtttttggatagaataggctaggtagaaagggaatacaaaagaccaataaacaagccaaaaaaaaaaaaaaactaagaaaaatattatcaagtttagattttgcttctctctttaatgggtgataaggtgtagttgctctttatcgagcctcaactatgtgtagagttcttgcattacatattatttttatctcattcccacagaaaccaaatcaggatattattattttgtattatagactaagacttggcaaataagttctgtaaagggccaggcagtaagtattttttggctttatgaaccagagggtctttgtctcaactatgcaaattcagccttgtaatgtgaaagcagttacagacaatatgaaaacaaatggtatggctgtgtttcaaaacaattttactaacatctacagccagtgggctagatttggcttatggccagtagtgtgttgacccctgttttgggtgaagaaactgagtatgaattttaaagctaatgaatcartgaggtagtatttggattctggt

SEQ ID NO: 48625 - DNA, 523 bp, Homo sapiens
ggtgtcagtgggtcctgggtgcacatttgtggaacagtgaatgggtgaatccctgttttacagatggggaaactgaggctcaggaaggcgatgcggctcacccaggttcatagagccagaaaatggcaaggctgggatcggagacaccaggcctgcgtgagtccagagtcagctcgttttttttttttgattgtttgtttgcttggtttttttttttttttttttttttgagacagggtctctgtcacccaagctggagtgcagtggcaggatcttggctcactgcaacttccgcctcctgggttcaagcgatctcctgcctcagactcctgagtagckgggattgcaagcgcgtgccaccatgcccagctaattttttgcatttttggtagagacagggttttaccatgttggccaggctggtctcgaactcctgacctcaagtgatctgcctgcctcggcctctcatagtgctgttgcccaacctcaaaaaacgaaaacgggaagtttttgtcaacaggag

SEQ ID NO: 48626 - DNA, 523 bp, Homo sapiens
ggtgtcagtgggtcctgggtgcacatttgtggaacagtgaatgggtgaatccctgttttacagatggggaaactgaggctcaggaaggcgatgcggctcacccaggttcatagagccagaaaatggcaaggctgggatcggagacaccaggcctgcgtgagtccagagtcagctcgttttttttttttgattgtttgtttgcttggtttttttttttttttttttttttgagacagggtctctgtcacccaagctggagtgcagtggcaggatcttggctcactgcaacttccgcctcctgggttcaagcgatctcctgcctcagactcctgagtagcggggattgcaagcgcgygccaccatgcccagctaattttttgcatttttggtagagacagggttttaccatgttggccaggctggtctcgaactcctgacctcaagtgatctgcctgcctcggcctctcatagtgctgttgcccaacctcaaaaaacgaaaacgggaagtttttgtcaacaggag

SEQ ID NO: 48627 - DNA, 602 bp, Homo sapiens
caactcctgacctcaggtaatctgcctgyctcggcctcccaaagtgctgggatcataggcatgagccacgatgcctggccaatgctgccattttcaaacacctatacttgatatgtattcgtagatttaaataatgtggtccaatcaaaccttttattttctgatctttgttaatatataactataccagtaagtttgcatgtaaataaagtcattgctccacaattccaaaggagtgcatttttctgtatgaatgattttcatacagaaattttcttaccataatttatttacttggctctcattgatacaccatcagtttgttctagatctttcttaatgctgagaatattcttgtgaaaacattctggagcatgagctaaatcactgtgtgaataattccaaaatatggatttattaatagtaggccccagtacttttctgaaccttgatccatattaaaaatttgtctctccaaactcctgtgcttgggagggactttccagggtgtcctagggtctccacatctcaatgaaagctggggaaggagaatttccctcatcctgggcctctgcttagtacttattcccttttctgccttc

SEQ ID NO: 48628 - DNA, 602 bp, Homo sapiens
caactcctgacctcaggtaatctgcctgcctcggcctcccaaagtgctgggatcataggcatgagccacgatgcctggccaatgctgccattttcaaacacctatacttgatatgtattcgtagatttaaataatgtggtccaatcaaaccttttattttctgatctttgttaatatataactataccagtaagtttgcatgtaaataaagtcattgctccacaattccaaaggagtgcatttttctgtatgaatgattttcatacagaaattttcttaccataatttatttacttggctctcattgatacaccatcagtttgttctagatctttcttaatgctgagaatattcttgtgaaaacattctggagcatgagctaaatcactgtgtgaataattccaaaatatggatttattaatagtaggycccagtacttttctgaaccttgatccatattaaaaatttgtctctccaaactcctgtgcttgggagggactttccagggtgtcctagggtctccacatctcaatgaaagctggggaaggagaatttccctcatcctgggcctctgcttagtacttattcccttttctgccttc

SEQ ID NO: 48629 - DNA, 616 bp, Homo sapiens
gactgggtagaatctttatttcttgtgggaactctttcccatgagagctgcccaaggttgttctccctgctacccccaccttccacctcgggagatggtgacttcattcttctgaaaactcttgcctactttcaggtcaggcacggtggctcacgcctgtaattccagcactttggaaggccaaggcaggcgcaacacttgagttcaggagttcaaggccagcctggccaacatggtaaaaccctgtctcttctaaaaatacaaaaattagctgggcgttgtggcgggcacctataatcccacctacttgtgaggctgagacatgagaattgcttgaacctgggaggcagaggctacagtgagctgagatcgtgccattggagtccagcatgggagacagagtgagacaccgtctsaaaagaaaagaaagaaaactcttgtctactttctgcagataaattccctgagggtacataaacctgccacctatcacagtggctccttgatccaacttactattctccatgttttcaggagtatgccatttgtaaaacaggactgtcatcaacccaaaggtccactctctttttatggacatcaatatgctgctgtctca

SEQ ID NO: 48630 - DNA, 584 bp, Homo sapiens
tgcattccttatatcacgcagatctytcacctggaatcactttttttttgccttaaatataaccttttgggttacctttttaactaaaattttcattttttacctcatatggtcttattttatactgcttcttgaaaaacactattgttgtgaatagaaatctaggtttgcacttatttcttcagtaacttcactgtatccttccactacatccatgagtcactatatactggatgtgagtggagacaatttatattgtgactatagtcttcctgtgctacagaaacaaaatttgatggcggtggtgttttgttttgttttgtttttgtttttgcttttgttttgcttttgagacagagttttgctcttgtcgcccaggctggaatgcaatggcagaatctcggctcactgcaacttccacctcccaggttcaagcgattctcctgcctcagcctcccaagtagctgggattacaggcacccaacaccatgccctgctaatttttgtatttttagtagagacggggtttcaccatgttggccaggctggtcttgaactcctgacctcaagtgatccacccacct

SEQ ID NO: 48631 - DNA, 1742 bp, Homo sapiens
ttaaagcaacagaaaatgaactaacgcagacctcatcagccacttcggcctaagcaggaaggatttaaccagatccttgcacatgaacaagcacccaggagaaggagatgaaagtggattgccagggacttggaacagaggtctgtatgatgattaatggctttgcactaattagcaacatgtcattgaggtttaaagtgctgaggcaatttatatatatctaaaatgtggcaagaggtgggaagagagaaattttgcttgaaaaaagtatgttcattatacttctaatgacatattattttcagaatacaaactacagaaagtaaatctcaaaatgtgggaaaggacagggatacacagaaagagcaacaagaatgcattatcatgatcagggtctttattcattagaaagcaccaaaacaaacattaagctttcactaagcatcagattgttaaagctcracattcatttaactttcacaacaacccctgaggtcaggactattaataacatcatattattgatggggaaattgaggttttggcaagcttacaaaacttgtccaaggtcacaaagcttggagaagcagattaggaacccagtctgacctcagaggtcactttcataacccgtatgttataacagcctttcaaaagtttagaaatgcaggcaatccccaaataaaaacttctatggggaaagatagtgaggacaggcatgcaaaaataaacttcccttatttcacaattgcctagggccaacttccgatattttcctacatatagtcatactgcttttaaaaaatagtagaaaattattgctctaagcctacctgtagggaagcagagaagaagggtatttatctgccatgctcaacagacttgagattcatctgccctaaaacctctggaagcagccaccccagagacaatgtgacaactctcatccctgaagccagagttgattgaacaaggtaggatgcacagtttactagattcccctgggattttaaaataggagaggacagttagtggggctagacctgtaagggccagtggcttcaatggaccatctacagaaaaatctacaggaatacaggtggtgaggacagaaagacagaagaaaataggagatgtggcccctcagctatggagaagccttggctcccaacagtggtttatctcccattgcggggataccggctatcattagggtgtagcatcactaagaatgtctactgctgagtccttttaagaagcttactttttcttaaagcagattgagggttttgtgttgttttgccttttgcaatccagggccttacctggagctcgaccacaagcatgacttttttatccagacaccctgcccaacgcatttcaaagccttatatccacactgtctctgttatttttgtttctgtgttacaataacatcttccatttagtgccagagctctgctagacacttcatcacacaagtgtttctcaaatcttcaacattaatcgctcacttaattggacttctgtagacagacactcaattttagacaaattttaataaacagtccaaagaagtatgggaattgggaataaatataactgggtccattggttattcaataaatagttttggggcaattggatatccatttggatatgttccattactctgaccacccacccagaaaaataaataggaaatgaattaaattagttgtaaaaaaaaataaaatgctgaa

SEQ ID NO: 48632 - DNA, 1652 bp, Homo sapiens
taaagagaattaagctaaggagaggaaagtcacctcatgggaattaggggacaagagagaggaggggaaaaaaatggcatggttactctaatgtggggatgcaaagcagccgccaaaagctgtcccttagcagcaacgaaaggctattaaataaagagaattaagctaaggaaaggaaagtcacctcatgggaattaggggacaacagagaggaggggaaaaaatggcatggttacgctaatgtcgggataaatccacgttttcaaaacaatgttaccgcggaattgactaatttaagcacagagaaaacttactaaaaaccaaaataaaattcctaagtttctgctgagactttcaaagtaaagtcatgtatgattgaagttcctgaaaaaagaaagggaaaatagaatggaaatttttaagaaagagggagaaaaaaaagagatacagataaatattaattttcatagagctgaagagacacaaaagtcctcaaactgaaaggtcctgaactgtgaggggcagagtgaaaaataaagagatcctaaaaagctttcagaggggaaaaaaccatcaggctgcaacagtaaccagtaacagaatttatcagcaatatcgatgctagcatataacagagcaattccaaagtactgaatgaaaattcgcttgaatctaaaagttcatattatggtaacttatcagtcaaatatagaagcaaaataaaatcatattatttaggaggttacctatctttcgagaaagtttcttgagaatgtactccaagaaaaataaggataaaaacctaatccagtaagatatgatggacttaaatccaagtccagcgagaagaaattgcaggatgtcagacctgcaggaggcttagaaagcagactaaccaaattagaattcagtgggctccaagataaagaaagcagtcaaaataacagatggaattagtaaattggaaggtatgaaggcatatgattctcatgacaggaaaaacaagatagtccataaaattgcaggcaaaaaaatatgcccaggaaagttatgattaaaagatgaatcaaagaaaagtcacagacaattgaatactttgtagaatgcaagaaaacagaatccatttggccttggcactaagaaaattctcctttatatggaataggtatcttgatattggatccacagagaaggggatgtgtatttgtcctttctcacatggctataaagaaatacctgagactgggtaattcataaagaaaaaaagtttaattggcttgcagttctgcaggttatagaggaagcatgatgctggcatctgcttggcttctggggaggcttcaggaaacttacaatcatggtagaaggtgaaggggaaacaggcacatcttacatggaaggagcaggaataagagagagacggggggaggtgctacatacttttaaacaaccagatctcaggagaactcattcattcactatcacaagaacagtactggtatggtttggatttgtgtccccacccaaatttcacgttgaattgttaattcccaatgttggacgaggggcctagtgggaggtgactggatcatgggagtggatttcccccttgytgttctcaagacagtgagctctcacgagatccagttatt

SEQ ID NO: 48633 - DNA, 664 bp, Homo sapiens
ttaaactcacctacttaytttaccttcaaggagtatctgtaaactagtctatggtgtcttaaaaatttttgtaaggatttttgaatggagttgcccacaaaaacaaagaggattcaaaattttaaaatccctgtcataagagaagcctctttgtgtgctaagaccaaatattctatgaaaaaataagattgtctgcgtagacagttgggctgtgtacaagtccagccacatccaaatgcatttctgaggaccagaacttatatgaagcctcatttcacatgtcattaagaacatctgtcagcagaaagaatcatttcactttgaaagttttatgtcctgagggttacccagtgcattaagccctgggtgaaaattgagtaagccgaagatttgaacccattcaaatgaaaaagaaaaaaaataaaaaagcaaagcaccttgattttttcaatgagggatcaagctctgagctttgagattgagtccctatcctaaccttttgcacaatactcctgtgtggttgactaaatccaaaaaagcgtccagtttcttaatgtttcaggtatccaagcttgggtagattaactttccattcatgaaatgtttcattcaggtgttcaggtatattgaaggaaaaataaatgaaaacttaatatgtatttgc

SEQ ID NO: 48634 - DNA, 620 bp, Homo sapiens
cccaggcaacagagcaagattccatctcaaaaaaaaaaaaaaaaggccttgtaatgaacaaccaactcttgtcttactctacctccacatctgaggsaatcacttttaatcttttcaggtcttttttcttgtggttaatgctatagctctaaataatcaactggtttactgctttatcaatgctagattttgttgactttctgctatgaataaataaattctgatttaggtcttaaaatacacctccttccttctcccaatatagttgtattactatgtttagttcaattaataaggtgttggttatgactcagtaaatgttcactgcagatctaaacagtatactatgagtttcttttgtctttcatggagtttttaataacaagaaagtaatagtgactctccattcgttctttgtttttgcctactatagaactatcatataagattattttttaaagtactgtttttttctgggagaagtcctaccctccttctagacattcccttctcctgctctgatatgtgccagtggcttctgggtgtgttgttctcatccttaaacttccctggcctgatgtcctttgttggatctgttgatttatagatcccaagtcttc

SEQ ID NO: 48635 - DNA, 620 bp, Homo sapiens
cccaggcaacagagcaagattccatctcaaaaaaaaaaaaaaaaggccttgtaatgaacaaccaactcttgtcttactctacctccacatctgaggcaatcacttttaatcttttcaggtcttttttcttgtggttaatgctatagctctaaataatcaactggtttactgctttatcaatgctagattttgttgactttctgctatgaataaataaattctgatttaggtcttaaaatacacctccttccttctcccaatatagttgtattactatgtttagttcaattaataaggtgttggttatgactcagtaaatgttcactgcagatctaaacagtatactatgagtttcttttgtctttcatggagtttttaataacaagaaagtaatagtgactctccattcgttctttgtttttgcctactatagaactatcatataagattattttttaaagtactgtttttttctgggagaagtcctaccctcyttctagacattcccttctcctgctctgatatgtgccagtggcttctgggtgtgttgttctcatccttaaacttccctggcctgatgtcctttgttggatctgttgatttatagatcccaagtcttc

SEQ ID NO: 48636 - DNA, 620 bp, Homo sapiens
cccaggcaacagagcaagattccatctcaaaaaaaaaaaaaaaaggccttgtaatgaacaaccaactcttgtcttactctacctccacatctgaggcaatcacttttaatcttttcaggtcttttttcttgtggttaatgctatagctctaaataatcaactggtttactgctttatcaatgctagattttgttgactttctgctatgaataaataaattctgatttaggtcttaaaatacacctccttccttctcccaatatagttgtattactatgtttagttcaattaataaggtgttggttatgactcagtaaatgttcactgcagatctaaacagtatactatgagtttcttttgtctttcatggagtttttaataacaagaaagtaatagtgactctccattcgttctttgtttttgcctactatagaactatcatataagattattttttaaagtactgtttttttctgggagaagtcctaccctccttctagacattcccttctcctgctctgatatgtgccagtggcttctgggtgtgttgttctcatccttaaacttccctggcctgatgtcctttgtyggatctgttgatttatagatcccaagtcttc

SEQ ID NO: 48637 - DNA, 620 bp, Homo sapiens
cccaggcaacagagcaagattccatctcaaaaaaaaaaaaaaaaggccttgtaatgaacaaccaactcttgtcttactctacctccacatctgaggcaatcacttttaatcttttcaggtcttttttcttgtggttaatgctatagctctaaataatcaactggtttactgctttatcaatgctagattttgttgactttctgctatgaataaataaattctgatttaggtcttaaaatacacctccttccttctcccaatatagttgtattactatgtttagttcaattaataaggtgttggttatgactcagtaaatgttcactgcagatctaaacagtatactatgagtttcttttgtctttcatggagtttttaataacaagaaagtaatagtgactctccattcgttctttgtttttgcctactatagaactatcatataagattattttttaaagtactgtttttttctgggagaagtcctaccctccttctagacattcccttctcctgctctgatatgtgccagtggcttctgggtgtgttgttctcatccttaaacttccctggcctgatgtcctttgttrgatctgttgatttatagatcccaagtcttc

SEQ ID NO: 48638 - DNA, 536 bp, Homo sapiens
catgcttgtaatcccagcactttgggagggtgagacgggtggatcacctgaggtcaggagttcgagatcagcctggccaacatggtgaaaccctgtctccactaaaaatacaaaaattagccaggcgggtggtgcacgcctgtaatcccagctacttggaaggctgagtcaggagaatcgcttgaacctgggaggcagaggttgcagtgagccaagatcgcagcattgcactcccgcctgggcaacagagccagactccattccaaggaaaaaaaaaaaaaaagtaaggctaacctccatgtgaggttttctcacagacagagccatggtgccattattatctccattccagagtttgaacaaagcacaaggataaagtcaggagggaaaaatgaagtctgagcagctggtgtttgcttcagcctcttccggagccgcttctgagccatcagggaataggaaggagytattgccattccctgcacggccccagtgcgagcctgggctgtgacgcacagatatggagggacattgtc

SEQ ID NO: 48639 - DNA, 602 bp, Homo sapiens
tgcagagagaggggacaatgcacatctatcacaaggcagaagcagccayggggatgctgacattgtgagggtgaagggcaatcagctgtcctgaggcagaggagagctgagttaacagccaagcactagggtggagatcagaaaacactccatggaaggggcagcaggaagacctggtcactaagctgctttgtgccttgaagaacgtgtctgcctcctgagccagggggtcccaattcctgcaggatccctggccccatgggagtcctgctggtagacagggatagtgactgttctttggcagcaagagtaggacgtctctcagtgcacggatactctggccttaccagcgtgggaggctcccacacacaccacccacatgtggctcagcttggactggtccccacacccccatgcacctaaatcttactcttcaagacttcccacttgtaaaccttcccagatcttccttgcttctcctgttcttcctgaccagtaatgcatcttccctcagacctatcctgtggccagtggctctctacctttcactatgactttttttttttaagtcacccattacaggtttgaaaagtgacttgaag

SEQ ID NO: 48640 - DNA, 533 bp, Homo sapiens
agcatgatctcggctcactgcaacctccgctcccaggttcaagggattctcctgcctcagcctcccaagtagctggaactacaggtgtgcgtcaccatgcccagctaatttttgtatttttagtagagactgggtttcaccatgttggccaggatggtctccatctcttgacctcgtgatccacccaccttggactcccaaagtgctgggattacaggcgtgagccaccgcrctcagccgagacatcatcttttgtatgtgtgtgacacagccctcaggagatcctgagaacatgtgccctgcgagactctctctctaccaaaaaaaaaaaaagacgaacccaaccttgtttagagagaaatgtaatggtttagttttgaaagactgccttctgaggagggattggattttttttttcttctaaaaaatgtaattgtcaaacctgacaaaatcaagaaatggagaaaggattccctatttaatagatggggcttggaaaactggcttgccatatgtagaaagctgaaactgga

SEQ ID NO: 48641 - DNA, 1903 bp, Homo sapiens
tgaataaatataatcatattaacatggtatttctttttaaattagaattttttaaattattgctgaggttgaacacttccaaatgttattagggtatcatacggctcctttgcacacctgtctatcagagtcttcgcatttctttagatacatatttaaatatggatattaaggaaaaatactacattcgtggtaagtactttcccaaatttattgtttgctcttttattcctgatgcagagacttccagttttttaaagttgtaactatccccaatttttgtaatttctttcactgttttgagctattaaagtcctcccccagtcagacatttgatactctattttcttcttctttttccattaatctatttaatcaacttggaatatattgtggcaaactgtatgagatgaggatccaaatcgctttgatattttttccaagcagctaaccaattgtcctagcaccatttattatataatccttcccttcatcactgatttatcattgttgtttttagaaattgctttttgtatctccatctggccaagtgggctttataaaggttgcagggtaaaactgtttttctctcctagtcccacataatttaggacattggaaaaatagcatcctggctaagcacttggcctctggactgaagccaggctgcctggattcaaatcaagtcgccagctttcccacctgtaaaatggggctaatcagtgcacctaccttgcaggatatcatgagtattaaaggagtcaaaacacttaaatgcttaaaatagtgcttagcacatggaggaactcaataaatcttagttattattctttttcaaattatcttgtttttaatgttaacttgtttatttctcagatgggaaaatgaggcttagcaatatgaggtgatcctccaagctcacgtaccccaggcctcccacaccgatacatttcctacgagaacgcaggtcttccccggcatctcatgctcaggtcaagccccatggcattgacctacgtaggcaaattcctctatgagataaggagagggagggaaggtgagagggcgggaggatgcaattcaaacaggatgtgtggtaccatccacccttctctcagcatatgtccaccccatgtgagtggggagaccccgacagctgttcagcttgtctttcttagttcctgtggccttcttcaccacactgagtgggtttccagtgtttaaagatatgtattttcaaacaacacggcccctaaatgtaaaccaactaacgttattccatctggggctcaactgttccagcaacagacctctaatcctcctggagcaaaatccagctgtcatggccttcacaagaagtggctgccattctgcagcacggccctttcctaggggagtttattcactacaaggactatgagagtgaagtcacagccgcccagctgccacttgttttttgtcttaggtcattccccttttcctactttattctcctctaatgtgaacttcataaagtgcacactggactcttcaccatgtccccataatcacacaaccacacaacatctatagcagcaaaaayggttccttttgccaaaatgctaaaatcaagaattattattatttttggggggtagactggaagagcctaaagtgacaagtcgggatagagcatgtggcatgtgcagaataggatgcacttgcttgacaagaggcacaaaggaatgatgttcattgatggggacaggcatcggccctcactgcattggctggtggtgcactgacactgcaggtgaagggactcttcctcatgagcaagtttccacacttgggcttgagtagggcaaacagctaggtaatgtcaagacagagcacctaattctggctaatgcattacagagtt

SEQ ID NO: 48642 - DNA, 1903 bp, Homo sapiens
tgaataaatataatcatattaacatggtatttctttttaaattagaattttttaaattattgctgaggttgaacacttccaaatgttattagggtatcatacggctcctttgcacacctgtctatcagagtcttcgcatttctttagatacatatttaaatatggatattaaggaaaaatactacattcgtggtaagtactttcccaaatttattgtttgctcttttattcctgatgcagagacttccagttttttaaagttgtaactatccccaatttttgtaatttctttcactgttttgagctattaaagtcctcccccagtcagacatttgatactctattttcttcttctttttccattaatctatttaatcaacttggaatatattgtggcaaactgtatgagatgaggatccaaatcgctttgatattttttccaagcagctaaccaattgtcctagcaccatttattatataatccttcccttcatcactgatttatcattgttgtttttagaaattgctttttgtatctccatctggccaagtgggctttataaaggttgcagggtaaaactgtttttctctcctagtcccacataatttaggacattggaaaaatagcatcctggctaagcacttggcctctggactgaagccaggctgcctggattcaaatcaagtcgccagctttcccacctgtaaaatggggctaatcagtgcacctaccttgcaggatatcatgagtattaaaggagtcaaaacacttaaatgcttaaaatagtgcttagcacatggaggaactcaataaatcttagttattattctttttcaaattatcttgtttttaatgttaacttgtttatttctcagatgggaaaatgaggcttagcaatatgaggtgatcctccaagctcacgtaccccaggcctcccacaccgatacatttcctacgagaacgcaggtcttccccggcatctcatgctcaggtcaagccccatggcattgacctacgtaggcaaattcctctatgagataaggagagggagggaaggtgagagggcgggaggatgcaattcaaacaggatgtgtggtaccatccacccttctctcagcatatgtccaccccatgtgagtggggagaccccgacagctgttcagcttgtctttcttagttcctgtggccttcttcaccacactgagtgggtttccagtgtttaaagatatgtattttcaaacaacacggcccctaaatgtaaaccaactaacgttattccatctggggctcaactgttccagcaacagacctctaatcctcctggagcaaaatccagctgtcatggccttcacaagaagtggctgccattctgcagcacggccctttcctaggggagtttattcactacaaggactatgagagtgaagtcacagccgcccagctgccacttgttttttgtcttaggtcattccccttttcctactttattctcctctaatgtgaacttcataaagtgcacactggactcttcaccatgtccccataatcacacaaccacacaacatctatagcagcaaaaacggttccttttgccaaaatgctaaaatcaagaattattattatttttggggggtagactggaagagcctaaagtgacaagtcgggatagagcatgtggcatgtgcagaataggatgcacttgcttgacaagaggcacaaaggaatgatgttcattgatggggacaggcaycggccctcactgcattggctggtggtgcactgacactgcaggtgaagggactcttcctcatgagcaagtttccacacttgggcttgagtagggcaaacagctaggtaatgtcaagacagagcacctaattctggctaatgcattacagagtt

SEQ ID NO: 48643 - DNA, 622 bp, Homo sapiens
gagatgcggtttctccatgttggccaggctggtcttgaacttcagacctcaggtgatccacctgtctcgccctcccaaagtgctgagggcatgagccactgcacccggcctagattctttatgagattgccgagctgtcacctaagaaatgtcctggttgtgcttygatttggtggggaggtgtgggacaatgacaacacctatgaatgtgtagcttcaaaaactggtgtggccaggcatgatggctggagagggagggacaaatatcactaccttgaggatttgcaaaggcctggctccatcctggactctgtttccagacattaccccccagtccccaccccgcgtgctacaggggctggtgagggttttaagacccacacctaggtgagcagtgtgggatagaaaaaagggcacaggcagggccatggggaatgagcccataactgtggtccaaactccctgaatgccatccttattctggaactttccttgttagcttgttagaactggctgtctgctctcccttctccagtgacagccgtcccctgtaggcctctgaagagggtcagcgctgagctctgagcagccctgctgtgtcagcagcctgagcctgccctgg

SEQ ID NO: 48644 - DNA, 1039 bp, Homo sapiens
gcaaaaaatttcttgtgacttgctctattgtgatattcgccttattgtggtgacctagaaccaaacctgcaatatctccaaggtgtgcctgtacccctgaaagcagagctggagtaaagacttgggtgtggatggtttatttgggaagtgattccaagaagcaagagtgagatgtgggaagagtgagccaggcaagaaaaaaaaagccaaaataatgaaatgccattgaggctgctcccatggactttttttatgcgggacctaccgagaggctctggaaagttatccaggactgtccacctgaaacgtgagcctcgagcatttgcccacctgtcccacacgggttgaggtcttcccctgaggctgttaacctgcaagtgtttctgggctgtatttgtgcttaggcaaaatcctacaatagtggagatgtcccggggcggaaagtgtagcttgagtttgctggcagcacaagggaagcctgtgcttccatggaactccccacggtggctgagactgaatgaaaggtgcgctgagaagacctgacgcagtcgtcattgcacggaggaatcgcagccatcgatcttggcaagaggacccccgccctgaatcctgcgcttgagagggtgcctctctggccctccactgactgtamcccggcccacccagagctctcaccctctgttctagggcacacgctgggcactcaggcccctggccaaatgtacctgagcctgcatggcctcttccctgggtccatttcaaagtgaaaactgtgcttgttgaaatggtgcccaaggctctgctgtctgaaggggtgagaattgtggatggagcttgtatggggcctagggagtcccccacacaggggtacgcaaggcttctcaagtaaggacagggctagctacgatgaaagaaaaaagtttagcctggggctgaagatcagctctccctttgctaccacattctctggcagagcaccaaggaatcagagaattctacactcgacttcgaccttgtgggttattacggtggtatattt

SEQ ID NO: 48645 - DNA, 532 bp, Homo sapiens
aaaatctaccacttatttttcagggtgactatttcaaacttctaccactgaaaatctgtacattatcatatcccttcttcttttcaacagacaactggccttctattttatggtaaaatagaagtcacaagacagaaggaaayactttctcctttgctgccacctcaagcttcccggtgtttctaaagggtcgtgttcaccttcctaattaggacgatggaagaagcatctctcttcttgcataaaactaatccctccccttatgatctagatcctattttcaacagctcctccagggatttaatttcataaatgatctactttctcacctgaggtttcaacactgttctatactggggcttttcccatcagtatttaaaggtgcttaattctcttcccgcaccctctaccccaaattatttttctttttatgtatctcatcctatctcattctcatgtcacaccctcttcacagacacactcatgggaagagtcgcttgcagtagctccatacagccaggagcgctcagta

SEQ ID NO: 48646 - DNA, 548 bp, Homo sapiens
gatttaaacactcactgagaacctccaaatgccagcctgttctgtaattttcttttatctactaatgtacagggaacagtttccatttccttagttaatatttcacagcaccatttttaatagatgcataataatccactgtayagaggtgtcatgactaatttagccaacaagtggcaaaagttttttgtttggtttgatttctgaaatacaaatatttaatctcttcagcaacctttccaggttaggtgagttccaagtgctgaactgtataggatacgctcaataatgtaagctgttattactaccataaccactattactattaccacacaggtgccagggacatatccaagttcagttgagtatttggggctttgttaaatgtttctctggaacccaagaaaggtcagggcaggagatacatatttgaattattatctggatacaaatacagagaaaaacatttttattctatttttttcttttatagtttttttaaatatctttttttatttttaagtgaagggatattttcgcagatgtca

SEQ ID NO: 48647 - DNA, 534 bp, Homo sapiens
tagaggaagaaggcataacaagaaagatgggatctgagttggttggtatggactggtggttattagcttgagttgcctgctggaatcacctagggagcttttaaaaatgyccatgcttgggactcaccctgagaatccatttaactggtttggggagagcccaggggttgctactcaggagagcaaccctcatgatcgcaatgtgcagccagggtgggaagccccaggaacagacaaatgccggctctcaggttgtcatctccatcaaacccctggtgggccttctccatgcttttggggggtctaacttttggcagtgccctgtccacatatctctcccctggatctaaagggccccatggagcagatgccagctacaggctcttcccttccttgggagttctgtgtccttaagtgaagaggagactttgtggatggactgactgaggggccgtgggtgggagacagatgagctgcatagactcggcctacagggcctaggggtgacattggatggggccacatgacaggtgg

SEQ ID NO: 48648 - DNA, 564 bp, Homo sapiens
tcaagagatcctcctgccttggcctcccaaaacattgggattgctagcatgaaccactgagcccagctctaattctaaaamctttaatatgactttcaagattttaggtaatcctggggagtgaatgtgacttttactattttacataataagtactcaataaatgtttgattgctctggttccatggtctgtcttggctggagagggttcctctcagctccacactcagccttccacactctgccgtgacattgccactttgccagctggatccatgccaggctctcccaacatggcgggaggagggaggaaggacatccttcttcctgtctacttactgctccaggcagcatgcctcagcagtgggtcttcacctagtagtgacaataggttccagtttccagcttttttgggggggtgttaggaaccgaatattcatgtctccccaaattcctattttgaaaccctaacccccagtgtggctgtatctggaggtgaagcctccaaggaagtaactaaggttaatgaggtcataagagtgggaccatgatccgataggatta

SEQ ID NO: 48649 - DNA, 519 bp, Homo sapiens
tgcccgagtgtgtcctgggacatggtggggtgggggctccccgactcctgggaaggggaagtctggggtggcctgtcctcccagctcctcgccccactggytcctctccccatgagtcatgggaaaaagcaacaaaaccaaccgcagggagatataatatctcttcctgtatctgtgacagctgtcttgttggtctggccgtctgttcttcctgtgagcatctgaatccgttcagaccaagctcttcctctccttgagcaccctctatggctcccaccttacccagtaaaatccagtcttccccaaggcccacaaggcttggctgtgtgatttgccctgtcacctccagctctcttcccctcattcacttggctccagccacagcaccttcctcactattccccaaacaaatataccaggcccagtccagcctcagggcctttgcatgtgctgttttcgccacctggaatacctttccctcagaatttttttttatcttttaattattttgttttttga

SEQ ID NO: 48650 - DNA, 917 bp, Homo sapiens
gaccacggttacgttaccttcctatgtgttctacttcttaatgttggtgattgccacaggacggactcgtcttttgaaaaatcacaaaagttctttacttatgatttatgtatttttctaggccgggcactgtggctcatacctgtaatcctagcactttgggaggctgaagctagcagatcacctgagctcaggagttcgagaccagcctgggaaacatgatgaaaccccatctctaccaaaaatacaaaaaaatgtagccaggcatggtggtgcatgtctatagtcccasctactcaggaggctgaggctggagaatcacttgaacccaggaggcagaggttgcagtgagccgagatcgcaccacttcactccagtctgggtgacagagcaagactgtctcaaaaaaaaaaaaaaaaaaaaaaaaagagatgcatttttctatatgcatgttgtgtttcagtaatgtttatttaaattaaataaaatgatttatttaatatttaaaaaatcttaatatgtacacatactgattgctcaataagtggtcatcgttactattattattacatgtcttttgatttaatgtaaggtgaagcacaggtcaaaggtacttttaaataaagacataggcttatgtaattccataatttcaatggagatgtttctattttttttatggtaaagcaaaggctttggacttcactatttgatcccaatacatattttttctcttgtgcaaatttgcttttttggagggatcatttagggtcaattgtttattgtctgtttcctatgttaactgtaactttagctgagttacataatcagagatgagtagctgatgaaataaaagcactcagagtttcttatgatgcattaaattgccaaagttcctgtaagttttcaatgaaaca

SEQ ID NO: 48651 - DNA, 1988 bp, Homo sapiens
tcaggagagaaaaacagatagtggaaagtgtgtggcagaagcgcttgctttcactggcctggaggaaaagtcaaattttgagtcagaagaaaaagggtagcaacactgagaagtctgtgtcctggctgcttgtgtggtcaggtgtactgctggtaatcaaactatgaacctggggtccatatgtccttctctttataaaagtacsaaataagttagggcttaagattgaactgcaatgaaaattatttttgctttcctttttttatcttaaaaatttttaaagggattttccaagtttatatactgtttatctcatatctggaacacttttaaattttggttagatttggagtaagtttgattatagtcttttctatagtcttttcttgatccttaaagaatgattcatttgattgctgtttcttatttcactgaacttttaatcatgtcacaatactatttttaggagtgtctatggatttctactgcctgagaagataaagccccaagtcttcacattaaagactctcataatctcacattggctttcttttcagtccttatgatccagaaacaccaggttacccattagttgccaagcacattctttaccgtcttcttagtgtccattcatctaccctcccgccaccatatctcctccttcatgaagctttcccagcacaggaaccccaggtggaatgaatcacttctgctcccagaatcctctgctcccagtgatggccattgtggatcctgctgttcctatgtgtataacccccttgctgtgtaggctgtaagaagcatgaggacagggactgtgcctattcttttttataactggcatttaacatagagcctggcatatgacagatgtccaacaaatcattttagaagaaaataattttcttaattaatgaatttttcattgcatctaaaaattagggggctgaatagtcctttaaatggtggatgcttctttggtctgttttaactttataaacttacttaagtggttgtaaaatgaagagtgctgtaaatctgttaagactacatcgtttcagttaaggatgactgattaagcacatgtttttattcctactcctcttccaaatgtccatagaactgctattccccccacacagaaaaactagtgaaaatatctgcattaatgctgcaaaatagggaaaagcattatccacatgaaaacaacttggaggaatttctgctgaatatagtgcagaggcaagaagtcagatgaaacccacccatagttgaagatatgcaaagtagcccccaccggagcagccaatggaaaagcacccctgacgtgagctcttggaaatctccttgaatcaaggccttggtgcgccatctataaacgctgctaaaatgtcgtggatataaatggaaaagttgaggctggttgacaaagttgataaaacctctaaaagatgattcaaatgaacaaaatgtgtcaaaaacaaattatgagataatcagggaaatgtgaacccagactggatatttaatatttcaatgattgttaaatttcctgtggaataatggaacatgagactttggttacactttgtatttatttatttatttattactattttactttaagttctgggatgcatgtacagaacgtgcgggtttgttacacaggtatatgtgtgccatggtagtttgctgcccctattgacctgtcctctaagtttcctcccctcactccccaccctcccaacaggcctggtgtgtgttgttcccctctctgtgtccacgtattctcattgttctactcccacttatgagtgagaacatgtggtgtttagtttcctgttcctgtgttagtttgctgaggatgttggcttccagcttcatccatgtccctgcaaaggacatgatctccttcctttttatggctgtgtagtgttccattgtgttatgtaccacattttctatatccagtctatcattgacgggca

SEQ ID NO: 48652 - DNA, 1988 bp, Homo sapiens
tcaggagagaaaaacagatagtggaaagtgtgtggcagaagcgcttgctttcactggcctggaggaaaagtcaaattttgagtcagaagaaaaagggtagcaacactgagaagtctgtgtcctggctgcttgtgtggtcaggtgtactgctggtaatcaaactatgaacctggggtccatatgtccttctctttataaaagtacgarataagttagggcttaagattgaactgcaatgaaaattatttttgctttcctttttttatcttaaaaatttttaaagggattttccaagtttatatactgtttatctcatatctggaacacttttaaattttggttagatttggagtaagtttgattatagtcttttctatagtcttttcttgatccttaaagaatgattcatttgattgctgtttcttatttcactgaacttttaatcatgtcacaatactatttttaggagtgtctatggatttctactgcctgagaagataaagccccaagtcttcacattaaagactctcataatctcacattggctttcttttcagtccttatgatccagaaacaccaggttacccattagttgccaagcacattctttaccgtcttcttagtgtccattcatctaccctcccgccaccatatctcctccttcatgaagctttcccagcacaggaaccccaggtggaatgaatcacttctgctcccagaatcctctgctcccagtgatggccattgtggatcctgctgttcctatgtgtataacccccttgctgtgtaggctgtaagaagcatgaggacagggactgtgcctattcttttttataactggcatttaacatagagcctggcatatgacagatgtccaacaaatcattttagaagaaaataattttcttaattaatgaatttttcattgcatctaaaaattagggggctgaatagtcctttaaatggtggatgcttctttggtctgttttaactttataaacttacttaagtggttgtaaaatgaagagtgctgtaaatctgttaagactacatcgtttcagttaaggatgactgattaagcacatgtttttattcctactcctcttccaaatgtccatagaactgctattccccccacacagaaaaactagtgaaaatatctgcattaatgctgcaaaatagggaaaagcattatccacatgaaaacaacttggaggaatttctgctgaatatagtgcagaggcaagaagtcagatgaaacccacccatagttgaagatatgcaaagtagcccccaccggagcagccaatggaaaagcacccctgacgtgagctcttggaaatctccttgaatcaaggccttggtgcgccatctataaacgctgctaaaatgtcgtggatataaatggaaaagttgaggctggttgacaaagttgataaaacctctaaaagatgattcaaatgaacaaaatgtgtcaaaaacaaattatgagataatcagggaaatgtgaacccagactggatatttaatatttcaatgattgttaaatttcctgtggaataatggaacatgagactttggttacactttgtatttatttatttatttattactattttactttaagttctgggatgcatgtacagaacgtgcgggtttgttacacaggtatatgtgtgccatggtagtttgctgcccctattgacctgtcctctaagtttcctcccctcactccccaccctcccaacaggcctggtgtgtgttgttcccctctctgtgtccacgtattctcattgttctactcccacttatgagtgagaacatgtggtgtttagtttcctgttcctgtgttagtttgctgaggatgttggcttccagcttcatccatgtccctgcaaaggacatgatctccttcctttttatggctgtgtagtgttccattgtgttatgtaccacattttctatatccagtctatcattgacgggca

SEQ ID NO: 48653 - DNA, 641 bp, Homo sapiens
tggaaagtgacaatcatcttcattaatgatcatggttcccataaaatcatccttatatcctatcttctctcagtataaaatactcaacatcagtttttacaattaattacaaacacgcctctatgttttactcaaagcatagtcttgaaaaggcagtggagttaaacaacgaacccttcggcaaatggcatctgcatagttttaagtaagattttgccgtcatagactgtaaagctgcctttataggtgtctcagaatccagrtttatatacaactagtacttctgacttgcgcctgtgtctgttcttgcagaatgaagtacctctggacgtcacacatgtgtgtgttcgcatcattcggcctatgtagccctgaaatatgggagttacttctgaagtcagtccatctttataacccaaagagggtcagtgtcatccctttttccatctccttttatgacttgcagtatttctttcataccacttctttttttgtttttcagtagctgtgagataaaatggatactgaaattgaagctgaaaatacataattgatatattaagattttatagggaattattttaaaataattttattttaaaaaattacttttttctcagactataagttagatatgttca

SEQ ID NO: 48654 - DNA, 1017 bp, Homo sapiens
aaaaactatttacaaatatacgttcgaattatcataatttctgcatttgttggcaaaacctcacctggagttattttggttataaacaccaatgccaaattcactccactgagatggatcattctggaaaggggaatcaaatgtaatttagaaattatttgaggttatttaaattcaggaaaagagactctgcattcaaaatgcattttctttctgtcattgttcagtaatgctcatcattttccttatatataaaaaccatatttagttagagactctttcccacrtggtattcaagaactctctaggcaaacctgatctagtgcagtagctaatttgaatcatctgaataagccatgagttatcaacttcagagaccactgaatgaatgcaagttgcccagcagctaaaacatcaaagtcaaacaaatcacaacattcagaagaaaaatatatttttcatattgattttttcttatatgtatgatgttcaataaatcacatcactggtattcactaacataagtcttattctcctagaatacaacatcaaatttaataaccacttttgttcaacatagaagatgaaagtcagtttctattgctctaggcagactgtatagtcaaaacacaagaaacatcagagaaaaggaaaatggagaaaaatgcattagatattaatctcatattcactgggaaaacaaaaaaatctttacctgtttttcctttcagagtttaaaaagatgtaaattttcttttgccctacctactctataattcagagctctttatccaaagcccttctttttttaccttatttcagccatgaatgtctctcaaatattgtcagtattaaacaaaaaacatgtctcttcttgaccctattttattcacacctcttgatctttcatttgctttcacaaaaattattcaacattcacagatacactagatcccaaagataacatacccttgtcacacttacctttctaattataacctggttctcagatctgaa

SEQ ID NO: 48655 - DNA, 604 bp, Homo sapiens
tacagggcatatgtggcctcatggcccccaggaaatatggctgtttccacaagtgctgagtccactctctccatcaatcctaagatgttagttccacagcactgccagcattgggctttgtctatttctttctttgtcatttttgagasggggtctttctctgtcacccaggctgaagtgcagtgatgcaatgttggttgtaatggctcccatttcatttctaattgatcttatttggctcttctctcctcttttcttggttaatcttgccaatggtctatcaattttatttatttttcccaaaaatcagctttacattttatttatattttgtattattttgtttcaatttcatttagttctactctgatgttggttattttctttcttctgctgggtttgggtttggtgtgttcttgtttcttgagtttctagaaatgtaaccttagattgtctatttctgctctttcaggctttttgatgtaggcatttaaggctataaacttttagcatgctctttgctgtattccagagattttgatagggtgcatcactattgttcagttagaagaatttttaaatttccatcttgatttcatatttg

SEQ ID NO: 48656 - DNA, 604 bp, Homo sapiens
tacagggcatatgtggcctcatggcccccaggaaatatggctgtttccacaagtgctgagtccactctctccatcaatcctaagatgttagttccacagcactgccagcattgggctttgtctatttctttctttgtcatttttgagagggggtctttctctgtcacccaggctgaagtgcagtgatgcaatgttggttgtaatggctcccatttcatttctaattgatcttatttggctcttctctcctcttttcttkgttaatcttgccaatggtctatcaattttatttatttttcccaaaaatcagctttacattttatttatattttgtattattttgtttcaatttcatttagttctactctgatgttggttattttctttcttctgctgggtttgggtttggtgtgttcttgtttcttgagtttctagaaatgtaaccttagattgtctatttctgctctttcaggctttttgatgtaggcatttaaggctataaacttttagcatgctctttgctgtattccagagattttgatagggtgcatcactattgttcagttagaagaatttttaaatttccatcttgatttcatatttg

SEQ ID NO: 48657 - DNA, 902 bp, Homo sapiens
caaaggagttagaggattcagctagcagccattgaaattcaatatatcttgtctttctgaattcccataaaatactttaatgttccattgattgccaactcaactgttttaaccagtacctaggacctacttggcagacagtcagttttgcaagatattatgccatttaattgcatgataatattacattcatgatggtaatataaatgaggcagtaaaaagcagttgtgaataattaaatgtcaaggactaagaaaatacattggatgacactgaagcatggtataactttagaaagacacccttcaatttcgracacaggcaggcagcgtatttaatgagcagaacctatattcttgttaagtttcactgctagaaccaaacctattttttcataaaggttcaccagtctttagattctgctaaaactcagttggagaatttcttttcacagcttctactgtctaaggtttcacaatataagaaatataaagtttctcctcttctaaagttggaaagttttatataagaattttcttgcgtctccattttcctcctctactgatcacaactccctcctgctacctcatgtcctttggttcccgggcaggggaattcttcagaaaataatccttccaatcactctctgtccttttcccctcaggtctagataagacaagccccctcaggaagccaggacaaagacgtgggagaaaggcaggtagagtggtcaagaaatgttcttttcaggcaggaattggggtcctcagcctatcttggcagagactccagcaagaaaaatatctaattcattcatccaattaagtggctcttaagcacctgcataggttaagagctggaacagaagtggaagggcaaagataaataccttccatccgatt

SEQ ID NO: 48658 - DNA, 576 bp, Homo sapiens
ggccataaaacacaaattatttccaaggacccaaagaccaatcacactcgatgggttaccatacctgtaagtatcaaaatattgtggaaaacatctgagatgaaaaccagaaatttaaagatgaattgaccattgattcaattcaattcaaggctttaatttaatagctctgtgagrttaaaaaaaaaaaaaaaaactatgctacgactggttccattcaaaaaaatatttttatcattgttgcaaatctgccaaaactaaacttacatttgtggagatgggcaattatttcccaattgcatttaagaattataccattggaattagaagccctgagttcttgtctttcagcttaacctgggcaaagcacttctgtttcttcctattcggaagacaatctttatctttcagataccttctacctccaacatcctatctgtttatgattctatcttattggaactaaaggaagttcagatcaacagtcatgtcttatgtgactaatggtctgaccactccagtaaaggcttggtgttagtaatgaccagatgacaggaaatcaattagacaaacatt

SEQ ID NO: 48659 - DNA, 1774 bp, Homo sapiens
tgcagaaaaaaaaaaatcctgtaatccccagtagcttggtgctgtcgcggtagagcaggtcgtggagttgctaatttggcctgggtgtccccacttggttccaccacagagggggcagcattatcttccacctacttgtgagatctactggttccaaactttccaaatccccaaaccaatgacttatttttctctcttttctatttctgtttcctaggaacgagtggaatatctctttctcataatttttacggtggaagcrtttttaaaagtaatcgcctatggactcctctttcaccccaatgcctacctccgcaacggctggaacctactagattttataattgtggttgtggggtaagtatcactgtctgtttctttccctttatcttaccagtgttgcgggacttttccttaagtcagctgaagacagggtcgttgtcagacggccacaaagatttaggctcgcagatgatctagagtgagaaaaatgagatttattttgctaaaaggaacagaaagggaaagagagactcagcaaagtgagagagtgcgcttcctgcccatgggcttcccgcctcgcaggttgaatccaaggttctacccaggaaaaggaggggtcaggcttctccctgctgcagttggtggcgtgaacttccgtggttccaccctagtgtgcactcctcccagtgcgcaggctggctggagtttctctggggacccctccccacctggctgtctcaccagtacatccctcttcttccttctgtgttatctcttttcaatttggtcctaactatgctgggcttcaggcaagaagaaaggatctgtgaaaatcactttgaattcagacttccccagagggacaggggctatgacccaagagcacccctctccaccactcccacacagcatgcacacacggttggacctgagtgctcctgatggaacccaggctgctctgtgctgctgtaggatatccccctgcttaaggactttcgtttcatctcagaccacatctggccccgcagttcctctgatagtttccctgctgtatcactgagcacatttggggcagctcgtccgtgagcatgcagtctgcaggtgtggggtgagggtggggcgcacacaggctgtgcctgtgctctggacttgtacagaggcctcttccccattctcactctacagggggcctggttctgtggccccagaaaaccagactgctcaagacaggtggatgagaaggaaacagggaactatgaaaggcgaagatgacaggtaaccaaaccccaatcaaatgcagcttcccccagacaccctgctccactgtagcataagataaggtagagtcagtctaggctttcaaaacagcaatgcaaagaatcttaaataaaatgtagaagagatctccttataaataagttattaacctcacaaaaagaatctccataaaatatttgtacctaacaggcctacctacactggtgaagtgtaagttattaaaatgcaggtgaggtcaggcgcggtggctcacacctgtaatcccagcactttgggaggccaaggcgggcggatcacgaggtcaggagatcgagaccatcctggctaacacggtgaaaccccgtctctactaaaaatacaaaaacttagccgggcgaggtggcgggcgcctgtagtcccagctactcgggaggctgaggcaggagaatggcgtgaacccgggaggcggagcttacagtgagccgagatcatgccactgcactccagcctgggc

SEQ ID NO: 48660 - DNA, 1774 bp, Homo sapiens
tgcagaaaaaaaaaaatcctgtaatccccagtagcttggtgctgtcgcggtagagcaggtcgtggagttgctaatttggcctgggtgtccccacttggttccaccacagagggggcagcattatcttccacctacttgtgagatctactggttccaaactttccaaatccccaaaccaatgacttatttttctctcttttctatttctgtttcctaggaacgagtggaatatctctttctcataatttttacggtggaagcgtttttaaaagtaatcgcctatggactcctctttcaccccaatgcctacctccgcaacggctggaacctactagattttataattgtggttgtggggtaagtatcactgtctrtttctttccctttatcttaccagtgttgcgggacttttccttaagtcagctgaagacagggtcgttgtcagacggccacaaagatttaggctcgcagatgatctagagtgagaaaaatgagatttattttgctaaaaggaacagaaagggaaagagagactcagcaaagtgagagagtgcgcttcctgcccatgggcttcccgcctcgcaggttgaatccaaggttctacccaggaaaaggaggggtcaggcttctccctgctgcagttggtggcgtgaacttccgtggttccaccctagtgtgcactcctcccagtgcgcaggctggctggagtttctctggggacccctccccacctggctgtctcaccagtacatccctcttcttccttctgtgttatctcttttcaatttggtcctaactatgctgggcttcaggcaagaagaaaggatctgtgaaaatcactttgaattcagacttccccagagggacaggggctatgacccaagagcacccctctccaccactcccacacagcatgcacacacggttggacctgagtgctcctgatggaacccaggctgctctgtgctgctgtaggatatccccctgcttaaggactttcgtttcatctcagaccacatctggccccgcagttcctctgatagtttccctgctgtatcactgagcacatttggggcagctcgtccgtgagcatgcagtctgcaggtgtggggtgagggtggggcgcacacaggctgtgcctgtgctctggacttgtacagaggcctcttccccattctcactctacagggggcctggttctgtggccccagaaaaccagactgctcaagacaggtggatgagaaggaaacagggaactatgaaaggcgaagatgacaggtaaccaaaccccaatcaaatgcagcttcccccagacaccctgctccactgtagcataagataaggtagagtcagtctaggctttcaaaacagcaatgcaaagaatcttaaataaaatgtagaagagatctccttataaataagttattaacctcacaaaaagaatctccataaaatatttgtacctaacaggcctacctacactggtgaagtgtaagttattaaaatgcaggtgaggtcaggcgcggtggctcacacctgtaatcccagcactttgggaggccaaggcgggcggatcacgaggtcaggagatcgagaccatcctggctaacacggtgaaaccccgtctctactaaaaatacaaaaacttagccgggcgaggtggcgggcgcctgtagtcccagctactcgggaggctgaggcaggagaatggcgtgaacccgggaggcggagcttacagtgagccgagatcatgccactgcactccagcctgggc

SEQ ID NO: 48661 - DNA, 1774 bp, Homo sapiens
tgcagaaaaaaaaaaatcctgtaatccccagtagcttggtgctgtcgcggtagagcaggtcgtggagttgctaatttggcctgggtgtccccacttggttccaccacagagggggcagcattatcttccacctacttgtgagatctactggttccaaactttccaaatccccaaaccaatgacttatttttctctcttttctatttctgtttcctaggaacgagtggaatatctctttctcataatttttacggtggaagcgtttttaaaagtaatcgcctatggactcctctttcaccccaatgcctacctccgcaacggctggaacctactagattttataattgtggttgtggggtaagtatcactgtctgtytctttccctttatcttaccagtgttgcgggacttttccttaagtcagctgaagacagggtcgttgtcagacggccacaaagatttaggctcgcagatgatctagagtgagaaaaatgagatttattttgctaaaaggaacagaaagggaaagagagactcagcaaagtgagagagtgcgcttcctgcccatgggcttcccgcctcgcaggttgaatccaaggttctacccaggaaaaggaggggtcaggcttctccctgctgcagttggtggcgtgaacttccgtggttccaccctagtgtgcactcctcccagtgcgcaggctggctggagtttctctggggacccctccccacctggctgtctcaccagtacatccctcttcttccttctgtgttatctcttttcaatttggtcctaactatgctgggcttcaggcaagaagaaaggatctgtgaaaatcactttgaattcagacttccccagagggacaggggctatgacccaagagcacccctctccaccactcccacacagcatgcacacacggttggacctgagtgctcctgatggaacccaggctgctctgtgctgctgtaggatatccccctgcttaaggactttcgtttcatctcagaccacatctggccccgcagttcctctgatagtttccctgctgtatcactgagcacatttggggcagctcgtccgtgagcatgcagtctgcaggtgtggggtgagggtggggcgcacacaggctgtgcctgtgctctggacttgtacagaggcctcttccccattctcactctacagggggcctggttctgtggccccagaaaaccagactgctcaagacaggtggatgagaaggaaacagggaactatgaaaggcgaagatgacaggtaaccaaaccccaatcaaatgcagcttcccccagacaccctgctccactgtagcataagataaggtagagtcagtctaggctttcaaaacagcaatgcaaagaatcttaaataaaatgtagaagagatctccttataaataagttattaacctcacaaaaagaatctccataaaatatttgtacctaacaggcctacctacactggtgaagtgtaagttattaaaatgcaggtgaggtcaggcgcggtggctcacacctgtaatcccagcactttgggaggccaaggcgggcggatcacgaggtcaggagatcgagaccatcctggctaacacggtgaaaccccgtctctactaaaaatacaaaaacttagccgggcgaggtggcgggcgcctgtagtcccagctactcgggaggctgaggcaggagaatggcgtgaacccgggaggcggagcttacagtgagccgagatcatgccactgcactccagcctgggc

SEQ ID NO: 48662 - DNA, 1774 bp, Homo sapiens
tgcagaaaaaaaaaaatcctgtaatccccagtagcttggtgctgtcgcggtagagcaggtcgtggagttgctaatttggcctgggtgtccccacttggttccaccacagagggggcagcattatcttccacctacttgtgagatctactggttccaaactttccaaatccccaaaccaatgacttatttttctctcttttctatttctgtttcctaggaacgagtggaatatctctttctcataatttttacggtggaagcgtttttaaaagtaatcgcctatggactcctctttcaccccaatgcctacctccgcaacggctggaacctactagattttataattgtggttgtggggtaagtatcactgtctgtttctttccctttatcttaccagtgttgcgggacttttccttaagtcagctgaagacagggtcgttgtcagacggccacaaagatttaggctcgcagatgatctagagtgagaaaaatgagatttattttgctaaaaggaacagaaagggaaagagagactcagcaaagtgagagagtgcgcttcctgcccatgggcttcccgcctcgcaggttgaatccaaggttctacccaggaaaaggaggggtcaggcttctccctgctgcagttggtggcgtgaacttccgtggttccaccctagtgtgcactcctcccagtgcgcaggctggctggagtttctctggggacccctccccacctggctgtctcaccagtacatccctcttcttccttctgtgttatctcttttcaatttggtcctaactatgctgggcttcaggcaagaagaaaggatctgtgaaaatcactttgaattcagacttccccagagggacaggggctatgacccaagagcacccctctccaccactcccacacagcatgcacacacggttggacctgagtgctcctgatggaacccaggctgctctgtgctgctgtaggatatccccctgcttaaggactttcgtttcatctcagaccacatctggccccgcagttcctctgatagtttccctgctgtatcactgagcacatttggggcagctcgtccgtgagcatgcagtctgcaggtgtggggtgagggtggggcgcacacaggctgtgcctgtgctctggacttgtacagaggcctcttccccattctcactctacagggggcctggttctgtggccccagaaaaccagactgctcaagacaggtggatgagaaggaaacagggaactatgaaaggcgaagatgacaggtaaccaaaccccaatcaaatgcagcttcccccagacaccctgctccactgtagcataagataaggtagagtcagtctaggctttcaaaacagcaatgcaaagaatcttaaataaaatgtagaagagatctccttataaataagttattaacctcacaaaaagaatctccataaaatatttgtacctaacaggcctacctacactggtgaagtgtaagttattaaaatgcaggtgaggtcaggcgcggtggctcacacctgtaatcccagcactttgggaggccaaggcgggcggatcacgaggtcaggagatcgagaccatcctggctaacayggtgaaaccccgtctctactaaaaatacaaaaacttagccgggcgaggtggcgggcgcctgtagtcccagctactcgggaggctgaggcaggagaatggcgtgaacccgggaggcggagcttacagtgagccgagatcatgccactgcactccagcctgggc

SEQ ID NO: 48663 - DNA, 610 bp, Homo sapiens
taagctacttggaggtagggatcttccactgctgtgtctcaagtgcctatatctgtgactggtatagggtaaattttccataactatttagtgaataagtaaattcgacgtcatatgtgtatatctcataatttgattttctgaaaagttacaaaatcctttacttatatgataaactagactcatctgcattgggacatcttccttataccaaataaatgatatctgttaataaagatattgggatacagrtttagtcatccacaaattttttttaaatttttttttaaatttttttttttttttttttttgagatggagtctcgcactatagcccaggctggaatgcaatgatgtgatcttggctcactgcaacctccacctcctgggttcaagtgattctcccgcctcagcctcctgagtagctgggattacaggtgtgcaccaccacacctgggtaatttttgtgtttttagtagagacagggtttcaccatgttggccaggctggtctcgaactcctggcctcaggtgatccacccgccttggcctcccaaagtgctgggattacaggcgtgagccaccgtgcccacctcacaatatgttttttt

SEQ ID NO: 48664 - DNA, 630 bp, Homo sapiens
ataaacaagtgtgacttggaggttgatttttctgagcatgggccataaaccgattctgagagtaatcagaaatgcaggtatacaagtgtttccacatgccctttcttcccaagtaaatgaggtgtaaactcatgaatgctgaggcctactgtgcaccagacactttccatatataatcttgttagaacctctcaagaattctatgatcaaagtttgcaaagaggaaacagatccccagagcaataacttttcagtctcacagaaataataaccggcagaggcagggtgagactttaagctacctgattcccaaatactcatgtgctaggacttactcaaaaggctttgcactcacccagagctggggacttgattcctgtcttggctgccatcttttgggtttcatcctctcttgctgtctgttctctgaacctcagcttcccacttggcaccctcctgctctttaaaacrtgaagtcagtataactttgcctaataaagtaaaccttcaaaaagctctgataaaaataatattcacagtgttcaactggcaagatacccctacttttctcacaagtcaccccaaagcaacaagggaacaataaaaaaaaaaaaaacaagaaatatggtc

SEQ ID NO: 48665 - DNA, 527 bp, Homo sapiens
tggagaccctgtgcaggcctggggcatggggtacatgggccacagcctgggaccctgtgtcctcctgggtggccctgctgctgtggggtcctgacctcaccccaccacgttgcaaccctgggtgtggggtcagagccagtctagggctgagcaagacctgagccctgccctcccctcctcrgggcccttcccttactcacccgtgctgccaggatctacaaccaatgccaggctcccaggctgccctgccctcctcatggacctccacaacgccacccctgcctgccgcccccatcttcccctccttgagggccaacccacagcccctcccccacaggcccagtgtacccagacctgatctacgctggcttgaaggcaggatggggtcagatttgactctgtgtccgcagagtccggtgactggacagtccccagatctggggccccgtggagcctggtgaagtgacaatggtgtgtgcctaggactggacccctcctgcaatgtcggcagcctggggacagccctg

SEQ ID NO: 48666 - DNA, 527 bp, Homo sapiens
tggagaccctgtgcaggcctggggcatggggtacatgggccacagcctgggaccctgtgtcctcctgggtggccctgctgctgtggggtcctgacctcaccccaccacgttgcaaccctgggtgtggggtcagagccagtctagggctgagcaagacctgagccctgccctcccctcctcagggcccttcccttactcacccgtgctgccaggatctacaaccaatgccaggctcccaggctgccctgccctcctcatggacctccacaacrccacccctgcctgccgcccccatcttcccctccttgagggccaacccacagcccctcccccacaggcccagtgtacccagacctgatctacgctggcttgaaggcaggatggggtcagatttgactctgtgtccgcagagtccggtgactggacagtccccagatctggggccccgtggagcctggtgaagtgacaatggtgtgtgcctaggactggacccctcctgcaatgtcggcagcctggggacagccctg

SEQ ID NO: 48667 - DNA, 1545 bp, Homo sapiens
agtctttttcatcaaggaacagctcagttctttttaaagccttacttgcttagatcaggctgcttaaggacaatctctttttctgttttttttttttttcctaagtcaactgatttggggccttaattatatacataaaattctttcagctttatcaggaaacataacctaaggaagtgaccatcccatcatattcatgggttctgcccacatccaaggtgaatggaggatacagggcatgtaaatcggggtaggaaacgtaggggccatcttagaattctgcctactacatagactttctgcttttgagggttaatgggctgactttgatctccataatgtcttcccgaaagacttattttaagggctataaaataatcatctttttgtttcctcaaccctttgccacagattttcatcatgtcaaatggactatgtgctagattgatttgatcttgcagtaaatcttattttttcaggagggactagctgtgactaggcctgggtatgtattaacaaacttattttccagtcatatcaggcacagattgttatgtatattggaaatgatttgctcgttgaaagcacatttaaaaaaaaatacacaaaaacttaaacaactcttaatatgctcagtgaaacaaatagttttaaattccaccattaggaacatttatcacttgtgcatgaagcaaacatatcattgaattttcccaaagattgagaaacactcagtaagatgtgtttaaagatttataagctgaagctgtttagaaaatagctcaactctctggcagcatttattcttggcctgatataagcccaggcatggaatttaaggcagggacaatctccattgtcctgaaatcaatgaaaatgttgtggagacagtttcaccccaaaggcaatggagcaaaaggaaaataatcaacttccttcagtttctctctgtgtctttcttgttgcttttgaagggatctatgatgtgggagtaattaaatgttcccaaagaatacaaaagaacagactaagccttggtgatgtgagagaactttagtgaacaaggcagacaattaaatacgttgatggggcattacgtagcttctaataactagcgcataggaaacaacatgaaaaaaaagagagaggaaaacaagagatcatcatttgtgaataacttccgagaagacagaacaaattcgggattacaaaagtgttctatggtttrtcagtcggagatgggcctgttcttttcaatcaatcaccccttatcaaaattctttctattcatttttctttaagtgggttataaaactttatgttttcttcctggttgtgtgtgcttgaatttcatatcagggaatctgatttgaaagcatatagaatgatcatacctttaacatgtcactatcctgtagtgttctccccttgctggaccaagggccacaagcaagggacagacatgctgttagtacctccataccccatgctactttctcatttgtccaagccaagcaagacatgtttaacaagcacatagtatgc

SEQ ID NO: 48668 - DNA, 3609 bp, Homo sapiens
ttgaatggtttggaacaatttaatgaaggagagttagctaaggcaattgctggtgaatttgatacaggtgagataacaggaaaaagtaagaaaaataataaaaatctaggaggggccaatatacaaaagactacaaaaatgtctttacattcttgatgcactttaaagataccaaaacagggtagtttattttgagtgcggttgatttaagaaactaaaattattcagctcataatcaaagagaacactttggtcctacttcacaaggctgtcaaatgagtgttcctttgtatatcttacctttacatgaggtgcttaaggtgtgcatatgtcgttttaaaaatgattttctacttaccaacttttccaatgaaccaagcagctatagtgcttcactgtgtctgataaaggggtgtccgatctatcacaaagtacctccttcagtctcttggacccctggcagaattagggacaacctcaggcaggaagcttgacatgtcaccagctcgactgggccaggtcatgattacctttgagcagtgcaggtcagtggaggtggcagctgctttgacaatgctgccctggacaggattttgcactggccaaatgtaaaactcagaaaaggctaacctggatttgactgtgggttttatgcaggcagagtcatcccaagaaatgtccaaatgggwaagcggggtcaaaatgggacagcggggttgtgaagtgagttatcatgcatggaatgcagagctggggccactcctgatggccatgagtcacagggtcacatgctactagctaatgtccctgtgcctaaagtcacacaaggaatcttttcaccacaatgaggaaggtgggatgtggctgttcttggcacagaactccctggggcttgtctgcatcccagagtgccctcactagggcttgctctaacttccaaccgactctagtgactactggtgacaatagccagccctacaagagggcatctggaagaactgtcttaagctcagatattggtttctcttggatatttaatttcttaccgaaaaatttctatttccttgtccttacatctggcattccacccttacctatatctcacatctcactcagagaaatccactgccatctcaagttcaccatgtgtcaccacacaaaactgggacatatttaaaaattgtataaagggaacacattcatgtattatatgtgcaattaaatttcttaaaaaatattgagcttatcgagtttcaatgtactgaagaaactgacccctttctttactttctgcctttactagcaacatcattatgtacctcaatctcctaaactagggaacctataactcacttatttctctattttcctcatactttctgatgactttttagaaccaaagaattttagactggaggtaaccttggcaaccatcaagtacaggcccctcatttacagatggggaaactaaaggcccagagaaatgaagtgatggacccaagggctagttagtgatggagatggaattagaatcgaggaccagtgcagagtttcctctatgacattcaccgatccatttattcattcagtcactcattcaaaaatgtactgagtgtctcctatgggccaagtaccgttttaggtgctggaaaaatcaccatcgtagcagctactgcttccattgagcccactgaatatcaggaactatttgactaagtcacagcccttacttaatcttccacagtccacttaatcctcataataaccctactaggtgggttctgttattacccccatcttatagatgaaccaattttttcccaagtagggaaaaaacttgggaaagtgtgttcattgttggggacccacaatagcttccccaaactgctgaatccattctaaatgtctctacttgactgccaaggcctttttataaacctgcccctcccaagctattcagccttctcagtcattcatcacataaaacctttgaatactcaagccagatcctcaccatgcctttcttccctgcatcatgctgcctctcccagcctggaatgcttgcggggaaaggctgtgacttattcaaatctctgacatagaatttgacagagtagggaccagtaaacgtttgtcaattgaatgaaagtttctggtacttcatcagtccaaatcatactatattgaattcttagcttcagtttcacatgcttcctggtgagacggtcacctcagtcataataatatcaaccaacatcccagtggcaataataccgaccccaccccagtagtgataccaaccaccactccgtattaactcagagaaccttacatgcatttcatttaatcctaacaaaacactaggagacaagtgccattactactctaattttaatatgaggtctctgaggcacagagaggttaagtaatttgccaagatcacccagctagtggaacgggttgatcctgggggctcattgtgctggattctctcttcataaatacatcctgattttctaactaaactgctttggaaaccctggggagtactggtttttctttgttttagagacagggtcttcctctatcacccaggctggagggcagtggcacaatcatagctcactgcagctttgaactcctgggctcaagtgatcctcccatctcagcctcccgagtcactgggattacaggtatgcaccaccatgcctggtccctggtgaacacttgtgcatcctgaaccttgatttctccctctgatttgccataaattgaggcacaggaatttaaaataatttttgtttaatgagagcctgaaacaaactattatttctctccctgttcatgatgcacaattaaaattataaaatgaagaacacctgtagaacagggagatgatgccctttagtatgcagcataagatgccctaagctttacggaagtaaatattttaatcttacttgggcccaggtatctggtcttaccatcctcccaccctctccactgcctggaaaaatactggttttcacattcacaagggcacacgttgctgcatggaactgagctataattattcaaattctgagttgggctttcatgagcagtcttttcagccccagaagcactagttttatgagcggtcaaatgcagctctcacttgcagtcggaagtcttcctggatccacttatcacattggttagggtgcagcacagtgtcagagggcccacagtggtgcctgtggatagccaagcagacagccccagagcctgcccttctgcatgactgacgtcctccacacttgaccatggaacaactccagccttagtaggtacaactcgcttgtattccatcctcagcttggctccctgttgttggtttcctcttgctcaaacgtgtgactccaaggttgtatcttatcccatgggtctcccagacaggctcccctgatcaccacccagctgcacatctccctcccactcaccacagctgcatctgccttcttgtcttaaacaattctgcaaagaagctgcaggtctcattgagtgtcccagtcccaaggagagccacagatgagactgccacagcagctgagtcagcagcaaggatgc

SEQ ID NO: 48669 - DNA, 3609 bp, Homo sapiens
ttgaatggtttggaacaatttaatgaaggagagttagctaaggcaattgctggtgaatttgatacaggtgagataacaggaaaaagtaagaaaaataataaaaatctaggaggggccaatatacaaaagactacaaaaatgtctttacattcttgatgcactttaaagataccaaaacagggtagtttattttgagtgcggttgatttaagaaactaaaattattcagctcataatcaaagagaacactttggtcctacttcacaaggctgtcaaatgagtgttcctttgtatatcttacctttacatgaggtgcttaaggtgtgcatatgtcgttttaaaaatgattttctacttaccaacttttccaatgaaccaagcagctatagtgcttcactgtgtctgataaaggggtgtccgatctatcacaaagtacctccttcagtctcttggacccctggcagaattagggacaacctcaggcaggaagcttgacatgtcaccagctcgactgggccaggtcatgattacctttgagcagtgcaggtcagtggaggtggcagctgctttgacaatgctgccctggacaggattttgcactggccaaatgtaaaactcagaaaaggctaacctggatttgactgtgggttttatgcaggcagagtcatcccaagaaatgtccaaatgggtmagcggggtcaaaatgggacagcggggttgtgaagtgagttatcatgcatggaatgcagagctggggccactcctgatggccatgagtcacagggtcacatgctactagctaatgtccctgtgcctaaagtcacacaaggaatcttttcaccacaatgaggaaggtgggatgtggctgttcttggcacagaactccctggggcttgtctgcatcccagagtgccctcactagggcttgctctaacttccaaccgactctagtgactactggtgacaatagccagccctacaagagggcatctggaagaactgtcttaagctcagatattggtttctcttggatatttaatttcttaccgaaaaatttctatttccttgtccttacatctggcattccacccttacctatatctcacatctcactcagagaaatccactgccatctcaagttcaccatgtgtcaccacacaaaactgggacatatttaaaaattgtataaagggaacacattcatgtattatatgtgcaattaaatttcttaaaaaatattgagcttatcgagtttcaatgtactgaagaaactgacccctttctttactttctgcctttactagcaacatcattatgtacctcaatctcctaaactagggaacctataactcacttatttctctattttcctcatactttctgatgactttttagaaccaaagaattttagactggaggtaaccttggcaaccatcaagtacaggcccctcatttacagatggggaaactaaaggcccagagaaatgaagtgatggacccaagggctagttagtgatggagatggaattagaatcgaggaccagtgcagagtttcctctatgacattcaccgatccatttattcattcagtcactcattcaaaaatgtactgagtgtctcctatgggccaagtaccgttttaggtgctggaaaaatcaccatcgtagcagctactgcttccattgagcccactgaatatcaggaactatttgactaagtcacagcccttacttaatcttccacagtccacttaatcctcataataaccctactaggtgggttctgttattacccccatcttatagatgaaccaattttttcccaagtagggaaaaaacttgggaaagtgtgttcattgttggggacccacaatagcttccccaaactgctgaatccattctaaatgtctctacttgactgccaaggcctttttataaacctgcccctcccaagctattcagccttctcagtcattcatcacataaaacctttgaatactcaagccagatcctcaccatgcctttcttccctgcatcatgctgcctctcccagcctggaatgcttgcggggaaaggctgtgacttattcaaatctctgacatagaatttgacagagtagggaccagtaaacgtttgtcaattgaatgaaagtttctggtacttcatcagtccaaatcatactatattgaattcttagcttcagtttcacatgcttcctggtgagacggtcacctcagtcataataatatcaaccaacatcccagtggcaataataccgaccccaccccagtagtgataccaaccaccactccgtattaactcagagaaccttacatgcatttcatttaatcctaacaaaacactaggagacaagtgccattactactctaattttaatatgaggtctctgaggcacagagaggttaagtaatttgccaagatcacccagctagtggaacgggttgatcctgggggctcattgtgctggattctctcttcataaatacatcctgattttctaactaaactgctttggaaaccctggggagtactggtttttctttgttttagagacagggtcttcctctatcacccaggctggagggcagtggcacaatcatagctcactgcagctttgaactcctgggctcaagtgatcctcccatctcagcctcccgagtcactgggattacaggtatgcaccaccatgcctggtccctggtgaacacttgtgcatcctgaaccttgatttctccctctgatttgccataaattgaggcacaggaatttaaaataatttttgtttaatgagagcctgaaacaaactattatttctctccctgttcatgatgcacaattaaaattataaaatgaagaacacctgtagaacagggagatgatgccctttagtatgcagcataagatgccctaagctttacggaagtaaatattttaatcttacttgggcccaggtatctggtcttaccatcctcccaccctctccactgcctggaaaaatactggttttcacattcacaagggcacacgttgctgcatggaactgagctataattattcaaattctgagttgggctttcatgagcagtcttttcagccccagaagcactagttttatgagcggtcaaatgcagctctcacttgcagtcggaagtcttcctggatccacttatcacattggttagggtgcagcacagtgtcagagggcccacagtggtgcctgtggatagccaagcagacagccccagagcctgcccttctgcatgactgacgtcctccacacttgaccatggaacaactccagccttagtaggtacaactcgcttgtattccatcctcagcttggctccctgttgttggtttcctcttgctcaaacgtgtgactccaaggttgtatcttatcccatgggtctcccagacaggctcccctgatcaccacccagctgcacatctccctcccactcaccacagctgcatctgccttcttgtcttaaacaattctgcaaagaagctgcaggtctcattgagtgtcccagtcccaaggagagccacagatgagactgccacagcagctgagtcagcagcaaggatgc

SEQ ID NO: 48670 - DNA, 3609 bp, Homo sapiens
ttgaatggtttggaacaatttaatgaaggagagttagctaaggcaattgctggtgaatttgatacaggtgagataacaggaaaaagtaagaaaaataataaaaatctaggaggggccaatatacaaaagactacaaaaatgtctttacattcttgatgcactttaaagataccaaaacagggtagtttattttgagtgcggttgatttaagaaactaaaattattcagctcataatcaaagagaacactttggtcctacttcacaaggctgtcaaatgagtgttcctttgtatatcttacctttacatgaggtgcttaaggtgtgcatatgtcgttttaaaaatgattttctacttaccaacttttccaatgaaccaagcagctatagtgcttcactgtgtctgataaaggggtgtccgatctatcacaaagtacctccttcagtctcttggacccctggcagaattagggacaacctcaggcaggaagcttgacatgtcaccagctcgactgggccaggtcatgattacctttgagcagtgcaggtcagtggaggtggcagctgctttgacaatgctgccctggacaggattttgcactggccaaatgtaaaactcagaaaaggctaacctggatttgactgtgggttttatgcaggcagagtcatcccaagaaatgtccaaatgggtaagcggggtcaaaatgggacagcggggttgtgaagtgagttatcatgcatggaatgcagagctggggccactcctgatggccatgagtcacagggtcacatgctactagctaatgtycctgtgcctaaagtcacacaaggaatcttttcaccacaatgaggaaggtgggatgtggctgttcttggcacagaactccctggggcttgtctgcatcccagagtgccctcactagggcttgctctaacttccaaccgactctagtgactactggtgacaatagccagccctacaagagggcatctggaagaactgtcttaagctcagatattggtttctcttggatatttaatttcttaccgaaaaatttctatttccttgtccttacatctggcattccacccttacctatatctcacatctcactcagagaaatccactgccatctcaagttcaccatgtgtcaccacacaaaactgggacatatttaaaaattgtataaagggaacacattcatgtattatatgtgcaattaaatttcttaaaaaatattgagcttatcgagtttcaatgtactgaagaaactgacccctttctttactttctgcctttactagcaacatcattatgtacctcaatctcctaaactagggaacctataactcacttatttctctattttcctcatactttctgatgactttttagaaccaaagaattttagactggaggtaaccttggcaaccatcaagtacaggcccctcatttacagatggggaaactaaaggcccagagaaatgaagtgatggacccaagggctagttagtgatggagatggaattagaatcgaggaccagtgcagagtttcctctatgacattcaccgatccatttattcattcagtcactcattcaaaaatgtactgagtgtctcctatgggccaagtaccgttttaggtgctggaaaaatcaccatcgtagcagctactgcttccattgagcccactgaatatcaggaactatttgactaagtcacagcccttacttaatcttccacagtccacttaatcctcataataaccctactaggtgggttctgttattacccccatcttatagatgaaccaattttttcccaagtagggaaaaaacttgggaaagtgtgttcattgttggggacccacaatagcttccccaaactgctgaatccattctaaatgtctctacttgactgccaaggcctttttataaacctgcccctcccaagctattcagccttctcagtcattcatcacataaaacctttgaatactcaagccagatcctcaccatgcctttcttccctgcatcatgctgcctctcccagcctggaatgcttgcggggaaaggctgtgacttattcaaatctctgacatagaatttgacagagtagggaccagtaaacgtttgtcaattgaatgaaagtttctggtacttcatcagtccaaatcatactatattgaattcttagcttcagtttcacatgcttcctggtgagacggtcacctcagtcataataatatcaaccaacatcccagtggcaataataccgaccccaccccagtagtgataccaaccaccactccgtattaactcagagaaccttacatgcatttcatttaatcctaacaaaacactaggagacaagtgccattactactctaattttaatatgaggtctctgaggcacagagaggttaagtaatttgccaagatcacccagctagtggaacgggttgatcctgggggctcattgtgctggattctctcttcataaatacatcctgattttctaactaaactgctttggaaaccctggggagtactggtttttctttgttttagagacagggtcttcctctatcacccaggctggagggcagtggcacaatcatagctcactgcagctttgaactcctgggctcaagtgatcctcccatctcagcctcccgagtcactgggattacaggtatgcaccaccatgcctggtccctggtgaacacttgtgcatcctgaaccttgatttctccctctgatttgccataaattgaggcacaggaatttaaaataatttttgtttaatgagagcctgaaacaaactattatttctctccctgttcatgatgcacaattaaaattataaaatgaagaacacctgtagaacagggagatgatgccctttagtatgcagcataagatgccctaagctttacggaagtaaatattttaatcttacttgggcccaggtatctggtcttaccatcctcccaccctctccactgcctggaaaaatactggttttcacattcacaagggcacacgttgctgcatggaactgagctataattattcaaattctgagttgggctttcatgagcagtcttttcagccccagaagcactagttttatgagcggtcaaatgcagctctcacttgcagtcggaagtcttcctggatccacttatcacattggttagggtgcagcacagtgtcagagggcccacagtggtgcctgtggatagccaagcagacagccccagagcctgcccttctgcatgactgacgtcctccacacttgaccatggaacaactccagccttagtaggtacaactcgcttgtattccatcctcagcttggctccctgttgttggtttcctcttgctcaaacgtgtgactccaaggttgtatcttatcccatgggtctcccagacaggctcccctgatcaccacccagctgcacatctccctcccactcaccacagctgcatctgccttcttgtcttaaacaattctgcaaagaagctgcaggtctcattgagtgtcccagtcccaaggagagccacagatgagactgccacagcagctgagtcagcagcaaggatgc

SEQ ID NO: 48671 - DNA, 1580 bp, Homo sapiens
gttaaattcaatttgaaatattactctgtatttaaaataaaatacaagcaagtacagtattaaaattatgccatacttctcttgcaactgatgttaaaactcccatgcaagtgattactttggtagaaacaaatgtttcctgatacagctaggtaataactcaaggaaagtaaacttggttcattctgtttgtgaagttaccagcagttgttggcttatttaagataccaagtctaattaagtttattgtcaacttttgtgtgtgtgaaacataaaagttgatttcctctcggttgattctcagaggaaggagtttctttgggtcaaagggagctctcattgctacttcagtgtttgcagtgtgcagagttgtaaaagttgagactagccactcaaaatgcgagcttctggtcctgacatttcacggggaaaggaaggctcatgaaccgactgagacatggttgagcggctaagatttctgtagctatgatgctgccatccaggccgacttcagacttgggaagtttccatgtgagtttttggaaggttttggggttttgtttttgatggaggaaaagaatgtgaaagagtgtttgcaccaaatagattaagctgttagtaaacatgcaccctttaaattaactgatgataaggacaaagaaggtgctttgtcgtcgtcaactggatttgtctgaggtcacagagacaaacaggtgaaggggcagtccctcttcaactccctaatggaaagcagagagtaaaccgtgaaacgaggaaaagttgaattggattcttcctcccatttattttagcaaaagcttgctcttctttctctcacttgcctttcttccgggggggaagcctggtttttccaaaatcaaatgagcataggaacaaatattgctcaggaatgtgcatcctttcaagacccttagcacttgtgatgagtaagtccctgtgtggtaagtgactggagacacatccatgtggcaaccccagcttctcggctgggctggaagataattaatttcactatcagcactgctgaacagagagcactgttcagagtcagggatgatgggtgggccaggcccttgcaagaggctgtccttgaattgggtgctggcttcctgtcagcgcgttgctttaaccatttgtgccctcastagttatgaaaaaaacagaaaagaaaggatagtaggtttacaggggactcttttggtcctgggaagagaatgcaaagcctaaaggaatcctaaaggaggagaaatgggctagagacccaagggaaaggaggcggcctgtctgaggaggaggtgggcaggttatcttttcagtagttttagtttgcaaaatgtgagttttgcattcagtttgggtttaagctggcatgtgtcagagaaatgcgaaagagccagtatagaaatttaagattgggtgctgagtttcttctccttttggtagagggttttttgtttttttttttgtttttttttgaatagggacttccaataactaagcagagagttagggttgtatttgctcttcaaatttgggggtttaccatcagaggttaaatg

SEQ ID NO: 48672 - DNA, 1580 bp, Homo sapiens
gttaaattcaatttgaaatattactctgtatttaaaataaaatacaagcaagtacagtattaaaattatgccatacttctcttgcaactgatgttaaaactcccatgcaagtgattactttggtagaaacaaatgtttcctgatacagctaggtaataactcaaggaaagtaaacttggttcattctgtttgtgaagttaccagcagttgttggcttatttaagataccaagtctaattaagtttattgtcaacttttgtgtgtgtgaaacataaaagttgatttcctctcggttgattctcagaggaaggagtttctttgggtcaaagggagctctcattgctacttcagtgtttgcagtgtgcagagttgtaaaagttgagactagccactcaaaatgcgagcttctggtcctgacatttcacggggaaaggaaggctcatgaaccgactgagacatggttgagcggctaagatttctgtagctatgatgctgccatccaggccgacttcagacttgggaagtttccatgtgagtttttggaaggttttggggttttgtttttgatggaggaaaagaatgtgaaagagtgtttgcaccaaatagattaagctgttagtaaacatgcaccctttaaattaactgatgataaggacaaagaaggtgctttgtcgtcgtcaactggatttgtctgaggtcacagagacaaacaggtgaaggggcagtccctcttcaactccctaatggaaagcagagagtaaaccgtgaaacgaggaaaagttgaattggattcttcctcccatttattttagcaaaagcttgctcttctttctctcacttgcctttcttccgggggggaagcctggtttttccaaaatcaaatgagcataggaacaaatattgctcaggaatgtgcatcctttcaagacccttagcacttgtgatgagtaagtccctgtgtggtaagtgactggagacacatccatgtggcaaccccagcttctcggctgggctggaagataattaatttcactatcagcactgctgaacagagagcactgttcagagtcagggatgatgggtgggccaggcccttgcaagaggctgtccttgaattgggtgctggcttcctgtcagcgcgttgctttaaccatttgtgccctcactagttatgaaaaaaacagaaaagaaaggatagtaggtttacaggggactcttttggtcctgggaagagaatgcaaagcctaaaggaatcctaaaggaggagaaatgggctagagacccaagggaaaggaggcggcctgtctgaggaggaggtgggcaggttatcttttcagtagttttagtttgcaaaatgtgagttttgcattcagtttgggtttaagctggcatgtgtcagagaaatgcgaaagagccagtatagaaatttaagattgggtgctgagtttcttctccttttggtagagggttttttgtttttttttttgtttttttttkaatagggacttccaataactaagcagagagttagggttgtatttgctcttcaaatttgggggtttaccatcagaggttaaatg

SEQ ID NO: 48673 - DNA, 610 bp, Homo sapiens
ttcctctaaatatgtttaaaacaacaaaaataataacaacaacccttacaaaaggcattgttatgaaggccttcctgttctccagagcatcagctggagttgatgtgaggccagaataagatgtaatgatgcttatgtttaaagttatcttataggcgaatcttctggtttctcaatataatgtttcttctttttggaaataactaatctcttgaaaaaacacaaattaaagagaatgtattcaactgtaatggagactttctctctaatgatttctttcataaagcatagatcaaatctaagctcatactttgaatatgaaaattttcttagtgatgaaagctatacttagcaaatgtggaatgtgggcttcatactttaagtgttcttgaaaataataactatgccagtgaacttcaagatgatgaagtttaatgggccctggagtctgaacagatctcactgcttggatccaaatatgagctgacaaccagaagtgtgtagaatcagcacaaatcagcagagaatcatggctctggtgggaaaagcrcgtgtgcccatcagaggagcccctggctggtgtaagtgattgaggaattgagaaccttgg

SEQ ID NO: 48674 - DNA, 505 bp, Homo sapiens
caattatatacgctgtctatatttcttcttatttgtattcctatgtttctatttttccactgcttattatagtcacttttgataggtgggaatactagaaggtttgatttatatatttaattttttcaattcagccacctaataaaattcctttattaattataaatgtttctcagttgatttattctcttgagttttctcagtagacaatctgcagatcctctgtgtattctttctgaagtttaaactcttttcttcttagacacttaggacactgggccgctctgaggataatgtcgagttagagtgttattaagatacatccttgtctygttccctaaatagaaaggccccttttattttgtcatcacaactgactgctctgggctcctgctggagcacgctgccttggtgtcgtgggtgtgcagcaggcccagtgcactgtccccccccacccactgctggctgcttggctgtagatagggataagttgaaacacccctaa

SEQ ID NO: 48675 - DNA, 561 bp, Homo sapiens
tgatctccagaactagcagaataagtttgtgttattttaagccactacatttccgttatttgctacagcatccatggaaagwgaatatactcagtaagcatgtgtttgtttaagtgaaggaggccctgtgtgggagggatgtcagctggcttggaatgtttgagagacagtgttctccagagcagtcagtgctcaccagtgacagcgagagggtcagagagcccttaggcagtgacagaaagaacgaaaatgaggagatggatttgggagtcatttcagaagcagaatctgcgagacttggcttagtgagcacgataggagtccaagaaatgacagcaacttctggcttgggggcataggtacatagggtgcccatcaaagtgagggaacaaaaaaggcagagtcggtttggttaagaaaagtcatgggttggggccaggctcagtggctcatgcctataatcctagcactttgggaggcggaggtgggtggatcacctgaggtcaggagttcgagaccagcctggccaacatgctgaaaccccatctctacttaaaaaaa

SEQ ID NO: 48676 - DNA, 557 bp, Homo sapiens
tgaacttgctgcagaggtaagaggaagacctatcacctgggctttctatgctctgtaagccgagatgctatcatgatgctcgtccatctcctatccccagccctgagtttcgctgtctcttttctggagcaaacactgccaattctttcaggccttcctcaaaccgcactactgtccatcctccatgtcctgccttgtctcctgcctctcygtggtcagcccagtctcccttctgaatggtgattctacactgagcacccctgcaggtggggtctgagcagcatggactggaccagcccccacctgcccacatctaagtgttgcttccctgatgatacagccgaagtgttcgtcaacttcactgcctcctacaccaggttgtattgggtctacccttggctcggtcacaggactcttggttaatgtctgctccatccggtacttttgcagctgtgaactgggcccaggggcggtactgaacatccatctgcttctcacgcacctttataggaccacaatccaaaggaatcctggtgggatgggatgaagggccacat

SEQ ID NO: 48677 - DNA, 592 bp, Homo sapiens
tgcaatcatagctcactgcagccttgacttcccaagctcaagtgatcctcccacctcagcctcccaagtagctgcgactacaggcactcgccacaacgcccagctaatttttgtatttkttgtagagatagggtttcacgatgctgtccaggttggtctgcaactcctggcctcaaatgatcctcctgcctcggcctcccaaagtgctgggattacaggcgtgagccaccatgcccggcctgcattatttcttacaactacttgtgaatctacgattaaaacaacaaaaactaactatatacataggcgtacatatgaaataatggtacatgaaatagacccgaaatggccaaaaagtgcagatgtcctggcaggtggtttgaaccgagggcttggggcgctggcctttgaatcctagctcctgcgcttaccgccccggtgactggaccaggttcctcactgctttgtgcctcaatgtcctcatctgcgagctggggccatgacagaacccgcccggaagccctgcctgtgctcagcgtccaccccaattcccgggggcgaggcctggtgctccctgggactgtggccctgt

SEQ ID NO: 48678 - DNA, 549 bp, Homo sapiens
acaatggtaatttttaatgacagtttttaattgagtgaaattaccataaaaataataatagtagcagctaatatttactgagctgttactaggtgcctataaatagcatagatttttaaattctccataattcttccttatttcacttaaccactctatcttaaattactcatgcttgcctcagtagcacacatacttaagttggaacaatagagagattggcayggcctctgtgaaagaatgacatgcaaatttgtgaagcattccatatttttttaaaaaaagagaaaaaaattactcccagattttcactgtgtttgtgcatatgaccttttgtttaggttgaattatatccaaagatgaaatttccagaagtgagattactgtgagtcacagggcatgagcattcttattacccttgatgtaaattgcaaagctttcaggcatggtggctgtcagcctgtaattccagcactttgggaggctgaggtgggaggattgcttgaggccaggagttggaggaggcagtataatgagtcactgtctgta

SEQ ID NO: 48679 - DNA, 587 bp, Homo sapiens
cctgccttgtaaacaactcttcctaccagccccaatctgtaactcacattccccctccctttcttattagagaaaatattcacaatatccagctgagtcagctaagattgtgcagtcctacccsagcccatgttggaatgacacagaggtagggagtgcattagggataagaacccctgctccaccccgtttggtgtgctcttgcaatcatgactaatgcaagcagcatacttgcagaagcaaattgtcttgctgagaaaacttttttgcctgagtgctgcttcttcctcacagcaccaatcatttgtttctaacaatctcgctaaaagcagcctagaaagcagccacttatgcagaaagagtaataatttatgctctacaagtcatataaaaaatgaagtttcatttgtttaccggctaatttacttcctgggagacatttttcattctaaaacagtgattccctaccaagagttcatagatgccaagaagtccataaaaggcgtaatggaattgccaaattatgttaaatacttcaaaaggactcaaagccatatactagttcccaataggcctgcacaagttat

SEQ ID NO: 48680 - DNA, 587 bp, Homo sapiens
cctgccttgtaaacaactcttcctaccagccccaatctgtaactcacattccccctccctttcttattagagaaaatattcacaatatccagctgagtcagctaagattgtgcagtcctaccccagcccatgttggaatgacacagaggtagggagtgcattagggataagaacccctgctccaccccgtttggtgtgctcttgcaatcatgactaaygcaagcagcatacttgcagaagcaaattgtcttgctgagaaaacttttttgcctgagtgctgcttcttcctcacagcaccaatcatttgtttctaacaatctcgctaaaagcagcctagaaagcagccacttatgcagaaagagtaataatttatgctctacaagtcatataaaaaatgaagtttcatttgtttaccggctaatttacttcctgggagacatttttcattctaaaacagtgattccctaccaagagttcatagatgccaagaagtccataaaaggcgtaatggaattgccaaattatgttaaatacttcaaaaggactcaaagccatatactagttcccaataggcctgcacaagttat

SEQ ID NO: 48681 - DNA, 2057 bp, Homo sapiens
gtgagataataaatatttattgtgttgggccactatgtttaagggtaattcattatgcagcagtagataactaacacagccttttaaagcttctggtcagaattggtgtatgtcactctactctcatttaattggccaaaacagatcacaagatcagcctggcatcaaatacctatggaaacattgcaagtcatagaggaatgggtaaggaaatatagcctgcttacaggaagagggagtgaatggttaagcacaatagtagagttcaccatatcctaccccaattcgtcctgttccttctcccaccataaaacacaaagttgaccatatcagcttccgttcttaaaacactttagtggctcttcgatgcctccagcacaaagtgttacctcttccatcaatccttccaggcttccatgttcttcctctgcctcagtgccaccctctatcagcttgtgactctatcctgtgctctgatttgtctgttcacctgtgcatctccttgatagcagagaccacactgattcatctttctctcctgatttctcagcacagggtcagatggtctaattttgtgatgaatggatggatgactggatggatggatggatggatggatagatagatagatgggtaaatggaaggctgaatagatgcagggagggacaggcagcagagaaagtatggggataaatgagcagcaatcctttggagttttgcagctgttgcatatgtgagccttctctctctgaccagacaagcaacttctacctccgaaccctggcctgggaatcaggaatcaaaaggtgtgtgttaaagtcttggccttgtcttgtaatggttttgtggcattgggaaggttcaaagttttaatcactagtgaaagttaaaaatgcctgaggaacaaaatcaaaatgaatgaagatctgatacagtgccttacagactgatatatactgcgcctgtgaggtgtgcccctctccagcctctcccatgtgctgcaaataagcatagaggtggactgtcagtgtcctatgtccctgagaaccttgagtaaaccacaagctgcccttaggacctggctgtgagactgcaggacaagggcctggacaatggaggagaaacagatacctggaactgtcaccaaaggcccctacaactcctctggagggcagcctcaggatgggaataactttgggctctcctttctttatcataacagtcaccgtggtgatagtggccaccaccattctctgcaggccaccaggcactggtccacagagctctgggagatgagcagcacacggctgtctaccctgccatgcgggtagattcacagaagccatgtgtctttggcctgactctgtcttcctggctagagcccattggtccagacaggaacatttgaccccaggtgagctttaaatgttgaacagagagttttggagccaagtcacatcaagggtggggtggtctggaaggtgccaaaaacccctgctgattacaacaattttccttgttgctcaaactcattagagatggtttttgtcatttgaagctaaaggatcctttaaacctcatgacaggccgggtgcagtggctcacgcctgtaatcccagcactttgggaggccaaggcaggtgtatcacaaggtcaggagatggagaccatcctggctaacatgttgaaaccccgtctctaataaaaatacaaaaaaattagccaagcacggtggtgcgtgcctgtagtcccagctactccggaggctgaggcaggagaatggcatgaatctgggaggcgkagcttgcagtgagccaagatggcacaactgcactccagcctgggtgacagagcgagactccatctcaaaacaaacaaacaaacaaaacaaaacaaaacaaaaaaaacctcatgacaaaccagcaaaaaaaaaaaaaaaaaaaaccacaacattttattgtgcccatttcacagataaaggaactaagaagctgagagctgtatcgaccagctcaagtccctcagctaagaaagtacagaggaaaagtagtgcctca

SEQ ID NO: 48682 - DNA, 2057 bp, Homo sapiens
gtgagataataaatatttattgtgttgggccactatgtttaagggtaattcattatgcagcagtagataactaacacagccttttaaagcttctggtcagaattggtgtatgtcactctactctcatttaattggccaaaacagatcacaagatcagcctggcatcaaatacctatggaaacattgcaagtcatagaggaatgggtaaggaaatatagcctgcttacaggaagagggagtgaatggttaagcacaatagtagagttcaccatatcctaccccaattcgtcctgttccttctcccaccataaaacacaaagttgaccatatcagcttccgttcttaaaacactttagtggctcttcgatgcctccagcacaaagtgttacctcttccatcaatccttccaggcttccatgttcttcctctgcctcagtgccaccctctatcagcttgtgactctatcctgtgctctgatttgtctgttcacctgtgcatctccttgatagcagagaccacactgattcatctttctctcctgatttctcagcacagggtcagatggtctaattttgtgatgaatggatggatgactggatggatggatggatggatggatagatagatagatgggtaaatggaaggctgaatagatgcagggagggacaggcagcagagaaagtatggggataaatgagcagcaatcctttggagttttgcagctgttgcatatgtgagccttctctctctgaccagacaagcaacttctacctccgaaccctggcctgggaatcaggaatcaaaaggtgtgtgttaaagtcttggccttgtcttgtaatggttttgtggcattgggaaggttcaaagttttaatcactagtgaaagttaaaaatgcctgaggaacaaaatcaaaatgaatgaagatctgatacagtgccttacagactgatatatactgcgcctgtgaggtgtgcccctctccagcctctcccatgtgctgcaaataagcatagaggtggactgtcagtgtcctatgtccctgagaaccttgagtaaaccacaagctgcccttaggacctggctgtgagactgcaggacaagggcctggacaatggaggagaaacagatacctggaactgtcaccaaaggcccctacaactcctctggagggcagcctcaggatgggaataactttgggctctcctttctttatcataacagtcaccgtggtgatagtggccaccaccattctctgcaggccaccaggcactggtccacagagctctgggagatgagcagcacacggctgtctaccctgccatgcgggtagattcacagaagccatgtgtctttggcctgactctgtcttcctggctagagcccattggtccagacaggaacatttgaccccaggtgagctttaaatgttgaacagagagttttggagccaagtcacatcaagggtggggtggtctggaaggtgccaaaaacccctgctgattacaacaattttccttgttgctcaaactcattagagatggtttttgtcatttgaagctaaaggatcctttaaacctcatgacaggccgggtgcagtggctcacgcctgtaatcccagcactttgggaggccaaggcaggtgtatcacaaggtcaggagatggagaccatcctggctaacatgttgaaaccccgtctctaataaaaatacaaaaaaattagccaagcacggtggtgcgtgcctgtagtcccagctactccggaggctgaggcaggagaatggcatgaatctgggaggcggagcttgcagtgagccaagatggcacaactgcactccagcctgggtgacagagcgagactccatctcaaaacaaacaaacaaacaaaacaaaacaaaacaaaaaaaacctcatgacaaaccagcaaaaaaaaaaaaaaaaaaaaccacaacattttattgtgcccatttcacagataaaggaactaagaagctkagagctgtatcgaccagctcaagtccctcagctaagaaagtacagaggaaaagtagtgcctca

SEQ ID NO: 48683 - DNA, 563 bp, Homo sapiens
attgtaccaacctagtttgtcttcatcagtaaagacagccagaggacagagaaccagactccaagctgggtctacctaagcacacctggttggctgagctgcagtttcctttcatccttcccttctgcattttctgctgttggcttagcagcgagaaaggggccattcttgtgagttttgggtttgcgactctgcctcttggtcttgcgactctgcctcttggtcttgcgttttacccccttctttcttccctccaggcacttgtgttaccagctgacctagctttcttcaggcgagtacaaattttgcaatttttctttcattgttttgacaatggatttgatttgtatatgtcagcctcayataatatccctatttagagcaattctctgatccggaggtaggactgaggaggaggaagtgtcaagcctgtcttctgacccagaaaccacttcttgtttccacagaaactaccttccccccctatctcttcctgacttgggggagggacagtgcagaaatgtctgttgggttcctaatctgtgggctatcatatgtgctca

SEQ ID NO: 48684 - DNA, 1433 bp, Homo sapiens
catagactctcaacttccaggcggggccatgtgagggggtgtccaaaattaattctctttgtttctgaatctgatattatgagatgaccagagactctgagactctgaagacaccatctttatgtcagatggtggctgggtttctactgacttgactaaaccttggaccgaaatgtttttttttttttccttttccctttaaaaaatagagacggggtctcactatgttgctcaggctagtttcgaactccagggctcaagtgatccacccacctcagcctcccaaagtgctgagattataggtgtgagccattgtgctcagctcccagatggttttgaaagtctttaagttccctttttctccttcaattaagtgcaaaattcccttatctgtttcagcctttgaaaggctgaatgttgcccttcagacctgccacaaggcatgatgaggtgagtcagggttagggtgaaaagttgggtctcgtcttgtccttcttggccactgttaccatttggtaacacttctcttctctctcaagcatttccagctagatattcatggagccctatgcgtggcctcacctgaacctgccctcctgggctcttgagtttctggctccaggtggatcccatgcctgctatctctcccagccttgggcttcctctacaactgctcagggcctgccatggccccctgcctcccaggaggacaagctgtctgaactagcagagtcttcaatccctgacaactcacctcatcaccttccttccctctcattgcctttctgtcccatagctgtcccctctgccggctgagggtgcatcacaggcctcttttctctggagctgcagggctctcaggaatttgggagtccagaaatgccaggtttcacaaaaagagaagttgcatagaaaaagttaagagttcctgaaaataaatacatgggactgggtccatctctttttgagcatctgctgagcttctgattatcttttgggggaaatgtcaaaatatcattgtcttcccctcacaagaacagaactccagagatggaagggatttctaatctccctattttacatatggggagactggggttcagggagggaaagtggacagtctggtgagtttgaaggcagggtcagtggggctttccctcaggccatgaaaaaaaacgcaaaaaagaaagacagggccgggcacggtggctcacgcctgtaatcctagcactttgggaggccgaggcagggagattacctgaggtcaggagttcgagaccagcctggtcaacatggtgaaaccgtctttactgaaaatacaaawttagctgggcatggtggcacgcacctgtaatcccaggtactcgggtggctgaggccagagaattgcttaaacccgggaggcagaggttgcagtgagctgagatggcacc

SEQ ID NO: 48685 - DNA, 648 bp, Homo sapiens
tataaccagctaaactatcattcatgagatgacaaaatagatacattataacacaaataaagactgagacatctacctccatcaacataaataaatctcaaaacgtaacaccgagaaaagcaagctgcaacaggatatgtacaatactattggcctgcaattataaagcccaatactgaagtatcaactctttgtgatttaaagtgcaaagcacaattaagaaaaatacaaccacacttaagatggtagttattgctggataggatagaagggaaggaaaaagcaatgggacttcacctgtgactgaaatgtcttatctttttttaaaataaaaaaaaacaggccaggcagggtggctcacgcctgtaatcccagcactttgggaggccgaggcaggtggatcacgaggtcaggagatggaaactagcctggctaacatggtgaaaccccgtctctactaaaaatacaaaatattagccgggcatgggcgtggtggcgggtgcctgtagttgcagctactgggggctgaggcaggagaatggcatgaacccaggaggcagagcttgcagtcagcagagatygcgccactgcactccagcctgagcgacagagtgatactccgtctcaaaaaaaaaaaaaaaaaaaaaa

SEQ ID NO: 48686 - DNA, 600 bp, Homo sapiens
attcccaaaccaaagaataatagaaagctggctctcatctcatccaacttcctttatgatacaaataaggaacctgagacagagagaaaggatttttcaaggtcattgtcctcataacaatcaaatacatataayaataacacatgagccgggcacggtggctcacacctgtaatcccagtactttgggaggccgaggcgggtggatcacctgaggtcgggagttcgagcccagcctgaccaacatggagaaaccccgtctctactaaaaatacaaaattaaccggacgtggtggcgcatgcctgtaatcccagctactcaggaggctgaggcaggagaatctcttgaacccgggaggcagaggttgcagtgagccgagatcgcgccattgcactccatcctgggcaacagagtgagactgtgtctcaaaaataaataaataaaataataataataataataataataataatacatgatactttgtggtcgagctgggacttcaacctgtaggctttgctctcccagtccaggttgcagcacgccaatgacccctttccttcccttacgctccaggggcctcagcatgggtatagtacc

SEQ ID NO: 48687 - DNA, 1796 bp, Homo sapiens
tgttttgcctccaagaaggaagtctctgaggtgtggtggaaatgtgtgtggtctgtgttcatccaacagccatgatctggcctcataggctcctcagcctgcttgctttctcttggcgtccagaattcccaaggagatatgtcagagccctggggtcagaacactttagggttcmgtgggccctggcagcctggtagacctttagagctgtcagtggtgcgggggccagagcaactccatcttgaataggagctggataaaatgagactgagacctactgagctgtgttcccagatggttaaggcattctaagtcacagtgtgagataggaagtcagcaccaaatacaggtcataaagaacttgcttataaaacaatagcaaagacctggaaccaacccaaatatccatcaatgatagactggagaaagaaaatgtggcacatatacaccatgggatactgtgcagccataaaaaaggatgagttcatgtcctttgcagggacatagatgaagctagaaaccatcattctcagcaaactaacacaggaacagaaaaccaaacactgtatgttctcacttataagtgggagttgaacaataagaacacatggacacggggaggggaacatcacataccggggcctgtcagagggtggggggttaggggagggatagcattaggagaaatacctaatgtagatgatgggttgatgggtgcagcaaaccaccatggcacatgtatacctatgtaacaaacctgcactttctgcacatctatcccaaaacttaaagtataatttagaaaaaaaagatctttctgataaaacagtttgcagtggagaagttggccaaaacccaccaaaaccaagatggtgatgagagtgacctctggtcgtcctcactgctacactcccaccagcgtcatgacagattacaaatgccatggcgatgtcaggaagttaccgtatatggtctgaaaagaagaggcatgaataatccatcccttgttttgcgtatcaagaaataaccataaaaatgggcaaccagcagccctggggactgctctatggagtggccattcttttattcctttactttcctaatcaacttgcttttgctttactgtggagtcgccctgaattctttcttgcgcgagatccaagaaccctcgtttggggtctggatcgggacccctttcctgtaacagaggtactgaccccatttgtcttacacaaccttggtccttgaaggtctccgtgcttcatccgtaggaacccgtgatacaccacccccatcctgcccccacaccttctgcccattgttcatgaggctttggtcagccatggccttggcttggagctttgcacaatgttggtccacgtaggttttactggcgccatcattgggaactcatcatgcacccagaaccccacctctgaccccacaccctctgtccattgctcaggaagctttgattggccatggtcttggccttctgttaacctgtaggatggagtgtttatttttttccacctcctacatctttattctatgtgactatagatacaaagattgatacatctggatgtggctattcataggtgggcacataaacgctcacaagattacatgaatatgtctgtgagccccgaaaatctgagacacaggtctcagttaatttagaaagtttatttttccagggttgaggacacaggcctgtgacacagcctcaggaggtcctgacgacatctgcccaaggtcagagcatagtttgattttatacattttagggagac

SEQ ID NO: 48688 - DNA, 1796 bp, Homo sapiens
tgttttgcctccaagaaggaagtctctgaggtgtggtggaaatgtgtgtggtctgtgttcatccaacagccatgatctggcctcataggctcctcagcctgcttgctttctcttggcgtccagaattcccaaggagatatgtcagagccctggggtcagaacactttagggttccgtgggccctggcrgcctggtagacctttagagctgtcagtggtgcgggggccagagcaactccatcttgaataggagctggataaaatgagactgagacctactgagctgtgttcccagatggttaaggcattctaagtcacagtgtgagataggaagtcagcaccaaatacaggtcataaagaacttgcttataaaacaatagcaaagacctggaaccaacccaaatatccatcaatgatagactggagaaagaaaatgtggcacatatacaccatgggatactgtgcagccataaaaaaggatgagttcatgtcctttgcagggacatagatgaagctagaaaccatcattctcagcaaactaacacaggaacagaaaaccaaacactgtatgttctcacttataagtgggagttgaacaataagaacacatggacacggggaggggaacatcacataccggggcctgtcagagggtggggggttaggggagggatagcattaggagaaatacctaatgtagatgatgggttgatgggtgcagcaaaccaccatggcacatgtatacctatgtaacaaacctgcactttctgcacatctatcccaaaacttaaagtataatttagaaaaaaaagatctttctgataaaacagtttgcagtggagaagttggccaaaacccaccaaaaccaagatggtgatgagagtgacctctggtcgtcctcactgctacactcccaccagcgtcatgacagattacaaatgccatggcgatgtcaggaagttaccgtatatggtctgaaaagaagaggcatgaataatccatcccttgttttgcgtatcaagaaataaccataaaaatgggcaaccagcagccctggggactgctctatggagtggccattcttttattcctttactttcctaatcaacttgcttttgctttactgtggagtcgccctgaattctttcttgcgcgagatccaagaaccctcgtttggggtctggatcgggacccctttcctgtaacagaggtactgaccccatttgtcttacacaaccttggtccttgaaggtctccgtgcttcatccgtaggaacccgtgatacaccacccccatcctgcccccacaccttctgcccattgttcatgaggctttggtcagccatggccttggcttggagctttgcacaatgttggtccacgtaggttttactggcgccatcattgggaactcatcatgcacccagaaccccacctctgaccccacaccctctgtccattgctcaggaagctttgattggccatggtcttggccttctgttaacctgtaggatggagtgtttatttttttccacctcctacatctttattctatgtgactatagatacaaagattgatacatctggatgtggctattcataggtgggcacataaacgctcacaagattacatgaatatgtctgtgagccccgaaaatctgagacacaggtctcagttaatttagaaagtttatttttccagggttgaggacacaggcctgtgacacagcctcaggaggtcctgacgacatctgcccaaggtcagagcatagtttgattttatacattttagggagac

SEQ ID NO: 48689 - DNA, 1796 bp, Homo sapiens
tgttttgcctccaagaaggaagtctctgaggtgtggtggaaatgtgtgtggtctgtgttcatccaacagccatgatctggcctcataggctcctcagcctgcttgctttctcttggcgtccagaattcccaaggagatatgtcagagccctggggtcagaacactttagggttccgtgggccctggcagcctggtagacctttagagctgtcagtggtgcgggggccagagcaactccatcttgaataggagctggataaaatgagactgagacctactgagctgtgttcccagatggttaaggcattctaagtcacagtgtgagataggaagtcagcaccaaatacaggtcataaagaacttgcttataaaacaatagcaaagacctggaaccaacccaaatatccatcaatgatagactggagaaagaaaatgtggcacatatacaccatgggatactgtgcagccataaaaaaggatgagttcatgtcctttgcagggacatagatgaagctagaaaccatcattctcagcaaactaacacaggaacagaaaaccaaacactgtatgttctcacttataagtgggagttgaacaataagaacacatggacacggggaggggaacatcacataccggggcctgtcagagggtggggggttaggggagggatagcattaggagaaatacctaatgtagatgatgggttgatgggtgcagcaaaccaccatggcacatgtatacctatgtaacaaacctgcactttctgcacatctatcccaaaacttaaagtataatttagaaaaaaaagatctttctgataaaacagtttgcagtggagaagttggccaaaacccaccaaaaccaagatggtgatgagagtgacctctggtcgtcctcactgctacactcccaccagcgtcatgacagattacaaatgccatggcgatgtcaggaagttaccgtatatggtctgaaaagaagaggcatgaataatccatcccttgttttgcgtatcaagaaataaccataaaaatgggcaaccagcagccctggggactgctctatggagtggccattcttttattcctttactttcctaatcaacttgcttttgctttactgtggagtcgccctgaattctttcttgcgcgagatccaagaaccctcgtttggggtctggatcgggacccctttcctgtaacagaggtactgaccccatttgtcttacacaaccttggtccttgaaggtctccgtgcttcatccgtaggaacccgtgatacaccacccccatcctgcccccacaccttctgcccattgttcatgaggctttggtcagccatggccttggcttggagctttgcacaatgttggtccacgtaggttttactggcgccatcattgggaactcatcatgcacccagaaccccacctctgaccccacaccctctgtycattgctcaggaagctttgattggccatggtcttggccttctgttaacctgtaggatggagtgtttatttttttccacctcctacatctttattctatgtgactatagatacaaagattgatacatctggatgtggctattcataggtgggcacataaacgctcacaagattacatgaatatgtctgtgagccccgaaaatctgagacacaggtctcagttaatttagaaagtttatttttccagggttgaggacacaggcctgtgacacagcctcaggaggtcctgacgacatctgcccaaggtcagagcatagtttgattttatacattttagggagac

SEQ ID NO: 48690 - DNA, 1796 bp, Homo sapiens
tgttttgcctccaagaaggaagtctctgaggtgtggtggaaatgtgtgtggtctgtgttcatccaacagccatgatctggcctcataggctcctcagcctgcttgctttctcttggcgtccagaattcccaaggagatatgtcagagccctggggtcagaacactttagggttccgtgggccctggcagcctggtagacctttagagctgtcagtggtgcgggggccagagcaactccatcttgaataggagctggataaaatgagactgagacctactgagctgtgttcccagatggttaaggcattctaagtcacagtgtgagataggaagtcagcaccaaatacaggtcataaagaacttgcttataaaacaatagcaaagacctggaaccaacccaaatatccatcaatgatagactggagaaagaaaatgtggcacatatacaccatgggatactgtgcagccataaaaaaggatgagttcatgtcctttgcagggacatagatgaagctagaaaccatcattctcagcaaactaacacaggaacagaaaaccaaacactgtatgttctcacttataagtgggagttgaacaataagaacacatggacacggggaggggaacatcacataccggggcctgtcagagggtggggggttaggggagggatagcattaggagaaatacctaatgtagatgatgggttgatgggtgcagcaaaccaccatggcacatgtatacctatgtaacaaacctgcactttctgcacatctatcccaaaacttaaagtataatttagaaaaaaaagatctttctgataaaacagtttgcagtggagaagttggccaaaacccaccaaaaccaagatggtgatgagagtgacctctggtcgtcctcactgctacactcccaccagcgtcatgacagattacaaatgccatggcgatgtcaggaagttaccgtatatggtctgaaaagaagaggcatgaataatccatcccttgttttgcgtatcaagaaataaccataaaaatgggcaaccagcagccctggggactgctctatggagtggccattcttttattcctttactttcctaatcaacttgcttttgctttactgtggagtcgccctgaattctttcttgcgcgagatccaagaaccctcgtttggggtctggatcgggacccctttcctgtaacagaggtactgaccccatttgtcttacacaaccttggtccttgaaggtctccgtgcttcatccgtaggaacccgtgatacaccacccccatcctgcccccacaccttctgcccattgttcatgaggctttggtcagccatggccttggcttggagctttgcacaatgttggtccacgtaggttttactggcgccatcattgggaactcatcatgcacccagaaccccacctctgaccccacaccctctgtccattgctcaggaagctttgattggccatggtcttggccttctgttaacctgtaggatggagtgtttatttttttccacctcctacatctttattctatgtgactatagatacaaagattgatacatctggatgtggctattcataggtgggcacataaaygctcacaagattacatgaatatgtctgtgagccccgaaaatctgagacacaggtctcagttaatttagaaagtttatttttccagggttgaggacacaggcctgtgacacagcctcaggaggtcctgacgacatctgcccaaggtcagagcatagtttgattttatacattttagggagac

SEQ ID NO: 48691 - DNA, 578 bp, Homo sapiens
gaagctctgctcactaatcataatgcaatatcagtgttttctgcaaatccccttattatctctgcatcattagcagtttctgagcttgtctacaactaatttcacagtgaatcttatttctacctgatattttaaataagctgtcacgcagggcagcagctgacatgccgctgagaaagaagcaaatcagcctaaagtaggctttcaagcagcctccaacaattaggctttgggccatcgtacaaggtgggaaaatggggcaagtgtctagagcaaaccctgccccctaccccagtttaaataagtcatgtcttagtagataggtaagtggtctccagagctaggtttccagggggctcatttctgctcagctccttcccacaggtgacccatagcgagtgaattgatgtctctgaacytcagacagtaaaggaataaaacctcctcatagggttgttgtgggcttagcaagctaatgtctataatgtgcttagtgtgatgcacctagactattgaacacctagtgtatcctcaataaatctagttttaattgctgttcatatgtttatgaattaaat

SEQ ID NO: 48692 - DNA, 614 bp, Homo sapiens
gaagatgtatgctcctagtacatagcaatttcacctttaattatgtgacttggacaaaatcttttacatatgcagaaagagatgttcattgcagcaatgtttgtcatgctggacatttgtaaataacctagatgccacttaatggggacatgaatgaagcaaaggtggtgtatttcgtgatagactactgtgcatcagtcagaaggaatacaagtaggtctctttttaatttgatactgcatgtgggttccctgcattaatatggacaggctcagaaacgatattgagtgatgaaamgaagatggagactggtatctacgttggatgttacttgtgtgaatttttactcaatgtaccaagcaacatggaatgtagaaatgtatcaagaggaagatacacacagagtttggcagctgcctggggaaggggaacaggttggggtaaatggaactgggcactgtggggttatggaggatgtttagtaatatccgtgatgttctgtttgtttaaggtctagaaatcattgtgacaaaatataatttgtagttttgggtggtttgaatattagtattttctccattattttttgagaatagaagaaagacttcctggga

SEQ ID NO: 48693 - DNA, 1969 bp, Homo sapiens
ctcatggatgcaatgcaaacatgcaaggtaaacattgagggaagactgctcaacatataagagagatcaaaatgaggagaagttactcagggtagattgcctgcaagaggtgagctttgagccagatttcataggagaaaagaaatgagaacaatcttaactaaaccaagggaaagcagagatgctgagaatagaatccttggggattcctttcaatgcttcagaaattacttcatttaaatcagaaagtggcatttgtcagactttccatgtaagatgactggcattatagcaattatttttcagagtctaaatatctccactgaaagttagagaaacaaagcagaaaaaaatactgtaagagttttgttgttagcatttttttattctgggacaatactcttgcattggtgattcaaaggaaaatagaaacgtggacagttttactactaaagaaacaggcccaatatttaaggcttgaatcgaaaagttatttttgaatattgcaaacatagaacgtattcgagtatgtgttccgagtattgcaaacttagaacatatttgagtattcgttccaggaacacattctgatattctgccaagcagaatcagaactccccaagatcaaggtgcctaagagctacttcaaatgtttcataagtagttgaggcgcacatcaatcaactgacaaaaatccttagacttatttattttgtttcaatttctatatcttcatgaggcagaagaggacaatctggttttgaaaatcttcataccgaaacaatgtaatacccacatcagcccaatcttacatcaacttccaaagtaattagtacatagaatatcaactaggatattctttttactagcactcttgggaatatcaaaatagaacacgtttattgtcagagttatattaacacatttaacccttaagacatttaagcaaaagtcttatgccttcccacaagctaccaaattcccagtcttcttaaagagctggtggcacttgacctttagacactacagcagacaagggatcaggaatacccacattctgctcaccctcctcatcatgcagttctcacagggaagctattcttaagaaagagtaactaaatgaaaatatcaataatgttaattattcatctagcccagttcattattattcatctagcctcaatcaagcccacctggtaagagttgcactggtcacatgctcaggaagcctcaagaactagggggatttccggtctcctgctgaatcccctctccttggggagagaaaacaagagagagaggtgctgcatcaccttccaggttgtgtttgttctgggaacgcaggatggaattctgcctgcctcccaaagcccctgaatccctggttctcctcacccacacagcttatagacccagctgtgggagaagaaacatcactattaggttggtgcaaaggtaattgcacaaaaaccgcaaacacgtggatggggacagtgccagaagataaccctcacggcgacaaccttaatgaggtttcactctgagcactagcaagtatgtgtatacaaataccattgctaaaaactctgtgaaaataataattgcatttttctcatattacattaggttgtttcatatgaaaccagtttttgtggatcaaaatggtggaatcttggcatttcgtatggtacaacctgataaatgtccatctctccatttatcttacaataagttccttaaagtcaagaaacacttcggtggtaccggagactagcagtgtgtttttctattagcagtttgataaatatttgtctaattgaattgaatggagacattcaatataatactctgcttcgragataaggctctacactttccacctaaatgttgaggcttcctgctctgcctccttccttggctattccttgtccgcaatctgtaagtgtaagaattctcagggtccttttat

SEQ ID NO: 48694 - DNA, 569 bp, Homo sapiens
tggactgagagttggaagcccaaggacctggtttcaacactctgctgtgctgccacaggcaagccactccacgtctctgaacctgtgtccttttctgtccagtgagcacagaatgtctgtcctgtcaaatgcggctagaaagcagacatagaaagataattttacattgagaagacttcaaatgagaataccaacaaatatttgtttctcactattaaattagtaacttaaacatctcatttctgatttctagccagcacgtggagaattggttcatgtgaagcagcatgtgtgctgcttactcagcctctttgaagaacaatttaaaaataaaaattaaaagccagcygggcgcggtggctcacgcctgtaatcccatcactttgggaggccgaggcgggcagatcgtgagttcagaagatcgagaccatcctggctaacatggtgaaaacccgtctctactaaaaatacaaaaaaaaaaaaaaatagcggggcatggtggtgggcgcctgtagtctcagctactcaggaggctgaggcaggagaatggcgtgaacccgggaggcaga

SEQ ID NO: 48695 - DNA, 610 bp, Homo sapiens
gcacttcaaggtgccccgggattctggacaaactgccatggccaccccagagcaccctgtcctgtgttcttagggaggatggtgtgcagatctaaaaccccgtgggacccagcagcaggggccggcagggcatctggtgctggttgtgttgccagcgttggaatgggctctaccgaactccccagccctgcaggtgcaggccctgtcctcctggaggaccttagcttcttcatttgtttattttccccataaagaggggtgaagaggaaagccaaaaccaactcacagctgaccactcagatgaccctgtgaacgtcctacacagtaactgtatgcacgtggctggatgggggccaggaggcgtccttggccccacgtgccctcacttgccmagattttgtttcttccctgaaaaacatgttctgtgctttcatccgcgcatctgacagtccctcatctgtgcagagttgatgagcccctcttgcaagggggcgtcctttgtgtttttgcaaaaatgctccaaccttggctaggtgcggtggctcacgcctgtaatccctgcacttcaggaagccagggtgggaggatcgcttgagcccaggagttcaag

SEQ ID NO: 48696 - DNA, 632 bp, Homo sapiens
gcttttgttttcacagttgcaaaatgattgctgtacccaaaattgcattcctatttaaggcaggaagaaggggggagggcaaaaggataaaaactcaagccagttgggtccattcttaacaagagctcttccggaagcctgtctagcaacttccatttgcatctccactgttgagtccagcagcacggatagctrgggataatgactattgcagtagggaatattctatcttgaatattgaatatgaagatggggatgcggtgggtaggtaaaaaggggagaatgaataccgatagttaagtagcagtgtctgccttggtttaccccaagtatttctcaaacctatccaattttctccttccctaccgccaacatcccagtgaaaccacaatccactctcagctggacattcttctagctggtcttcctgcacagcaaaaggatgtttatcttttaaaacttacatctattatgctgctctgctggttaaaacttataatgtcttcctatattagttagaataaaatctgcacatgtttttatgacttaaaatgcccacatgacttgatatctcccacttatttttttcccttctttcctcctggtttgtgacagtccaggcacgttggcct

SEQ ID NO: 48697 - DNA, 632 bp, Homo sapiens
gcttttgttttcacagttgcaaaatgattgctgtacccaaaattgcattcctatttaaggcaggaagaaggggggagggcaaaaggataaaaactcaagccagttgggtccattcttaacaagagctcttccggaagcctgtctagcaacttccatttgcatctccactgttgagtccagcagcacggatagctagggataatgactattgcagtagggaatattctatcttgaatattgaatatgaagatggggatgcggtgggtaggtaaaaaggggagaatgaatacygatagttaagtagcagtgtctgccttggtttaccccaagtatttctcaaacctatccaattttctccttccctaccgccaacatcccagtgaaaccacaatccactctcagctggacattcttctagctggtcttcctgcacagcaaaaggatgtttatcttttaaaacttacatctattatgctgctctgctggttaaaacttataatgtcttcctatattagttagaataaaatctgcacatgtttttatgacttaaaatgcccacatgacttgatatctcccacttatttttttcccttctttcctcctggtttgtgacagtccaggcacgttggcct

SEQ ID NO: 48698 - DNA, 1399 bp, Homo sapiens
tgaacartttttctctatcctatagggacccctactcttccatacctgagtaccatgtctctctctctatatatatgtagtgtgtgcatatatatatatatatatgagtcgtagaatcacaaaactgctaagcactttgaggtcatctggactgccctctccacctctagtattaacggatgaaattcccagctgtgaaccccaaagtgcattctgcagtttatatatatatatataatataaatatatataatatatattatatattaatataaatatatataatatatataatataaatatataatatatattatatatatttatatataatataaatatatatataatatatattatataaatatatatataaactatatatatatagtctgtgtgcatatatatgtatgtatgtgtatatgtgtgtgtatatgtatgtacatatatatatatacacacacacactttcctaaacgacatgaaatcctatatttatttgaaggtcttcactgtggaccacattggccaaaacctaggattccatgttcttactcatctttccctttagacaggagccactgggtgctttgaagggaagaaaaatgaaggccaaattgattgatgtgacttcctaattatcagggttaccatcctatgaatttcatgtgggtccctgggcaagtcatttactgccttggaccatgacctccgctgtcacgcgaggaaagtgaattcccatcccccctccatacaacaggaatctttgagaaagattcttggaaaggggatgatgtggattgcacccttagctgaacggtgacctagatatggtcagcagaaggcaattggtttgccctaaattagatctgacctgctttataattgcaaatccctgagggactgcattacgccacagtttcttttccattgctgactggcagcaaacatctctgccacccacctgtgtgtactattagagcaagacttgagcctacacatgtttgtttgatgatgataatggttataattgttttagaagtaacactgaatttattttaaaacttccaaccaaatgtcacccgaatcccttcacctcccttccctttacctgccaaactcattctgctttgaaaggggtatggaattaagaacttctgtggggaatcaaagaaagggataaattcaataagaattgaagattgatttagaatcagcatagccataccttcaggggctctgggagcattgcagcccctcctctcattaaggatcactgggaatcatgggatggctaattaacgagagagatttcctgcagtctaactcccccgcctcatctcctggaagacatctgtcagggagcataggcaaagggggttgtaaacccctgctccac

SEQ ID NO: 48699 - DNA, 1399 bp, Homo sapiens
tgaacaatttttctctatcctatagggacccctactcttccatacctgagtaccatgtctctctctmtatatatatgtagtgtgtgcatatatatatatatatatgagtcgtagaatcacaaaactgctaagcactttgaggtcatctggactgccctctccacctctagtattaacggatgaaattcccagctgtgaaccccaaagtgcattctgcagtttatatatatatatataatataaatatatataatatatattatatattaatataaatatatataatatatataatataaatatataatatatattatatatatttatatataatataaatatatatataatatatattatataaatatatatataaactatatatatatagtctgtgtgcatatatatgtatgtatgtgtatatgtgtgtgtatatgtatgtacatatatatatatacacacacacactttcctaaacgacatgaaatcctatatttatttgaaggtcttcactgtggaccacattggccaaaacctaggattccatgttcttactcatctttccctttagacaggagccactgggtgctttgaagggaagaaaaatgaaggccaaattgattgatgtgacttcctaattatcagggttaccatcctatgaatttcatgtgggtccctgggcaagtcatttactgccttggaccatgacctccgctgtcacgcgaggaaagtgaattcccatcccccctccatacaacaggaatctttgagaaagattcttggaaaggggatgatgtggattgcacccttagctgaacggtgacctagatatggtcagcagaaggcaattggtttgccctaaattagatctgacctgctttataattgcaaatccctgagggactgcattacgccacagtttcttttccattgctgactggcagcaaacatctctgccacccacctgtgtgtactattagagcaagacttgagcctacacatgtttgtttgatgatgataatggttataattgttttagaagtaacactgaatttattttaaaacttccaaccaaatgtcacccgaatcccttcacctcccttccctttacctgccaaactcattctgctttgaaaggggtatggaattaagaacttctgtggggaatcaaagaaagggataaattcaataagaattgaagattgatttagaatcagcatagccataccttcaggggctctgggagcattgcagcccctcctctcattaaggatcactgggaatcatgggatggctaattaacgagagagatttcctgcagtctaactcccccgcctcatctcctggaagacatctgtcagggagcataggcaaagggggttgtaaacccctgctccac

SEQ ID NO: 48700 - DNA, 1399 bp, Homo sapiens
tgaacaatttttctctatcctatagggacccctactcttccatacctgagtaccatgtctctctctctatatatatgtagtgtgtgcatatatatatatatatatgagtcgtagaatcacaaaactgctaagcactttgaggtcatctggactgccctctccacctctagtattaacggatgaaattcccagctgtgaaccccaaagtgcattctgcagtttatatatatatatataatataaatatatataatatatattatatattaatataaatatatataatatatataatataaatatataatatatattatatatatttatatataatataaatatatatataatatatattatataaatatatatataaactatatatatatagtctgtgtgcatatatatgtatgtrtgtgtatatgtgtgtgtatatgtatgtacatatatatatatacacacacacactttcctaaacgacatgaaatcctatatttatttgaaggtcttcactgtggaccacattggccaaaacctaggattccatgttcttactcatctttccctttagacaggagccactgggtgctttgaagggaagaaaaatgaaggccaaattgattgatgtgacttcctaattatcagggttaccatcctatgaatttcatgtgggtccctgggcaagtcatttactgccttggaccatgacctccgctgtcacgcgaggaaagtgaattcccatcccccctccatacaacaggaatctttgagaaagattcttggaaaggggatgatgtggattgcacccttagctgaacggtgacctagatatggtcagcagaaggcaattggtttgccctaaattagatctgacctgctttataattgcaaatccctgagggactgcattacgccacagtttcttttccattgctgactggcagcaaacatctctgccacccacctgtgtgtactattagagcaagacttgagcctacacatgtttgtttgatgatgataatggttataattgttttagaagtaacactgaatttattttaaaacttccaaccaaatgtcacccgaatcccttcacctcccttccctttacctgccaaactcattctgctttgaaaggggtatggaattaagaacttctgtggggaatcaaagaaagggataaattcaataagaattgaagattgatttagaatcagcatagccataccttcaggggctctgggagcattgcagcccctcctctcattaaggatcactgggaatcatgggatggctaattaacgagagagatttcctgcagtctaactcccccgcctcatctcctggaagacatctgtcagggagcataggcaaagggggttgtaaacccctgctccac

SEQ ID NO: 48701 - DNA, 564 bp, Homo sapiens
cttatgtttgttgtggagggacagcatgaggggcacacatggggccctcagtaaggcctgcttacaaagaacaagggaagggagtctttggggtgcctgtccagaacctactcttgggatgtgggcacacagcagccgggtggcaggtgagggcagagacggtgctgggcagggggctgggccaggggccatacctgaccatgacataggagatgccgaagtcgggcagggactgccaggcctggatgaagcgcagctgggcctctgccagcgacaactgggccacattctggtgggcttccaggatccgtggggtgagctgcgggaccatactggtgacgggctgccaggcactattcccctcctccagagtcaccgagcccccacctccccatcagggtgacagcatgtgagcctgggaaggggcagtgcccacgtggggccgccaaggtgcagatctgcactgygccaggctgcaaggtggacatgggcacctggaccgtgactcctcccaaagggtgggtaccagccgcacaatctcagggacacagtgggagaagccca

SEQ ID NO: 48702 - DNA, 602 bp, Homo sapiens
ggcactggaatgttttcaaggctctccagggaagcgtgttgtgcagccacgggtgagaaccacaggtatacacctggaagattagtacctacatgtcatcagaggaagcctggggctacacgggctttctcaaggtcccacagctgacrcgtggtggggccaacacaggctttctttcctgctgacagtaattcttctctgaatgaggcagaacccaattagttaataactatttcacctggaagggaaccacaagaggtatttttctcttctcaacccagggaatctcagagaaaagtgagtaattacatttaggctattctgttactgaatacatcctttctactcaaagtatgatccatggtgcagttacatggatctgaatctcagaccccacctcagatctcctaaaccaaaatctgaatggcaataaggtctccaggtgttttaaattaaaattaaattaaaacctgagaaaattaaaatctgagaagcactgggccatactacctgccgtaatacagagactgacaaacttttaggctttatgggtcatgctgtctctgtcacaactactcgttctacctttatagcacaaaagc

SEQ ID NO: 48703 - DNA, 532 bp, Homo sapiens
tgctattttatttgctattgttatcatagattgacatatgcaaaattaatttccctgaagccaattattttaagggtggattgtctaayaaacaagaagcaaaacacaaaagaccatacaataaggccaggcactgtagctcatgcctgtaatcccagcactttgggagaccgaggcgggcagatcacctgaagtcgggagcttgagaccagcctgaccaacatggtgaaaccccgtctctactaaaaatacaaaattagccgggcatggtggcgcatacctgtaatcccagctactcaggaggctgaggcaggagaatcgcttgaacccaggaggcggaggttgcggtgagccaagattgcaccattgcactccagcctgggcgacaagaatgaaactccatctcaaaaaaaattaaaaaataaaaatgagaccataccataggtccttttaaaaataaagttcaaaaacaagcaaaactaaacaatgttgggtagtgatgcatgtattcatggtaaaactataaagcaaa

SEQ ID NO: 48704 - DNA, 572 bp, Homo sapiens
aaacagtaacacagtaacatactcaacccctggatccgccactaagccaagatgtatgtttgcttgaataatgtaatctctctatgtgttaacgttcttgtctgtaaaatggaaatggtctctatccctaaccctcatgagagaggagggagccctttccaagccttctcagctgtttcttggaaacacgatgcaagtttatgtgccagcttgagcagggttgtggttgtttggggggatakaaatgactggaggcatgtaggcagcacgcaaatagaggcctggggagcagcctctaaaacacagtgggcccattctcccctctctttgcccactagcataaaagaagaagagctggaggaagcctggttacctggaatactgcttccccctctgcccacctcatttattttgctttgcaacctccttccatgttctcacacacataaaaaacaaaaacatgtgtatgtgctcaggtaagtgcactttggccagagaggaccagcctggagtctaacgccaccccatgggctgaagggatgcatgtctcacccacacagagccctcaccat

SEQ ID NO: 48705 - DNA, 1895 bp, Homo sapiens
agattgaataattgaaggcactatgcttggtgctgaagaaggtctaaggaggtctacaccacagaggctgcacccactcctcagccttgctgagccacaccattctcatctctacagcatccacctctcttggctcttgtaaggattgagacatgccaccaggcttactgtaagcactgaacagctgggaggatttgatgctgtcccactgccataccaaggggcaagttttctggacttgcctagaccttatagcagattaagtacttttatttcactgaacaaagtttagagatcattttacatcactgaacaaagtttagagatttggagagtatttgtttttaatttctatggatctgcttatacttctcttttgcaaattgaaacaccgtggaagattttttggaacttaggttgagagttgtacatggcttcagagttgctgtggatttctatctccatggggccatctgtctcatctgtctatataatggtcatgcactttgcagagcctgcttcaatgtctgctatactatggccactctgccagtgttgttgacaaacagatgggttttgatggcagagaaacttatatttagcaagtcttccttttgcccttgaacttttccacctgttgtttgcaccagcaactcccatggmaaatgtgaaaaagcaaaaaataaggaatattacaagatgggactaacattaaaatgtatgttttcatcaaacatgatcaagaacctaccgatgattgaaggtatctaaaaccaaaggagtcccttagataagatgttacaaatcattcccaaggggtggtgggaaggggacatgggatttgagggcaggtacaaaagagaacttgtctataaacttctttaatccttaataaaaatgtgcactttagatattattatgtactcctattctacaggtaagggaccaaccttcaggagtttacttatcttgccaaaggtcacgttactagttaggaggtaatctcagggcagggactctgccttgtcattgctgaagccttagttctgagaacagcctggactacagttctgtgtttaatatttttttaaataactaataataaatatattaggtagggaagtggacctttaaaacaggctttctccactgtattagtctgttcccacaccgctatgaagaactccctgagactgagtaatttataaagaaaagaggtttaattgactcacagttctgcatggctagggaggcctcaggaaacttacaattatggcataaggcacctatttatagggtgtccggagagagaatgagtgcaagcagaggaaatgccaggcgcttataaaactatcagatctcctgagactcactcactatcatggaaaaagcaccccaattatccaattatctccacctggtcccgccattgacaagtggggattattacagttcaaggtgagatttaggtggggacacaaagccaaaccagatcatccaccttgatatgattgacattttgcatcagatgacttatcatcctgggaggccatcctgtacactgtagaattattgacagcatctcgacctctacccactagagtagcgtgtggctctgtgatgcattccagggtgaccaagcagggattgtgtctagacaagagtttctgttgaattttaccatcctatgaagtatttcgtgagggaactcacaatgtgtccaatcccacaaagatgccagagaaaggctgcattcattcaggttgactataatgagtaacaatttattttggaatattaattaaatgggtgtatgtgttgttgttgctggttttttttgtagaccaaattttgaatacaaatatctggtccctgaaaaattattcctgatttga

SEQ ID NO: 48706 - DNA, 587 bp, Homo sapiens
cacacggagaaagtgacagagctaggatttgaacctttctctgtctgtttcctaagccctgacttgagaacacaattcagcatggggtattaaccacgcaggatctactgagcccccacggttgttctgcaggtagaatgtgattagggagtcaaagtgcctttggaaaatgcaggcattagacaagcattatttgttaaaatagtttgcggctatgttctccccttgctggtcttcattcaacaaatatttcttgtgtgctaagccaggcactgttccaggcactcaggatatagcagggagaaaagcagataaaatctttaccctggtggagctgacatttccccaagcaggacagtctgcagacatgaataaaaagattgatcagccatgtgagagagagagagtgcttaaggctgaatctctctctctctctctctctctctctmtctatatatatatatacacacacacacacggttatatagatgtagttatatatatagttatatagatacagttatatatagtatatatatagactatatatatatatatatatactctctctatatatatatacgcat

SEQ ID NO: 48707 - DNA, 587 bp, Homo sapiens
cacacggagaaagtgacagagctaggatttgaacctttctctgtctgtttcctaagccctgacttgagaacacaattcagcatggggtattaaccacgcaggatctactgagcccccacggttgttctgcaggtagaatgtgattagggagtcaaagtgcctttggaaaatgcaggcattagacaagcattatttgttaaaatagtttgcggctatgttctccccttgctggtcttcattcaacaaatatttcttgtgtgctaagccaggcactgttccaggcactcaggatatagcagggagaaaagcagataaaatctttaccctggtggagctgacatttccccaagcaggacagtctgcagacatgaataaaaagattgatcagccatgtgagagagagagagtgcttaaggctgaatctctctctctctctctctctctctctctmtatatatatatatacacacacacacacggttatatagatgtagttatatatatagttatatagatacagttatatatagtatatatatagactatatatatatatatatatactctctctatatatatatacgcat

SEQ ID NO: 48708 - DNA, 542 bp, Homo sapiens
actaatatgtggacatttccataagattcaaagtaatttatttttctggtcataaagggtagaattgagttgggctctttcaaacytaaataaaatagttaaaaaaattactatccaaggaataaatcagtgttcaaatcatgaaaacagaagatctctatgataggtttcagacatgctacattggaaatataaattgctttattgttttgtgtcatctttcactaatattctcatgttcattgaaacttaaagctaaacaagttagttttcatagatgtaatccattgaaagtacagttttgggcttgatttcggtccctgagatatgtagcttgatccatcctacatgaattataaaaacacaaaatccagtctatcgaggttatgggcttgaagtgaaactttacatcgtaaagtatacatttgtggagtatacatcttttgcacatcttttttggtgaagagtctccaaaatttaaagataattttattcatcaattaaatatttatcaagcaactattaagtaccagaaacttgtt

SEQ ID NO: 48709 - DNA, 549 bp, Homo sapiens
tggccatatggcccatattagcctgtttttattactcatttgaggaagatagaaaattgctgttgtaactgatatttagttcacttaagcctggatggaataaattggcgttactccagacagtggagcaaattgtcataatgctacctttctccactgatttgaaatgtcattttcactatataggaaattctttatagcttcgggttgtttctgtgctttttattgagctccattgatctttgcgtctattgcatctattttaggatagcaatatttttagttactgcagtcttataatttttaatataagcaaacttgtttctcttacttaaaaaaatgttatctgttcatttttgcagatttgcacattaagattgtctatttcttcaaaaaaatcctgttaggatgttaatttgattcctattatgtttattaaataatttggtgacacattttracaataaatctctatccagaaacagggcttttttgtcccttagtcttatagttgtattaatacacctaccctcttctatttggttattg

SEQ ID NO: 48710 - DNA, 532 bp, Homo sapiens
tgcagtggcgcaatcttggctcactgcaagctccccctcccaggttcaygccattctcctgcctcagcctcccgagtagctgggactacaggcgtccaccaccacgcccgtctaattttttgtatttttagtagagacggggtttcaccatgttagccaggatggtctcgatctcctgacctcgtgatccgccggctttggcctcccaaagtgctgggattacaggcatgagccaccgcgccctgccatatttaaagtttttaaaccagccaccagcagaggcctttaaaagcagacgatgagcctgggcaacaaagcaagaccctgtctctacaaacaattttttgttttttaagtagccctgtgtagtgacacaggcctgtagtcttagctactcaggaggcttatgtggcgggatcagtttagcccaggagttcgaggctgccatgagctatgatcgctatgatcgctccagtacactccagcctgggagacagagtgagaccccatctgtaaaataaataaatgaata

SEQ ID NO: 48711 - DNA, 600 bp, Homo sapiens
gaattcatgtgtgtatgcatgttcctacaccacattcatttgctttacgatgtttaaacaggttattttgtagctcacttgtccctccgcctgcgacttatgtctaatatgcctggaatgttgacatgttaaacaagcaaacatgaagtaatatttttcctttttctactattattttttagtcatttatctttacattatcagtgttggcagagtttttgctgtttaataaacatttgttccgatcagataagtgggaagaaattgtcatttgcttgttcaagtcatccttttctgtgataatctgctcctagctgaacatagggaaatagatasaacaatgcctcaggcctacaacagggccaggctcagtgtgatttcacataagtttggctaaaataggactcaagtggagatggtcactcttcagcacggagagagaacacaccacacaacctcttcaggagattcagcctcaatcttacgcattgaagggactgtcctccaagtgagaggattggcttatgtctcaggccctccagtttctgttcaagttgaatgtggttatcaactacacatcacttaaagtcaaatacctga

SEQ ID NO: 48712 - DNA, 546 bp, Homo sapiens
gagtgaggctctgtctcaaataaataaataaatagtaactaagggggtggggggagaagaagatggcatttcctgtacagctgtttgtggttaaagatattgcatattctaagggtgaagaagagagagagatgactgtgtgacaggttaacctttatttggccctacagacagaaaggattccaatggcagtgaaaagagggaaaacattgcagacagaggagagaagggcaataaaagtgaagaggtttgtgttgtcaatttcatgtgggtcagtaacagacaccaatgtaggtggggcgcaagcattgtttgtcagtgtcatgctcacctaagagcctttcttgaaatgtcccagtttgccgaatcccccctttaggaccccttatccccattcagacacacyccaagtctcccactatttatcttatttttcttcatattaaacaatcaaccctaacagagtcttctttcattgtatgcagatgagttttataagtactcctgataatctccacactccttcataacaatgaaggaaaaggg

SEQ ID NO: 48713 - DNA, 546 bp, Homo sapiens
gagtgaggctctgtctcaaataaataaataaatagtaactaagggggtggggggagaagaagatggcatttcctgtacagctgtttgtggttaaagatattgcatattctaagggtgaagaagagagagagatgactgtgtgacaggttaacctttatttggccctacagacagaaaggattccaatggcagtgaaaagagggaaaacattgcagacagaggagagaagggcaataaaagtgaagaggtttgtgttgtcaatttcatgtgggtcagtaacagacaccaatgtaggtggggcgcaagcattgtttgtcagtgtcatgctcacctaagagcctttcttgaaatgtcccagtttgccgaatcccccctttaggaccccttatccccattcagacacactccaagtctcccactatttawcttatttttcttcatattaaacaatcaaccctaacagagtcttctttcattgtatgcagatgagttttataagtactcctgataatctccacactccttcataacaatgaaggaaaaggg

SEQ ID NO: 48714 - DNA, 546 bp, Homo sapiens
gagtgaggctctgtctcaaataaataaataaatagtaactaagggggtggggggagaagaagatggcatttcctgtacagctgtttgtggttaaagatattgcatattctaagggtgaagaagagagagagatgactgtgtgacaggttaacctttatttggccctacagacagaaaggattccaatggcagtgaaaagagggaaaacattgcagacagaggagagaagggcaataaaagtgaagaggtttgtgttgtcaatttcatgtgggtcagtaacagacaccaatgtaggtggggcgcaagcattgtttgtcagtgtcatgctcacctaagagcctttcttgaaatgtcccagtttgccgaatcccccctttaggaccccttatccccattcagacacactccaagtctcccactatttatcttatttttcttcatattaaacaatcaaccctaacagagtcttctttcattgtatgcagatgagttttataagtactsctgataatctccacactccttcataacaatgaaggaaaaggg

SEQ ID NO: 48715 - DNA, 546 bp, Homo sapiens
gagtgaggctctgtctcaaataaataaataaatagtaactaagggggtggggggagaagaagatggcatttcctgtacagctgtttgtggttaaagatattgcatattctaagggtgaagaagagagagagatgactgtgtgacaggttaacctttatttggccctacagacagaaaggattccaatggcagtgaaaagagggaaaacattgcagacagaggagagaagggcaataaaagtgaagaggtttgtgttgtcaatttcatgtgggtcagtaacagacaccaatgtaggtggggcgcaagcattgtttgtcagtgtcatgctcacctaagagcctttcttgaaatgtcccagtttgccgaatcccccctttaggaccccttatccccattcagacacactccaagtctcccactatttatcttatttttcttcatattaaacaatcaaccctaacagagtcttctttcattgtatgcagatgagttttataagtactcckgataatctccacactccttcataacaatgaaggaaaaggg

SEQ ID NO: 48716 - DNA, 1526 bp, Homo sapiens
tcttaatctgtcaaacatctgttttagtatcttttttctatgttaaagaaatctggattttcttcagataataagcatccagagcttaagagccacatagatacttttactacttttgatcaaatggtatgagctaaatatatgaaaaacgaagtgactatatctgttttgaaatgatttctttttcattatttaattctacaagattttattgccaggtactgtgcttagcactggaaatacagagtgaacaaatcttacatcacataaatttgttaggcacattttatattttctcttctttaaattatcaacacacaaagtctgtagtaaaagtatgcaaatccctatttcttacctgccttttaagatcttctatgactgagaagtatctgctatagtcatgatcgtgttcccgggaagagccaggctcacatttctcgtaccagcccttgatcttctgctccaggtctgcgttggcctcctctagagcatgcacatggtccaggtaggatgccaggcggtcgttgagattctgcatggtcaccttttcattcccagagaggaggctgtgctcattgccaagaaaaccagcacaggcaccacttcccaaccctccaccgctattgcagaagcttcctccagaagagatgccctcaagagtacaagaaaagctgcttcttgctcccgatccaacacacacattcccagccacgaagcctgttcctccaccggacagcctaccagacccagttcgcgagcagatcctcctggatccaccagaaagtcgaaaagacatggtggcagcacagccgggcaaccccttcccagaaagaggagcaaagccagggttcaccttccacacttgttagctcccttggccttttatagtattcactgggtcatttcagtcttgactatgccagtctgtaataaaatttacttgcatcctaattgttgtttttcacaattgggtaatttttaacagcgtccagtctgtaggtggaaaggtgccccaaggatattttttatatataaaaatggtgccaggtgaagtaaaactaaatcatagcctcaaaggccaaaattaaatatgactaaatgtgcatctttttggccactggaatattaatagaatctagattctccccctgccacatataacaaagaattaataattccaatgagaaatgtctcctacttttgtcctgttaacgctcatagagtatttctagtattcccacttcattgagtgcttcctttcttcctttcgtttctttttcttttttcctttttttaaagatatgtggtctcgctatgtttcccaggctggtctcraactcctggcctccagtgatcctcagcctcagcacccagctcagcctcctgtggccagcattacaggtgtgagccactgccctgggtgtctgggtgtgtgttttccttcttatcaaaaccagaaaatctcagcatctattgatcttttggtagtgggagattttaaaagaaatctaccatttcttgaa

SEQ ID NO: 48717 - DNA, 639 bp, Homo sapiens
tcttgcctaacatacttttagaattggtgtagagctggacagctttgtgggaactggtgtgacctaattttcctcagtttaataactaatattttagcatttgaatgtcataaaggcattgccctaccccatacttttgtatcagtaggttttattattttatcacgtaaaaattacatattttgtgggatcctttttctgctttggtgaaatgtaggcttcacctctattgtgacgcttggtggattcattcttgctcatctgaagtggcatctgcagtcctgccacagtgaagtatatttttagcttttttttttttttttttttttttttgagatggagtctcgctctgttgtcaagctggagtgcagtggcacratgccagctcactacaacctccgcttcccagattcaagcgattcccctgcctcagcctctcgagtagctgggactataggtgtgcaccaccatgtccggctaatttttttttttgtgggtgtgttttagtagagatggagttttaccacgttggccaggatggtcttgatctcctgaccttgtgatccgccggccttggcttcccaaagtgctgggattacaggtgtgagccactgtgcctggccatttttagcttttttt

SEQ ID NO: 48718 - DNA, 666 bp, Homo sapiens
ctgctgtggaaaggggcagtgttgctatggcaatggtaaactgaccatgcacwcttgtgtgtgtatcttatggaaagctgcttccaccccagacctgttttagctagtcttcaatttgttgtggtgtctgagttccacctccagagtccagtcctacctcctttctcactcctttgtttttttgttgttgtttgtttttattttttgagatggggtctcactctattgcccaggctggagtgtggtggtgtgatcttggctaactgcaactccaccccctgagttcaagtgatcctccatcctcagcctcccaagtagctggaccaccaatgtgtgccactatgcctggctacatttttgtagttttggaagagatggggtttcaccatgttgtccaggctggtcttgaactcttgacctctggtgatccgccctcctcggcctcccaaagttctgggattacgggcatgagccacctcacctagccctacttcacttcactcctttgaatttcacaaccctcttctggctctcctctgatctccatctcatttctatcttttttgcagatcccattctcccctctcatcaatttttttttttttttttttgaggcagggtctcactgtcacccaggctagagtgcagtggcgtgaactcagctca

SEQ ID NO: 48719 - DNA, 564 bp, Homo sapiens
acaaacagacacacaccatttccaaggaaagggatcattaaaatattttttaacccatttcacgtcaatatggtccgtgttatgtgaatcactacttggcaaaatgaaaaattatatatatatatatakagagagagagagagagagagagttaaattggactgtgagagctgagcataaacacgttgcagatcaaagtcctggtttgtgaagacaggtgaaaggaaaaagtgcctgcctcctaatggaaaagaaatttcccaggaagggaaaaaataaaaggcgacccgaaacaaaagcaagatgaatcactttcattctgaaaggaacacagtgaaacaatgttgctaaatgagatacaatttctgacaaagatcttctctgttctccaaggacttttattgtgctgcgtgtaccaagagttatgtgttatcttcccaaaaagagtcagtgtactttattttatgcgtggtacctctctttgcctcttctccccacttgctgcgatttaagccgtctattgtagtgccctatctctgatcagccctaaagatctgaaaagcc

SEQ ID NO: 48720 - DNA, 1917 bp, Homo sapiens
gaacagaacatgtgataaaattgcaaagaatttactacacaccacacacaaacccacccacccacacgcgtgcatgtgcacacatgcatgcccacagacacacaaatgagtacaagtaaaactcaagaaacctgaataagatcagtagattgtatcaatgtcaatatcctggttgtgatagtgtactattattctgatgttatactagatgttaccactgggggaacctgggtagggggtgcactggatctctctgtattatttcttacagctgcatacgaatctasaattatcttgaaataaaaagttttattaaaagagtgttgccggccaggcgcggtggctcacgcctgtaatcccagcactttgggaggccgaggcgggcggatcacgaggtcaggagatcgagaccatcctggctaaaacggtgaaaccccgtctctactaaaaatacaaaaaattagccgggcgtagtggcgggcgcctgtagtcccagctacttgggaggctgaggcaggagaatggtgtgaacccgggaggcggagcttgcagtgagccgagattgcgccactgcactccagcctgggcgacagagcgagactccgtctcaaaaaaaaaaaaaaaaaaaaaagagtgttgccaaagctctttccaaaattcaccttatagtgatttcaggcagcagactgtcatgtcttttgcaaatgggcaagtctggggcctcagctggtgatgagctgcccctctgcagatgctgtaagagcagatgaagggagacaccttggaaggtccctagcactcacagagtacctactgtgtgctgggcatcaccttgtcatcttcacaacaatctgcaaagtacatgctgatgcgcccccttagagatgaggaagctgaaggtgacgtgccttacccagcaaaggatggaattcagattccaattcaaggctctatgcccaaagccaaaataaagacgaactccaagcctcatcctcacattgccctcctgtcttcatatcttcatagaactgcttaaatgttagcatgcctgggagtcacctggggactgggttataatgcaggctctagttctgaggttctgcatgtctaataagctccaagacactactgaggccaccacactttgagcactaaggccccatcccaccacccagaatcaaagatggtcaatttttttttttttttgaggcaggatctcactctgtcactcaggctggagtacaatggcacgacaacagctcactgcagcctcgacctcctaggctcaagtgatcctcccacctcagcctcccaagtagctgcgactacaagcatgcaccaccacacctggctaatttttttttattttttgtaaaggtggggtctccctatgttgcccaggctggtcttgaactcctggactcaagtgatcctcccaccttgagatcccaaattgctaggtgagccaccacgactggccttattttttatttcttcaggttttgagttcacaagaaaacatttcaacagagtgtagattttaatccatttttaaatcataattcttatcattttattgtgttaaatgtaaattttcctcttttctaaaattaacagagctcatactctgtggaatttcagttcagtgagaaaagtgtcaattacataataaatggtgatggcataactacctatctgattggaagaaaataaaattagatgtctacccagtttattaaaaatgaatttcaagcctgggcaacatagcgagatcctgcttctgcaaaaaaaattaaaaattagctgaatgggatggcgtgtgcctacagtcccagctactcagaaggctgaggtaggaggattgcttgtacccaggagttcaaggctgcagtgagctatgatcccaccactgcaccc

SEQ ID NO: 48721 - DNA, 591 bp, Homo sapiens
aaaactatagttcttgcaaatatgtactgacagggycccaggaatgagttttgagggcactagatgaatggagggaaggtgttgagtggcatgcagaatataaagctatacgggggagagtttgtaaatataagaaacaatctaatggtacagtatgcaacatactgacaaggacacctggagcttgttctaatttgctactaaaatggctccctgaagcttggggaaaaaaatgctagcctctaataaatggatggagatgctgaaatgccttggcagaatagtgtggaagaattaaaaatgcttagagaggtaggcgtgctagaatgaatttattcactatctgacctattttctcaatgagagcccagaggactctccatttagtaaatcaatatgggatgagctagtaaggatggcaccaacactgtgtcctttctaagccagggtcgatggaggggacactgctttggaactggactccccagagtcaatgaggacaataggattcaggcacagcagaaccctgaggctggcattaaacattaaagaaaaattgtaagtagctaccaaagtgtagcaaagctgcaa

SEQ ID NO: 48722 - DNA, 591 bp, Homo sapiens
aaaactatagttcttgcaaatatgtactgacagggtcccaggaatgagttttgagggcactagatgaatggagggaaggtgttgagtggcatgcagaatataaagctatacrggggagagtttgtaaatataagaaacaatctaatggtacagtatgcaacatactgacaaggacacctggagcttgttctaatttgctactaaaatggctccctgaagcttggggaaaaaaatgctagcctctaataaatggatggagatgctgaaatgccttggcagaatagtgtggaagaattaaaaatgcttagagaggtaggcgtgctagaatgaatttattcactatctgacctattttctcaatgagagcccagaggactctccatttagtaaatcaatatgggatgagctagtaaggatggcaccaacactgtgtcctttctaagccagggtcgatggaggggacactgctttggaactggactccccagagtcaatgaggacaataggattcaggcacagcagaaccctgaggctggcattaaacattaaagaaaaattgtaagtagctaccaaagtgtagcaaagctgcaa

SEQ ID NO: 48723 - DNA, 591 bp, Homo sapiens
aaaactatagttcttgcaaatatgtactgacagggtcccaggaatgagttttgagggcactagatgaatggagggaaggtgttgagtggcatgcagaatataaagctatacgggggagagtttgtaaatataagaaacaatctaatggtacagtatgcaacatactgacaaggacacctggagcttgttctaatttgctactaaaatggctccctgaagcttggggaaaaaaatgctrgcctctaataaatggatggagatgctgaaatgccttggcagaatagtgtggaagaattaaaaatgcttagagaggtaggcgtgctagaatgaatttattcactatctgacctattttctcaatgagagcccagaggactctccatttagtaaatcaatatgggatgagctagtaaggatggcaccaacactgtgtcctttctaagccagggtcgatggaggggacactgctttggaactggactccccagagtcaatgaggacaataggattcaggcacagcagaaccctgaggctggcattaaacattaaagaaaaattgtaagtagctaccaaagtgtagcaaagctgcaa

SEQ ID NO: 48724 - DNA, 591 bp, Homo sapiens
aaaactatagttcttgcaaatatgtactgacagggtcccaggaatgagttttgagggcactagatgaatggagggaaggtgttgagtggcatgcagaatataaagctatacgggggagagtttgtaaatataagaaacaatctaatggtacagtatgcaacatactgacaaggacacctggagcttgttctaatttgctactaaaatggctccctgaagcttggggaaaaaaatgctagcctctaataaatggatggagatgctgaaatgccttggcagaatagtgtggaagaattaaaaatscttagagaggtaggcgtgctagaatgaatttattcactatctgacctattttctcaatgagagcccagaggactctccatttagtaaatcaatatgggatgagctagtaaggatggcaccaacactgtgtcctttctaagccagggtcgatggaggggacactgctttggaactggactccccagagtcaatgaggacaataggattcaggcacagcagaaccctgaggctggcattaaacattaaagaaaaattgtaagtagctaccaaagtgtagcaaagctgcaa

SEQ ID NO: 48725 - DNA, 591 bp, Homo sapiens
aaaactatagttcttgcaaatatgtactgacagggtcccaggaatgagttttgagggcactagatgaatggagggaaggtgttgagtggcatgcagaatataaagctatacgggggagagtttgtaaatataagaaacaatctaatggtacagtatgcaacatactgacaaggacacctggagcttgttctaatttgctactaaaatggctccctgaagcttggggaaaaaaatgctagcctctaataaatggatggagatgctgaaatgccttggcagaatagtgtggaagaattaaaaatgcttagagaggtaggcgtgctagaatgaatttattcactatctgacctattttctcaatgagagcccagaggactctccayttagtaaatcaatatgggatgagctagtaaggatggcaccaacactgtgtcctttctaagccagggtcgatggaggggacactgctttggaactggactccccagagtcaatgaggacaataggattcaggcacagcagaaccctgaggctggcattaaacattaaagaaaaattgtaagtagctaccaaagtgtagcaaagctgcaa

SEQ ID NO: 48726 - DNA, 2448 bp, Homo sapiens
aacacggtgaagccccgtctctactgaaaccccgtctctactaaaaatacaaaaaattagctgggcgtggtggtgggtacctgtagtcccagctgctctggaggctgaggcaggagaayggcgtgaacccaggaggcggagcttgcagtgacctgagatctggccactgcactccagcctgggcgacagagcgagactccatctcaaaaaaaaaaaaaagtaaggaaggagactctgtgtcctacttaaaaccacctctagtttcctcactgcctgcagggtagaatgaaaatgccttagcttgcgtggtgcttcccaggcaggcaaccttttcctttgggcctaagcactttggacttgtcacccttcccagtcacactgtgcttctgtgcaccccacgagctgattgctgtgctgggaatggccctccagccccagctgcacaggctgaccagttccctcacccatcactacctggccccaagggccaggcccccaccgaaacctttctgcacccatgttaagcattcctccacaacctcctgcaacgtgttcagaccctcgtgagagcaccctaggttgatgttctctgctcaccttctttttttctcactggtctgtgagctctttgaagttagaaggcatcattactttcatctgtctttccagcatctagtaaaaataaataaataaataaagcctctaaaacaaaccactagaacatataggcttacgtctgtacctcaataatgaactccaggctatcaagtgatcattcgtttgctcattcattcttcagcagagggactgtgttcttgctttctgctagcactggatgttagatgaggtgctgggaaccccagacactcttagagcttctacttggcaaagatggaattgaaggttaacagacattttatgagacttggttttggagtcacattagtttagggttgattattttttaaacttctaatctccccagaattgaacttaatgagctatcccctgtcactcagaacttgtttggaggaactagaaaaccatgcagattctcagcattttttattcacgattttaaaggcaaatctggatgtggcattacaccgaggtgtttttagctttcctgaatgtcctaattgacatcaaatttttatgaaaacattccaaaacctatgattattattactctgaccactgtttatatttgagtgctgagcagaaaaagaagaatcaccaaagcttttctatttagtcatcttctagacaaaccatatgaaaaaatagggaagtgcttcattcgcagaggttccttggccctcagccaactgtgaagtccccagtcacagccaccctgagcctctctgtgggaagggactttcagcccaggaaagaatgagttcctgctggtgacctgccaggtgcagatggttgagtccactgtacacatctggttgggggtttccaaggtgctggctggtggagcccttatgcatgcgagggggtgaatggtggagatttctggatccctgcccaggaagcctcccaggtagcaaattaacatcagccatattatgctggccacttttttctctctggtgtttaaactctagatctccaaagtcaggcacacacaagataacccagtgtggtacaggaaaaatacagaccattggactagaacagttccattctcatacatttgataatggacttaacatgtaagtatacatgcacccactttatgaataaatatgcgtaagtctgtgttatgattagtctcttttaccattgaggtcatgtgctcaaacaagtttagagactcctttgttagccagtcaccattaatatagaacagaaaagattaatttttggtggaatggatgaaaatattaagaggtttcaaactaagtatcaattttataatcaattgtagagattcctttgttagccagtcaccattaatatagaacagagaagattaatttttggtggaatggatgaaaatgttaagagggcttcaaactaagtatcaattttacaatcaagtatgataatcttccttgcagcattgtatggtatgttggtgtgaacttggtagcccttgggttatttcctgcagaagtctaagggtgtgagatgtaacattttccgtatattgttagcctctgtatgtgcataatagagtgaagaacttcctgaagggggtacaacacagctagtgttatcattctatatccaaaaatggcagagggagaaagtcaaagggaccaccattaatattttgctgtttcagtattctttctataagtatttgcatacatttttggtttactaaattatgattatgttgaacagtgttttataatccagtttttttcactgtgtatttttccttgtcaaagggtgagaataagacaatagattcatgattgtgaaggtcatttt

SEQ ID NO: 48727 - DNA, 543 bp, Homo sapiens
ggacctcattgaaataggaagccttagaaatttctagaataggtactatgcctctggacgaatatgcaccatgtctctggactcactggagggcacctacagtgagttttcagacactgccctgaattttaaaaatcctcagtatccacaatgactacctgtcttcacccagactcagaaatgctaatgggggtcaggtgcagtgactcactcccataatccgaacrctttgagaggccgaggcaggcggatcacttgaggtcaggagtttcagaccagcctggccaacatggtgaaaccccagttctactaaaaatacaaaaattagccgggcatggtggcgggtacctgtaatcccagctactcaggaggctgaggcgggaaaatcacttgaacccaggaggcggaggttgcagtgagctgagattgtgccatcacactccagcctgggcaacaagagcgagactcaaaaaaaaaaaaaaaaagaaaaaaaaagaatatttacaggacttctgctttcgccacgatagagtaacagggact

SEQ ID NO: 48728 - DNA, 543 bp, Homo sapiens
ggacctcattgaaataggaagccttagaaatttctagaataggtactatgcctctggacgaatatgcaccatgtctctggactcactggagggcacctacagtgagttttcagacactgccctgaattttaaaaatcctcagtatccacaatgactacctgtcttcacccagactcagaaatgctaatgggggtcaggtgcagtgactcactcccataatccgaacgctttgagaggccgaggcaggcggatcacttgaggtcaggagtttcagaccagcctggccaacatggtgaaaccccagttctactaaaaatacaaaaattagccgggcatggtggygggtacctgtaatcccagctactcaggaggctgaggcgggaaaatcacttgaacccaggaggcggaggttgcagtgagctgagattgtgccatcacactccagcctgggcaacaagagcgagactcaaaaaaaaaaaaaaaaagaaaaaaaaagaatatttacaggacttctgctttcgccacgatagagtaacagggact

SEQ ID NO: 48729 - DNA, 539 bp, Homo sapiens
cttatttgatcttgatcattcattcattcattctttcagaaaataatttctgagcactccccaaggattagatgttattaatacaactttccaaaagggaaaacatacatcctttctcagaagaaagttctgtcttttgctttctttaggttaatgatttacatgtgtaaatcaggaaaaataactaacggatactaggattaatatctgggtgatgaaataatctgtaaaaaaaaaaaaacctatgacacaascttacttatgcaacaaacctgcacttatacccttgaacttaattttttttttttttaaaaagaaaggagtttaaggccagacatggtggctcacacctgtaatcccagcactttgagaggctgaggtaggtggatcacctgaggtcaggagttcaagaccagcctggacaacatggtgaaaccccgtctctactacatatataaaaactagccaggcatggtggtgggcgcctgtaatcccagctattcgggaggctgaggcaggagaattgcttgaactcagga

SEQ ID NO: 48730 - DNA, 539 bp, Homo sapiens
cttatttgatcttgatcattcattcattcattctttcagaaaataatttctgagcactccccaaggattagatgttattaatacaactttccaaaagggaaaacatacatcctttctcagaagaaagttctgtcttttgctttctttaggttaatgatttacatgtgtaaatcaggaaaaataactaacggatactaggattaatatctgggtgatgaaataatctgtaaaaaaaaaaaaacctatgacacaagcttacttatgcaacaaacctgcacttatacccttgaacttaatttttttttttttwaaaaagaaaggagtttaaggccagacatggtggctcacacctgtaatcccagcactttgagaggctgaggtaggtggatcacctgaggtcaggagttcaagaccagcctggacaacatggtgaaaccccgtctctactacatatataaaaactagccaggcatggtggtgggcgcctgtaatcccagctattcgggaggctgaggcaggagaattgcttgaactcagga

SEQ ID NO: 48731 - DNA, 572 bp, Homo sapiens
tgtgaaaaaagccactgtggtgtaccaaggagagagagtaaagattcaggaaaaatttaagaatggaatgctacatggtgataaagtttctttcttctgcaaaaataaggaaaagaagtgtagctatacagaggatgctcagtgtatagatggcactatcgaagtccccaaatgcttcaagggtaagtctgcattggaacgtttagctaggactcccacttgccygtcatcataatcagagcctttgttctataatgattgtcaaaaaccagatgaggccaggtgcggtgggtcacgcctgtaatcccagcactttgggaggctgaggcgggtggatcacctgaggtcacgagtttgagagcagcctggccaaaaaggtgaaagtctgtctctactaaaaatacaaaaattaattgctgtggtgccgggtgcctgtaatcgcagctacttgggaggctgaggcaggagcatcacttgaacctgggaggtggaggttgcagtgagccgagatcgcgccattgcactccagcctgggcaacagagcgaaactccgtctcaaaacaaaaacaaac

SEQ ID NO: 48732 - DNA, 572 bp, Homo sapiens
tgtgaaaaaagccactgtggtgtaccaaggagagagagtaaagattcaggaaaaatttaagaatggaatgctacatggtgataaagtttctttcttctgcaaaaataaggaaaagaagtgtagctatacagaggatgctcagtgtatagatggcactatcgaagtccccaaatgcttcaagggtaagtctgcattggaacgtttagctaggactcccacttgcccgtcatcataatcagagcctttgttctataatgattgtcaaaaaccagatgaggccaggtgcggtgggtcacgcctgtaatcccagcactttgggaggctgaggcgggtggatcacctgaggtcasgagtttgagagcagcctggccaaaaaggtgaaagtctgtctctactaaaaatacaaaaattaattgctgtggtgccgggtgcctgtaatcgcagctacttgggaggctgaggcaggagcatcacttgaacctgggaggtggaggttgcagtgagccgagatcgcgccattgcactccagcctgggcaacagagcgaaactccgtctcaaaacaaaaacaaac

SEQ ID NO: 48733 - DNA, 3268 bp, Homo sapiens
tcagttatcttctataagtttgtaggttgccttttaattttcttcatggtgtcttctgataaacagacgttctcaaatttgatggattaaacttatcaatatttttctttagtgcttttctgatatgcttaaaatgttttccctaacctgaagtcaaaaaggatactttcccttatttatttgtaggtttggactttcaaatggagtatttttttttggctggggggagacckgagttttattattactcaaatcagtctccccaagcatctggggatcagagtttttaaggataatttggtgggtgggggaaggccagtcagtcaagagtgctgattggttgggtcaaagatgaaataatagggaattgaagctgtccttttggactaagtcagttcctgtgtggaagccacaagatcagatgagtcagtttatcgatctgggtggtgccagctgatcgatcgaatgcagggtctgcgaaatctctcaaacactgatcttgggagcagtttagggagggtcagaatcttgtggcctccagctgcatgactcctaaaccataatttttaatcctgtggctaatttgttagtcctacaaaggcagtttagtcaccaggcaagaaggaggtttgttttgggaaagggctgttattgtctttgttttgtactataaactaagttcctcccaaagttagttcagcctttgcccaggaatgaacaaggacagtttggaggttagaagatggcattggttagactagatctgtttcactgtcttcagttataattttgcaatggttgcttcagtccttccctttggattttataacaccttaatcttaaagtgttggctaatgaagatggaaaaagtgtgaagaccgctctaacttcttcctgctgatcagggggatagtgggggtaggtgttgaccccaaggtgagaggagtggaaccactttgcaactgtctgagcatactcatgcaggcctggttggggttccaaggtttgcatggcaaaggtgttagtattgtcatctatagttttagtaccacatttaagagaacagcatactataaggtaaatattgagtactagggtaaggggtgcaattcttagttttaaaagtaaagatttgaaaatattagtttggggacttgtagccctcaaggatttagtccaaactgcagaaaaaaactttgagaacagctaacaacaggtatactatattttttcttttgaaccgtaatttttctctctccagtccccatgtttattaataacaaatcatgatataattgagttgtttacaacataaactttagtcttattgtacttggcctgattatttgcataaagtacagcaagaataatgatttttcacataggctttaaaaattggcttcgatggaactctattccataaggaatcttagataagacttttataaagctgagcccagctatgggttcgtaccctcaaatacctacgagttggctaaattcctctcctctcctcttgaggttcctatatagcttggggctcctggacctgttagaaagttgacattctttacttaccacaagtcgggaatcttgtacagagatggcatagacaaggtatgaggccacatttcccaaggggcttttattggctctacaagtcaactttgattctttaaagaagcatgccattccagtcaaagccttggtgaaataactagtttctccagttgtgtcctgttacaaaagaaaacagtttcttattgcacttatgcaaataactatactgtcattaagttgagaatattcacaaataaaatggagtcatttaattgatctgctattgattttgtatggagtgacatggtgatccaatttcatttttttcctccatataaacagtcaattattccagaaccatttctaaaatagtctactcgttctcctatgattatcaatggcaagctctgtcacctatccagttttcatatatgcataaatctgtttctggagtctctgtttcattccattggtctgttttcttatcccatcttaattactgtggccgtatgaagttttgaagttttaaagagaggaacaagtctcccaaacttatttttgaggaacgtcttggctctccttggctgtttgctgtataacaatattttaggttggtgggatattggagggggagggataagggaaaagaaggggagaggaaaaggtttacaaatatatatttgctcacatataaatcttctgaaagtcaactctgctgttgtagtcaagcattttttaggccataaaagttgtctgcttaaatttattgacatgagtgtcagtaccatatgtgatgaggcactgggtcaacataatttttgtttcttttatttttaaaactaacttccttgggatcttatcatttcttgagatgaacagtataacgttgtgataaaaaaaaaagcatgagctttactttgaggaacatttctttttaaatttctgttctgctgcttagtatttgtgtgaccttagacatattacttaatatttctgaaatgaattgcttgctttttggtctgtaaatggtagtgataatattgacctactgtgttagttttttatctgctgtaacaaattaccataagcttagtggtttaaaagaatataaatttattatcttatataggttaaaagtctgacaaggtccttactggactaaaagcaggttattggcagggctgcatgcctttttggactctctacaggagaatctgtttccttgttcattcagattgttggcagaaatcagttttctgtgattgtaggcctaaggtctccatttcctcattggctgtccactgggatcttcccagcttgcagaggccaacttcatttcttggctcatggccccgtccttcatcttcaaattcagcaacaatggattgaatccctctcactctttgaatctctcttgctgcttcttccatcacgtcactctgtgtctgtctctctctctctcactctagcctggaaaggttctctaagggctcatatgattagattgggcccattcagataattcagaataatttccctattttaaggtctgtaactttaatcacgtttgtacatggcccttttgccatgcaaagtaacatatttacacgttctgagatacaaatgtgaacatctttttggggaaaggaagggttgcattattgttctgtctatctgccatgcctaccatgtgactgttgtgaggaat

SEQ ID NO: 48734 - DNA, 565 bp, Homo sapiens
tatttagccaaataaaattgatgtggatgaagaaaatggctataaagtccatgaactcattgtccaaatatagagatatctgtgcacactgattttactgactacttcatgggtcttytcttcctagatagggggaaaagacatcatgggctacaatttatggcatcccagacatggacaatcttttatctcattgcacttggtacagatatactactcatccattctgggctaaagtggtttggcaaacaatgcattcctcagtctctttattctccctcagattcgaccaatatactgaatggggtgatgaccagtctgacactacttaccaatgcacagtcaatctactctactgtaaaagtggttattaataaaacctccaaaagagcagatgacttctcaaaaaagtagtctctcacaaaaaaaaaaaaaaggaatcagtagattgaagagaaatctgtatgcctgtttaaagcagcactattcacaagagccaaaatatggaaccaacctaagtgtccaccaatggatgaatggataaagaaaatatgatatatataca

SEQ ID NO: 48735 - DNA, 565 bp, Homo sapiens
tatttagccaaataaaattgatgtggatgaagaaaatggctataaagtccatgaactcattgtccaaatatagagatatctgtgcacactgattttactgactacttcatgggtcttttcttcctagatagggggaaaagacatcatgggctacaatttatggcatcccagacatggacaatcttttatctcattgcacttggtacagatatactactcatccattctgggctaaagtggtttggcaaacaatgcattcctcagtctctttattctccctcagattcgaccaatatactgaatggggtgatgaccagtctgacactacttaccaatgcacagtcaatctactctactgtaaaagtggttattaataaaacctccaaaagagcagatgacttctcaaaaaagtagtctctcacamaaaaaaaaaaaaggaatcagtagattgaagagaaatctgtatgcctgtttaaagcagcactattcacaagagccaaaatatggaaccaacctaagtgtccaccaatggatgaatggataaagaaaatatgatatatataca

SEQ ID NO: 48736 - DNA, 565 bp, Homo sapiens
tatttagccaaataaaattgatgtggatgaagaaaatggctataaagtccatgaactcattgtccaaatatagagatatctgtgcacactgattttactgactacttcatgggtcttttcttcctagatagggggaaaagacatcatgggctacaatttatggcatcccagacatggacaatcttttatctcattgcacttggtacagatatactactcatccattctgggctaaagtggtttggcaaacaatgcattcctcagtctctttattctccctcagattcgaccaatatactgaatggggtgatgaccagtctgacactacttaccaatgcacagtcaatctactctactgtaaaagtggttattaataaaacctccaaaagagcagatgacttctcaaaaaagtagtctctcacaaamaaaaaaaaaaggaatcagtagattgaagagaaatctgtatgcctgtttaaagcagcactattcacaagagccaaaatatggaaccaacctaagtgtccaccaatggatgaatggataaagaaaatatgatatatataca

SEQ ID NO: 48737 - DNA, 565 bp, Homo sapiens
tatttagccaaataaaattgatgtggatgaagaaaatggctataaagtccatgaactcattgtccaaatatagagatatctgtgcacactgattttactgactacttcatgggtcttttcttcctagatagggggaaaagacatcatgggctacaatttatggcatcccagacatggacaatcttttatctcattgcacttggtacagatatactactcatccattctgggctaaagtggtttggcaaacaatgcattcctcagtctctttattctccctcagattcgaccaatatactgaatggggtgatgaccagtctgacactacttaccaatgcacagtcaatctactctactgtaaaagtggttattaataaaacctccaaaagagcagatgacttctcaaaaaagtagtctctcacaaaaamaaaaaaaaggaatcagtagattgaagagaaatctgtatgcctgtttaaagcagcactattcacaagagccaaaatatggaaccaacctaagtgtccaccaatggatgaatggataaagaaaatatgatatatataca

SEQ ID NO: 48738 - DNA, 513 bp, Homo sapiens
ttaaaaaaaaaacacatatcttcatttccaacaatttttaaaaatttctcttcactggcagacacacccaaggaagaagcatccagttcaggttctctattagtctgttttcacactgctataaagaatactacctaagactgggtaatttataaaggaaagaggtttaattgacttacagttccgcattgctggggaagcctcaggaaacttacaatcacggcagaaggggaagcaggcactttcttcacaaggcagcaggagaaagtgagtaaatgaaggagaaactgccaaacagttttaaaaccatcagccctcatgagaactccctcactatcacgagaacagcatgggggaacygcccccatgatccaatcacctcccaccctcaacaagtgctaattacaattcaagatgagatttgggtggggacacagagtcaaaccataccatattcctcttagctctacctccagtgcacctaagtggctacatgtgatggaactaagctca

SEQ ID NO: 48739 - DNA, 575 bp, Homo sapiens
atagcaaagacttggaaccaacccaaacgtccaacaatgatagactggattaagaaaacgtggcacatatacaccatggaatactatgcagccttaaaaaataatgrgttcatgtcctttgtagggacatggatgaaattgaaaatcatcattctcagtaaactatcacaagaacaaaaaaccaaacacctcatgttctcactcataggtgggaattgaacaatgagaacacatggacacaggaaggggaatatcacactctgggccctgttgtggggtagggggaggggggagggatagcattaggagatatacctaatgctaaatgacgagttaatgggtgcagcacaccaacatggcgcatgtatacatatgtaactaacctgcacattgtgcacatgtaccctaaaacttaaagtgtaataatagtaataataataaagaaaactatcaagatgtcacagaaaagtgtcgaagaaggtttgtacttatgtgatggacttagagtgagtacatccaaatcatccttaaaatacttcaggaaacagaaaaactagggcaaagtattggagtta

SEQ ID NO: 48740 - DNA, 645 bp, Homo sapiens
taaataatctctccacaatttttctgttatataaattcagatttctttaggtagaagttttttttttaataaggtttccctgtattacatatcttcagttattctgggatagtgtgagaaaaagacagatgaatgtggcaaaatgtttaaatattctcagaaaaagagtctcctgacttaggtagagcagccaaaaccacaaaagctttatttcttttatcctgaaatagcaagggtgtttttcaagatccagtcagaatatacagcagcaaatagcttgcaaaatgtttaatacatgatcaagtgcaactcacagtttcacccaaatacctaatgtatattccagtagactatgagagacaagcatcaatcagcattcaagctacctcatcctttctcaaggtgaaagaactaaaacaactgtattatctgtatgacaatcactcctgttttatttggagctgygttccactctgaccatcagagaagcaatgacatagtttcactgctgctcttattaaatattattactgtggtgcaagcttgacggtcgagagaggagaaaaaggaggcagcttcattgcccagaggagatccagtaatcagatggtctgcagcctgaagagaacatcaatcttctgaatt

SEQ ID NO: 48741 - DNA, 1005 bp, Homo sapiens
tcatggcatcagcatgaccacagcagtggtgtggccagattcttgtgtttcttgactctctggttcatgttcattttctagacatgatctcccagcctccactataccagcttcagagtcagagttgatctctgttacttgcaactgaaagtatcgtacctgatgcccatatgtatgagatgtccatgaatgtgagaggcccagaacagggaacatcctgtgggaataaagtatgttcccccaaaagctcattgtcattcaaggttcttattttatatcttataaaataggagaaaggcatatagaaaatgaatattctttctcttgtatgtttactattgccactgtatgtgtgaggtatttttctactggtttcaactggagtaagtcccatagagtaactagggaggtggaatgattggtaccagggcagaattcttttagaactccagtcctacaaatgagcacaagagataccttttaaggctgaaggaggaacatagtaagaaatctaacaggtgatgcaaaggcttgaaactagaagaaatgcaggcttttgctgcatggcaggaagctggacwggagcgaagagtctccgaggatgaattcttcaactattgggactccagaacctcaagagaaagcaaactcagccactccttatgccaatgagtaaagaagttaagcgtcactcagactgcaagtagaccagatagcccgtattccagacaggagtcatggaaccacagtgagaaatgccttgcgcattaaggaagacttgcccaggaaccagagtgactgtagagatggaagagggcctaagcagggccaaaggaggtaatcatggggctcatatctagaattagaagctcagaaataagtcccagcaaggctaacagaaactaatagtctaccttgcttcaaataattaatctgtgctctgataatgcatctctagctatgttgcacattttcttcatgtgcatgtatatgggtgtttgggga

SEQ ID NO: 48742 - DNA, 598 bp, Homo sapiens
ggtggccaggccgtgcccttgctgttgctgggcagtgtctttttggaaagggagctgccccaggctttagtgcagctgccaacgctgttaggcctggcctctcgaggcctcttctgacttcaagggtcacagccccccaaagatcctctcacccatggtagttgctgctcatggttctgtctgtccgtgcaccgatgcayacaccacaccccaccgctgtactctgaaattggcgagtgagttgagagccagctctgcggggtcatcacgcagccatggttgtgcctgtccttcatggtggtctttcaggttatcttggcaacatgtacattgcttttattttttttcttttttgcttttattgtacagtcagttctataaaatttctcttttgagttttatacctttgtagcattttagatgacattgtgtttgtactttgttgtgtagagtggaagaattgtgttgaataaacccaagatcggaatgcaaatctaaaaaaaaaaaaattaaaacaaaaggggcaacatttaaaataatatttaatctgtatgttactaatatacctagtaatgatcagttctatgaggaaaaatca

SEQ ID NO: 48743 - DNA, 565 bp, Homo sapiens
caaaggcctcctttctcaccaagtctccacaatttgccatctaccccttcaatgctgtcttctgtcttctatagtcccttaactggacaatcactcctatgcttatagtttggcttgtattcaaattagttatgaatagttctgtccatcccttaagactgtaatccttcccacagcagggaaagcatcatttttactctataacaatcctctcctctagcccctgctccaatagacacccgatagacactgctaggtgtctattacatacctgcaccaagtaactaattatacggtagtgttttccacacttttatgatgacaagaattatgtggtagaactggttaaaaaaaatttctcagatcccaccctgaccctctgtataggaatgtccaggggcaaaacctaggaagctgtttttttttttttttttttttttttttgagacggagtctcgctctgtygcccaggctggagtgcagtagtgcgatctcggctcactgcaagctccgcctcctgggttcatgcaattctcctgcctcagcctcctgagtagctgggatt

SEQ ID NO: 48744 - DNA, 603 bp, Homo sapiens
tttcttttcttgtgtcttgctttcttcttattactcaccatatcattataattttacattatgatacctagaagagagtgcactgataacttatctgagatcasaaaggtactccacattcagataccaaattttgtgatctcagacaagtcatctcacttctcaaggactcatttttctttgcctgtaacatggaggtggtttcatgtgctgttcagggagacagtgtgaagaacctccagcactatgcctggtatacagtgagaactcaatagttgtaagtcactgatgctctcagctggtttaggacactgcctacaattgaaccttgtagagtttatgactatccatgataactactgagagaactggctggagataggggaggtataggagattgatttgattgagggtttttcctcattattgcaatttgcttgtattcaaaagacacacacacacaaacaatgaaatgagctttttgtggttctaatctcaaaatgaaatatggaaaagcaaaagaaagtttgttgacctgggggatcaggactcactggtaacattgctttacctctctgcccccactgtctctgcagttggcct

SEQ ID NO: 48745 - DNA, 1573 bp, Homo sapiens
tcctcatattacttttttatctttctcttcctttttataatgttgatttgtcagaggaatcaagtcatatttcytatagaaagtcccttgacttgactgcctcctgtggaaccctctcactttagtatctaaactttttcattttgtgtttattttctactcaatcttaattctactgccaggattttttttaatggaggctttctgtcaatttgttaggaagatgtttgaggtaattaaagctgttagagcagcattgtccaataggaatatctgagtcatattaacagtcttaaattttctactaaccatattacaaaaactaaaaaaaagtgaaattaattttaacaatatatttcatgtcatcccccatatcataagtaatgtcattttagtttgtaatcaaattaaaaactgttgggatatattccattatttatgaggtgttccagagaaataagcctctttttttttcccagccctacaatccatagctctttcctgcagttagtctgtttcctcactatttcctttttgttccattgggttttccaatacccatgtaaccagttatctgtattaaagtgcttttgtgtaaaatacgtaaagtagtttctggtttccttaatggaccttgactggtattcttctatctgtctttggaggctgatttgtagaatttgtagaatatgtagaattgccaggtaaaatacaggatgcaataactggtatattcttatacaagaaaaatatccattgtttatttgaaattgaaattgaactgggtgctgtacatttttatttgctacatttggcaaccctataattatcttcgcggtcacctgatgttttgattatggcagagagatggatttgctgttgagaagaaggcactattgcatgtcttctgtgtgactatgctcacctattttatcaggtaagtagccacctgcggcactgtccttcctatccagttctagtcccagcacttactgccttagtctggcagcaagtgcagatgctgctgcaaaacagcacacttagtgtttggagaatgccctgttggaatttatccaatgaaatcattaatgataaatgacagttttaaaataatccatttaagtttctcctgactaattttttctttgaagatttatggttttctcttctattgacttgagctgaatttgtacatctgtttattggatatttcatatgtgactacattaagaccagcatggcacatgtatacatatgtaactaacctgcacaatgtgcacatgtaccctaaaacttaaagtataataaaaaaaaaaaacattaaaaaaaaaaaaaaagacatttcatgtactaatctctaaataaattaggccagatatgcatgttttcttatcccagaacattgtagaagaaaagtacttattttttacattttttaatatgagaaacaaatgaaagtaaacatgcagcttgtgattaatcatgagaccgtcaatgtaatcagttatgcaagaaattattgaacttcatgtgcaagacctagtatatacaatggcacatctactcagaatca

SEQ ID NO: 48746 - DNA, 1573 bp, Homo sapiens
tcctcatattacttttttatctttctcttcctttttataatgttgatttgtcagaggaatcaagtcatatttcctayagaaagtcccttgacttgactgcctcctgtggaaccctctcactttagtatctaaactttttcattttgtgtttattttctactcaatcttaattctactgccaggattttttttaatggaggctttctgtcaatttgttaggaagatgtttgaggtaattaaagctgttagagcagcattgtccaataggaatatctgagtcatattaacagtcttaaattttctactaaccatattacaaaaactaaaaaaaagtgaaattaattttaacaatatatttcatgtcatcccccatatcataagtaatgtcattttagtttgtaatcaaattaaaaactgttgggatatattccattatttatgaggtgttccagagaaataagcctctttttttttcccagccctacaatccatagctctttcctgcagttagtctgtttcctcactatttcctttttgttccattgggttttccaatacccatgtaaccagttatctgtattaaagtgcttttgtgtaaaatacgtaaagtagtttctggtttccttaatggaccttgactggtattcttctatctgtctttggaggctgatttgtagaatttgtagaatatgtagaattgccaggtaaaatacaggatgcaataactggtatattcttatacaagaaaaatatccattgtttatttgaaattgaaattgaactgggtgctgtacatttttatttgctacatttggcaaccctataattatcttcgcggtcacctgatgttttgattatggcagagagatggatttgctgttgagaagaaggcactattgcatgtcttctgtgtgactatgctcacctattttatcaggtaagtagccacctgcggcactgtccttcctatccagttctagtcccagcacttactgccttagtctggcagcaagtgcagatgctgctgcaaaacagcacacttagtgtttggagaatgccctgttggaatttatccaatgaaatcattaatgataaatgacagttttaaaataatccatttaagtttctcctgactaattttttctttgaagatttatggttttctcttctattgacttgagctgaatttgtacatctgtttattggatatttcatatgtgactacattaagaccagcatggcacatgtatacatatgtaactaacctgcacaatgtgcacatgtaccctaaaacttaaagtataataaaaaaaaaaaacattaaaaaaaaaaaaaaagacatttcatgtactaatctctaaataaattaggccagatatgcatgttttcttatcccagaacattgtagaagaaaagtacttattttttacattttttaatatgagaaacaaatgaaagtaaacatgcagcttgtgattaatcatgagaccgtcaatgtaatcagttatgcaagaaattattgaacttcatgtgcaagacctagtatatacaatggcacatctactcagaatca

SEQ ID NO: 48747 - DNA, 1573 bp, Homo sapiens
tcctcatattacttttttatctttctcttcctttttataatgttgatttgtcagaggaatcaagtcatatttcctatagaaagtcccttgacttgactgcctcctgtggaaccctctcactttagtatctaaactttttcattttgtgtttattttctactcaatcttaattctactgccaggattttttttaatggaggctttctgtcaatttgttaggaagatgtttgaggtaattaaagctgttagagcagcattgtccaataggaatatctgagtcatattaacagtcttaaattttctactaaccatattacaaaaactaaaaaaaagtgaaattaattttaacaatatatttcatgtcatcccccatatcataagtaatgtcattttagtttgtaatcaaattaaaaactgttgggatatattccattatttatgaggtgttccagagaaataagcctctttttttttcccagccctacaatccatagctctttcctgcagttagtctgtttcctcactatttcctttttgttccattgggttttccaatacccatgtaaccagttatctgtattaaagtgcttttgtgtaaaatacgtaaagtagtttctggtttccttaatggaccttgactggtattcttctatctgtctttggaggctgatttgtagaatttgtagaatatgtagaattgccaggtaaaatacaggatgcaataactggtatattcttatacaagaaaaatatccattgtttatttgaaattgaaattgaactgggtgctgtacatttttatttgctacatttggcaaccctataattatcttcgcggtcacctgatgttttgattatggcagagagatggatttgctgttgagaagaaggcactattgcatgtcttctgtgtgactatgctcacctattttatcaggtaagtagccacctgcggcactgtccttcctatccagttctagtcccagcacttactgccttagtctggcagcaagtgcagatgctgctgcaaaacagcacacttagtgtttggagaatgccctgttggaatttatccaatgaaatcattaatgataaatgacagttttaaaataatccatttaagtttctcctgactaattttttctttgaagatttatggttttctcttctattgacttgagctgaatttgtacatctgtttattggatatttcatatgtgactacattaagaccagcatggcacatgtatacatatgtaactaacctgcacaatgtgcacatgtaccctaaaacttaaagtataataaaaaaaaaaaacattaaaaaaaaaaaaaaagacatttcatgtactaatctctaaataaattaggccagatatgcatgttttcttatcccagaacaytgtagaagaaaagtacttattttttacattttttaatatgagaaacaaatgaaagtaaacatgcagcttgtgattaatcatgagaccgtcaatgtaatcagttatgcaagaaattattgaacttcatgtgcaagacctagtatatacaatggcacatctactcagaatca

SEQ ID NO: 48748 - DNA, 616 bp, Homo sapiens
cagactcatgaaatctccttaatggaacttggagagcacctaatccaacgattctcattgtcagataaggcaatcaaggcacagagaagttaagcgtttgtttaaggtcacagagtttttcatagcagagcaaatgaagatcctgcttcttgtgaccttagctcgggaatatgtccacattaccttctgcttttatgcttattatggttatgattatccygcctcttagccacactggttaactcttatttttatagctttagctaatgttataaaaattaatattctttttttctacctttattatcatattatatggctgcaacaaagtcatagcatatgttttcccttgtttttaagatgggtgtacaaaaagtgacttcctaatatttgaagagttcataaattataaattcagaacatttccatttccacccacctcctttcctgcggtagcaattctggagccatttggcgatgatttgtaaatctttgaacctgtaacaggagaatggataattctaagagtgcatctaaaagaaatagtttgcatcgtttggaacaatgaaccattctgtaattcaatagaagacctgagacagcatgaatgagatca

SEQ ID NO: 48749 - DNA, 616 bp, Homo sapiens
cagactcatgaaatctccttaatggaacttggagagcacctaatccaacgattctcattgtcagataaggcaatcaaggcacagagaagttaagcgtttgtttaaggtcacagagtttttcatagcagagcaaatgaagatcctgcttcttgtgaccttagctcgggaatatgtccacattaccttctgcttttatgcttattatggttatgattatcctrcctcttagccacactggttaactcttatttttatagctttagctaatgttataaaaattaatattctttttttctacctttattatcatattatatggctgcaacaaagtcatagcatatgttttcccttgtttttaagatgggtgtacaaaaagtgacttcctaatatttgaagagttcataaattataaattcagaacatttccatttccacccacctcctttcctgcggtagcaattctggagccatttggcgatgatttgtaaatctttgaacctgtaacaggagaatggataattctaagagtgcatctaaaagaaatagtttgcatcgtttggaacaatgaaccattctgtaattcaatagaagacctgagacagcatgaatgagatca

SEQ ID NO: 48750 - DNA, 599 bp, Homo sapiens
gataactttgtcaagcaaggtatctaatgatattgcccactccttccttgaaactccccacttcttgactacctgtgacaagtctgtctcctgaattgcctgctacctatctcattgttctttctctgcctccttgataggttacatttcttctacattgttaagttttgccattctaacatattctgtcctttgtctactgcttttctgactctaaccattctctgtttgtaacctcatggttttcactaccacctacttttgtttcccaaattataactctagcccttgcttcttccctgatgttcaaaacatcacccccaactggaaaatcttccatggtcatctccttccccagataagtgaatccttcctttctgtgtactgtttagtttccaggtgrtttcactgttacatgcatctcacaatattgcaattgctgatttacctgtatgtcccttttcagaatatggaaaatcttccatgttcatctccttccccagataagtgaacccttccttgctgtgtactgtttagtttatacatgatttcacagttacatgaatcccacaatattgcaattgctgatttacctgtat

SEQ ID NO: 48751 - DNA, 540 bp, Homo sapiens
ccttaagaractagaaaaagaatagcaaaatagatccaaagctcacagaaagaaataataaagataaggcagaaataaatgaaatagagaacagcaaaatgaattttttagccaaggaaataatatttgcatgttaactttttccaatatccattttccccttctttctgaaacctccatttttgagctgggtatattgctgcctagctaacagcatttcccagcctcctctgcaactagatgtggccatgtgtccaagttctgatccatgagatgtaagcagaagagttctgaagtgtttctggaaactattaaaagggagaggcttctcttttctcctcgctttcctcctttttactgctcggaatgtggatgcaatggcaagaactccagcagtgatctgtactatgaagcagctttgggaatgggagctacatatggtagaggaaaaagacagagacagcctgagtccctgatatcatgtctcttccttaccagccttgaacttcctcctccagccagagagagacagagagcaaa

SEQ ID NO: 48752 - DNA, 531 bp, Homo sapiens
ttatgtgaaaaattgggagaagaaatcagcattttaataaaacaaaattgttttctaaagttagtacttccacagtaccacacacacacgcagattgagaataaacattttcacagartatgggggaaaaggaggaaaataatccccagccttaggaatccagtttttgttgcatagaactctgacctgattaaggtcagtcattttttttgttgctggtgttggtagctgatcctgcttcagatgatccatctattatttcccctttccgcctttttaaaccatcaccactgacttttagaagccagagtttatatcgtttgtgataagcttcttggtgttatcacaataaatcgtaaagctttagggctaaaaaggactgtagtggtctcatggtccaacctcctgacttttcagatgagaatatatccctgtttattttttctttcgtttaagcatttccatctacatattatttcttttatatatttgaaagattctagtctgaagtaggtcaggtagggaggagaa

SEQ ID NO: 48753 - DNA, 534 bp, Homo sapiens
atgtgctgcaggtggtaaccagcaaccagagagtgtccggatgcaccttaataaccaggagctgcattagtcagcatattttcagcatgtgtctcatctttagtacacttacttaattgagcatcagagaagccgtgaccaaattaatattcaagcaaagctttggattagtaaccgaatgaaagccacatggctcccttgctgttcggctgagtggtgatcactgtttcatacaattgccagatgtccagctttgagaacatgatactcaaaaaagaataaaatcagcttggttttcatgagcaagtaaatgatgagtcagatctacccrtttcattgatgcaggagaatagaagggcttgaagaccatcaatgcagagccaactggggaaggcatcaagcctgttatggagtgaagtggaagaaagaatactgactcggagaagagggacctttattctagtcactcccttgctcttactagctatgtggcattggcaagggaccttggtctctgaaaatcaggttttacac

SEQ ID NO: 48754 - DNA, 534 bp, Homo sapiens
atgtgctgcaggtggtaaccagcaaccagagagtgtccggatgcaccttaataaccaggagctgcattagtcagcatattttcagcatgtgtctcatctttagtacacttacttaattgagcatcagagaagccgtgaccaaattaatattcaagcaaagctttggattagtaaccgaatgaaagccacatggctcccttgctgttcggctgagtggtgatcactgtttcatacaattgccagatgtccagctttgagaacatgatactcaaaaaagaataaaatcagcttggttttcatgagcaagtaaatgatgagtcagatctacccgtttcattgatgcaggagaatagaagggcttgaagaccatcaatgcagagccaactggggaaggcatcaagcctgttatggagtgaagtggaagaaagaatactgactcggagaagarggacctttattctagtcactcccttgctcttactagctatgtggcattggcaagggaccttggtctctgaaaatcaggttttacac

SEQ ID NO: 48755 - DNA, 1744 bp, Homo sapiens
ttgaggcaataaatggaatgtgtcagtayagcttgtttccagtatttcctgacacacttataccccatgtgcagtgccaataaaatatttcaaatatctctctttgcctatcaagacagaattttaaatagcctttttctgctttattgtcaatctgtttcctttccagaactgactttttgcataacctttgtaatgaaaataccagaaacatttctgccgctacccatttctaaaaatgagacattcagacttttgatggatgggccttttgcctattcatagcctttgtctatgcctcacgtggttatgactcccccctcctctcccctctccccatttgccatcaagatattttatgttcaagatttctccaaaaatggggaaaagtgcaattgaagtaaaagtcaaaattaaagcaaatggctgtgcactgagcagaatcctggggttgaattgtagcccatgacaggtttgtacctcaagagacccacagcaggcagtacccattcagagcagcattcatttattcaacacatgactatggcatgtaaaatattggggaaagattaactgtgctatgtggcaataagcttttaaaattgtgtttgcagccaggcattaagatacatagtcccaagaggctgggtttaatcctgataccataacctgccagcagtgtacccctcagctttttacctggctttctgagcctcagtttcctcatcttcaacatggagaaaagagtataacaccgttgtagacttagcatgagaactcaatgagatcatatgttcagggatggtattcatatttaacaactgataaagcataggcattgaaaaatcagaaaagatgtaataaatgaatgaataacagagtttgcatctagacccaccaaggtttaagacatttaatcctcaacattttaaggaaatttacctgaatagtttttagtaagaaagagagaaatttacctgaatactttttaaataagaaagagagaaggaagagaaggaaatgaaagggaagggaaggagctaaaatatccaattactcttttaaaatttctccatacttattcatatctgtagatctagccaaactatatccaggccatacttagagtgtccaaagaagacaaaaagtttcactgtcttgtggcttctttgaatcctaacggaatagtttcttatacaaaatatattccagtttattcatcaagcattcattcaacaaatatttattaattgctgctgaagagttaaaagataaggcacctgtcagtaaagaggtcagagaagacatatgcagaaataataactagatcatcttttaaatatgttacttaaacaaaaatgctgtggatattaagaaaatgagaaagaacactcaggactggagttaatacagatacatttatgaagatgggaagctttcccctaagtttagtggaaggttagagggtgagcaatggccagagtgaatattttgggacatctgaagtatatcaactgtatcagatgctttgcaaacattaacaattttagctctctctctctctctcaaacacacacacacacacacacacacacacagatttaatattaatattatctccactctaaagattgagagaatattagtttctagaaatgaaggtgcaagttctcagaactagaaaatgataagagtccatgtttgaactcagatcagcttgactccatttaaccgttcaacatcc

SEQ ID NO: 48756 - DNA, 1744 bp, Homo sapiens
ttgaggcaataaatggaatgtgtcagtacagcttgtttccagtatttcctgacacacttataccccatgtgcagtgccaataaaatatttcaaatatctctctttgcctatcaagacagaattttaaatagcctttttctgctttattgtcaatctgtttcctttccagaactgactttttgcataacctttgtaatgaaaataccagaaacatttctgccgctacccatttctaaaaatgagacattcagacttttgatggatgggccttttgcctattcatagcctttgtctatgcctcacrtggttatgactcccccctcctctcccctctccccatttgccatcaagatattttatgttcaagatttctccaaaaatggggaaaagtgcaattgaagtaaaagtcaaaattaaagcaaatggctgtgcactgagcagaatcctggggttgaattgtagcccatgacaggtttgtacctcaagagacccacagcaggcagtacccattcagagcagcattcatttattcaacacatgactatggcatgtaaaatattggggaaagattaactgtgctatgtggcaataagcttttaaaattgtgtttgcagccaggcattaagatacatagtcccaagaggctgggtttaatcctgataccataacctgccagcagtgtacccctcagctttttacctggctttctgagcctcagtttcctcatcttcaacatggagaaaagagtataacaccgttgtagacttagcatgagaactcaatgagatcatatgttcagggatggtattcatatttaacaactgataaagcataggcattgaaaaatcagaaaagatgtaataaatgaatgaataacagagtttgcatctagacccaccaaggtttaagacatttaatcctcaacattttaaggaaatttacctgaatagtttttagtaagaaagagagaaatttacctgaatactttttaaataagaaagagagaaggaagagaaggaaatgaaagggaagggaaggagctaaaatatccaattactcttttaaaatttctccatacttattcatatctgtagatctagccaaactatatccaggccatacttagagtgtccaaagaagacaaaaagtttcactgtcttgtggcttctttgaatcctaacggaatagtttcttatacaaaatatattccagtttattcatcaagcattcattcaacaaatatttattaattgctgctgaagagttaaaagataaggcacctgtcagtaaagaggtcagagaagacatatgcagaaataataactagatcatcttttaaatatgttacttaaacaaaaatgctgtggatattaagaaaatgagaaagaacactcaggactggagttaatacagatacatttatgaagatgggaagctttcccctaagtttagtggaaggttagagggtgagcaatggccagagtgaatattttgggacatctgaagtatatcaactgtatcagatgctttgcaaacattaacaattttagctctctctctctctctcaaacacacacacacacacacacacacacacagatttaatattaatattatctccactctaaagattgagagaatattagtttctagaaatgaaggtgcaagttctcagaactagaaaatgataagagtccatgtttgaactcagatcagcttgactccatttaaccgttcaacatcc

SEQ ID NO: 48757 - DNA, 568 bp, Homo sapiens
tgtgtgtgtgtgtgtgtgtgtgtgtgtgtrtgagtgtgtgtgtgtgtgtatcctggaatcacccagcagtagttgcaacctttattagcagagaagtataagacaaaagaaccaaaggtgatcttagcttcctgctcctatttaactctcccaaattactgtctgtatcttagccaagaggctttttgctctcaaggttctccttactgaaaaatatattaaaaattctgcattctggctccttctgacttccagatatatcaagtagtttccttctaccttatgacactggctatagctgactgttccctctgtctggaaaattcttctatctgaccttcagtgttctcgttctcttcatttgtgtctcagcttagatgtcacctcttcagtaggacatttcccttttaccttaagtagtcagttaccaattttccagttctaatgtcctgttgccactatcagtgggggtgtaccttgtaatggccagagccagctgttcaatattcaagaactttgtgagctggttgtttaactattggtagattgaaatcagccataataggat

SEQ ID NO: 48758 - DNA, 568 bp, Homo sapiens
tgtgtgtgtgtgtgtgtgtgtgtgtgtgtatgwgtgtgtgtgtgtgtgtatcctggaatcacccagcagtagttgcaacctttattagcagagaagtataagacaaaagaaccaaaggtgatcttagcttcctgctcctatttaactctcccaaattactgtctgtatcttagccaagaggctttttgctctcaaggttctccttactgaaaaatatattaaaaattctgcattctggctccttctgacttccagatatatcaagtagtttccttctaccttatgacactggctatagctgactgttccctctgtctggaaaattcttctatctgaccttcagtgttctcgttctcttcatttgtgtctcagcttagatgtcacctcttcagtaggacatttcccttttaccttaagtagtcagttaccaattttccagttctaatgtcctgttgccactatcagtgggggtgtaccttgtaatggccagagccagctgttcaatattcaagaactttgtgagctggttgtttaactattggtagattgaaatcagccataataggat

SEQ ID NO: 48759 - DNA, 568 bp, Homo sapiens
tgtgtgtgtgtgtgtgtgtgtgtgtgtgtatgartgtgtgtgtgtgtgtatcctggaatcacccagcagtagttgcaacctttattagcagagaagtataagacaaaagaaccaaaggtgatcttagcttcctgctcctatttaactctcccaaattactgtctgtatcttagccaagaggctttttgctctcaaggttctccttactgaaaaatatattaaaaattctgcattctggctccttctgacttccagatatatcaagtagtttccttctaccttatgacactggctatagctgactgttccctctgtctggaaaattcttctatctgaccttcagtgttctcgttctcttcatttgtgtctcagcttagatgtcacctcttcagtaggacatttcccttttaccttaagtagtcagttaccaattttccagttctaatgtcctgttgccactatcagtgggggtgtaccttgtaatggccagagccagctgttcaatattcaagaactttgtgagctggttgtttaactattggtagattgaaatcagccataataggat

SEQ ID NO: 48760 - DNA, 568 bp, Homo sapiens
tgtgtgtgtgtgtgtgtgtgtgtgtgtgtatgagtgwgtgtgtgtgtgtatcctggaatcacccagcagtagttgcaacctttattagcagagaagtataagacaaaagaaccaaaggtgatcttagcttcctgctcctatttaactctcccaaattactgtctgtatcttagccaagaggctttttgctctcaaggttctccttactgaaaaatatattaaaaattctgcattctggctccttctgacttccagatatatcaagtagtttccttctaccttatgacactggctatagctgactgttccctctgtctggaaaattcttctatctgaccttcagtgttctcgttctcttcatttgtgtctcagcttagatgtcacctcttcagtaggacatttcccttttaccttaagtagtcagttaccaattttccagttctaatgtcctgttgccactatcagtgggggtgtaccttgtaatggccagagccagctgttcaatattcaagaactttgtgagctggttgtttaactattggtagattgaaatcagccataataggat

SEQ ID NO: 48761 - DNA, 459 bp, Homo sapiens
gtcttcaacttctgtttccattaataggatacttaatacttttcgtaaaaaacggactctgggtttgtccaattcactgaattcaactacctaatggtcaggacatggagaaaaataaagttacactgatttagccaactttttcaatgatttgtaatatagttaattagagtaaaaattaatctccccccttcccccactctacccgatttaagaagctatttccagagctaagaaatgaacacctgttggcaaggatgtgggccttgggaattcctacacactgctggcagaggtgtggccggccacagccaccgttgagaacaactcagcagtgtaagtggaattcccgggtcatacaccttatgaatcagaaattcagtatctagaactgaaccataaattacctccattcccaaaagtacccatcccctaattaaaacyatatatatatatata

SEQ ID NO: 48762 - DNA, 1426 bp, Homo sapiens
gattcttccattttctgaatattgtctgtcgtaaccaccccaagcggaacatggcacatgaaagaagaaatggaaaaagaagctggacttatacagtggtttgcagaggctattgtactaacttttacgattgatatctgtgaatgtgtcttttttttttttttttgagatggagtttcgctcttgttgcccaggctggagtgcagtggcacaatcttggctcactgcaacctccaccttccagtttcaagcgattctcctgcctcagcctcccgagtagctgggactacaggcacgcgccaccatgcccagctaattttttgtatttttaatagagacggggtttcaccatctttgccaggatggtcttgatctcatgacttcgtgatccacccacgtctgcctcccaaagtgctggaactacaggcgtgagccaccgcgcccggccatctgtgaatgtgtcttgttcccagtaccaccccctccaggctttaattccatcttgggcaggtattttctttgtatatttttgcaccctctgcagatgccttgcacatagtaggtgttcatgaatgtttgctgaatgaatgaatgagctcctgaataagaatgaagtttacctcttgtgcaaattccttgatgcatcatctctcctctccttttcgctgaaaagagggcttcttcctccttttagccagatcaggatagaggcaattttctttagcacttcctctgggcaactcttattgtcacctataggtttgcgtctaggggctggatcccttgcttttcagacccctgaaggttgccccatcacagaaaggaggagcggagagtaggcagagtgcagggaggaagcctagaggattaattggttaaactttattacaaaggctggtcctattgtttacgggccattaaaaaccattatcatcttcccaggccaggcagacagcagycagctgctttgatgcatgtcttagagagataaggaaaatttatcccttgttttgacttcacaatttcttcttggtttattatctgacatgctattcaactttctctccacatgtccctgatctcaagacaactctttcaagttgttggcaggggaggttcaggttagaatcctacaattttagacttggaagagcccgccgagatcaatgactgtccctaacctgcccccttcctttcccgcccctgcccccatctgtatttttcctccatggcagagcagttcctggactctcaagtaatttgcacttattgatctctgagaagggcagacttttcttatgaccttcagttaatcctcccacctccatggccacatctactctgcagagaggacttcctagagctctcctgcctcattccaaatgaccagctccttacttagtatccacagggtactgtgtatgta

SEQ ID NO: 48763 - DNA, 541 bp, Homo sapiens
aggactggaaaaaaataatatctttaaaaagcagcaaataagttattctaattaagaggtgaatttagcaatgccacttgataaacagcaataaacaattagaaaatggtaccattcacagaaacatcaaaacgaaacagtttctaggaataaatcttacaaaatatataaaatcatctacatggaaaatggtaagatattattgagagaagtttaaatgacctaaataatggaagaagaatccatgctcatgaattttaacactcaacatttagaaatatgaattctccctaaattcacctgtagattaaattacaaacaaattcaccacaagtcatttggtggaaaccgattctaaaatttacttagaaatgtgaagaatgaaatatagttgatgtggtaaaacaacaaaactgttgttactatcctacatatcaagacttattataaagcatttaattctggtcccatgtccctctaccacttcactrttccaactctcttcctttcaacatccagctggtatgtgtgaggatgtgca

SEQ ID NO: 48764 - DNA, 1968 bp, Homo sapiens
tatctcaatatagaaaacaatttcccaagttttaaaaaaattattaaaagttgtattagtgacacttaatgagaaaatgacattacccggaatactctgagattatgaaatgcataactcatcctctacaatatattcattagagtgtataaattctttataatcttttagtgtctaatatatgcatcctttacttaatgaatacttagatatctgagggctgatgattttataatatttgtatttatatcaccaacatatctaaaggcctttatctagtttcttaaagcaaaatactacatctctcattatgctctttaccaaaacctcagtgtgcccttcattataaaggtgaatttcttatttttctttttttgaatcaaaaagtaaaaagttttctttggatatctctgtagtaagccatattaggatacctgtctttctcacattattggtatcctaataattccaataatacagtttgaacacttgggacttgtttatgattattatatagaacatttatacaattttattgactggggcatcaagtaccaatcctgttcttacatgccaaatgtttattaaatttattccaatatttcgtaactacattttctccaacaccttacagtgatattctctcctccctcaaaagaaaaaacaataattaagtaggtcagagttgttacttgttccggagtgctacactctctgatactctctgagtatccctggcaaggatagaaaatttaataaccagcaaagtaaagatggcttattttcctcctccctccctccttcctgctctcccttcctttctttctttattccacagatatattaagtatcttttattgttccaggcattaggtagagagtgttctgtgccgggtcattgctaagccatgagataaatcagggattccaaagttgtatcttaacaccagttgaagaaactgacataaattctatttctcaagacactttcacaaaaaacttattttggtctgcagttgtgacagtcttttggatgactcggcaacattttataaaatatacatccaaaaatctcatgaggttaaatgttttgttcctatttgttagaggaagcttattttaacagaaataaaaatcgttttgttaattcaagccatttactttggctcaaaagcctgcaaatgggtagataatagaaaattattactgacccattgcacatcaacatatacaagaaaatgcaatgagttctccctaaagaatttggtccagtaatttgcatcttttaaggggtacagtaccttgctgttcattttttcactaaccagaatcttcaatttcttagtttacgtggttttggattttggcttttcttattgtttttgtttttgtatttacagtcctttgagcgagtgttggtagaaaacaagctgcatggcctctctccagctctctctgaagccatccagagcatttccagatgggaactggtgcaagctgctttgcctcatgtcctccactgcactgcaaccctgctttcaaaccgaaacaagctaggttggtgccccgcattacttctttattgcatgtgattgccctttgtgttcaacactcatcataataacctgtactgagtagtttctgttttctcaagcactgtgcatatattatctcatttaattatcacaaaatcctcctcacacttatactcattattttcattttaccgataaagaaactggctgtcttgtttttaattttttaattttacaagtaatatatgaatatattctccttttaacattaagataggctgggtgtggtggctcatgcctktaatcccaccactttgggaggccgaggcaggctgatcacctgaggtcgggagttcgagaccagactagccaacatggtgaaaccccgtttctactaaaaatacaaaattacctgagcatggtggtgcacacc

SEQ ID NO: 48765 - DNA, 551 bp, Homo sapiens
cacagaaaagattccattttcattttgtagtgaagaaataagccgttaacttctgaacagcaggggtcattttatatggctttatattctccaaggcacctttgctgtaaaaattgctcagtgtgacttaaacaagttaaacttgttaaacaattgcactatttactccctagcctcacccccaaggactttaaaactttttgactgcaaccaaatacaatttgatcattatccaggaggcacatacatctgtataacagaaactttggcaatagtacaggtacttccttctgtcagatgcagtgctttttgatatttcctatttgaatcagttatttctccctattttaaattgtattgagacctccagttgaaaaacatttaattataggctacaaagtgattggcaaggtttcttgtaaagggccggttagtaartgttttagacttagggcaacatgtggtcttgatcacttcttcttcagtttttttttttaaacacatacaccttctgagggttgcggttgtacaaaattagctgcagatcaagg

SEQ ID NO: 48766 - DNA, 1807 bp, Homo sapiens
tacgaattcaagtacccttctagggcaaagtcagaggtggaagaactgcctacctaaagaattacttggtgctaaaggacagtatgaaccacagaaggagataagtaaaacaggggcaggatgacattatttaaactccagattctcagtggaatactaacatagtctgttatgttacagtattgtcttttttattttttatttttgagacagggtctagctctatcacccaggctggagtgcagtgagaagatcttggcttactgcaatctttgcctcctggtctcaaggaatcctcccacttcagcctcctgagtagctgggactacaggtgcgcatcatcacgcctggctaattttttgtagtgacaggatttcaccacattgcccaggctggtctggaactcctgagctcaagtaatctgcctgccttggccttccaaagtgctggggttaaaggcatgagccactacacccagccgagtactgttttttatagtacacatgaggtcacatgagattgttaaacaggagagtaatgttagaataatagggaaagtgggttggttcatacataatttttcatagcactttaatgctttgtagtacaaagacacaatagctgaagtacaattattgcacttagttttgtgattgaaccaggcctgggggagtatagcactcaaatgatgacctttcacggtgtgggaccccattcttccctgggcttggttcagccatatgctccattttgatagtgcttattttgcagctccctcacatctttgggcaaaagcgacatcagacaacgagtcagagccatccatctctggcaactccacatttcctgcaaagtttgcaactgcttctccatctgctacttctgatgatctcccgcccttgtttccatcactcatcagtgtctacccttctgtaaactgtcattctttaagcaaccttcaacttttttaaaaaggtaaaactctttaagttaatataacattgctttatttgttaggagttttacacgtccttctaaatgaactactattttcatttcggttgttattgtctgttaatactacagttcagtggttgccagactttgttgtttattagttaactacggatgttttagaatactgaggcccagctgaacctcattctatttaactcagaatgtcttgagtgtgggagccagctatcagtttttaaagatcatatcagtaagtagcaaagtttgggaaccaccgctcagttgttcagagtttgagagggctttcccagacttattttttccttaggctcttattttaagtgagccattttcttaaaatgtgaagattttcaggaatgtattatacacagcatattatagccagaatsttttgtcattttttggcttctgctgtggtctggatactggtgtcctccaaaattcatatgttggaacctaatatccaatatgatagcattaagagatggggtcttttgggaagtaagtcataaggactctgccctcatgaacaggattagtgcccttactgaagaggttgaacggagcagccttgcccccttctgccatgtgaggatgcagcaagaaagtgtcatctataaggaacaggccctcatcagacacagagtctactgttgctttgatcttggatttctcagcctccagaactgtaaaaaataaatttttgttgtttataaattaccaagtctaatgtattttgttatagcagcccagtttccaaaataaaaataatgtaaagggagagcaggatttggggagtaaaaaatggctg

SEQ ID NO: 48767 - DNA, 1807 bp, Homo sapiens
tacgaattcaagtacccttctagggcaaagtcagaggtggaagaactgcctacctaaagaattacttggtgctaaaggacagtatgaaccacagaaggagataagtaaaacaggggcaggatgacattatttaaactccagattctcagtggaatactaacatagtctgttatgttacagtattgtcttttttattttttatttttgagacagggtctagctctatcacccaggctggagtgcagtgagaagatcttggcttactgcaatctttgcctcctggtctcaaggaatcctcccacttcagcctcctgagtagctgggactacaggtgcgcatcatcacgcctggctaattttttgtagtgacaggatttcaccacattgcccaggctggtctggaactcctgagctcaagtaatctgcctgccttggccttccaaagtgctggggttaaaggcatgagccactacacccagccgagtactgttttttatagtacacatgaggtcacatgagattgttaaacaggagagtaatgttagaataatagggaaagtgggttggttcatacataatttttcatagcactttaatgctttgtagtacaaagacacaatagctgaagtacaattattgcacttagttttgtgattgaaccaggcctgggggagtatagcactcaaatgatgacctttcacggtgtgggaccccattcttccctgggcttggttcagccatatgctccattttgatagtgcttattttgcagctccctcacatctttgggcaaaagcgacatcagacaacgagtcagagccatccatctctggcaactccacatttcctgcaaagtttgcaactgcttctccatctgctacttctgatgatctcccgcccttgtttccatcactcatcagtgtctacccttctgtaaactgtcattctttaagcaaccttcaacttttttaaaaaggtaaaactctttaagttaatataacattgctttatttgttaggagttttacacgtccttctaaatgaactactattttcatttcggttgttattgtctgttaatactacagttcagtggttgccagactttgttgtttattagttaactacggatgttttagaatactgaggcccagctgaacctcattctatttaactcagaatgtcttgagtgtgggagccagctatcagtttttaaagatcatatcagtaagtagcaaagtttgggaaccaccgctcagttgttcagagtttgagagggctttcccagacttattttttccttaggctcttattttaagtgagccattttcttaaaatgtgaagattttcaggaatgtattatacacagcatattatagccagaatgttttgtcattttttggcttctgctgtggtctggatactggtgtcctccaaaattcatatgttggaacctaatatycaatatgatagcattaagagatggggtcttttgggaagtaagtcataaggactctgccctcatgaacaggattagtgcccttactgaagaggttgaacggagcagccttgcccccttctgccatgtgaggatgcagcaagaaagtgtcatctataaggaacaggccctcatcagacacagagtctactgttgctttgatcttggatttctcagcctccagaactgtaaaaaataaatttttgttgtttataaattaccaagtctaatgtattttgttatagcagcccagtttccaaaataaaaataatgtaaagggagagcaggatttggggagtaaaaaatggctg

SEQ ID NO: 48768 - DNA, 1807 bp, Homo sapiens
tacgaattcaagtacccttctagggcaaagtcagaggtggaagaactgcctacctaaagaattacttggtgctaaaggacagtatgaaccacagaaggagataagtaaaacaggggcaggatgacattatttaaactccagattctcagtggaatactaacatagtctgttatgttacagtattgtcttttttattttttatttttgagacagggtctagctctatcacccaggctggagtgcagtgagaagatcttggcttactgcaatctttgcctcctggtctcaaggaatcctcccacttcagcctcctgagtagctgggactacaggtgcgcatcatcacgcctggctaattttttgtagtgacaggatttcaccacattgcccaggctggtctggaactcctgagctcaagtaatctgcctgccttggccttccaaagtgctggggttaaaggcatgagccactacacccagccgagtactgttttttatagtacacatgaggtcacatgagattgttaaacaggagagtaatgttagaataatagggaaagtgggttggttcatacataatttttcatagcactttaatgctttgtagtacaaagacacaatagctgaagtacaattattgcacttagttttgtgattgaaccaggcctgggggagtatagcactcaaatgatgacctttcacggtgtgggaccccattcttccctgggcttggttcagccatatgctccattttgatagtgcttattttgcagctccctcacatctttgggcaaaagcgacatcagacaacgagtcagagccatccatctctggcaactccacatttcctgcaaagtttgcaactgcttctccatctgctacttctgatgatctcccgcccttgtttccatcactcatcagtgtctacccttctgtaaactgtcattctttaagcaaccttcaacttttttaaaaaggtaaaactctttaagttaatataacattgctttatttgttaggagttttacacgtccttctaaatgaactactattttcatttcggttgttattgtctgttaatactacagttcagtggttgccagactttgttgtttattagttaactacggatgttttagaatactgaggcccagctgaacctcattctatttaactcagaatgtcttgagtgtgggagccagctatcagtttttaaagatcatatcagtaagtagcaaagtttgggaaccaccgctcagttgttcagagtttgagagggctttcccagacttattttttccttaggctcttattttaagtgagccattttcttaaaatgtgaagattttcaggaatgtattatacacagcatattatagccagaatgttttgtcattttttggcttctgctgtggtctggatactggtgtcctccaaaattcatatgttggaacctaatatccaatatgatagcattaagagatggggtcttttgggargtaagtcataaggactctgccctcatgaacaggattagtgcccttactgaagaggttgaacggagcagccttgcccccttctgccatgtgaggatgcagcaagaaagtgtcatctataaggaacaggccctcatcagacacagagtctactgttgctttgatcttggatttctcagcctccagaactgtaaaaaataaatttttgttgtttataaattaccaagtctaatgtattttgttatagcagcccagtttccaaaataaaaataatgtaaagggagagcaggatttggggagtaaaaaatggctg

SEQ ID NO: 48769 - DNA, 1482 bp, Homo sapiens
gtttctgttcttgtgcaaagaacagcgcaatccattcaagttcacaggggcgggtggcacttgaaaatgtcagggtcaacttgcagggcagaagttagcagggaagtcttcctgggggagtgggagagcccagcagagtttaggaggagggasgggcgacatcggggcaatcctctgagtctctctttcctcctcaggaactgtccaggaagaccctgcagtctctctgcaggctcatgggagctcccagaactgagacaacacacggatccaggcctgcttcgaagtcagtgggatgaggcccttgaaagtcgatgtattgggttcctagggctctcgtgaaaacatgccacacctggctggttttaaacaacaggagtttattctgtcagttgagaaggctacaagtgcaaaatcaaggtattgatgggatgagttccaactagaggctgtgaggcagatcaactccatggctctctcctggcttctgctggtttctggcaaccgttcacttcccatgcctggtagacacatcactctaacctctgcctcccgttttcacgggcacattcgcgtgtgtatgtttgtgtgtgtgtgtgtgtgtgtgtggatgtgtgtgttaaggacagcaatcattagactagatggggcccactctaatccactgtgagcttctcttactttggtaacatctgcaaagaccctatttccaaacaaggtcacattccatgttctgggactgtcttctgagagatgtctcctccaggatccttccaggtggaaggatgccctttgacttgcaaagccaggcagaaaaccaggatcagggcaggacaagaggatgctagcctgtgatggctcccactcaggtgggatgtgagaagtgcctgtggcctgggacacaccaacttgctcccattacctcatctgagatggattgcacagtgtatgtccagggcccatcccggcacactgtgcctttgcaatgctgtctctgcgctttggaaattcactcagcccactgcgtggggtggtctgaggcgggccacaaccatttctcaaccatccctgagtacctgaccagtatccctcgggggtgacgaccggctacatctggagcatgaggagcgtgtttacctggtgagtaaggatgcaagcataggacgtcctggccgatcctctgcacaagcaatgcctttgctccaacgggatgggcaacgttggattaggcctgaggcagatttgatctcggaagatacattcgagtctatgtgttttgtgcctttatttttgtttccttgaattaacatggagtccatttcaactttcacttagtctccttctttctcttcccccacttctttctctctctctctttctttgtatgtggaagaattgtaactctgtgttccacaatgtctaaatactcaaatttagagttgacagccatacagcaaattattcaagttgctgtcaaaaaaa

SEQ ID NO: 48770 - DNA, 1482 bp, Homo sapiens
gtttctgttcttgtgcaaagaacagcgcaatccattcaagttcacaggggcgggtggcacttgaaaatgtcagggtcaacttgcagggcagaagttagcagggaagtcttcctgggggagtgggagagcccagcagagtttaggaggagggaggggcgacatcggggcaatcctctgagtctctctttcctcctcaggaactgtccaggaagaccctgcagtctctctgcaggctcatgggagctcccagaactgagacaacacacggatccaggcctgcttcgaagtcagtgggatgmggcccttgaaagtcgatgtattgggttcctagggctctcgtgaaaacatgccacacctggctggttttaaacaacaggagtttattctgtcagttgagaaggctacaagtgcaaaatcaaggtattgatgggatgagttccaactagaggctgtgaggcagatcaactccatggctctctcctggcttctgctggtttctggcaaccgttcacttcccatgcctggtagacacatcactctaacctctgcctcccgttttcacgggcacattcgcgtgtgtatgtttgtgtgtgtgtgtgtgtgtgtgtggatgtgtgtgttaaggacagcaatcattagactagatggggcccactctaatccactgtgagcttctcttactttggtaacatctgcaaagaccctatttccaaacaaggtcacattccatgttctgggactgtcttctgagagatgtctcctccaggatccttccaggtggaaggatgccctttgacttgcaaagccaggcagaaaaccaggatcagggcaggacaagaggatgctagcctgtgatggctcccactcaggtgggatgtgagaagtgcctgtggcctgggacacaccaacttgctcccattacctcatctgagatggattgcacagtgtatgtccagggcccatcccggcacactgtgcctttgcaatgctgtctctgcgctttggaaattcactcagcccactgcgtggggtggtctgaggcgggccacaaccatttctcaaccatccctgagtacctgaccagtatccctcgggggtgacgaccggctacatctggagcatgaggagcgtgtttacctggtgagtaaggatgcaagcataggacgtcctggccgatcctctgcacaagcaatgcctttgctccaacgggatgggcaacgttggattaggcctgaggcagatttgatctcggaagatacattcgagtctatgtgttttgtgcctttatttttgtttccttgaattaacatggagtccatttcaactttcacttagtctccttctttctcttcccccacttctttctctctctctctttctttgtatgtggaagaattgtaactctgtgttccacaatgtctaaatactcaaatttagagttgacagccatacagcaaattattcaagttgctgtcaaaaaaa

SEQ ID NO: 48771 - DNA, 514 bp, Homo sapiens
tgaggatgaggtttggatgcagagttttgagagaagggtgatcagagctagggtctaagcaacattggtctgctcccttggaggagaattttccctttttccttctgccctttagccagtgctgcggccacctcctctctcrtagctggcatttaaaagccaaatggatgccacaaccttctaatgcatctagatatgcagcaaaaatattcaaaaaattccagcaaggtcaaaataatctcaggcctagatttgccaccagtgccctcttctgggcagctttattttatagtagtgtcacaaaacacttgtttgtcaatatatgtatttgtgcactaagtgtcaccagaaaatatatttatgtctgttggttacagcctaaacagtttaagaaaccatgtttagatgttttcccagtcaggaaaggccaaactaaaaaggggtgtgtgtgtgtgtgtgtgtgtgtgtgtgtgtgtgaaaaagagagatgggggcccccattccactaagaaga

SEQ ID NO: 48772 - DNA, 514 bp, Homo sapiens
tgaggatgaggtttggatgcagagttttgagagaagggtgatcagagctagggtctaagcaacattggtctgctcccttggaggagaattttccctttttccttctgccctttagccagtgctgcggccacctcctctctcatagctggcatttaaaagccaaatggatgccacaaccttctaatgcatctagatatgcagcwaaaatattcaaaaaattccagcaaggtcaaaataatctcaggcctagatttgccaccagtgccctcttctgggcagctttattttatagtagtgtcacaaaacacttgtttgtcaatatatgtatttgtgcactaagtgtcaccagaaaatatatttatgtctgttggttacagcctaaacagtttaagaaaccatgtttagatgttttcccagtcaggaaaggccaaactaaaaaggggtgtgtgtgtgtgtgtgtgtgtgtgtgtgtgtgtgaaaaagagagatgggggcccccattccactaagaaga

SEQ ID NO: 48773 - DNA, 514 bp, Homo sapiens
tgaggatgaggtttggatgcagagttttgagagaagggtgatcagagctagggtctaagcaacattggtctgctcccttggaggagaattttccctttttccttctgccctttagccagtgctgcggccacctcctctctcatagctggcatttaaaagccaaatggatgccacaaccttctaatgcatctagatatgcagcaaaaatattcaaaaaattccagcaaggtcaaaataatctcaggcctagatttgccaccagtgccctcttctgggcagctttattttatagtagtgtcacaaaacacttgtttgtcaatatatgtatttgtgcactaagtgtcaccagaaaatatatttatgtctgttggttacagcctaaamagtttaagaaaccatgtttagatgttttcccagtcaggaaaggccaaactaaaaaggggtgtgtgtgtgtgtgtgtgtgtgtgtgtgtgtgtgaaaaagagagatgggggcccccattccactaagaaga

SEQ ID NO: 48774 - DNA, 520 bp, Homo sapiens
cagaaggcattaagggaagatcccagtccatcttcttggagctgagagctggatcagtgcccctggctttgaggcagggtaggggcagttctctctcagggaggcctgcagatcgccacctgccccacggtgggaaggaaagatgacaggtgggagctccaggtggattgggaggggagggagatggagtgggctttggcaaggcatggggggataagcttgagatgcagagtggcagcaggcaggcaacagcatttctggagaccaccaggcacaggacgtgctggcctgtcctcaggacaagcaatgccagggcctgagctgcccttacccttcaagacgaggcccgagaactggaatgtgggctatgcttttcttcaccaaactgaagcttggcaccctgagtgttgtttgtaccaactgcagtaggcagacagggaaccaacgcttcctgagcactgactgtgtgctgtgcactgtactgygtgctttctgtttgtttgtttcatggagagatgta

SEQ ID NO: 48775 - DNA, 615 bp, Homo sapiens
aataataagtaccttaatgaatttctgtggtagatcaggcatcttaattctgctaactgcatcatatccagatactgttacgtctgttgcacatagatgaagatacagaagctttaagaagttaaatagcttacctgaagttatttaggaaatggccaaagtaggaatttgagtatggtttgcttagattccgagtattgctctttctgttaaacacctgcaataaccattctcaaaacatttgacatcagtactcctttacattcttcaaagttattgaggatcccaaagtttttgtttctgggggttrtatctttcagtatatactatatttgaaattaaaactgagaaatttttaaaaaacatgaatacataagcatatattgtattggctgttaaagaataaggcacgtaacattttagtattattctgagaattatttaaagctcatagactccctcaaaagggttgaggggagggggtacccagaccgtatattgagaaccactaatctgtaagaagactagtgagtttggcattggacaaattcatctctccattctttttcagtttaatgttctgttagtcttctgattacaatgaatactactcta

SEQ ID NO: 48776 - DNA, 615 bp, Homo sapiens
aataataagtaccttaatgaatttctgtggtagatcaggcatcttaattctgctaactgcatcatatccagatactgttacgtctgttgcacatagatgaagatacagaagctttaagaagttaaatagcttacctgaagttatttaggaaatggccaaagtaggaatttgagtatggtttgcttagattccgagtattgctctttctgttaaacacctgcaataaccattctcaaaacatttgacatcagtactcctttacattcttcaaagttattgaggatcccaaagtttttgtttctgggggttgtatctttcagtatatactatatttgaaattaaaactgagaaatttttaaaaaacatgaatacataagcatatattgtattggctgttaaagaataaggcacgtracattttagtattattctgagaattatttaaagctcatagactccctcaaaagggttgaggggagggggtacccagaccgtatattgagaaccactaatctgtaagaagactagtgagtttggcattggacaaattcatctctccattctttttcagtttaatgttctgttagtcttctgattacaatgaatactactcta

SEQ ID NO: 48777 - DNA, 615 bp, Homo sapiens
aataataagtaccttaatgaatttctgtggtagatcaggcatcttaattctgctaactgcatcatatccagatactgttacgtctgttgcacatagatgaagatacagaagctttaagaagttaaatagcttacctgaagttatttaggaaatggccaaagtaggaatttgagtatggtttgcttagattccgagtattgctctttctgttaaacacctgcaataaccattctcaaaacatttgacatcagtactcctttacattcttcaaagttattgaggatcccaaagtttttgtttctgggggttgtatctttcagtatatactatatttgaaattaaaactgagaaatttttaaaaaacatgaatacataagcatatattgtattggctgttaaagaataaggcacgtaacattttagtattattctgagaattatttaaagctcatagactccctcaaaagggttgaggggagggggtacccagaccgtatattgagaaccactaatctgtaagaagactagtgagtttggcattggacaaattcatctctccattctttttcagtttaatgttctgttagtcttctgattacaatgratactactcta

SEQ ID NO: 48778 - DNA, 528 bp, Homo sapiens
ggttctaagaagtggctttcaaagcagaagtgggtaggttttaactgtttgaattagataacctatagattcttttaagttcttactttctwtaaatctcatataccaaaatatatcccctaaggaccaggggtgaactatatgaatcatgccagtgattatgtgaattatatctcactgatatttctttttttattattattatactttaagttttagggtacatgtgcacaacgtgcaggttagttacatatgtatacatgtgccatgttggtgtgctgcacccattaactcgtcattaacattaggtatatctcctaatgctatccctcccccgaccccacaacaggccccagtgtgtgatgttccccttcctgtgtccatgtgttctcattgttcaattcccacctatgagtgagaatatgcggtgtttggttttttgtccttgcgatagtttgctgagaatgatggtttcaagcttcatccatgtccctacaaagggcatgaactcatcattttttatggctg

SEQ ID NO: 48779 - DNA, 528 bp, Homo sapiens
ggttctaagaagtggctttcaaagcagaagtgggtaggttttaactgtttgaattagataacctatagattcttttaagttcttactttctttaaatctcatataccaaaatatatcccctaaggaccaggggtgaactatatgaatcatgccagtgattatgtgaattatatctcactgatatttctttttttattattattatactttaagttttagggtacatgtgcacaacgtgcaggttagttacatatgtatacatgtgccatgttggtgtgctgcacccattaactcgtcattaacattaggtatatctcctaatgctatccctcccccgaccccacaacaggcsccagtgtgtgatgttccccttcctgtgtccatgtgttctcattgttcaattcccacctatgagtgagaatatgcggtgtttggttttttgtccttgcgatagtttgctgagaatgatggtttcaagcttcatccatgtccctacaaagggcatgaactcatcattttttatggctg

SEQ ID NO: 48780 - DNA, 528 bp, Homo sapiens
ggttctaagaagtggctttcaaagcagaagtgggtaggttttaactgtttgaattagataacctatagattcttttaagttcttactttctttaaatctcatataccaaaatatatcccctaaggaccaggggtgaactatatgaatcatgccagtgattatgtgaattatatctcactgatatttctttttttattattattatactttaagttttagggtacatgtgcacaacgtgcaggttagttacatatgtatacatgtgccatgttggtgtgctgcacccattaactcgtcattaacattaggtatatctcctaatgctatccctcccccgaccccacaacaggccccrgtgtgtgatgttccccttcctgtgtccatgtgttctcattgttcaattcccacctatgagtgagaatatgcggtgtttggttttttgtccttgcgatagtttgctgagaatgatggtttcaagcttcatccatgtccctacaaagggcatgaactcatcattttttatggctg

SEQ ID NO: 48781 - DNA, 632 bp, Homo sapiens
aattatatcgcttttacacctaaggcaactaagacccatagtaggttgattaacatagttaaatacacaccacgagaaagtgttggagcagagttcagatatttgaggtccggtccagagcccatgctatcttgttctataaatatcgtgtatgtattcaatagtattttcaattactcaaaatgagcaggggttcattatagtaatggaacttcttgctgaaccaaaataagtatttggctccatattcagtagtgaggtcagtatacctggattcaaggttccagtttaagggacatcatggttctcagcctcagcttattcatctacagaatgagatacttcagttcagttgtaaactcataaacatctgttttgtgctctgcagtgagctctatatgatgaatggcacagagataaaaatgtgycctaggcgactgcataaactccaaggttcttccaaaattagatatttacattatataaattaagcattactgattcacaggatataatttcagagttttttttattttaaaaagtcagctttttgctgggtgcagtggctcacccctataatcccagcactttgggaggcctaggtgggtgtatcacttgaggccaggagttca

SEQ ID NO: 48782 - DNA, 632 bp, Homo sapiens
aattatatcgcttttacacctaaggcaactaagacccatagtaggttgattaacatagttaaatacacaccacgagaaagtgttggagcagagttcagatatttgaggtccggtccagagcccatgctatcttgttctataaatatcgtgtatgtattcaatagtattttcaattactcaaaatgagcaggggttcattatagtaatggaacttcttgctgaaccaaaataagtatttggctccatattcagtagtgaggtcagtatacctggattcaaggttccagtttaagggacatcatggttctcagcctcagcttattcatctacagaatgagatacttcagttcagttgtaaactcataaacatctgttttgtgctctgcagtgagctctatatgatgaatggcacagagataaaaatgtgccctaggcgactgcataaactccaaggttcttccaaaattagatatttacattatataaattaagcattactgattcacaggatataatttcagagttttttttattttaaaaagtcagctttttkctgggtgcagtggctcacccctataatcccagcactttgggaggcctaggtgggtgtatcacttgaggccaggagttca

SEQ ID NO: 48783 - DNA, 627 bp, Homo sapiens
gcagagtccatccttttaactactgagcttccctgagttccaccttgagatacaacttttgcagaaattagggtacagatagaccaaaattgtgtgtatataatgtaatatataaggtcatatgtgtaaatacttctaatatttgtgaatayaattttaaattgcatataaatacttatgcaggttataaatatacaatttatgtatgttaaatgtcactgctcaatgagtgattagatgaggttgagaagggaggtagagacacatctgagttctgaagtagctcttgtcattcttagacaaaacatattgttaaacatctcaatttcattgtctttgatacatgaatatttaaagcactatgcatatacctgtcacttaagaattaatttgtgttgccttaaaaacataaaaaataagacagggagactttccaatagtaagtaattgagccagagctggtaaagagagaggaagcattttgggaatgtgttacacatgcagaggatccctgactcatgacagttctgcttatgatttttcaactttacaatggtacaaaagtgatataactcagtggaaaccatattttgactgcctatacagccgtcctgcttttcatactca

SEQ ID NO: 48784 - DNA, 627 bp, Homo sapiens
gcagagtccatccttttaactactgagcttccctgagttccaccttgagatacaacttttgcagaaattagggtacagatagaccaaaattgtgtgtatataatgtaatatataaggtcatatgtgtaaatacttctaatatttgtgaatataattttaaattgcatataaatacttatgcaggttataaatatacaatttatktatgttaaatgtcactgctcaatgagtgattagatgaggttgagaagggaggtagagacacatctgagttctgaagtagctcttgtcattcttagacaaaacatattgttaaacatctcaatttcattgtctttgatacatgaatatttaaagcactatgcatatacctgtcacttaagaattaatttgtgttgccttaaaaacataaaaaataagacagggagactttccaatagtaagtaattgagccagagctggtaaagagagaggaagcattttgggaatgtgttacacatgcagaggatccctgactcatgacagttctgcttatgatttttcaactttacaatggtacaaaagtgatataactcagtggaaaccatattttgactgcctatacagccgtcctgcttttcatactca

SEQ ID NO: 48785 - DNA, 639 bp, Homo sapiens
agttgaggccaggtgtggtggctcatgcctgtaatcctagcactttgggagtccaaggcaggaggattgcctgagcctaggagtttgagaccagcctgagtcatataartgagaccccatatctacaaaaaaaaaaaaaaaaaatacaaaaactagcccaggcatgatggtgtgtgtttgcaggtcccagctacttgggaggctgaggtgggaggattgcttgagcctgggatgtcaaggctgcagtgagctgtgattgtgtcactgggctccagcctgggccacagagtgagaccctgtttcaaaaaaaagaaaaaaaagttgacttgaatttttgttctgtaagctcaataacagcatataatttatggaggttctattaaattgtcctgcaggcttttctgggagagtcttttgacatcatagaaagaataaagcaagaataaaagcagtcttatatggcttatggaggattcttaggaatattgacagcataacagaagtttaatgaatcttaactgatacttagatacataacttagcagaacagagagatttaaggccaaatctctggtgtctcttcccaaatatgaccttattactgtacttatttttacccaacccttgctacctgtctca

SEQ ID NO: 48786 - DNA, 639 bp, Homo sapiens
agttgaggccaggtgtggtggctcatgcctgtaatcctagcactttgggagtccaaggcaggaggattgcctgagcctaggagtttgagaccagcctgagtcatataaatgagaccccatatctacaaaaaaaaaaaaaaaaaatacaaaaactagcccaggcatgatggtgtgtgtttgcaggtcccagctacttgggaggctgaggtgggaggattgcttgagcctgggatgtcaaggctgcagtgagctgtgattgtgtcactgggctccagcctgggccacagagtgagaccctgtttcaaaaaaaagaaaaaaaagttgacttgaatttttgttctgtaagctcaataacagcatataatttatggaggttctattaaattgtcctgcaggcttttctgggagagtctttygacatcatagaaagaataaagcaagaataaaagcagtcttatatggcttatggaggattcttaggaatattgacagcataacagaagtttaatgaatcttaactgatacttagatacataacttagcagaacagagagatttaaggccaaatctctggtgtctcttcccaaatatgaccttattactgtacttatttttacccaacccttgctacctgtctca

SEQ ID NO: 48787 - DNA, 1665 bp, Homo sapiens
tttttcagttttacaagactgaagcccgtaatgcagagaaccagagatttctgaggtccctgctttcaaatgatatcatgtgctctctggagcattcaggtcactctttagatggatggctgttacccctccattcaagaatctcttactggaaactaactatgtggtagaggcatggagggcacagtttggcatcaagaatgaaccagaaacattttgtcttcatagtcaggtggtgaagactagaataaataaaccaggcatggtgtgtgataaggtataattaaggtattaagggatctgtgggttaataaatatttgtaattgctgcttcagcctccgttgccctcggctccctccaataattccctgattttgttttatggaaactgcccacctcatgatcaaacacaaggtttgggtgcctacactcctagcctctggggtgggtccagataaacaagccaggccacatggcccttatcactcattcctctggctgtagtgactggcccagggacagacacacaggccatgtgaggagtctatttctagggtttctgggaaagagggattcctcttttttgtgaggaagcttattggagagacacccgcttgtcccctggaaagcatgacacgagaatgtgaggcttgcaggtgccacagtcatttgcaattatgagggaaacaactggagctgttcagagaacgtggtagggatcctcaagatgaatcagacaacaagggaggcagaggggaataacaaaaggaaatggagtccttggcattatcatcagaaccacttgatcaggcctcacctgactgatctacttatggactttcctagggactgatgggtaggagggttatttgaatgggcaagatatagaaaaggcatccttttatcatgaatttttaaaataaatgcactaaagtacagagaccaatacaacaaattctgtgtccaccccagagctaacaatatgctattatgcttgattcagatattttaatttttttaatgaaggaacacatgacagatggaatttggtctgcattgtggtatttctcagtttgatttccctccctctccccttccagaggcagccactaacgagaacttagtatgtatccataccatttatgtttttgtacttatagtaaatatccatcaacattatttagcatgtgtgactgtgtgcttttaagttccatcaatggcatcacactagatctatcattctgcctttgttttctaagtaattctatgtgctacttatttattcatacttgtacatttagatctagatgattcccttttaattgtataatattacatcatagaaacttgccaggcatagtcattgtcctccctgtggaaacgtatgtactttacattttgaagttatttcaaacaatgtcttacgaagatctcattatttacatgtgcaggagtttctctagacttagaattgaaagagctggatccaagggtgtgaaattttcaacaattctcagagaagaaggaaggagwggcagatagcatttcatttttactactaagggatgcctcactgtgtttctattaatgcttatctttttgccttaaattctattttgtttgatagtaatatagttgcaacaattttctggttaatgtacaca

SEQ ID NO: 48788 - DNA, 405 bp, Homo sapiens
caatcataaaccaatatttctgtgattgattgacctttccatacatatatcaagcatttactaatctttcgggttaggggctgatagactgttctcttgaagatgcatcctcttgtttataagcactgatatagggaacttttatggtaaaaagaacaaaaaagtatgagatattttctgggaatcttgttccacggagacttggaacccaattcaatgtgaaaagagaatgtttctgttaggagctttatccagggaactgacagtgtcaagcagcttgctccaagccatttgaatggaaactgtgagaagacaccacaactctgaagtcacagttaaacagatgatgccttggccaggcgcagtggctcaygcctgtaatcccagcactttgggaggtggagg

SEQ ID NO: 48789 - DNA, 531 bp, Homo sapiens
gtttggttgggccgggcatggtgcctcatgcctgtaatcccagcattttgggaggccactgcaggtggatcacctgaggycagcatgaccaacatgctgaaaccccatctctactaaaaatacaaaattacccgggcatggtggcagatgcctttaatcccaactacttgggaggctgagacaggaaaatcacttgaacccgggaggcagaggttgcagtgagccaagattgcgccactgcactccagcctgggtgacaagagcaaaaccccatctcaaaaaaaaacaaagaaaaagaaattttggttggctgcatagcttgctaagtcttactatttcccttccttttcattttatcacttttgctatgtatgcagtgctatcacattgtggttttaatttgcatttgcagatgtgaattttaagagatgtttgtaggcatacttatggtaattcagtagtcctttcccaagaagtatgttacaaaaacggaattgtaggtattcttgatcaatattgccattatcctca

SEQ ID NO: 48790 - DNA, 531 bp, Homo sapiens
gtttggttgggccgggcatggtgcctcatgcctgtaatcccagcattttgggaggccactgcaggtggatcacctgaggtcagcatgaccaacatgctgaaaccccatctctactaaaaatacaaaattacccgggcatggtggcagatgcctttaatcccaactacttgggaggctgagacaggaaaatcacttgaacccgggaggcagaggttgcagtgagccaagattgcgccactgcactccagcctgggygacaagagcaaaaccccatctcaaaaaaaaacaaagaaaaagaaattttggttggctgcatagcttgctaagtcttactatttcccttccttttcattttatcacttttgctatgtatgcagtgctatcacattgtggttttaatttgcatttgcagatgtgaattttaagagatgtttgtaggcatacttatggtaattcagtagtcctttcccaagaagtatgttacaaaaacggaattgtaggtattcttgatcaatattgccattatcctca

SEQ ID NO: 48791 - DNA, 556 bp, Homo sapiens
ctgggtgacgtgcctctccagctctccttcctggattagacaaatgaggagagaaggaatatgtcacatcaaagacccattactgctgtttgcaatatgctttcaaagcatgacatggaagtttgctgttttgttcataagtttttatttagttatgattgtaaaaggaccaaaagttatgcctgtactggtgtgtatacttttcaataaacaattgtgcatttttgataatttttctatactatgttctgattgtatttattgaaacataattttgtttcaactctaataaaaacctacgcttgcttttgtatatctcttacaattatatttttctagtaatttatttttgttgtattttattagtattagcctgtagtggcttggcaattaaacacagtcaagtcttctgcacagatggattaggaagcattcaggaggccccatcacgggcatctctcyatgcagtcagttccctgtatggtgagcacgtgcacaaggcagtttggaagctcttgaggcaagacttttgaaaatacccttggggtatataagg

SEQ ID NO: 48792 - DNA, 576 bp, Homo sapiens
ttttagtagagatggggtttctcyttgttggtcagggtggtcttgaactcccaacctcaggtgatccgccaacctcagcctcccaaagtgctgggattacaggcgtgagccaccacacccagcccaacctgtacattctcattaggagacagcccaatgttatggttaagagtgtgtacttgcggggtaggtggcctgggctgaattccctatcctgccacaacagctaaatgatcttgggcaagtcacttaactctccatgacttggcttctcatctatatgtataaaatggtgatgttaagaagagcaatgataaggtcactcagagacctaaatgagttaataaatgtgaaatgcttagaacaatgactggcccagttttatgataggtaaaataaacatcccagtgtttacaaagaaatagtctaccctgaatgtattcatgtactgtgttgttctcacatctttcccagtatgtccctggcccgtgacagctttttccgttcagctttcaaggtggtcctcttcctctccagacctagatttttctctctttgtcccctgcttaaatcaat

SEQ ID NO: 48793 - DNA, 820 bp, Homo sapiens
ctatattacacaggaggtcctttgtcatccaaaggtgattcaactgagaaagcagaagatggaggaagcagcagaatgagaatccgatttcaagacgcagagcatctctgaagctgacgggatgtcccagcttctgaagccaaaaatggagccaaaagccaagaatcaagggctgctaaaaggtggagaagagccaaggaaacagactgtccactggaaggccagataagatcyaactatgactacaccttaatttgtctaagtgaaatcaacttctatctttggatctctaccactctaatttaagcacgtaacttggtgctcatttgttaccacagaaataggaagttgatgcaagtcctgtccagaatacttattttataacctactttgaaggtaaccagaataagtcatagatatttccgttctatctaagtacccataactcatccttccctgagaaaactcatcaggaaaaatttgaaggcagtaaaattagtgtcattttcctagcatcccagtagacatgttttatgcattaaatgcattcatgtaattttgtatttgaaataaacatgcataaatgccatgaaggatacatcttacattttacaggagaaaaatagattctgattatttgttttctatggaagaaactcaatatataatttaaaaaaccatccccccccccaaaaaaaaaaaattctgtggttggaataacttcactagattccaccagtcaaaagataacccgttattccagacaatataaaaaatggtagcatttctcaaaatatcaccctgtcttgacaaccaagcg

SEQ ID NO: 48794 - DNA, 1231 bp, Homo sapiens
ggtaaaaccagaagcattgaagattagtatttaatctaacagttagaacatagtctggtgaacctgggcagcatggcatcccagatggagggatgtgtgcgctggaattagggctgttagagcatgacacaaaattgtcatcttcaaatgctttactctgactctaccggggaagtcaaggtgaagagggacaaaaggtaagtttggaaaatagaggccagttcataaagagccttcggtgggatactaacaacctcaaatcttatcttgaattgccctgaaagctattgaaggattttaagtaagaaattacttcatcagattatttctttcagaaagatcgttgtgtatagtaatgtgaagattgtatcagagcaggaaaatgagttagaagatatttttgaaatccaggctagacaccctgtaaggcagggagggtcatgttttctgaagaatgaggaaaagtggaataaaatcaatgagaaagatttaaaacatcaagcccatttagatataaaatatagggaggtagattcaaagaatacaaaggaaagcatagaatttaattagattttaagcttattataagatctgttacatcagaagtatctaaaagacattcaaatatagaacaatattacaaagaatgaaaaagtgaataaatgaataagatacctagtagtttagcagatgattccatagaatattctaggctgcaaaaaaaaatttggttgttattaacctattagcagcatttcaattaattggaataggagaaattatcaaggaagattattaagtgctcactatgtccgaggtactattttaactgcatttatatgtattttctcatttaattcttttgacaaattctacaattttacagatgaagaaactgaacaataaggctgatacttatacagacaaaagccttgaaatattgcttttcctctttttatacctgaattaatttagctttctgaatccaataaaatcattataatcacgggacctttggtgtgggctttaattcttggaggatttagtatcatccgataaagcaatcaatttataggaattgtgaaactgaaaaaatatttggacctggaagtcattgttaatgagaagtgtgtcattctttgttttaatgtattttattaataataagattttgggccaggagsagtggttcatgcctgtatttccaacactttgagaggccagggtagga

SEQ ID NO: 48795 - DNA, 637 bp, Homo sapiens
gtcctttaatgttatatataatccatacttaaatttcctcaattttcctaaaatgtcctttacagatggtttgttttagctgggatctaatcaaggaccatgaattcaatttattgtaattttacttacatcaattttaatttataacaattgtctccttttccctacctcaaatactgcaaagaccaagcaagttgtcatttagagtattccartttctggatttgttagactgtttcctcatgctgtcagttagcaagttctcctctttagttctacatatagtatttagaagtagaagactaatcaaattcagaggaagcatttatgaaaagtccagtttatagggtgtagtgaaaccagaaaatgattacttagaggaggaggaatagcgaattgggggctgtgatggaagattctgtggtgccgataataggagttttttttttgacccccccccacaacactcagatgttaatacatagaagtattcactttgtgaacattaatcaaaatgggagcttttaattttaaaaaatgtatttctaaaatatctttttttagaaaaaaaaagaataccatatagtgttgtgcttttattgcatcatatcatgatatgcataatgcctgattatct

SEQ ID NO: 48796 - DNA, 595 bp, Homo sapiens
ccatctctaaggtcgaccagatggctgtcatcctgccatgtcaaaggtcgaccaggtggctgtcccttgtcacttctaaggttgaccagatggctcttgccttgccatgtctaagkctgatcagatggctcgcaccttgccatgtcgaaggtcgcccagatggctctcatcagcagcagtactgttcaagtccagtagcaggatgtgatgattcactgcaacttcagtctctgtagtctcacctgggcagtcttcgtgtctcagcctcccgagtccttgggactactgggaccttctttcactgttctattcctaacctgacatttagtttatttccacagtacttagagtgacttgctattgtttttcttctttgttcttttgtctgttttcctatgctctttcctgtaaatgaagttgaccttttagattttcctttgtcacactccagcctgggtatcacaaatggagagaaaaagagaaagagaggagatcttaatggtgatattaattaccttttaccttggttcactcccacttatttatacattgttctttaatattgtttatttttttgtttttgtaaaacatttac

SEQ ID NO: 48797 - DNA, 539 bp, Homo sapiens
attttaaaaaattattttaggaggtaggcaataaaaaatgtttgagtctataggtttccttatgtttgcgtcacagaaaacacaattattatttttgattggtcaaaccaaaatctcttcagggatgtgttattgtagtgggaaatcagagactggagagactaagcggagttcaggagggartattttaagtgtacactagctcagcggacatgcatcttgaaagtctgagcagcaaacaaagaaaatgaatgtcttttatgcactttgaggtgggaattatatgatgcaggaagctggtttacaaaagcgagaacaaagcagttaattatcaggtgacattcttaggactcagcttacatcttgggaaaacatgtcttgcgactcatgcttatctatcttgtgactttgcagctgcacagcaagaaaaacaggagcttacagaacttacaaaatatgtgggggagagatatggttaatgcttcacagaccttacagaggagcagttaatattctttcttaactcttatttcaggggg

SEQ ID NO: 48798 - DNA, 541 bp, Homo sapiens
tttccaactgtcctccagaaatgtaccaactgactgggggtagagaggagggactgaagcagaaccttcaactttttttttttttttgagatggagtttagctcttgttgcccaggctgaagtgcagtggcgtgatctcggctcactgcaacctctgcctcccacgttcaagcgattctcctgccttagcctcccaagtagctggtattacaagcatgcaccaccacaccyggctaattttgtatttttagtagagacagggtttctgcatggtggtcaggctggtctctaactcccgacctcaggtgatccacccaccttggcctcccaaagtgctgggattacaagcatgagccaccatgcctgatctcaacttttactctgtgtatttctatattaattgaatttttacaagaatatattcgtgtgttacttgtatatatatacttttaaatagccaatttatgctcctaccaatgtatctataaaagaacatacatctccttatctttatcaacgctgggcattgtcttttaaatct

SEQ ID NO: 48799 - DNA, 1864 bp, Homo sapiens
atgagaagggtttgacctttatggtctttcttctgcttcttcaaaccccacratcatttttttgaaaatcacaaaatgcatgagatagatgggacttatgggatcccctgttcacctttacttcaaagccagaaatgccattctttaagtccaaggcttacccagtcttcaggttctcactcaagtgttaccttttagggaccaagcagaatcgaggtactcaataaagagttgctggttgctggatgaataaatggctgagtcttctgtgaaccctggcccattctattctttgtctaaatcttgccacacgtgttttctttatgaatcattctgtcctttattcttaaagatactagttatgtctcgtatttctccttgaccattctcttatctacccaacacacctaagaatatatatgtatgtatatatatacacatacataagaatatataccacatacataacacatgtgtatatgtatgtctacatatgtgtatatatacacgtgtgatataaatttatatatgtgaattactagaaacgtttcgattttaggattagatattttgcatttatacatttgtcagcctactggactgtaagttcattgagggtaagaagaaaaagaccatgataaccccttctgggaatatcagtgcctacgaaaacatctgtttctcagtaaatgttgggtatcgatgctgagcaatgctgaaacatatgcatgagcattgttactccagtactgagagccaaagatgccatggtgcactctatcattttagaaagaccacagacaattagatggaaaaggaaggcaacatcttgctaggatcttgtgtatgcttccaggcagatgaacagcctttttcctagggaaatgcatggcaggcttcatgtaagaggttccctcaataaccaaacactccattcaaaggttatatttacacagctcattaggaaaattttttatacttttgacactcattagactcataatcgtccactgaagctactgtgtaacaagagataaacactccattctagaggatgaataattaggtactgctcagcactgtgctctttacacgtctaattttagagcataattaatcctgctgaagctgcatacgataagtgaaatatttatgcagctgtgttaattcatgtatttactcctagagagacattcagaattggtcatggctttccgggaagatcatctggagacaccccctggaccaatggcattttctctcccaagtcttatgcctcccgatggcctcaagagatgaagctgaatagagacatttcccaaacccaagtctgaccaggaaggcaatgagccagaacagaaaatatcgatgagaacctagatgttctgtaagtacatgaacaaacccctggcccatctggatgcttttactgtttattttttatttggtgcaaagaagaccttttctgtttagcaccacaaaagttgtttctgtgttactaacttgactacattattgccagtgcaacactaaagaagttgtgtttgatactagagttgtgcacgggcaactatggtgatgatgagaaggagaaggatgaagaggaggaggagggtggtggtgatggccatgatgatggtggtgatgatcgtggtaatgaggatgatggcaatggtcatgatgatgatgatgatgacggtgatggtggtggtgatgataatgataataatgatatcagaggcgtgtgaaccagaacactccatcttaaatagtagctgggtaaaatgaggctgagacctactgggctgcattcgtaaatggcttaaggcattctaagtcacaagatgagataggaggtgggcaa

SEQ ID NO: 48800 - DNA, 1864 bp, Homo sapiens
atgagaagggtttgacctttatggtctttcttctgcttcttcaaaccccacaatcatttttttgaaaatcacaaaatgcatgagatagatgggacttatgggatcccctgttcacctttacttcaaagccagaaatgccattctttaagtccaaggcttacccagtcttcaggttctcactcaagtgttaccttttagggaccaagcagaatcgaggtactcaataaagagttgctggttgctggatgaataaatggctgagkcttctgtgaaccctggcccattctattctttgtctaaatcttgccacacgtgttttctttatgaatcattctgtcctttattcttaaagatactagttatgtctcgtatttctccttgaccattctcttatctacccaacacacctaagaatatatatgtatgtatatatatacacatacataagaatatataccacatacataacacatgtgtatatgtatgtctacatatgtgtatatatacacgtgtgatataaatttatatatgtgaattactagaaacgtttcgattttaggattagatattttgcatttatacatttgtcagcctactggactgtaagttcattgagggtaagaagaaaaagaccatgataaccccttctgggaatatcagtgcctacgaaaacatctgtttctcagtaaatgttgggtatcgatgctgagcaatgctgaaacatatgcatgagcattgttactccagtactgagagccaaagatgccatggtgcactctatcattttagaaagaccacagacaattagatggaaaaggaaggcaacatcttgctaggatcttgtgtatgcttccaggcagatgaacagcctttttcctagggaaatgcatggcaggcttcatgtaagaggttccctcaataaccaaacactccattcaaaggttatatttacacagctcattaggaaaattttttatacttttgacactcattagactcataatcgtccactgaagctactgtgtaacaagagataaacactccattctagaggatgaataattaggtactgctcagcactgtgctctttacacgtctaattttagagcataattaatcctgctgaagctgcatacgataagtgaaatatttatgcagctgtgttaattcatgtatttactcctagagagacattcagaattggtcatggctttccgggaagatcatctggagacaccccctggaccaatggcattttctctcccaagtcttatgcctcccgatggcctcaagagatgaagctgaatagagacatttcccaaacccaagtctgaccaggaaggcaatgagccagaacagaaaatatcgatgagaacctagatgttctgtaagtacatgaacaaacccctggcccatctggatgcttttactgtttattttttatttggtgcaaagaagaccttttctgtttagcaccacaaaagttgtttctgtgttactaacttgactacattattgccagtgcaacactaaagaagttgtgtttgatactagagttgtgcacgggcaactatggtgatgatgagaaggagaaggatgaagaggaggaggagggtggtggtgatggccatgatgatggtggtgatgatcgtggtaatgaggatgatggcaatggtcatgatgatgatgatgatgacggtgatggtggtggtgatgataatgataataatgatatcagaggcgtgtgaaccagaacactccatcttaaatagtagctgggtaaaatgaggctgagacctactgggctgcattcgtaaatggcttaaggcattctaagtcacaagatgagataggaggtgggcaa

SEQ ID NO: 48801 - DNA, 1864 bp, Homo sapiens
atgagaagggtttgacctttatggtctttcttctgcttcttcaaaccccacaatcatttttttgaaaatcacaaaatgcatgagatagatgggacttatgggatcccctgttcacctttacttcaaagccagaaatgccattctttaagtccaaggcttacccagtcttcaggttctcactcaagtgttaccttttagggaccaagcagaatcgaggtactcaataaagagttgctggttgctggatgaataaatggctgagtcttctgtgaaccctggcccattctattctttgtctaaatcttgccacacgtgttttctttatgaatcattctgtcctttattcttaaagatactagttatgtctcgtatttctccttgaccattctcttatctacccaacacacctaagaatatatatgtatgtatatatatacacatacataagaatatataccacrtacataacacatgtgtatatgtatgtctacatatgtgtatatatacacgtgtgatataaatttatatatgtgaattactagaaacgtttcgattttaggattagatattttgcatttatacatttgtcagcctactggactgtaagttcattgagggtaagaagaaaaagaccatgataaccccttctgggaatatcagtgcctacgaaaacatctgtttctcagtaaatgttgggtatcgatgctgagcaatgctgaaacatatgcatgagcattgttactccagtactgagagccaaagatgccatggtgcactctatcattttagaaagaccacagacaattagatggaaaaggaaggcaacatcttgctaggatcttgtgtatgcttccaggcagatgaacagcctttttcctagggaaatgcatggcaggcttcatgtaagaggttccctcaataaccaaacactccattcaaaggttatatttacacagctcattaggaaaattttttatacttttgacactcattagactcataatcgtccactgaagctactgtgtaacaagagataaacactccattctagaggatgaataattaggtactgctcagcactgtgctctttacacgtctaattttagagcataattaatcctgctgaagctgcatacgataagtgaaatatttatgcagctgtgttaattcatgtatttactcctagagagacattcagaattggtcatggctttccgggaagatcatctggagacaccccctggaccaatggcattttctctcccaagtcttatgcctcccgatggcctcaagagatgaagctgaatagagacatttcccaaacccaagtctgaccaggaaggcaatgagccagaacagaaaatatcgatgagaacctagatgttctgtaagtacatgaacaaacccctggcccatctggatgcttttactgtttattttttatttggtgcaaagaagaccttttctgtttagcaccacaaaagttgtttctgtgttactaacttgactacattattgccagtgcaacactaaagaagttgtgtttgatactagagttgtgcacgggcaactatggtgatgatgagaaggagaaggatgaagaggaggaggagggtggtggtgatggccatgatgatggtggtgatgatcgtggtaatgaggatgatggcaatggtcatgatgatgatgatgatgacggtgatggtggtggtgatgataatgataataatgatatcagaggcgtgtgaaccagaacactccatcttaaatagtagctgggtaaaatgaggctgagacctactgggctgcattcgtaaatggcttaaggcattctaagtcacaagatgagataggaggtgggcaa

SEQ ID NO: 48802 - DNA, 1864 bp, Homo sapiens
atgagaagggtttgacctttatggtctttcttctgcttcttcaaaccccacaatcatttttttgaaaatcacaaaatgcatgagatagatgggacttatgggatcccctgttcacctttacttcaaagccagaaatgccattctttaagtccaaggcttacccagtcttcaggttctcactcaagtgttaccttttagggaccaagcagaatcgaggtactcaataaagagttgctggttgctggatgaataaatggctgagtcttctgtgaaccctggcccattctattctttgtctaaatcttgccacacgtgttttctttatgaatcattctgtcctttattcttaaagatactagttatgtctcgtatttctccttgaccattctcttatctacccaacacacctaagaatatatatgtatgtatatatatacacatacataagaatatataccacatacataacacrtgtgtatatgtatgtctacatatgtgtatatatacacgtgtgatataaatttatatatgtgaattactagaaacgtttcgattttaggattagatattttgcatttatacatttgtcagcctactggactgtaagttcattgagggtaagaagaaaaagaccatgataaccccttctgggaatatcagtgcctacgaaaacatctgtttctcagtaaatgttgggtatcgatgctgagcaatgctgaaacatatgcatgagcattgttactccagtactgagagccaaagatgccatggtgcactctatcattttagaaagaccacagacaattagatggaaaaggaaggcaacatcttgctaggatcttgtgtatgcttccaggcagatgaacagcctttttcctagggaaatgcatggcaggcttcatgtaagaggttccctcaataaccaaacactccattcaaaggttatatttacacagctcattaggaaaattttttatacttttgacactcattagactcataatcgtccactgaagctactgtgtaacaagagataaacactccattctagaggatgaataattaggtactgctcagcactgtgctctttacacgtctaattttagagcataattaatcctgctgaagctgcatacgataagtgaaatatttatgcagctgtgttaattcatgtatttactcctagagagacattcagaattggtcatggctttccgggaagatcatctggagacaccccctggaccaatggcattttctctcccaagtcttatgcctcccgatggcctcaagagatgaagctgaatagagacatttcccaaacccaagtctgaccaggaaggcaatgagccagaacagaaaatatcgatgagaacctagatgttctgtaagtacatgaacaaacccctggcccatctggatgcttttactgtttattttttatttggtgcaaagaagaccttttctgtttagcaccacaaaagttgtttctgtgttactaacttgactacattattgccagtgcaacactaaagaagttgtgtttgatactagagttgtgcacgggcaactatggtgatgatgagaaggagaaggatgaagaggaggaggagggtggtggtgatggccatgatgatggtggtgatgatcgtggtaatgaggatgatggcaatggtcatgatgatgatgatgatgacggtgatggtggtggtgatgataatgataataatgatatcagaggcgtgtgaaccagaacactccatcttaaatagtagctgggtaaaatgaggctgagacctactgggctgcattcgtaaatggcttaaggcattctaagtcacaagatgagataggaggtgggcaa

SEQ ID NO: 48803 - DNA, 543 bp, Homo sapiens
ccaggtgtggtggcccttgcttgtggtcccagctattcaggaggctgacgtggtagaatagcttgagcccaggagggtgaggtcacagtgagctatgtttgtgccactgcactccagcctgggtgacagagcgagaccctgtctcaaaagaaaaaaaataaaaacaaggaaatatctgttttctaataattagagaacttctgcttactagtgctgcactcctatagtttggtttgtttgttccttccaaatctcatgttgaatttttttttttttttttgagatggagtcttgctctgttgcctaggctggagtgcaatggcgcaatctcagctcactgcaacctctgcctcccaagtwcaatcgattctcctgcctcagcctcccgagtagctgggattataggcatatgctgctgcacctggttaatttttgtatttttagtagagacagggtttcaccatgttggccaggctggtcttgaactcctgacctcaagtgatctgcccgccaagccctcccaaagtgctgggattacagggg

SEQ ID NO: 48804 - DNA, 554 bp, Homo sapiens
taaccaccttaaggtctatgtatttttcagataattcttgttataatctgtgatttctttgcatgcagttccttcatatctgaatcttggcaggctcagaaattaaaacatttcgtcagaaagcttagaaaatatggggcacaattgggaatatgtataggatgtctgtgttttggatacacacacacacacacacacacacatacacacaccaagcacttactcttgctaaagaagctcacggtggggacttccaagggcagaatcaggtccaaatgccttcagggaagacagatttcagattctttggggaagaacttttttaactgtcaaatctgcccaccaacagaattgctgcattacaaagttcagtaaaaggctattctccctctccccaccgccatctccccaggattttgagaataccagaagcttccaatgacaggattgttataaaaacagcattcttttatgcccacccatttaaaagctatgctattataaaaagtaaagaacgagttgctctcaccagkgcgcatggtgggtatgtgacc

SEQ ID NO: 48805 - DNA, 562 bp, Homo sapiens
tgcttccttctaaaatatgagtaccatatattcttaccattttatagatggtaaacaacaaacatytgttgaataagaataatgatggctgccatttattgagcacataatacatatcagatattaggatgttttacatccattatttcaaaacagttcaataaatagtaagatagaaatctgctattagtagaaaataactttgtatgactttattttataaaaatgaaatcaaagttgatttaacttagatatggccttatttatttattaggttttgagacaaggtctcactgttttacctgggttggagtgcagtagcatgatcatggttcactgaagccttaacctcctaggctcaagtaatcctctcaccccatcctccagagcagctgagaccatttattcatttttgtagagacagggtctccctgtgttgcctgggctggtctcaaactcctagactcaagtgatcctcctgccttggcctcctaaaatgctgggattacaggtgagagccactgcacccagagatatggcattatttttaagtttaaaagct

SEQ ID NO: 48806 - DNA, 554 bp, Homo sapiens
gtttctattagtgggactggtgctttttaaatgcttacagtatagcacaggagcatttgatcctttaattaccctaggtggccccactcagtgggtggtgatttgggtgaggaatctggatagctttggtggtcagtcaagccataaagaaaactctcctccttccaccctcatttatttttctctcctgagtgccagtcaaaatgagatttttttgttttttgtcaattcttctaggaatacttctgtttggcatttgaatccaggcttaagttaaattttaggcccccaagaccaaatttccaaaagggtcctctacccttggctaactgctaaatgaataaatctctaaagaagccttccgtattttccaggtccttttctccatttatttcacagcctaagtgttccttagatgatacttgagtgggtggcttatgacccagtctcctgccaaattgctcagctttctacygccataagaaatacctcctccattttacaaatggaaaagtctccttggtttatctccacaacttcatggaatcagatcc

SEQ ID NO: 48807 - DNA, 1020 bp, Homo sapiens
cttcccgattcttgcagccagatgcttcctcctctgcctccatgacctgtcacagccccacacctctggactgtgaatgtccaggtccctgggtgcttctgccatttgcttccagctggggcttggcacccacggggcttcaggagactggctgaataaatgaattagtatgtaatacaaaaacaacaaataaatagaaaaaattaaccaggcatggtggtgcacacctgtagtcccagctactcaggaggctgaggtaggaggatcaactgagactgggaggcagaggttgcagtgagccgagattgtgccaccgcactccagcctgggtgaaagagcgagaccctgtctcgggraaaaaaaaaaaaaaaaagaggtggaaggaaaatagacccagtgtgtttcccataacattatgacaactcagttgttcattcatatgttcactcattaattcaacaaatgtttgtggaacaaatcgtcctgggcaccaaggagttagtgggcatgagataggcaaggtcctggccctcatggaactagtttgcctgggtgacaggccgtgtgtagggagcccttggtcatggccggatgctgttaacattcactcattttgacctcctggggctccaggcacctgttagccgatgaaagcgggcagcagagaccccggggaatgatactgggtagaacaaatgggagtaagttagaggacttgggaacaccaagtcagagcccacttgtgtcacctagggggcttttatttttattttgtgtctgccatatcaaggggtttatttggaatttatcataaacttgatattttagccatattttgcagccagccatagtgcttcttctgttcaagttttccacatttctttgacaaaatgtttattacatgtcgccctttgagcttgtagcacatgacttgtacttagtgttcaataagagaaacgcaagttttagcatctcaaactggttagtttatcacacttttcctcataagggttttgtttt

SEQ ID NO: 48808 - DNA, 551 bp, Homo sapiens
aataccttcatatgtcaggcatttgcctgcagctttagaatcttccaacaacactgcaatgagctattattacgtcttacaaatgaggaattggagactcagagaacctagaaaagcagcccaagaccacagagcaagcgatagagtcagctgcccagagctgagtctctccttgctgagaaagaatcaagaaagaatctttgtttaatgcatcatcgtctgtctttaaaagaatcaatatttatctcctgccaaaagtcctcagttgccatcctgtccttgcagctcctgagagcttcctgaggagtgttgagggggcaaagggtggccrgagaggagtgccctgagcctcacagacagtggtgcccaccgcagggaccgggagagccactgtcagctccacaaagcgcttctgtggtaatttgacaggattaaggggattaatacattaatgcattattagcacttttataggagattttcagcgagttgagcacggtgatccctatttcctgttatataaaccggcagtaattgtcttaattggccca

SEQ ID NO: 48809 - DNA, 580 bp, Homo sapiens
tcaatttggttttagtattatttataagcagatttttaaaatattatgttttcaagatcatttctttctttacagccttcaggtagctcatttcaattatgaaagtgattagttcccatagtaaaatttgcaagtagtatagaaaggcagaaataaaatgcaaattcctagcttcttctcaattatcagccccactatccagagtttgtgtatccatcccaaaattccccacgcacatacaaacatgtttgcatacctatttccatattttgcgcaggaatatactctttaatcagatatactttctttcctaattaaaagttttatcctaatcacatttattgatataataacaatcatattatgccatctctgacacatggcatatacttttcaaaaagaatttcttggtaaaacaatgatagattcacagrgaattgcagtcatagtacaaaggggtcccaggtgcccacccttccctcagcttctgccaatgctacatgtgtgcgtgtatcattttgggtcattaatcccacgtgtagattccattaacagccaacacagtcaagacatggaactg

SEQ ID NO: 48810 - DNA, 538 bp, Homo sapiens
gtcctatgtggtccttgttggactagagtggccgctgtcttagattgcccattccttggtctttggcaagagatgagcatttcttggggcatgtttgtttgcacacactagggttttgtgtcagcctctcaactacctagtctggagatataaggcaaaaagaaaacccaaggaattcacccctggtttcttcctccagtcgcaagctccccaggtggtctgccttcttccctccttctttcagagtcrtcttacatttgttttacgtgtaatgcccagtggctttagctgcacttagtgggaggaatggagaaaaggatgtctactccgtctacccagaagcacaagtacaacatatgacataaactttaaattcattttgttgtctgtgtttctttctgctacatggatatttttatacactgttatatattcttctgaaaattgttaaaattatagcttggcataacttaaacttcagtgttacattttcttctaaaagttaagaaagttaccatgcttgtattctgtcacctta

SEQ ID NO: 48811 - DNA, 538 bp, Homo sapiens
gtcctatgtggtccttgttggactagagtggccgctgtcttagattgcccattccttggtctttggcaagagatgagcatttcttggggcatgtttgtttgcacacactagggttttgtgtcagcctctcaactacctagtctggagatataaggcaaaaagaaaacccaaggaattcacccctggtttcttcctccagtcgcaagctccccaggtggtctgccttcttccctccttctttcagagtcatcttacatttgttttacgtgtaatgcccagtggctttagctgcacttagtgggaggaatggagaaaaggatgtctactccgtctacccagaagcacaagtacaacatatgacataaactttaaattcattttgttgtctgtgtttctttctgctacrtggatatttttatacactgttatatattcttctgaaaattgttaaaattatagcttggcataacttaaacttcagtgttacattttcttctaaaagttaagaaagttaccatgcttgtattctgtcacctta

SEQ ID NO: 48812 - DNA, 1951 bp, Homo sapiens
tgcctcttcctctctgtcttgtgtgtgaagggccacatctgacacactgacctcagggataagtcgctgccatgtgattttaacccccatatacgaaatttgacaatgtagaggcatagaatagaatcatgcttagtttttgagagcgtgtaatcattgaagcataacattatttactttcacccccccccaaaggaaacctctctgaaaattaaatgactagttttacgtttttaaagtgtatataattggtaaaatggtctcatttcttgcttcccccaattcaaaagggacaaagtgatatgttcgtaagtaaataattttttctttttttttttagtgatgatctggagactttaatatgggatttatgatggctaaagagcattacctacccaagaggaacctttaatccagggaggaagttatgagtttttggttcattttgtggtcaacctcattccttctagttttgtctatggcctaggcgagagaaaataattggaaatgctatgatgaaaataatagaacgattcctcttgttgctatggtgacaagaataaattgaatccattgctctgaaaaattgcccgaaagtgtactttagcattccacggtgggtttatttgttgagaattttaatctgtcagcttccatcaaaatggtgcagcactcagagaaatatttcccatctatacttttagctggtttttgttatttgttttattttttaaaatgttatagatttgggggtacttgcgcaggtttgctgcatgggtatattacataatggtgagggttaggcttctagtctacccatcagccaattattgtaaaagaaagcaaccgtcattatattgaaaatttaaataattttctaaaagcatcttgccaggtacaaatctaaaagcagattatagttttatgtccaccatcatggaaaatgtcattgtcagcaccagccgagctttggatgatttttcaggtcattgacgatcattagtatgatacgggactccaaagatctggttgagaaaccaaaggatgtggattcccaatctcattcagtgtaaaacagtcatataggcttacaagaagaaataagccctagtgcctcggtttttctgtttaatttttgataatgagcattttaataatagtgatagttagcatgtaccagatgcaccaagcattttgtggatgttgtccatgctcttgacagcaactcttaacatgtaagtattatcatctatagtttgcagatagaagaaactgaaactcagagaggtaaagcaacttgatcaaggtcacacagcaaagtggagagctgggatttaagcccggctgcatcttggctctagactccgtgcctcccgatggtgctggttgctcctaacttgcagtaacactattggcttcaaaatatctgagcatctatcctgagcagtatatgcaaaagagttaacgctggcctgaaaggcctttgccagggttgggagggaagcgtgtatctagcactctgtttgtttattttttttctgagccagggtctccctctgttgcccaggctggagtgcagtggcataatctctgctcactgcaatctccacctccctggttcaagcaattctcctgcctcagcctcccaagtagccgggactacaggtgtgcaccaccatgactggctaacttttttgtatttttagtagaggtggggtttcgtcgtgttggccaggctggtcttgaactcttgacctcaagtgatccacccacctcagcctcccaaagtcctgggattacaggcatgagccactgcgtctggctgcactctgrttttgatcatttattttgctgtctttaggattttgttttctcattttaaaaacagttgatcttctgtgaagaaaaacttttggttaagaaccaagaacctgtttctaccttgtgtttc

SEQ ID NO: 48813 - DNA, 1889 bp, Homo sapiens
tattacacagctaataagcataggagctaagatttgaattcaggtctctctgactccagaactaatgttcttaagtctagtgctacactatttctgcttaactacattgtgtgtgaagtaacctcctgtccttaagtctattggaccatattcacctgagttatacaactttatggcaaaatatgaactatttcccatttggactttggctacatttccttagtatgaagtaagagaaaatcttggaaatacttcatagacatctatcaaatctctgagctttcttttttttcagaaattggaaacataaactattttagtgcctattatkgagtgcccctattcaaactaacatcccctctaacccactcagaagaatattctaaattatagcatttagtctttggataggtatgtgcaggactacacaggtatatatccaagatgagtgcagttaaaggtttcatcactcaaatgtccagtcctataagcttgaaataataacaaaatagccttttgaaatgaaagcttcagaaataggtacattaaaactaagtgtatagccattatttgtaaatggcaaaatgaaccctattaaggggttctgtttctaaaatcacaaaatcgagctctgatgccctgtgaatatgacagcaaataatacattctatatccacggttgactcatcatcttgccatgtcagtaggctaaatggaaggaaatcatctggctttttattataactgtcattgagattattgctccttttccatatttaaccatcttcactttccttctatttcaacggtcctcaaattttaatgttaaaatattaacctgcagaatcccatcacagcccccaaatattctgattccatatgaaaacctgataacctttttaaaattaaaagctgagatgaatattgtgtagattatcttttttacatacttggagagatcatttctcatgtaattattagaataatttttacttattttgtatttttggtgaaaaataagtagtttatttccaaaaattatccaacaaatagtgagcatctgctcaaattgtagaaaattttgacaatatagaacaatttaaaaattttgttacttattgatagtctttgttaactccttgataaatatgattctagagctttcatttataaatttatgacttttatatattctacatttacattgtattctatattctaccacttgtatattcttttaagttgtttccatttttatatgtcaactgttcattttttatttcttctctctgtgtgtcttaaattgggtaatttctatgcttaatcttagacaaaaggctgagaagcaattggataatttctattgctgtcttttaagcttattccatttacatcataagtgcttaaatatagaagatacatcatgcagtaggccaggcatgatggctcacgcctgtaatcccagcagtttgggaggccgaggtgggcggatcacctgaggtcaggagttcaagaccagcctgaccaacatggagagtctctactaaaaatacaaaattagccgaggtagtggtgcatgtctgcaatcccagctactccggaggctgaggcaggagaatcgcttgaacctgggaggcggaagttgcagtgagccaagattgcaccattgcactccagcctgggcaacaagagcaaaactccatttcaaaaaaacaagatacaccatgcagttgttggttgcaatgttctatatccatcccttagtttgtttgctaattgtgttgttctacttagatttaaatagatttctttagtgatttttttctttgattatttaatcactgagaaattcatactaaaataccctattatgattatggatttgtcaa

SEQ ID NO: 48814 - DNA, 1889 bp, Homo sapiens
tattacacagctaataagcataggagctaagatttgaattcaggtctctctgactccagaactaatgttcttaagtctagtgctacactatttctgcttaactacattgtgtgtgaagtaacctcctgtccttaagtctattggaccatattcacctgagttatacaactttatggcaaaatatgaactatttcccatttggactttggctacatttccttagtatgaagtaagagaaaatcttggaaatacttcatagacatctatcaaatctctgagctttcttttttttcagaaattggaaacataaactattttagtgcctattatggagygcccctattcaaactaacatcccctctaacccactcagaagaatattctaaattatagcatttagtctttggataggtatgtgcaggactacacaggtatatatccaagatgagtgcagttaaaggtttcatcactcaaatgtccagtcctataagcttgaaataataacaaaatagccttttgaaatgaaagcttcagaaataggtacattaaaactaagtgtatagccattatttgtaaatggcaaaatgaaccctattaaggggttctgtttctaaaatcacaaaatcgagctctgatgccctgtgaatatgacagcaaataatacattctatatccacggttgactcatcatcttgccatgtcagtaggctaaatggaaggaaatcatctggctttttattataactgtcattgagattattgctccttttccatatttaaccatcttcactttccttctatttcaacggtcctcaaattttaatgttaaaatattaacctgcagaatcccatcacagcccccaaatattctgattccatatgaaaacctgataacctttttaaaattaaaagctgagatgaatattgtgtagattatcttttttacatacttggagagatcatttctcatgtaattattagaataatttttacttattttgtatttttggtgaaaaataagtagtttatttccaaaaattatccaacaaatagtgagcatctgctcaaattgtagaaaattttgacaatatagaacaatttaaaaattttgttacttattgatagtctttgttaactccttgataaatatgattctagagctttcatttataaatttatgacttttatatattctacatttacattgtattctatattctaccacttgtatattcttttaagttgtttccatttttatatgtcaactgttcattttttatttcttctctctgtgtgtcttaaattgggtaatttctatgcttaatcttagacaaaaggctgagaagcaattggataatttctattgctgtcttttaagcttattccatttacatcataagtgcttaaatatagaagatacatcatgcagtaggccaggcatgatggctcacgcctgtaatcccagcagtttgggaggccgaggtgggcggatcacctgaggtcaggagttcaagaccagcctgaccaacatggagagtctctactaaaaatacaaaattagccgaggtagtggtgcatgtctgcaatcccagctactccggaggctgaggcaggagaatcgcttgaacctgggaggcggaagttgcagtgagccaagattgcaccattgcactccagcctgggcaacaagagcaaaactccatttcaaaaaaacaagatacaccatgcagttgttggttgcaatgttctatatccatcccttagtttgtttgctaattgtgttgttctacttagatttaaatagatttctttagtgatttttttctttgattatttaatcactgagaaattcatactaaaataccctattatgattatggatttgtcaa

SEQ ID NO: 48815 - DNA, 657 bp, Homo sapiens
aactggccaaacatatgcagaaaactgaaactggaccccttccttacatcttaattcaaaaattaactcaagatggattaaagacttaaatgtaagacctaaaaccataaaaaccctggaagaaaacccaggcartaccattcaggacatatgcatgggcaaaggcttcatgactaaaacaccaaaagcaatggcaacaaaacccaaaattgacaaatgggatctaattaaactaaagagcttctgcacagcaaaagaaactatcatcaaagtggacaggcaacctacagaatggggaaaatttttgcaatctatccatctgataaagggctaatatctagaatctacaaggaacttaaacaaatttacaagaaaaaaacaaacaatcccatcaaaaagtaggcaaaggatatgaacagacatttacttctcaaaagaagatatttatgcggccaacaaatatatgaaaaaaagctcatcaacactggtcattagaggaacgcaaatcaaaaccacagtgagataccatctctcaccagttagaatgaggtttttctttttataaaaattaatctatgcatgtttgtagtaatctgaaatactcatttgttttcatttttaataataatccattatagaacatttataaaaaaggaa

SEQ ID NO: 48816 - DNA, 1701 bp, Homo sapiens
tttctctagtcaatccctgaatatcttcaagcaattcatatgatttttctttggctttccccagaagaaattctgaaggggaaggaataaataattttgcattggccaagcattagtttgaaatgtctaagcttttctttatggaagtttttaaatgcagtcacttttgatttggtacagaattataatcaactagaggctacaggcattttagcctgctggagtttatattgggggttttgcaagacagcaatctccatttcttaaacatgtgctttagtaagacaaaatactatttctcagtagagcacaaccttgaagaaaatcaatgtaaatgttattctacttctcacctctttttttctacaaaactaaacactccaaacacaggcacagcaaactgcatttckaaaggttttgtaagttaaacaagccaaggaagttacatggaaaaaaaaaatctcctttgagatataaaactgttcatatctgaaggagactgtacagatagcagaagggaatatagtataatatttgatgaagagacgtaattatcatttatgaatgagaaagctcaatgttttcctaaattactcgaattaaacctcaaataaatatttgaagttctccatctaattcggctacaatgaaaaactgaatctcattacctctggatttacatcgactccaatttcaaagattatatttatttcagaggggatgaaaaagcatttttcactaggaagaaaatgaattgaggtttcaatataaaacaagactcactgcatattataaagaaagtgctagtctaaatttttttttccaaagaaaacttctaagaaaaagtcagagatatttcacttagtttggagataagtttaaataaatgacaattatgtgcctgtaatagtggtacaaacagatattgtatacctcaatttaagcatatttattatatcaactagagagtattattccttttatgaaataattcctcattctacaaaaacacgcagtataggatccatttagtaatgagctccccagtgtattctacctgtaatttaattcaattttcacagttttctagatacaacaattgcctcaagcaaggtaaacgtctttgccagtttaagtggatacgctgtagaaatcagatcagtgtgtgtatgtctgtacatctctttaaaagcttattgcaatgtggttataaaaggaacagtcagttgtccactattttcaccatatgcaatttcctcccatagattcacggccatatggagatgttcatcctgagccacctggatttccagcagggaaaacaaaaccaacaaacaaaacaggacatgacaatgaagatatcaaagaactgttatttacttttgctacaagaagtacagagaggattcatgattcttgaactatattttccaaaataagtgacagtcattcactttcttgacaaatatctatggagtactaacaataggccggacactatgatcgtcttttacaatatattctccctaaagaagattccaagtgaaaatatattgagagtgctcatcattctatatctcatacttgaaacattcataataggcgcgtcggccacttaagggctccaagaaatcttaaagaaacttgtttaatccaacagtgaccagatacatttaattatgtcattttcttttcctttcc

SEQ ID NO: 48817 - DNA, 1701 bp, Homo sapiens
tttctctagtcaatccctgaatatcttcaagcaattcatatgatttttctttggctttccccagaagaaattctgaaggggaaggaataaataattttgcattggccaagcattagtttgaaatgtctaagcttttctttatggaagtttttaaatgcagtcacttttgatttggtacagaattataatcaactagaggctacaggcattttagcctgctggagtttatattgggggttttgcaagacagcaatctccatttcttaaacatgtgctttagtaagacaaaatactatttctcagtagagcacaaccttgaagaaaatcaatgtaaatgttattctacttctcacctctttttttctacaaaactaaacactccaaacacaggcacagcaaactgcatttcgaaaggttttgtaagttaaacaagccaaggaagttacatggaaaaaaaawatctcctttgagatataaaactgttcatatctgaaggagactgtacagatagcagaagggaatatagtataatatttgatgaagagacgtaattatcatttatgaatgagaaagctcaatgttttcctaaattactcgaattaaacctcaaataaatatttgaagttctccatctaattcggctacaatgaaaaactgaatctcattacctctggatttacatcgactccaatttcaaagattatatttatttcagaggggatgaaaaagcatttttcactaggaagaaaatgaattgaggtttcaatataaaacaagactcactgcatattataaagaaagtgctagtctaaatttttttttccaaagaaaacttctaagaaaaagtcagagatatttcacttagtttggagataagtttaaataaatgacaattatgtgcctgtaatagtggtacaaacagatattgtatacctcaatttaagcatatttattatatcaactagagagtattattccttttatgaaataattcctcattctacaaaaacacgcagtataggatccatttagtaatgagctccccagtgtattctacctgtaatttaattcaattttcacagttttctagatacaacaattgcctcaagcaaggtaaacgtctttgccagtttaagtggatacgctgtagaaatcagatcagtgtgtgtatgtctgtacatctctttaaaagcttattgcaatgtggttataaaaggaacagtcagttgtccactattttcaccatatgcaatttcctcccatagattcacggccatatggagatgttcatcctgagccacctggatttccagcagggaaaacaaaaccaacaaacaaaacaggacatgacaatgaagatatcaaagaactgttatttacttttgctacaagaagtacagagaggattcatgattcttgaactatattttccaaaataagtgacagtcattcactttcttgacaaatatctatggagtactaacaataggccggacactatgatcgtcttttacaatatattctccctaaagaagattccaagtgaaaatatattgagagtgctcatcattctatatctcatacttgaaacattcataataggcgcgtcggccacttaagggctccaagaaatcttaaagaaacttgtttaatccaacagtgaccagatacatttaattatgtcattttcttttcctttcc

SEQ ID NO: 48818 - DNA, 1701 bp, Homo sapiens
tttctctagtcaatccctgaatatcttcaagcaattcatatgatttttctttggctttccccagaagaaattctgaaggggaaggaataaataattttgcattggccaagcattagtttgaaatgtctaagcttttctttatggaagtttttaaatgcagtcacttttgatttggtacagaattataatcaactagaggctacaggcattttagcctgctggagtttatattgggggttttgcaagacagcaatctccatttcttaaacatgtgctttagtaagacaaaatactatttctcagtagagcacaaccttgaagaaaatcaatgtaaatgttattctacttctcacctctttttttctacaaaactaaacactccaaacacaggcacagcaaactgcatttcgaaaggttttgtaagttaaacaagccaaggaagttacatggaaaaaaaaaatctcctttgagatataaaaytgttcatatctgaaggagactgtacagatagcagaagggaatatagtataatatttgatgaagagacgtaattatcatttatgaatgagaaagctcaatgttttcctaaattactcgaattaaacctcaaataaatatttgaagttctccatctaattcggctacaatgaaaaactgaatctcattacctctggatttacatcgactccaatttcaaagattatatttatttcagaggggatgaaaaagcatttttcactaggaagaaaatgaattgaggtttcaatataaaacaagactcactgcatattataaagaaagtgctagtctaaatttttttttccaaagaaaacttctaagaaaaagtcagagatatttcacttagtttggagataagtttaaataaatgacaattatgtgcctgtaatagtggtacaaacagatattgtatacctcaatttaagcatatttattatatcaactagagagtattattccttttatgaaataattcctcattctacaaaaacacgcagtataggatccatttagtaatgagctccccagtgtattctacctgtaatttaattcaattttcacagttttctagatacaacaattgcctcaagcaaggtaaacgtctttgccagtttaagtggatacgctgtagaaatcagatcagtgtgtgtatgtctgtacatctctttaaaagcttattgcaatgtggttataaaaggaacagtcagttgtccactattttcaccatatgcaatttcctcccatagattcacggccatatggagatgttcatcctgagccacctggatttccagcagggaaaacaaaaccaacaaacaaaacaggacatgacaatgaagatatcaaagaactgttatttacttttgctacaagaagtacagagaggattcatgattcttgaactatattttccaaaataagtgacagtcattcactttcttgacaaatatctatggagtactaacaataggccggacactatgatcgtcttttacaatatattctccctaaagaagattccaagtgaaaatatattgagagtgctcatcattctatatctcatacttgaaacattcataataggcgcgtcggccacttaagggctccaagaaatcttaaagaaacttgtttaatccaacagtgaccagatacatttaattatgtcattttcttttcctttcc

SEQ ID NO: 48819 - DNA, 1701 bp, Homo sapiens
tttctctagtcaatccctgaatatcttcaagcaattcatatgatttttctttggctttccccagaagaaattctgaaggggaaggaataaataattttgcattggccaagcattagtttgaaatgtctaagcttttctttatggaagtttttaaatgcagtcacttttgatttggtacagaattataatcaactagaggctacaggcattttagcctgctggagtttatattgggggttttgcaagacagcaatctccatttcttaaacatgtgctttagtaagacaaaatactatttctcagtagagcacaaccttgaagaaaatcaatgtaaatgttattctacttctcacctctttttttctacaaaactaaacactccaaacacaggcacagcaaactgcatttcgaaaggttttgtaagttaaacaagccaaggaagttacatggaaaaaaaaaatctcctttgagatataaaactgttcatatctgaaggagactgtacagatagcagaagggaatatagtataatatttgatgaagagacgtaattatcatttatgaatgagaaagctcaatgttttcctaaattactcgaattaaacctcaaataaatatttgaagttctccatctaattcggctacaatgaaaaactgaatctcattacctctggatttacatcgactccaatttcaaagattatatttatttcagaggggatgaaaaagcatttttcactaggaagaaaatgaattgaggtttcaatataaaacaagactcactgcatattataaagaaagtgctagtctaaatttttttttccaaagaaaacttctaagaaaaagtcagagatatttcacttagtttggagataagtttaaataaatgacaattatgtgcctgtaatagtggtacaaacagatattgtatacctcaatttaagcatatttattatatcaactagagagtattattccttttatgaaataattcctcattctacaaaaacacgcagtataggatccatttagtaatgagctccccagtgtattctacctgtaatttaattcaattttcacagttttctagatacaacaattgcctcaagcaaggtaaacgtctttgccagtttaagtggatacgctgtagaaatcagatcagtgtgtgtatgtctgtacatctctttaaaagcttattgcaatgtggttataaaaggaacagtcagktgtccactattttcaccatatgcaatttcctcccatagattcacggccatatggagatgttcatcctgagccacctggatttccagcagggaaaacaaaaccaacaaacaaaacaggacatgacaatgaagatatcaaagaactgttatttacttttgctacaagaagtacagagaggattcatgattcttgaactatattttccaaaataagtgacagtcattcactttcttgacaaatatctatggagtactaacaataggccggacactatgatcgtcttttacaatatattctccctaaagaagattccaagtgaaaatatattgagagtgctcatcattctatatctcatacttgaaacattcataataggcgcgtcggccacttaagggctccaagaaatcttaaagaaacttgtttaatccaacagtgaccagatacatttaattatgtcattttcttttcctttcc

SEQ ID NO: 48820 - DNA, 1701 bp, Homo sapiens
tttctctagtcaatccctgaatatcttcaagcaattcatatgatttttctttggctttccccagaagaaattctgaaggggaaggaataaataattttgcattggccaagcattagtttgaaatgtctaagcttttctttatggaagtttttaaatgcagtcacttttgatttggtacagaattataatcaactagaggctacaggcattttagcctgctggagtttatattgggggttttgcaagacagcaatctccatttcttaaacatgtgctttagtaagacaaaatactatttctcagtagagcacaaccttgaagaaaatcaatgtaaatgttattctacttctcacctctttttttctacaaaactaaacactccaaacacaggcacagcaaactgcatttcgaaaggttttgtaagttaaacaagccaaggaagttacatggaaaaaaaaaatctcctttgagatataaaactgttcatatctgaaggagactgtacagatagcagaagggaatatagtataatatttgatgaagagacgtaattatcatttatgaatgagaaagctcaatgttttcctaaattactcgaattaaacctcaaataaatatttgaagttctccatctaattcggctacaatgaaaaactgaatctcattacctctggatttacatcgactccaatttcaaagattatatttatttcagaggggatgaaaaagcatttttcactaggaagaaaatgaattgaggtttcaatataaaacaagactcactgcatattataaagaaagtgctagtctaaatttttttttccaaagaaaacttctaagaaaaagtcagagatatttcacttagtttggagataagtttaaataaatgacaattatgtgcctgtaatagtggtacaaacagatattgtatacctcaatttaagcatatttattatatcaactagagagtattattccttttatgaaataattcctcattctacaaaaacacgcagtataggatccatttagtaatgagctccccagtgtattctacctgtaatttaattcaattttcacagttttctagatacaacaattgcctcaagcaaggtaaacgtctttgccagtttaagtggatacgctgtagaaatcagatcagtgtgtgtatgtctgtacatctctttaaaagcttattgcaatgtggttataaaaggaacagtcagttgtccactattttcaccatatgcaatttcctcccatasattcacggccatatggagatgttcatcctgagccacctggatttccagcagggaaaacaaaaccaacaaacaaaacaggacatgacaatgaagatatcaaagaactgttatttacttttgctacaagaagtacagagaggattcatgattcttgaactatattttccaaaataagtgacagtcattcactttcttgacaaatatctatggagtactaacaataggccggacactatgatcgtcttttacaatatattctccctaaagaagattccaagtgaaaatatattgagagtgctcatcattctatatctcatacttgaaacattcataataggcgcgtcggccacttaagggctccaagaaatcttaaagaaacttgtttaatccaacagtgaccagatacatttaattatgtcattttcttttcctttcc

SEQ ID NO: 48821 - DNA, 606 bp, Homo sapiens
tccagtcaaaggaacccccaatcatcagatgtttttgttctgtacatggagaatcagcctaagkctgtctctgtgggcatgtgtgcttctgtggatttcccaagggccatgggaatggctgtggacacagagcaggcaaagtgtctgtgatcaggacatgatagagatgacactgtacttcctttagctgccctcggagacatcttgtgcctcatagcagaaggtagaagtggggagatttttgtctaataggacggtttcaggcactgtcagagctgtgggtgggttacgtaccatttcctcaagctgtacttgggggagaagttggggagaacttgtgcatttaactgcttgggttggcccagcagtgtttcttgctttttcaaccctcagagttctgaagcaatcgggaaatgttacaggaaggagaaagaggttttcagggacagaaggatagtgactagcagggcaatgttggaaatggaaaacaaaaaaacaaattttttaaaataagccttttacttgggaatattttagatttgcagaattattcagaagatgctacagagagtttttgtataccctacactcagtcttccctgttaa

SEQ ID NO: 48822 - DNA, 641 bp, Homo sapiens
catataggggatactagcttggaaggggagatacttagagaaaaaatgactttcagtgctatagcaaaaaggaatttaaaacatttcaaaagcccccaacctcagtacattccaaarcaggataaaataaatacaaacaaaaaatcaacacctacaccaaaccaggctaatataaaacaaaacctacttaaggtccagatttttttgtcccagcatttaaaaacagtgccagcatggactgaagtaaacacgctgcaatgatttctcagcttgggaaactgtcctttcttatatgtgagatgcctacagaggaagcagaaagatagtaatttctttcccttgcttttctgggagatggatctcagtgtttttgtcccttggtcctagccattttaaagagactgctgccagaagaaccacttagcacaattgtgaaaacctagtccccatccatagcagagatgctttcctttaagctgtactttttgagatattattgacatcaatatttgttaaaaccaaccttcgtggagctgttgctatgtaaaatatattacacttaggtcaccaagtcattagtccaatataggtatttggaagttggtttttagtcattctctttaattcaaatggaattaggg

SEQ ID NO: 48823 - DNA, 641 bp, Homo sapiens
catataggggatactagcttggaaggggagatacttagagaaaaaatgactttcagtgctatagcaaaaaggaatttaaaacatttcaaaagcccccaacctcagtacattccaaagcaggataaaataaatacaaacaaaaaatcaacacctacaccaaaccaggctaatataaaacaaaacctacttaaggtccagatttttttgtcccagcatttaaaaacagtgccagcatggactgragtaaacacgctgcaatgatttctcagcttgggaaactgtcctttcttatatgtgagatgcctacagaggaagcagaaagatagtaatttctttcccttgcttttctgggagatggatctcagtgtttttgtcccttggtcctagccattttaaagagactgctgccagaagaaccacttagcacaattgtgaaaacctagtccccatccatagcagagatgctttcctttaagctgtactttttgagatattattgacatcaatatttgttaaaaccaaccttcgtggagctgttgctatgtaaaatatattacacttaggtcaccaagtcattagtccaatataggtatttggaagttggtttttagtcattctctttaattcaaatggaattaggg

SEQ ID NO: 48824 - DNA, 2548 bp, Homo sapiens
ataacacatggcacataacgacccttatagcggagatattattatctctgccttaaatgtgaggaaattaagaaatgagaggttaaacatcttaccatagtaggtcacacgatacacgaagtagcaggtattctaagaagcagaatctgcatttatttagaggtaagcataacactaaatttattattacataaaaaatcagtccactttaaaagccactgtacatctgatgggactttggggtttgattgcagaattctctgcaatagggttgtttgggatgtaattaacatgacaaacaagggaaagacacaagtttagcaaaaagctcactttgagtggataaatttctctttttcctttttttaaacgagaaaggctggataaaaggcagatgaaataactgctgactgagtggagctcttgagctaaggacttgtactgtgaaaattctactttgtctagcaaacactatcaaacagaaaccttgaaaagagaacatttatgtttctcattttcttaaaaaaaaaatcagctctaacctcatgacttccctgacaacgctaaaagtcataggtggtaggaggaatatagaagctagaagcaaggcttctactccttgaacagtctctcattcccagcatcttagtttagctatggaggctgagtgaatgcacagacaacacaaactgaggtgtctttaggcagtccgttcagatgagtaactcagatcctctgcacaagcccctcccagggtaaaagtcaggaatttcaggtggcagtcccccaaaacaaaggcagatagaacaggtgactatatacaaagaccatgatttttcaatcacagccacatctaaacgaaaaagtcaaatacagtgattggtattaatatgatttgaacagaatcgtcattccaattgctccaaaggtgctgtggtttagtggtggagttttgtggtgggctttggagtacaaccgaacattcttcaaatgctaactctgcaatctactgccatatacattattttacctctcagagtgactgcttttcttcttgtaaaataaatgtaattcttatctcttggatttgagaggatttaatgagactacacagtaacacattacttggcatatagtggatgatgaaaaaatgtgaattttattattgtgttaaaaatgtgaattttcagatcctccaataagtagatgccaagatgagattcaatgtgcaagaaatttattagaggatatgcctgtgaaagaaaatgaggaggagggcaggagaggctggtggagctttcaggccatgatgcaagtccgaccctaggtgaaggagagaaagagggaagggtggaggaaccctaaattgccatgcatttctaaggaaagtctgtcaaggccatcaagcagtcctagagccaaattcgcccatcggaggatcctgcatctccagaaataggcctgcctcaacaaagatgccaggcttattcacaggctgggagcagcccgtgggaagcatagacttgcactgtgatgaatttccaaggcagcagctgaaaccctgggtcactcttgttccttgcagtcagagaggcatgttcttgtggtcaccaccagtattattcaatgcagattctttggcaaaccatgtgttattgcttctgaaaaggcaaaagagggcagagagagagagtgcatgcgcatacgagcacaatagtacacatagattaggaatacaaagatacagtctgggcatcttttaggttatatatttgttttaaaaatggaaatgaagtcatatggatgcaaaaggattccatatgaaattctaagatgattcttgtgattaaaagcaagttataaaaatacacaacttttaaaaactacttttaataaatcttttcctatttagagctgacattcatgaacaattgatcataggtttccttaaaatttactatttttcttttcttcttctttttctttcagtatacacaattaagaggtttttggcttctttttggtcttgtacttgttagagaatccgaggaaaaccactgaccttcttcgtctctaaaatgtacatatatccatacacattaaagggtacaattccaaagagtttatgggccctttaaggcccatcaaagaaacagtgcttacatttataaagctattaacctacatgattttaaactattttataatttttggactacatacttctgtggattaagataaacaaccagttattgctatcgagacctctgggtttttaaattcacaatctcagtgcacactaaggcctcattcatccaagctaacctgaatggggagagtctatgtggctgcacatttaaatacataaataaaatgcgtatttgtgtgagaagtttcttcttattccttctcttctgcatatgatatgtccagtttgggacagaggtgcacatgcttaagtcaatctgattatgcattaggtccttacttttaacatttttaaattgaccagttgtaggtstagccctgtgagtgtctgttacctcac

SEQ ID NO: 48825 - DNA, 608 bp, Homo sapiens
caaaacaaaatatttgaaatccactggagtaattaatctcaggtgcttgctggctccttctctctgtgagatattagagagtagggaggccattctggtgyctttcagatcctatcaggcagttctgatcttgtctggatcagcctgtgttattgggatcagcctgcattattgaagctacctaccacacggagtcttagaggaatcattctccccactttgagggctttctaggccataggcaatccaggattctagatccaatcagaaagatatggatgaaataaattttttgcaattttccctatggccgagacccactgtgaaaaagttctgggatggtgtgaggatctgactcaacaaatattcattgaacatcaaatataggctacacattagcttggtactgctaggtttgagctgatatttgtcattttgtttttgttgttgttgttattattatttgttgttgttgttattattatttattgttgcttttccatacctaattcagaaactccagttcctacaactttatagagtaagaaaatgtaggggttaatgtcctttcccctgctctacatatttccattgaattcttccaacct

SEQ ID NO: 48826 - DNA, 608 bp, Homo sapiens
caaaacaaaatatttgaaatccactggagtaattaatctcaggtgcttgctggctccttctctctgtgagatattagagagtagggaggccattctggtgcctttcagatcctatcaggcagttctgatcttgtctggatcagcctgtgttattgggatcagcctgcattattgaagctacctaccacacggagtcttagaggaatcatyctccccactttgagggctttctaggccataggcaatccaggattctagatccaatcagaaagatatggatgaaataaattttttgcaattttccctatggccgagacccactgtgaaaaagttctgggatggtgtgaggatctgactcaacaaatattcattgaacatcaaatataggctacacattagcttggtactgctaggtttgagctgatatttgtcattttgtttttgttgttgttgttattattatttgttgttgttgttattattatttattgttgcttttccatacctaattcagaaactccagttcctacaactttatagagtaagaaaatgtaggggttaatgtcctttcccctgctctacatatttccattgaattcttccaacct

SEQ ID NO: 48827 - DNA, 584 bp, Homo sapiens
tttcttattacatgatagttacctattaaaatggttcatgtgtcatatccaaaaaggatatagaggatggcactgagatttatttgcaaatctttgggtatcatttatttataaacgcaacatatacgtatagagatacaatgtatttttttttatcaattttgaattataatttagatttaaataagcatttttccccagaaccccgatattggaggaaaataaaaacacaacatcaagaaacacataagggtatatctggctgaaaatatagagtattttcagagaagttgggtcaaggttatccatcagaaatgattaacaaattaatattagaatgatattattctgttgtggtagtacaatatagctaggtaccctgaattggtggtgagccaccaatttttttataatcattatgcagctttgattgttacaactgaattatagtgatacctgtccaacagacaattttaagctagtctcagaataagaagagaagtacaactttctccaagatggataaaaaaataaacagattattattgttattgttattatatgcagcactaagcstatgcaaa

SEQ ID NO: 48828 - DNA, 515 bp, Homo sapiens
catctttatccatttcttctacttagccctttgccctcttgtgctttgctttttgctttgggggcaaaaagcccccacctatgaatgattgtcccacatctatgaatgattgtcccatatttgtccatttcttcaacttagctctttggctgttgtgctttgctttttgctttgggggcttttgtttatttggttttggatttttgatattttgtttgatcacaccattattcaaacccaaagacacgttcagggagtaggaaagaaaactcaacccacacagtactgggtccatcacagaggtgkattaaatatttatggacttcaaccaaacaatatctttactggtcagtacttaagagcaagatgaggaataaggttgaaattatttcctaagaagagggggtttatgttttagttatccattctgttcacacatgtgaggaagacgggatactgtagtagttaaaagggcagcttgcttcaaagctagccaaagctgagtttgaattcct

SEQ ID NO: 48829 - DNA, 509 bp, Homo sapiens
gagggagaaggattcagggcagactgctcctaaggatgaaacagcaaagatttgaactagggagacttcctttatgggagtctcagttgattattcataagggggtgaaaaggggtgttactagtaagcacgttctgtgtggtcctctgggtggcacatgcgcagtagctgtacatatttgttcagccatcacacgtctcatttaaatcataaatctccacccaggggtgcttttttttttttttttttctatcatagtaagcaaagtgtcagtctgaggacaggtaaaatcaaaatgtgcaggctgtctacaggggaaattccctactgaagatagctttgcttgaatgagcttaactgcaatgtgaatgctggggtttattgtgttaactgtatggacattackgttgctgggtccagaaaacatggttacttccttaacgcctagactgtctcccttgtaggtaatgtcatattacaggagagcaggagaagataaaatgctattt

SEQ ID NO: 48830 - DNA, 615 bp, Homo sapiens
ggaggccgaggtgggcagatcacttgtggtcaagagttcgagaccagcctgaccaacatggtgaaaccctgtctctactgaaaatacaaaaaattagccaggctttttggcaggtgcctgtaatactagctactcaggaggctgagggaggagaatcacttgaacctaggaggcagaggttgaagtgagccgggattgtgccactgcatttcagcctgggtgacagagcaagactctgtctcaaaaaataaatacttaaaatatgttttctgctggctaaatttttctcaagatgtctaaataaactagactctatattagaacccaaattcaaaacaacactctaaaactagaaattaaatattttaatataaatttataattttatgacattataaaakattaagctcccaaaaataaaagtataatatagtaatgagagaaacagaaagaccctctcaaacacatatacacataattgtcctatccatgtatctttatatacattatcacacttatgtccctaatggaaaagttgcaatagggtttataaatcagtgtagtattataaaatagtataatataataaaaagtagatattgctgtcagacttca

SEQ ID NO: 48831 - DNA, 492 bp, Homo sapiens
taagttttgaattagtggccaatattttcatataaaaatatgaaaatattgcagttggtatgttgatgagtggggccttatggggaagaaaaaggcacattggtattagcattcagagtgggaaaatgctacttgttctcttttgttcttgtaattcttttatacaagygacttctgtcgcttaaataagtcctcgaatgtttacatgatcaaaaataacttacctttattatttttgcctattaatgtatggtttataaatacagatgcttaaaggggttatagaaagaaaggtaaaggaatagaagtcagctggctgtaagacaaaccagccaaactggtgagctcatgttctcttatagaaaggatgctgcttctctgatcagtaaatggttgctggttgaatggggaaatggatgaatgagatctcagcaatgccagatgtttctgtttctcaagagaagtcagaatttgattttttttttttttttt

SEQ ID NO: 48832 - DNA, 561 bp, Homo sapiens
aaaatagaatcttaaaaattgcccgtccttctgaggcctcctgcacagtcatagcgccctgtggccccgcggccaagcgggaggagcaggcaggggaggttgcttccaggacgccaggacactggctgcaggtggagagaaacaggaggggcggctgtggtgagccggggctggcatccacctcctggcgacgcgacctaccagggaccttgccaaggggcctcagtcagccttctgttgatgacaygctgaggtcaggaccagggccacagcctgtgtctgacaagaagcagtttccagttatttggtgaatcagtgctgggggcctggcctgaggggtccagggagtcacacctgactccatgtccctctttcccacaaagtaggagagcgccatgggtcacctgcccgaaaaggcaggtccatcctctgcctgcagtcagaactcagggggatccctgaggccggcagcagagccacgaggacgcagtggcctggcggcgggtggggcagcgcgggagctgctttccaggccagacagacggagccgttctcctgccg

SEQ ID NO: 48833 - DNA, 633 bp, Homo sapiens
gcctgccaaagagcagatgcccagtgaatgtgtgccatgagggagaatcagccctaaagcttttatcctgaacttgttccctccataaacagtgcttagggtttagtggtgctggtggacctagcaatgtgtattaagatgaccaaaacaagccctaacttctttatcaggaaaggaggctcagataggtagtatattaacagtcacaaagctagttaagtggtgggaactggaagamcaaaagcttgcatttataaagcccccgacattctgccaagccatttgtgcacactatcttacttagtcctcaaaccaacctatcagatagggactctcatcatttccatttgtagataaggaacctgagatgtagggaggttactaacccaaggtcaaacagttcagtggtagagctgtgtttctaaagcactgtcttctcatcccatcaaaagattccaagcttttgtgtattattctcaatatgacagcggaaatcctcaagacaggccaaatactgatgagacatccactggccagtaacaagtcctatatttcttctcatgacaactgtgaccaaagtttaaaaggtgtggaaaaaccccaaaccataaagataatttctggggtctctag

SEQ ID NO: 48834 - DNA, 1049 bp, Homo sapiens
tatcccaaggttcaccttcccttggggctctcagcactttatcattgctccacctacatggacctagggagggggcttcatgccccctctaaaatcctggctgaggagtgggcataaaatcctccagattcctgggagctttgccgaggtcaagctggccctttaaaacaaggactaaagggaaacgcagaataaccaaaacccaaagatatgatctggggtcagtgtttcccagacttccctgaggataggaccccctggggtgcttgattgaatgtgtgcatagatttctggaaattcagattcagaaagtttgggttggggcctaggaatctgctttctaccagcatcccagataattctgacttgcagcagagttgagaacctctgaggtagctgtgtgatgggtcttgaagcgccttcccatcccagctgcctccatgttaaccccaccacctgggagcctgggtctggtccctgatcttttgtatcttgaaggccatgtattctcaaattccagacattttaacaagtgcattggggttttattgttgtagttgctaaagatgcagattcctgggccccattccaagagattctgattcagtaggtctatggtagggcctcaaaatctgcagttttaaactttaaggaattctaatgtcagtagtcaccggaacacagtttgaataaaattgttattggctgggcttgatggctcacacctgtaatcccagcactttgggtggccaaagtgggaggatcrtttgaggtcaggaattcaagaccagcctggtaaacatagcgagaccccaaagaaattttttacaaagaaaaaaattgtttttgacaaaggagagaaagagactcagaatgatgacagagtcctttctgcctctctaaagcctgcctcctcagtaagtggcactactcccaggtgactgattccaggaatgaccaggcctttcagggaagatcacattttctcttccctggcccagcaggctcaccttgctgaggatgatcagacctgaatagaatgcagtcac

SEQ ID NO: 48835 - DNA, 546 bp, Homo sapiens
atccagtgttttactggagtgcctgcgggatcaccaccacgtcagctcctacttgggctatgtcccttgccttttgtctcctgccagtcaccctctgctaggcactgggcactgccacacacggcaggtcactcygccaaatggtgttctatggtggggggcaaaatgactcctgttccttttgggcaatggtctgaacttcaagcagattattatactctaaacatctcagagggtgactcaacagccctttctgtcaccaccccctcaaccctgcaagactcagacctgagtgcaggggaagctggaccgggacagccatgtgactggtgggagaggcgaggctgtgcagcgctaagaccttcacctctcccactggtgactaagccttgtcactagatcacgcttgtcctcctgttcctttaggaggaggtttcccaggtatcagccactcgcatggagaaaattaagtttgtgggtggggggtgggcggaggggtgcatcgtcaacaggggatttggaacttagggaaactcaagtgggtct

SEQ ID NO: 48836 - DNA, 546 bp, Homo sapiens
atccagtgttttactggagtgcctgcgggatcaccaccacgtcagctcctacttgggctatgtcccttgccttttgtctcctgccagtcaccctctgctaggcactgggcactgccacacacggcaggtcactccgccaaatggtgttctatggtggggggcaaaatgactcctgttccttttgggcaatggtctgaacttcaagcagattattatactctaaacatctcagagggtgactcaacagccctttctgtcaccaccccctcaaccctgcaagactcagacctgagtgcaggggaagctggaccgggacagccatgtgactggtgggagaggcgaggctgtgcagcgctaagacctycacctctcccactggtgactaagccttgtcactagatcacgcttgtcctcctgttcctttaggaggaggtttcccaggtatcagccactcgcatggagaaaattaagtttgtgggtggggggtgggcggaggggtgcatcgtcaacaggggatttggaacttagggaaactcaagtgggtct

SEQ ID NO: 48837 - DNA, 497 bp, Homo sapiens
tccaggttcagatgcactaggcacagcaaagactgtgtgtaccactcaaccaaacacactgaattccagtgatggacatatttgactctcaagagccatgccctgtgatcttgttattgctaccctcctaggatgstttcagatacagccccatcaagaagcaagggggtgatgcagatggcccaggagctctctgctcttaccactcatacattcaaaaagcacttattgggcagccttagtgcacattggcctggcagagctctgcacttgacctggaggttacagggttaaggaggctaaggtctccctgcatctacccaaactgagaaaaccagcaccagatgaaggctaaatatcttgctgtttggttggttggacacagtggctcacacctgtaattccagcactttgggaggccaaggtgggcagatcacctgaggtcaggagtttgacaccagcctggccaacatggtgaaaccctgtctctactaaaa

SEQ ID NO: 48838 - DNA, 544 bp, Homo sapiens
accaaggtaaagagcgtctaaataatcactttgatggattaagattggaatgaagtttggctgaaaagaaactttccttatccatctaagtcagagtatctggtgaggagtaaagagtaggaggcaggccgggcgtggtggctgacgcctgtaatcccagcyctttgggaggctgaggagggcagatcacgaggttagatcgagaccatcctggctaaaacggtgaaaccctgtctactaaaaatacaaaaaattagccgggagtggtggcgggcgcctgtagccccagctactcgggaggctgaggcaggagaatggcgtgaacccgggaggcggagcttgcagtgagccgagatcgcgccactgcactccagcctgggcgacagagagagactccgtctcgaaaaaaaaagagtacaaggcaataaaattctctgtgatggtccggggtggactgttcactgcaggaagatctttgcaaatatcggggcggggggttttctaccacagatgcattttaaaatgggcacctgtgggcaaggca

SEQ ID NO: 48839 - DNA, 544 bp, Homo sapiens
accaaggtaaagagcgtctaaataatcactttgatggattaagattggaatgaagtttggctgaaaagaaactttccttatccatctaagtcagagtatctggtgaggagtaaagagtaggaggcaggccgggcgtggtggctgacgcctgtaatcccagctctttgggaggctgaggagggcagatcacgaggttagatcgagaccatcctggctaaaacggtgaaaccctgtctactaaaaatacaaaaaattagccgggmgtggtggcgggcgcctgtagccccagctactcgggaggctgaggcaggagaatggcgtgaacccgggaggcggagcttgcagtgagccgagatcgcgccactgcactccagcctgggcgacagagagagactccgtctcgaaaaaaaaagagtacaaggcaataaaattctctgtgatggtccggggtggactgttcactgcaggaagatctttgcaaatatcggggcggggggttttctaccacagatgcattttaaaatgggcacctgtgggcaaggca

SEQ ID NO: 48840 - DNA, 541 bp, Homo sapiens
caattcttttacataaaagtaatcatagtatatatactattatacaacttttttcrccaattaacaatgtatattaggtatttttcaacgtcaataccatataaagatttttgtttcattcttaacagcatattggccgaggacagtggctcatacctgtaatctcaacacattgggaggccgaggttggcagatcacttgaggccaagagttcaagactagcctggccaacatggcaaaactccatctctactaaaaaagaaaaatacaaaaacttagccaggcatggcgctgtgtgcctgtaatcctagctactctggaggctgagacatgagaattacttgaacctgggaggcagaggttgcagtgagctgagaccatgccacttcactccagcctgagtgacagagcgagactctgttaaaaataaataaataaataaataaataaataaataaataaataaataaaagatgtattcctttaagtggatggaatgttatttatttgataggtttcacatttatgtacaaaatcaatt

SEQ ID NO: 48841 - DNA, 541 bp, Homo sapiens
tgcctcggcctcccaaagtgctggrattacaggcatgagccaccacaaccggcctatatatttatttttgagacacagtcttgctctgtcaccaggctggagggcagtggcgcaatcttggctcactgcaacctctgccttaccagttcaagcaattctcctgcctcagcctcccaagtagctgggattataggtgcacgccatcatgcccagcaaatttttgtattttcagtagagacggtgtttcaccatgttggccaggatggtctcaatctcttgacctcgtgatccatttgctttggcctcccaaagtgctgggattataggcgtgagccactgcacccggccctttccggctttattaacccaggacttgcctggttgctggttctccagagatctccacagcagtggcaataataaagtctctcctccagagaccagggtctgcctctcttgtctggtgggaattttattccacaaaaattatgggcaccagctggggagaggcacaggggctgggtgtgttagacttctgaga

SEQ ID NO: 48842 - DNA, 567 bp, Homo sapiens
ctccgtctcaaaaaaaaaaaaaaaaaaaagagatcgagaccatcctggccaatatagtgaaaccccatctctactaaaaatacaaaaattagctgagtgtggtggcgtgcgcctgtaatcccagctacttgggaggctgaggcaggagaatcacttgaacccrggaggcagaggttgcagtgagctgagatcgtgccactgcactccagcctgttaacagtctttaaaaaaaaaaaatgaaatttgctagatgcagtggcacaaacctgtagtcccagctactcctgagttggcaagatcacctgagcctaggagttggaggctgcagtgggttatggttacacgtgtgaattgccactgcactctagcctgggcaacatagtgagatgctgtctttttttttttttttttaagtgaaattcttgttactgtcaatctttccttcaaattgtttctgaaggctttgtgcacccacattacttgcaagaaatattttcgtatgttttctgctaggaataagagactgcctataacaagtaaaattcctttagctgatgggtgtacttt

SEQ ID NO: 48843 - DNA, 652 bp, Homo sapiens
ggcaaacataattttaaaagatgctgcttaacaaatctgtagattttaaacattgacagtagcagtgctggttgaaatacagggaaatggagactgttactgttctaattacagtatatatgggattacaaatctttccagagagtaattggtcagtatatggcaaatgcctaaaaaaaatgcctgcatagaattggaacaactccagttctaggggtttgttctaagggaatttttaagggtatctgtggagaatttgctatgaagatgcctattgtagcgttatttatatttttgacaaatttttaaagagcaaaaatctaacaaaactatttgttaaataaatattggtatgtagtggaataaggaatgtgattaaaatggtaacaaaggcaaagttttaataacatggaatgatgcttaagtcatattaagtaaaaaagcwagttacaaaatagagcatattgtatgaccactttgttaaaatataggtacatttaggattatgaggtatttttgtattggtcattttgtttttcagtattttctaaattttttaaaaatgtacatggtatctgaagagtgtagttttataaagtaatgagaatggagacaataatgaggctttataaattatactttatcatctctc

SEQ ID NO: 48844 - DNA, 688 bp, Homo sapiens
ctttgtgtgtatgtgtctatgttgttgggttctttttgttgttgttgttgatgctgctgcttttttttttttttggtcaacctatttgtgtttggtttgcacagatttcaagaagtacatgacaatctgttagagagatcaggcctcctagaagatagtgatggataatgaagtaggtgacagacatgaggaaaaacagagcctacagaagtctttggctagtctatgctacagaccagggtaagtacctcgtctttgtcagcctctatttcttggtacaacaatccatatctctggttagcaatttcatcttcagataaatctgagttgttgatgtcctggtctcgggaactagcagaactctcagtgctagcattccaggaggtccccaaaatcaatggtcttgctatctcctggctttgttcccagcagctagcaatggcttgttccctacaatcacctgctagtaagtccaccttcagttcttccttgtgctcaactacatctgaatgtgtccagctattatctaagccttctgtatctctgataggccagtggttaatagaatccagacaactggcaaatccacttgcttggccatctggtataccagagaatcctgttatatccaaattattcattgctgaatccargcttggctgccagatttgacctggatctgttcccc

SEQ ID NO: 48845 - DNA, 594 bp, Homo sapiens
tgtttctgctctgccacccagttattttactctgtcttgagtaaaaggtatttcatcccaaaacgattgtttaagaaaaaaaatttggttcacttttaaagttcatttctaccaaatttccttttttttttttttttgagacggagtctctctctgtcgcccaggctggagtgcagaggctcaatctcggctcactgcaagctccgcctcccgagttcacgccattctcctgcctcagcctcttgagtagctgggactacaggcgcccgccaccrcgcccggctaatttttttaatgtatttttagtagagacggggtttcaccgtgttagccaggatggtctagatctcctgacctcgtgatccgcccgccttggcctcccaaagtactgggattacaggcatgagccactgcgcccggccataccaaatttcttagaagaaatttgttctattgacggtttccttgctttcaccttgtgtcataaaataacgctttatcttataaaatagcctgtagtaattccatttgagcattgttactcaagtcttcacttggaatttgcctaactccttcccctccccgaagtcacct

SEQ ID NO: 48846 - DNA, 594 bp, Homo sapiens
tgtttctgctctgccacccagttattttactctgtcttgagtaaaaggtatttcatcccaaaacgattgtttaagaaaaaaaatttggttcacttttaaagttcatttctaccaaatttccttttttttttttttttgagacggagtctctctctgtcgcccaggctggagtgcagaggctcaatctcggctcactgcaagctccgcctcccgagttcacgccattctcctgcctcagcctcttgagtagctgggactacaggcgcccgccaccgygcccggctaatttttttaatgtatttttagtagagacggggtttcaccgtgttagccaggatggtctagatctcctgacctcgtgatccgcccgccttggcctcccaaagtactgggattacaggcatgagccactgcgcccggccataccaaatttcttagaagaaatttgttctattgacggtttccttgctttcaccttgtgtcataaaataacgctttatcttataaaatagcctgtagtaattccatttgagcattgttactcaagtcttcacttggaatttgcctaactccttcccctccccgaagtcacct

SEQ ID NO: 48847 - DNA, 594 bp, Homo sapiens
tgtttctgctctgccacccagttattttactctgtcttgagtaaaaggtatttcatcccaaaacgattgtttaagaaaaaaaatttggttcacttttaaagttcatttctaccaaatttccttttttttttttttttgagacggagtctctctctgtcgcccaggctggagtgcagaggctcaatctcggctcactgcaagctccgcctcccgagttcacgccattctcctgcctcagcctcttgagtagctgggactacaggcgcccgccaccgcgcccrgctaatttttttaatgtatttttagtagagacggggtttcaccgtgttagccaggatggtctagatctcctgacctcgtgatccgcccgccttggcctcccaaagtactgggattacaggcatgagccactgcgcccggccataccaaatttcttagaagaaatttgttctattgacggtttccttgctttcaccttgtgtcataaaataacgctttatcttataaaatagcctgtagtaattccatttgagcattgttactcaagtcttcacttggaatttgcctaactccttcccctccccgaagtcacct

SEQ ID NO: 48848 - DNA, 956 bp, Homo sapiens
tcttctagaggttggcagtttcaattttgttgttgcttagtctctctcctagaaccaaagaatcgcagggtgggccaattgtctagcacaagcttttccaatctgcagtccacacacagcccaggatggctttcaatgtggcccaacacaaatttgtaaacttaaacattatgagattctgggccgggcgcrgtggctcatgcctgtaatccctgcactttgggaggccgaggcgggcggatcacgaggtcaggagatcgagaccattctggctaacacagtgaaaccccgtctctactaaaaatacaaaaaattagccaggcgtggtggtgggcgcctgtagtcccagctacttgggaggctgaggcaggagaatggcatgaacctgggaggcggagcttgcagtcagctgagatcgttccactgcactccagcttgggcaacagagcaagactctgtctcaaaaaaaaaaaaaaaaaaaaaaaaacatgagattctgtgtcttaaatgtcttaaaatattataagattttttgtgtgtgatttttctttcttttcttttttttttttttttttgctcattagctatcgttagtgttagtatgttttatgtgtggcccaagacaattctttttcttccaatgtggctcaaggaagccaaaaaattggacacccctggtctagcacaaaacttagcacaaaatctgctactacatggacaaatgcaaggtggacggatgaggggaacagatcaatgaacagttcagccagagcttgacagcatctctcttatagccccaactggtcctggggcatgtgtgtgagactctctgaatgtggcccccaccccgccctgtgtctacatcccctctggaagaggcttctctgtagaaactgcctgcctgcacctcccatccctggcctcaaatgggctccttgctcactccaatcccctcc

SEQ ID NO: 48849 - DNA, 580 bp, Homo sapiens
tttatttttatgctttggaagttatccagaatcatggaattctcaatcacagtcaatcacccaacctactcacctttccagtgtaatcttagtcaaatttttttttgttatccaatgagatgcagtatttcaactcagaaagataaatagagtgaatttatagagactattaactaagaacatacagttttatttatactcagaagcaagtagattatgtacatatatatgaagataaaaattaaaaggataattgtgtaaatttscatgtagagggctttgaaaacctgtttacttgttaatgccgttttgatgtattgtgtctttgttctcccgacccatcatccagagctctctgcaggagctaagtgctcatcagttccatgacttggaaactgtctaagtttagaggcacttgtatttgttagtaaataaggcaagatgatattgtttcacaggttttagtgccgaagactgaatagataagctgctccacccagtacactggtgttcatttcatggtcatctcatctgttaaccatggatataaaacatttatcttcaatgatggggttttacc

SEQ ID NO: 48850 - DNA, 580 bp, Homo sapiens
tttatttttatgctttggaagttatccagaatcatggaattctcaatcacagtcaatcacccaacctactcacctttccagtgtaatcttagtcaaatttttttttgttatccaatgagatgcagtatttcaactcagaaagataaatagagtgaatttatagagactattaactaagaacatacagttttatttatactcagaagcaagtagattatgtacatatatatgaagataaaaattaaaaggataattgtgtaaatttgcatgtagagggctttgaaaacctgtttacttgttaatgccgttttgatgtattgtgtctttgttctcccgacccatcatccagagctctctgcaggagctaagtgctcatcagttccatgacttggaaactgwctaagtttagaggcacttgtatttgttagtaaataaggcaagatgatattgtttcacaggttttagtgccgaagactgaatagataagctgctccacccagtacactggtgttcatttcatggtcatctcatctgttaaccatggatataaaacatttatcttcaatgatggggttttacc

SEQ ID NO: 48851 - DNA, 1932 bp, Homo sapiens
ttagagataggatctctctatattgcccaggctgaagtgcaatggctattcacaggcacaatcatagtacactacagcctcaaattcccagcctcaagccatccttccacctcagcctctcaagtagctgggacaacaggtgtgtgccaccacaccaggctaattttttttttcttttttttggtagagacagggtctcactatactgcccaagctggtctcaaacttctggcctcaagtaatcctcccacctcagcctcctgagaacttgagattacaggttcccaccacgtgtccgacctttgtatcttattattaacagtaattacttattcatatcagagctttattcagagcctttttactcataggtataatattaaactatattgatgcaatattagtaaactttattgaggtcacaagaacaaatgaaaggagctatgactcacaaattctacttgaaagttatcctacataaatacatacacatgtttccaaagatatatgaacaaggatattaaatgttgctttgtttgcaacaaacaaaaaatggaaaccgcataagtgcccctcaataggtgaatggttcactaaaggttttgagatcctgaagttattataaagaatgacagaaatcaacacatatactatcatggaaaaaattcaatatgtaagtgaaaaaactcttgccacagaatatgtgattattatttccatgtatgttatagtcatgcatatataatataaaaatgtattatatataataacatctatgcttgtaaagatcacgaaggaaacacatcaaaatgtaatagggattatttctgggcagagaatagaaaatagtttcagaaggactttctctttttaatcaatgtattgctcaagttgttcactataaatgtggattcatatattatttgtgtaattaaaaggatgagtgacagctgacatctttccactaacccagaagaatgttttaaaaaccaatcaaagtggaaagaacaactaagaattcatagctgtctaggtcatttagcatagtgaataaacatatcttcatgtacgtgaggatatcattacaatacagcactaagccatggtggtacttacacacctcatagctcaagacgtattaaaatattgtcaaaatttctgtttgaaaggcagcaaattatgtgatatgatttggaaaaaaatgtccactaaaaataatcgaagtacagtaataaagaacttgatactaaatagatacggttcagctgcatataaaattcacttgtacagtacctgcccaacactgccaggtgagtgaaaggtacagagtgaaccatcacactggccacactgggggttcttctgatgtttacaggctccactcaagagacagtattgcatccaataatctgctggtaaatgtttaacaactggctctggggatagttggggtgagtgctgacttgcagagtttctgatttccatgatgtaaataatccctccacggctgctttcaagttaccaatgagacattgctagtggggaagagattctcagttacagcaccacaccattctatagtrtttcctctacataggcccaatagatacaaaaacttcaagaacatatacagtataaccagtaaaaagtagtaaaataatcaagaagagataagttttgagtatcattgcctttgtttttcacatcgttcatgtaatggtaagtttatataaattttaataattgttatgtttaaaaatcagtttgcaaatttcctgtaattttgatccatcagctctcttaagctcgtacagctcgtacaggctggctctagcataccactgactgtaggagcgtacagatttgtatctggaacatttccacggagaatacttcaaggaaggggccaagtagatgctaatcagaattata

SEQ ID NO: 48852 - DNA, 2085 bp, Homo sapiens
gattggcttggaactgtaaaattagccatctgcctattaaaaatgtaaccagctgcatccgatgaaacacagtgactattgaaatgaactcatccgggagagaactcgagtcccctgcttggacatttttccaatctactgctagactgagacactccacaagcaaagagcctttcgtccttgtttggaggaaaacggcatgactctcaagaacgaagaagacttgcgggtttgttttgttgctaaaattctggcatttctcaggatgagttggacttgaagtgcagatttctcagtttgtctgccatttgtttaaaacacctccctgttgcaagaaaaataaaatataaaataaataarcacacccctagtgtctccctcccttcaagattttatggtaaatcctgggcatttctaacaaaccttaatccaagcctaaaatactctaagcagcacataataacttaaaactgagagctggtgccatagttattcctgcaagtgctaccatttcgccagatattaggcattctatatttaccacaaggtctgtttattaaaaatgagaactttcaatagcttgagctattttttccctaaagcgtaatggagcattaaaaaataattcattaactaattaacaaaactgtgtttatttacagtatataaaatgtttctatcaggaaaataacacaccataatacagcgttgtgttgacagcaaaacatctgcagcttaatttaaatgcatttactaaatgacgaggggaaatcaaaggatgtttaaacagctacttctctgcctgtgatttgtgtttctctttagaggtcacaggcaccaagaaaagatgccccttgggaagccagagctattttcaaaggtgctcaatacaaaaatctttatgcaattagggaaagaccggtctgcacatggcttggactccgagccagttaacacagatgggtccgtgcaaatgtcctaaatccaactgcttggaagtcactaagtactgttaggctgaaacatatgaagatgtctttttgtaggtcaaaatctgtcaaatattgacagctttattacattcaatctgatatttcccatttggacttccctccctcccttccttccatcctctcttccttctttccttcctttcttccttccttcctccctcttttttctttttctctcttccgcctttccttcctcccttctctttctttccctctctcttactctctctctccccctctcttctttcttacattgccttgggcaggatttttgccaacacaaaaaaattagactcaaagtaaattgaattgataaacttgcctatcattctattttaaaatgtgttttgctaggttcgttttcccactaaatctctcctctgctcctgcctgaaacttctcagaaggcaaagcgttttccatttgtttgtaggtttgattttcttgtcaccaccctaatatgaaattgcaagaaaattgtatgtgatgtggtagtaatcatattacatgccattcaggtgggtgtataaatcaaaatctctcagaagaaaagcttatagtctggtgataaaatcagcaataatacaggcaaatgttatgttttaagaatttgtccttcattcgcttagacctaaagcttagagtgaacctaggaattacaaaataaactagaaaaaaaaatcattttccccttaacacgcaagcatattcttaacgtctacctttgttagaatcatgcactaattataaaatgttttatttcagctctgctactcagaggccatccatgcagccttttgacagtaggaccctggttatgtaacagccataaggaaatttcccatagtaatttcacctgtttcagatgcaaacacattgtaagcctcttaagctacatagaacaaataggctatatcctgaaaactggagtactgtttaaaattagattttgttttaaagtctagttcagcaaattgtgctaactgaacagaattgttttaaccatgtccctctgtatttatacatgcgggggctgttaactcacaatactagtatctgttgtacaattaca

SEQ ID NO: 48853 - DNA, 529 bp, Homo sapiens
gaatttamaaaaatcacagacccctgaaactaacttgtttattttcatggatcccaggcccaaggacccctggtctggaagctcttacttttctcaacttcttactctgaattccacatatgtgaaatttctgtgaaatgaagttttcctctttaattttagccccttagattgagatattgcgtgaaaaccttggggacacctgtttttttattatcatcatgatacaagctcttccccttgagcaaggtcattggagtgaacatcagtccttgcgctgggctgctggcacaagatgatgtgtgggaaaccccagcccaggcctggtttcctctcttcaagccagataccatgtactggctttcatttcttctttccagttgtgggaataaagccaaagttcccttgtacattcactttacatgtttgaatatgcccttttgtataagtttgtgttcctctttttgccttttgcaaaatctgctgactaccacatcttggccattcagagaagaacaggtggatgctc

SEQ ID NO: 48854 - DNA, 616 bp, Homo sapiens
tccctagaatgtggacagctgtgtgtagacccacctgccgtgggagtaacaatggctcaggccagtcctccttccccaccatgtgggagagctggcaggttaccaatgcctggcctcccacatccggcagctccaggcctgtgtcctgcccaggtgtgtttcccatttagaaagtgagatctggagctctgattctcagccctgactgtacatctgatcacccagagagtttaaaaagtttgatgctcaggtcttcaagtttcagacttataaaatcattatctctgggtatgggacaggaggrtgggctatccagcaagagactgctgactccccgaggggccaagcctgcagccccggagatgccctggaaccctctctgcaatggcaaaacatgaactatatcaccactccccttctcactccaaattctaaaatgactatggctgtgattttgcagggtgtcatcggctacgcaactcatcatagcagcctgtagctcaacaggtgaaaagtctcccttcatttctcaatgatttttctcctatgatcattttactggagaagttgttcagcttggtcttttgagacagctcaggatcttacatatgatatg

SEQ ID NO: 48855 - DNA, 591 bp, Homo sapiens
aacattgatgagaacaaaatctgattcttggccagggccactgtatatgtggagttggcacattctccccatgcctgcgtggattttctccagggcctcaggtttcctcccgcatcccaaagatgtgcacgtcaagtactttgacgtgtctcttttgtcccagtctgatggagtgtggatgcgtgtgagtgcaccctgcaatggggatggcgccctgtccggggcgggttcctgtctggtgccctgagctgccaggagaggctccagccacctgagacccggaactggaatatgtgggtaaataattatctacttgtttttatgaacctttcttagatgtacatttcactcacattcatttcagtgtttaatattagaagtgttattratatcccttaataagaagtttggggatatttttgtgaccagaaatatgccataggaacttcactcctgtttatctaacttaggctgtgctaaaattgattttgttgtatgttgtttcacttaaaatcacagtttccaagaacctattgatgacattaagtgaggacctagcccatcaggggaggttgaatgacttgctgaggg

SEQ ID NO: 48856 - DNA, 1038 bp, Homo sapiens
tttaatttttcatcttgaagaaagacaaatactgtttctttaaaaagagaaaatatagaaaactattcatatcttaacagatagattaatctttgtagagagattgagtcaactgtatagttagccarcttcaaagttagaaagggcacagtccacacaggactactctcacttctgacaccacaagtttagaggtgatcccagaggactctcaaggtcaggaatttgctagaaggaactcaagtggtaatactcatgggtgtgatttatattataggaaaaggatatagatcaaaatcaaaagagatacataaggcagaattgagagatgtctaaacatagagcttctgctgtcctcacctcgtggcatcatgggctggcattaactcctcttgtccacagtatccactgggcattgccaaccagcaatgctcacccaagcctttggtgttcagagtttttattggaacccgatcgcatgccacctgcatggatgatcttatcttctagcccctcttggaggtgtaatgtgctaatgcttttggtcttcaatttctctagatgttggaaatgttattgcatagcccaaagccccatactaaatcctattgttagactgtctagtgaccaaatgcctcaggcaaaaaacacactcctgtcaggcaggacattccaggggcttaacgattgtctctttgtggccaaaggcagagggcaagaccagactctctttgggcaaggttaattctttactgcataaccttcctaggtcaaggttaaatgccattttgatttgattttatatatttagctctaagtttattttaagcataaacatcctggaattttatagtgtttctcctcagaaaattacattctgagatgcaattagaagggacttttgagcacagatttgaataagtgtcactgtagcaggtaaaacactaattattttgtagcatctcttttggctgcttaggggacttcttgattacttcttagcaggaggcagaatggtgtaacttaattatattttca

SEQ ID NO: 48857 - DNA, 1184 bp, Homo sapiens
ggaggctgaggtgggtcaatcgcttgaggtcaggagttcgagatcagcctggccaacatggtgaaaccctgtctctaccaaaaaatacagaaattagccaggcctggtggtgcgtgcctatagtcccagctactcgagaagctgaggtgggagaatcacttgaacctgggaggccgaggctgcagtgagccaagatcacgccaccgcactccagcctgggcgacagagtgagatcccgtctcaaaaaaaaaaaaatcaataaatgatctctccattacatgataaaaattaatctttaaagtttatcacaaaattgttacctttggtatagctcttcacttctttctctttgctttatttcttacttccctgtaattgggaggcaataaatagtcttctcttccaagagaatgtaggcagtcatcacaataaaaacagatgagacaaaaatgtccatgaaggctgggtgcagtgggggatgcctataatcccagctactcaagaggctgaagcgggaggatggcttgagcccagaagttctagaccagcctggacaaaatggcaagactcttcctctaaaaaaattttttttaagtcaacaaaagacttaagatggtaaggtcaggtgactatttggaaagaaagttggaagaaagactctggaggcggtgctcatgccagtgaggctgaggtcacctactcaattctcattaccaggatccctacatggcaacttcacctctccacgaaaaggttttcaaataagctgtaacactagtctcctcagaaacactaatttgaagaaaatacaaaacatagatttctccacattgttcattattctccacattattcagttgcattattcaggggcacccctcctctgtcatccacagttcatttgacatattattaacctgagwagaatatctgtgatttctatgttcttaaccttttttgatcatagaactctggaaatctgaagacatctatggatgctttttccaggaaaacacatatgcacacaaactttttaaatatttacctgtcaggtttaacacatctacagtagcaaccccataagctacctaactttaggactctcacctacaaaataccctggtttaccccacagcaacggttccctatgagagacaaaaaaagaaacaaacaacaacaacaaa

SEQ ID NO: 48858 - DNA, 531 bp, Homo sapiens
tcagcaattctgttacctcttgaacttcacttggaagccaaatgatgattcttttcacatgaaccagtgaagtgtgtgtgtgtgtgtgygcgcgcacacgtgtgtgtgtgtgtgtgtgcgcgcgcgcatgcacttgtgagagagaaagagaggttttctatttacttgggtaaataaatatcgcaaccaaagacaaatgcttgtttaaggtcttcagtgacagcagaagaacaagtacataagtaaacactatttctcttttaattctaaaagagcaagacagatgagggtatagaaggcaaaaaagaaaaaagagaggaatatatacactgtttaagtaaagatatctaccttacagccattagtaagatttgggctctaaaccaaaagagctctaatgtcttttaatgactttggttgtatgaaattttcaaagtaaaataattaagaattttaagctctatcacacttttaaatgcaaaggattgtcaaattaataatttttaaagggtgttataactccttaaaagt

SEQ ID NO: 48859 - DNA, 531 bp, Homo sapiens
tcagcaattctgttacctcttgaacttcacttggaagccaaatgatgattcttttcacatgaaccagtgaagtgtgtgtgtgtgtgtgcgcgcrcacacgtgtgtgtgtgtgtgtgtgcgcgcgcgcatgcacttgtgagagagaaagagaggttttctatttacttgggtaaataaatatcgcaaccaaagacaaatgcttgtttaaggtcttcagtgacagcagaagaacaagtacataagtaaacactatttctcttttaattctaaaagagcaagacagatgagggtatagaaggcaaaaaagaaaaaagagaggaatatatacactgtttaagtaaagatatctaccttacagccattagtaagatttgggctctaaaccaaaagagctctaatgtcttttaatgactttggttgtatgaaattttcaaagtaaaataattaagaattttaagctctatcacacttttaaatgcaaaggattgtcaaattaataatttttaaagggtgttataactccttaaaagt

SEQ ID NO: 48860 - DNA, 531 bp, Homo sapiens
tcagcaattctgttacctcttgaacttcacttggaagccaaatgatgattcttttcacatgaaccagtgaagtgtgtgtgtgtgtgtgcgcgcgcacrcgtgtgtgtgtgtgtgtgtgcgcgcgcgcatgcacttgtgagagagaaagagaggttttctatttacttgggtaaataaatatcgcaaccaaagacaaatgcttgtttaaggtcttcagtgacagcagaagaacaagtacataagtaaacactatttctcttttaattctaaaagagcaagacagatgagggtatagaaggcaaaaaagaaaaaagagaggaatatatacactgtttaagtaaagatatctaccttacagccattagtaagatttgggctctaaaccaaaagagctctaatgtcttttaatgactttggttgtatgaaattttcaaagtaaaataattaagaattttaagctctatcacacttttaaatgcaaaggattgtcaaattaataatttttaaagggtgttataactccttaaaagt

SEQ ID NO: 48861 - DNA, 531 bp, Homo sapiens
tcagcaattctgttacctcttgaacttcacttggaagccaaatgatgattcttttcacatgaaccagtgaagtgtgtgtgtgtgtgtgcgcgcgcacaygtgtgtgtgtgtgtgtgtgcgcgcgcgcatgcacttgtgagagagaaagagaggttttctatttacttgggtaaataaatatcgcaaccaaagacaaatgcttgtttaaggtcttcagtgacagcagaagaacaagtacataagtaaacactatttctcttttaattctaaaagagcaagacagatgagggtatagaaggcaaaaaagaaaaaagagaggaatatatacactgtttaagtaaagatatctaccttacagccattagtaagatttgggctctaaaccaaaagagctctaatgtcttttaatgactttggttgtatgaaattttcaaagtaaaataattaagaattttaagctctatcacacttttaaatgcaaaggattgtcaaattaataatttttaaagggtgttataactccttaaaagt

SEQ ID NO: 48862 - DNA, 531 bp, Homo sapiens
tcagcaattctgttacctcttgaacttcacttggaagccaaatgatgattcttttcacatgaaccagtgaagtgtgtgtgtgtgtgtgcgcgcgcacacgtgtgtgtgtgtgtgtgygcgcgcgcgcatgcacttgtgagagagaaagagaggttttctatttacttgggtaaataaatatcgcaaccaaagacaaatgcttgtttaaggtcttcagtgacagcagaagaacaagtacataagtaaacactatttctcttttaattctaaaagagcaagacagatgagggtatagaaggcaaaaaagaaaaaagagaggaatatatacactgtttaagtaaagatatctaccttacagccattagtaagatttgggctctaaaccaaaagagctctaatgtcttttaatgactttggttgtatgaaattttcaaagtaaaataattaagaattttaagctctatcacacttttaaatgcaaaggattgtcaaattaataatttttaaagggtgttataactccttaaaagt

SEQ ID NO: 48863 - DNA, 1861 bp, Homo sapiens
tcacttctttttcttggcatctccctttccaagcacacccactctcctggtttccattatctccctgcagacaactctcaactggctctaagaaagctcactataattttcagcaacctaattcagtcgtttgtccgtcacaaataacagctcaggaaaatcaaaggattttctcactagcatcttatcattccatgtcacctagcaactatcccagtgcttgatattctgctactagaaactccctactacacagataataccactggaaggtataaagccacttgactgacctctctccattcacagcatttataactgtaagaaattgccagtggttgactctttccgaccttcgaaagtggcaatttcatgtggttcagcttaatagtatttattaccttgtgctgtaataattttgtatctgtatctcccatgagactcaaagctgcttgattgaggagatcatgcttgcttctgcttttcatcaagttgcctagtacatgacactctgtaaggattagaccaagtaggtattgaataattgtttggcgaatttaaaaaattaaagaaacatttgaaatcaatgcaccagaggctagagacagagtgctaggaagggaacaggatggggacagggacaccagagcaaagatagagtcaaagacacatttccaaaatggcaattcatgccttgtgtcagttgtacccacctcacattctttaacacttaaggtttttctgggtagtaagtgcaatacattcttattataaaacaatatagacagttcagtatgtataaatgaggataaaatcaaaatcacccacaatctcaccactttgtgataataaccattaacttcaatattgatgaatttccttgaatgttttatctacaatatttctttcatatagttgatatcactctgtatgcacaaacttgtatcctttttctaaatcttaatatcataatattagcattttctaatgttagtagatgtacttcttaaatattgctttttaatgataaaggtttttttttttttttttacaaataaagatttgtctatattttgggttatttccttaacacatattcacaaaggtaagaattaaaaagtaattttaactaagtcaaggagcatgaaaagtttttagattcttggtacacatttttatccagtgttttaaaaaactactaccatagtacacatctccaatttcaatatctctatgtgagtgcttgccttatcatgaaaaagtcaatattgaatattattattattttattatacttttataacttcattggcaaaatgttaacctgccattttaaagtttgcctttgttagattattagagagattgaatttgttttcagacaaatattttattaagtatgttattttctcatgaaaatggtttgttcataacctttgccttttgatctattggaatgtgttttctaatcagcaagaatattagttttattttgcttattatatatttgaatttacttttacttttataaaaataatacctgcatatagttaaaagccacagggtgctaaaagatttgtggcaaaataacagcagtccctttctctgaagccctcctcaggacctattctcatgtgtcagaagcaactactttcaattttttagctgtttcttctaaacattttttgaccattttttgaggttgggttttaggtgagatctgccatggtatcctattatgaagacaaagattttgcctcttttagacagcctcctcattttcttcttaatccycctaaagtggttaaagtgcaatttttggttaaattacaagtcagtgtttctaaatgcaacgtggact

SEQ ID NO: 48864 - DNA, 516 bp, Homo sapiens
gagtagctaggattacaggtatccgccaccatgcccagttagcttttgtatttttcatagagacggggtttcaccatgttggccaggctggccttgaaatcctgacctcaggtgatccacctggctcagcttttcaaggtgctgggattacatcacacctggccccagctgtgttttcttaaaaagagatttctgtgtatacaagtaactttttatcaggaagaatatgggcactgaatttggaaaccttgatggcacaggacttctgtaactttacatttgtagggcatgtgactggrcaactgttagagatctgaaatgtttagtttatgttgcagatatgttcatccatataaagagtcagaactaaagcttgcatcctctttagtgtcttctgggcaatgttatgtatcgtaacgtaacaaaggactgattttggaagcaagcatcatagcagggtacctaccagattataaaacttctcataaatagatattacccatggtttaaatattt

SEQ ID NO: 48865 - DNA, 566 bp, Homo sapiens
ggcagacaggctgttaaaaataaaagcaggcctagtagaatacagaagcccggggagcttttccttactatttaatgaaaatgaagcgggttctctgagcctatatggttggagggaaggtgaggtgtgtgcagctgtgatcaggttacaaggcagtggcttgtaatttataaattagtgtgtaacgtgtcactgaggcagaagctgagggacgtagcactaacgggagtttcctgaaattgctcagataatgggagaaaagagtttgcgtgtctgatcaggtgggaagtgtgatattttaagaatcttccatatttccctgctggggagctaggactcagttcattgcttgttcttgcctggacgccgcacaccaggttagcagccaccagggggcaccaaagcagcccatcccagaggaaagcgtgggcctctgagccattgaaattcactcctgagcacacttccctttgagcccgcataacctgatgatggtgcagattcagcagtgcaacacgtggttggggcgtgtggatatggaatcacacagacaaggcttcygggtc

SEQ ID NO: 48866 - DNA, 587 bp, Homo sapiens
tatttcagatgtcatgtctcccacgagaccttcctgactctgtctacgcccaaagtcaaaagtcagcctccctcttgcaggcttcccagttataaggtacctccctcaagcactgatcacattcagccttgagttctggctctttgtgaacacgtttttctcttctactcaactctcaggtcactgggagtagaatccaaggcttgtctatggctgggatcctctgtagcattttacagtgtctgacataagtatgtgttgggctaaaattaaatgtcattttatttttctacttcttaatagactaaagaggcagaagagctacaaagtcaaggrttgttaggatctagttaaaactatatatgtttgtgtgtgtttctgtctataaatatatacatatacacatgtatctcctctctatatctaaatctatatctatctatagacagagacagggtctcgctctgtcacccaggctagagcacagtggtgtgatcatagttcactgcagccttgacctcctgggctcacactattctctggcctcagcctcacgagtagctgggactgcaggtgtgagacatcac

SEQ ID NO: 48867 - DNA, 551 bp, Homo sapiens
tgtttgaatagtttctcaggctggcagagaagtgaaacccattaagtagaaaactgggtggcatgcagctggtccagatgataggaaattagccaggtggggaccgagggcaaggatatatctggtgagaggcagggaactcagggttaggtctttggggccctgtgaggcataaaatgtcacagcagcacgtggtatttcaggtcttacaatrcaagcctgtgccctcagctgtgacccatttgcacccagaacaacacactgctggttacagttatttaaggaagcatcttttcctgaggaccttaatgaagacctgtgctcactccaccctcctctcctctctgtggtggctgctgcctggattccagcttcagccactggacttgggatttggaactgatgcctgtggaactgggtctctgtgaagagtggggaacctgctgagacttgttcttgggaattgagctatagactagaagattgtgcagtaaacaagaagaaagatcaccaagatcgtgacattggagaccttgctctactttaataaa

SEQ ID NO: 48868 - DNA, 551 bp, Homo sapiens
tgtttgaatagtttctcaggctggcagagaagtgaaacccattaagtagaaaactgggtggcatgcagctggtccagatgataggaaattagccaggtggggaccgagggcaaggatatatctggtgagaggcagggaactcagggttaggtctttggggccctgtgaggcataaaatgtcacagcagcacgtggtatttcaggtcttacaatacaagcctgtgccctcagctgtgacccatttgcacccagaacaacacactgctggttacagttatttaaggaagcatcttttcctgaggaccytaatgaagacctgtgctcactccaccctcctctcctctctgtggtggctgctgcctggattccagcttcagccactggacttgggatttggaactgatgcctgtggaactgggtctctgtgaagagtggggaacctgctgagacttgttcttgggaattgagctatagactagaagattgtgcagtaaacaagaagaaagatcaccaagatcgtgacattggagaccttgctctactttaataaa

SEQ ID NO: 48869 - DNA, 551 bp, Homo sapiens
tgtttgaatagtttctcaggctggcagagaagtgaaacccattaagtagaaaactgggtggcatgcagctggtccagatgataggaaattagccaggtggggaccgagggcaaggatatatctggtgagaggcagggaactcagggttaggtctttggggccctgtgaggcataaaatgtcacagcagcacgtggtatttcaggtcttacaatacaagcctgtgccctcagctgtgacccatttgcacccagaacaacacactgctggttacagttatttaaggaagcatcttttcctgaggaccttaatgaagacctgtgctcactccaccctcctctcctctctgtggtggctgctgcctggattccagcttcagccactggacttgggatttggaactgatgcctgtggaactgggtctctgtgaagagtggggaacctgctgagacttgttcttgggaattgagctakagactagaagattgtgcagtaaacaagaagaaagatcaccaagatcgtgacattggagaccttgctctactttaataaa

SEQ ID NO: 48870 - DNA, 553 bp, Homo sapiens
aaatttttcaagagtattttattgcaacattgaaasagggcatgtcaagcattgttagcctgccaaatcagaaaaaaaaagaaagaaaacaactaatgtaatacaataaatacccaagttgactgagaaaaagttctcacctgtccctggctcccaacttttcacctgacaatggaaaaatccccagaatttcacaagaaatactgtggggtccatgatacgaggagctgcccaggtattgataacaccccaagacctgctagagacaggactagagcactatcaatggtgggacttcctgggcgaggccacactgccagcagaagggcaggtgcccatgtagcgacctccctggagaagcaaggcatgcatacagtgggggagggagccaaagtcacaagacaaagcaaagcgacaggtgtcccagcttcctcaagggaggaagccaaggcaatgctgcacttgttgggttcaggctggggcacagactccagataaaaacacatcctcactgactcaggctctttcagtttcaagaaaaagcaatggttgg

SEQ ID NO: 48871 - DNA, 553 bp, Homo sapiens
aaatttttcaagagtattttattgcaacattgaaagagggcatgtcaagcattgttagcctgccaaatcagaaaaaaaaagaaagaaaacaactaatgtaatacaataaatacccaagttgactgagaaaaagttctcacctgtccctggctcccaacttttcacctgacaatggaaaaatccccagaatttcacaagaaatactgyggggtccatgatacgaggagctgcccaggtattgataacaccccaagacctgctagagacaggactagagcactatcaatggtgggacttcctgggcgaggccacactgccagcagaagggcaggtgcccatgtagcgacctccctggagaagcaaggcatgcatacagtgggggagggagccaaagtcacaagacaaagcaaagcgacaggtgtcccagcttcctcaagggaggaagccaaggcaatgctgcacttgttgggttcaggctggggcacagactccagataaaaacacatcctcactgactcaggctctttcagtttcaagaaaaagcaatggttgg

SEQ ID NO: 48872 - DNA, 553 bp, Homo sapiens
aaatttttcaagagtattttattgcaacattgaaagagggcatgtcaagcattgttagcctgccaaatcagaaaaaaaaagaaagaaaacaactaatgtaatacaataaatacccaagttgactgagaaaaagttctcacctgtccctggctcccaacttttcacctgacaatggaaaaatccccagaatttcacaagaaatactgtggggtccatgatacgaggagctgcccaggtattgataacaccccaagacctgctagagacaggactagagcactatcaatggtgggacttcctgggcgaggccacactgccagcagmagggcaggtgcccatgtagcgacctccctggagaagcaaggcatgcatacagtgggggagggagccaaagtcacaagacaaagcaaagcgacaggtgtcccagcttcctcaagggaggaagccaaggcaatgctgcacttgttgggttcaggctggggcacagactccagataaaaacacatcctcactgactcaggctctttcagtttcaagaaaaagcaatggttgg

SEQ ID NO: 48873 - DNA, 319 bp, Homo sapiens
gtgggggcgccgacggtttcccggcccyggcctgcagcttggaggagaagctgagcctgtgcttccgcccctcggatccgggcgccgagcccccgaggacggccgtgcggcccatcacggagcgcagcctcctgcagggggacgagtgagtgcggggccccggccgggagtgggcgggagcctcccctacccctcgcccgaccggcagccctacggccgcagctcctccctgcgccctccttccgcccggacgcgggagtccccgccctctcgcctccttcctccggccgtcggcctcggctcgcccagcaatttaaat

SEQ ID NO: 48874 - DNA, 543 bp, Homo sapiens
gcaaagaaacagacacatcatcagttccccttctccacgtgtcccaggctaagccaatccagtgcttcccattccactagccacactaattggctcaggaacggacattagattaaaacaggccaatcagagtgaatttcaggaatattgggagaagtcaccagaaaagaggactgctcccttctgaagctggacttgaacctgagaaaatgtgacctggggctgctggcggccagcttgtccccgttaggtgacaataagcagacagaagagccaagcagcyatggaggaaaatcaggtacctaaatttagctcaactcctgcctcattcagttatacaattcaataagttcttttcttcttcccagtttaaagtttactgtgttgtgttcactctcagttgaaaggatcttaactgatacagcaagtcaaagcctttttaggtaaagcatttgccatttgatccttgtggtatgattctggccacattattgtcaaatctcagatgtaacagcaattcatctgtaaatatgtcatatcttt

SEQ ID NO: 48875 - DNA, 1765 bp, Homo sapiens
caaagcttctccaagtgatgacataatgtctaaatatcccagccatgattccgtgtcaaatctttgatgagtgcccagcttcaaggaatccaataccaaggatccagattcatgcaatcattgcacagtcagagtaagacagtgttgctgaaactgtggggtccatctttgatgacatcaattctgaatctgctgtcccaggtcctattaagggaaagtgctccattttgctaaattaaaaacagaaaagtgtcagagaaataccatttcctcttagctgcaggagacattacagaagtaattaaactggattttggtgtgtcaggcacatttcttttattgacagtgacagtaattctgtaaatcaaaacctggaagcattttcagtgtgttgaagtgctaaagataaaacctaaggattttaaaattaaatctcattaaactaaaattgatctatagagtgcagtatgagaggctgctgcctgagttctaaatgcaacctctcttttgacattcagtgcctacggtatctgagtccctgaaagctatggccatgtaaagccaaatggagtaggtcttcagtattatctctcatttatggttttgaggtctccaggaaaattctctctccactatctcaatatttccttttctaatgttgtcagtaggttttgttaacatgcagtttttctggcattcttttattctttccacatttaagttcctccacaatcttatgcgacaactctacagcatgctttgttcttcacatgctctggcatcaactctttgattcagagaagtatagagacacactggtgtagtcaataccttttctttatgccttcatccctgctaaatgatgccctcatttgggctgtcctcttccttccctccttccgctctgcctaagaaaattcagcctgtggagatgatccagctcacatcaagttcatccagagtagtgcagtctttgattacttgatggttcttctgcttctgaacccaaatatttactgtctagagttgtctttttatgtgtataagtctttatttctcatctgtagtttattatctcattcttctgtttttggtattatttctcataacacttattaaatgctcagtaatatttgaagattggtgtcttggaggatccgttaattaactgtgtgtgtgtgtgtgtgtgtgtgtgtgtgtgtgtgtgtgatctttgcccatttctacagctcttttaagaaaatatgtacatgtcacatcacatctggcaggagtaatttattatgctttatcacattaatgaaaatgcatttttcaatatctttattccgtaactaggaacaaaatgctttgagtaaaggttctgtgtgtgtatctaggaaaagtttgtatgtgagtgtgtatgtgtatatgttcatgggcacgtatacatatcatgggagatgatggatttagcaaacattttctattttcttcacattccattgcagcagccctgatttgtatattatcatattaattatttttatttatttatttatttacttcgagatggattctcactctgtcacccttgctggagtgcagtggcatgattttggctcaccacaacctctgcctcccaggttcaagcgattctcgtgcctcagcctcccaaggagctgagattacaggcatgcgccactaygccccactgctttttgtatttttaggagagatggggtttcaccatgttgcccaggctggtcttgaactcctgacctca

SEQ ID NO: 48876 - DNA, 595 bp, Homo sapiens
tggatattttcgcctgaatacccagatcccatagatcaatgaagacgaccatgcgagaggagaaaagagacgagatggcaatacccacagcacgtttctatcctccatgctgagcacrctatgtagttaagaaatgtttgttgaatgaatgaatgagtgaatgaatacatgtatagccaagtgagctcggaaatactcagaggataccttttcctggtccctgtctgccatcactgtgactttccccagccacatacagggaagtgtagttcatctgatgggcagtttcaaagcagatgaaattagccagaatgccgaagactgcctttagtataggcacactttttcaagttttcatcagttaatgcattttcccctctcttgtaatgtagcttctagcttccaaaaaactgtatttcggaaaatgttcctaaggagaccaggactgctcatacgagaccacctcagctgagctgttgttagtaagcccgcagcctgctctgctctccttagctgtttcctcgtttaacatcgccactgaacacttgctctataccattaggcggccgctctggaggaaaatgaaggatttgct

SEQ ID NO: 48877 - DNA, 595 bp, Homo sapiens
tggatattttcgcctgaatacccagatcccatagatcaatgaagacgaccatgcgagaggagaaaagagacgagatggcaatacccacagcacgtttctatcctccatgctgagcacgctatgtagttaagaaatgtttgttgartgaatgaatgagtgaatgaatacatgtatagccaagtgagctcggaaatactcagaggataccttttcctggtccctgtctgccatcactgtgactttccccagccacatacagggaagtgtagttcatctgatgggcagtttcaaagcagatgaaattagccagaatgccgaagactgcctttagtataggcacactttttcaagttttcatcagttaatgcattttcccctctcttgtaatgtagcttctagcttccaaaaaactgtatttcggaaaatgttcctaaggagaccaggactgctcatacgagaccacctcagctgagctgttgttagtaagcccgcagcctgctctgctctccttagctgtttcctcgtttaacatcgccactgaacacttgctctataccattaggcggccgctctggaggaaaatgaaggatttgct

SEQ ID NO: 48878 - DNA, 548 bp, Homo sapiens
tcagcattaaaatacaaattagtcacatttggaawacaaccaacaaaagttttttaaactatagaaatacatatcaattaaactaggctgtgcgtagttaaaatccagtgtctgtactaacaaaatctgtcagcccaccatcatttatgttttataataaatatagtgcttaacagaatgtgggaataacattaccatgtattgacaagcctattatactttgaacaggtactacaaagaaagctgtaaagcaaatgtctttgttcactgtgaagtctgcatcgtagaataatccctagagatgaggaaggaagagtttcagacacaattagggccccttttaaagggtatcctcagtaaaatactgtgtataagttcttcagcattagcacatgtaccctctcttatgattgctaataagtcctctgggcctctagtcaactttctggtctttgctttaaaacctgtctcaactgaaaggcaatgaaaggtcccttcaagtcagataataggggtgtgcacagaagcaggtgagattgtttctctct

SEQ ID NO: 48879 - DNA, 1791 bp, Homo sapiens
ttggctggagcagctctgctccacatgctccacgtgtctctcctcctccctgggataataagctggattgagcatgttcttctcatagtaatgtgagatggacaaaagagaacagaaataggaggcatctttaggtcaaggcttaagagtattcagagaaaaaaatgcagaaaaaccacgagatacataggaagcgatataaattttctgagtggtaagattatgtgtaatttttcatttcttctgtttattttttctaaagttttaacaacaaaatgtactacttttataataaaatccaggcaaaaacttattttaaatatttcactaaactattcacaggtttcctatttcttatgtccttctcataattatttatatagaaaggaggccaactggagatagaagacctaatatttgatgttgtcatttatgtgtcaaaaagccatattttccttatgcgttgcctggcctgctgttgaatataaattgtgtatcactgataaacttaaagtggtagagaattataacgctaatataatccctgttcatttacttactttcctcattaaagaaaacacacacacacagagaattccatttgtttacaaaaatcacaatcttcttaaatttgctttgatttttgcatggacacaacaaaatgttttaatatagaaagaaagtacttaacaccttgagttgctggtattatttttcaaatttgtggtccttcatctcataatgacacayaaaagaaatgctttatgctcatctctgttctttgatttctttactcatgtaagtgaatttttttttcttttcctgtggactagcctagaaagccttatttccctcccccctcccttttttttggtgccataattagattgagtggtagatgtttctagtgaatcattctaccaattaggctaaaatattaaagacaagtaacttgagaaggaaactcacatatctatagcactttgcagcagatgtatcctatttacttctttattttattgcttaatgactggatctgaagtaattgcaccatttgacagatatttatttgtaaaatgtgattcattcagtcagacacttttcaaatgattttcatgccaagtgttaaaattgcgtaggcttgagtagctgtttcaaaagatgcaaacacacatgttaattccatgcatcaagcacatctactttcggctctttttattatagaaatatttcagttgacaaagagtgctagtgaacagacggcagggacttctggactttaatcaaccgcaatcactggcagagttcagaattaatttcctaaccatgaatcacctgcagacaatgaatcacgttctagagaattttgccaaacaaaacaagccatcatgccctatacaacttttgaggacagggctatggaaactcatttgactagcacagttgaaacagtgaaagggaaagaatactagcgaatactggaacaagctatcaaagagtgcctggtgactttcaacttaaaaaagacaaaggaaagcaagagttcagcaagaaaacactcctttctgaaacaacctatccattggttggcttctatccctaaattctagctattgacaatcaagataaaggattttttgactaggataggttctatccattatagcacagacgtcaaaacattttcacctattctttaatcaaagaatcagaaacttcttatttagtttctgtttcagacactgtatctccttggacagaaataaatgagggcaattagacaaatattca

SEQ ID NO: 48880 - DNA, 1417 bp, Homo sapiens
gcccagtggtaaggacctaggtcaataaagaccaatccattgtaagaaataatacagagaaatatcctataaccttcttgytcagttctctctaatgttaaaactgttatagttcactatcataataggagaactaacatttatgcaatccacaaacattattcggattttaccagttttatatgcactcatgttggtgtgttgcacactcacatgtgtgtgggtagtgtattgagttaaacgcaatttgatcacaggtgtaaatttctatgaccacccccacagtaaagacacaggacagcttcaccacaagaattcttcatgctactcctttatagacacagtcacctctctcccttccctaatccctatgatgttcttcatttctataatgtagtcatttcaagagtgctacataaatggaatcatattgtatgtaactattccaaattggctttttgtactcggaataaatcctttgagacccatccaagttgttgcgtgagcaatgtgttcctttacgttgcagattagtattccatgacatgaatgattcagtttgtttaaccattcacccattggatgacattttaattatttgcagttcagagttattacaaatacaactgctataaacattcatgtataggcttttgtgtgagcataaattttcatttttgtgagataaatgaaaggatgctattgccaagacttatggtaaacccatgttcagctttataataaacttctgacttgtttttgactcaaatttgtttacacaaatattaagggaatgcctatttaatatcaagaactatgctaatacctaagaaaaagtataacataacagatactgtccttgttcttacaaactagaggagaagattgtaaaaaaatcaaataaatgtaataacattttttatgaaggaatatctctgtgtctggatgggagaggacttctcaaatctaagggtcagggaaagatttcatgaggcatttaagcctgtgcataggctatcattcttgcttcttctctagaattgctttgaaatatcccttctgagaggtcctatgtagatttcattgcccagctcaactctggcttctaatgtgaccactgtgtctaactctggtttaattcatatgaaaaatgaggatggaaatagaacatcttctcaaggtttctataagaattaaataaagagtagatttaaaaatctttatcaagtacctggtttagagaaatgtaattcttattactattatatggcttttcattaacccaactcctgtaaaaaattatctctgccaaagatagccttgtgggatgatgtttagctttcattaagggatcttgcatgttttttctctggtgatagcagaagtgggttttctgtgttattttccaaagcaaagg

SEQ ID NO: 48881 - DNA, 1417 bp, Homo sapiens
gcccagtggtaaggacctaggtcaataaagaccaatccattgtaagaaataatacagagaaatatcctataaccttcttgctcagttctctctaatgttaaaactgttatagttcactatcataataggagaactaacatttatgcaatccacaaacattattcggattttaccagttttatatgcactcatgttggtgtrttgcacactcacatgtgtgtgggtagtgtattgagttaaacgcaatttgatcacaggtgtaaatttctatgaccacccccacagtaaagacacaggacagcttcaccacaagaattcttcatgctactcctttatagacacagtcacctctctcccttccctaatccctatgatgttcttcatttctataatgtagtcatttcaagagtgctacataaatggaatcatattgtatgtaactattccaaattggctttttgtactcggaataaatcctttgagacccatccaagttgttgcgtgagcaatgtgttcctttacgttgcagattagtattccatgacatgaatgattcagtttgtttaaccattcacccattggatgacattttaattatttgcagttcagagttattacaaatacaactgctataaacattcatgtataggcttttgtgtgagcataaattttcatttttgtgagataaatgaaaggatgctattgccaagacttatggtaaacccatgttcagctttataataaacttctgacttgtttttgactcaaatttgtttacacaaatattaagggaatgcctatttaatatcaagaactatgctaatacctaagaaaaagtataacataacagatactgtccttgttcttacaaactagaggagaagattgtaaaaaaatcaaataaatgtaataacattttttatgaaggaatatctctgtgtctggatgggagaggacttctcaaatctaagggtcagggaaagatttcatgaggcatttaagcctgtgcataggctatcattcttgcttcttctctagaattgctttgaaatatcccttctgagaggtcctatgtagatttcattgcccagctcaactctggcttctaatgtgaccactgtgtctaactctggtttaattcatatgaaaaatgaggatggaaatagaacatcttctcaaggtttctataagaattaaataaagagtagatttaaaaatctttatcaagtacctggtttagagaaatgtaattcttattactattatatggcttttcattaacccaactcctgtaaaaaattatctctgccaaagatagccttgtgggatgatgtttagctttcattaagggatcttgcatgttttttctctggtgatagcagaagtgggttttctgtgttattttccaaagcaaagg

SEQ ID NO: 48882 - DNA, 1417 bp, Homo sapiens
gcccagtggtaaggacctaggtcaataaagaccaatccattgtaagaaataatacagagaaatatcctataaccttcttgctcagttctctctaatgttaaaactgttatagttcactatcataataggagaactaacatttatgcaatccacaaacattattcggattttaccagttttatatgcactcatgttggtgtgttgcacactcacatgtgtgtgggtagtgtattgagttaaacgcaatttgatcacaggtgtaaatttctatgaccacccccacagtaaagacacaggacascttcaccacaagaattcttcatgctactcctttatagacacagtcacctctctcccttccctaatccctatgatgttcttcatttctataatgtagtcatttcaagagtgctacataaatggaatcatattgtatgtaactattccaaattggctttttgtactcggaataaatcctttgagacccatccaagttgttgcgtgagcaatgtgttcctttacgttgcagattagtattccatgacatgaatgattcagtttgtttaaccattcacccattggatgacattttaattatttgcagttcagagttattacaaatacaactgctataaacattcatgtataggcttttgtgtgagcataaattttcatttttgtgagataaatgaaaggatgctattgccaagacttatggtaaacccatgttcagctttataataaacttctgacttgtttttgactcaaatttgtttacacaaatattaagggaatgcctatttaatatcaagaactatgctaatacctaagaaaaagtataacataacagatactgtccttgttcttacaaactagaggagaagattgtaaaaaaatcaaataaatgtaataacattttttatgaaggaatatctctgtgtctggatgggagaggacttctcaaatctaagggtcagggaaagatttcatgaggcatttaagcctgtgcataggctatcattcttgcttcttctctagaattgctttgaaatatcccttctgagaggtcctatgtagatttcattgcccagctcaactctggcttctaatgtgaccactgtgtctaactctggtttaattcatatgaaaaatgaggatggaaatagaacatcttctcaaggtttctataagaattaaataaagagtagatttaaaaatctttatcaagtacctggtttagagaaatgtaattcttattactattatatggcttttcattaacccaactcctgtaaaaaattatctctgccaaagatagccttgtgggatgatgtttagctttcattaagggatcttgcatgttttttctctggtgatagcagaagtgggttttctgtgttattttccaaagcaaagg

SEQ ID NO: 48883 - DNA, 1417 bp, Homo sapiens
gcccagtggtaaggacctaggtcaataaagaccaatccattgtaagaaataatacagagaaatatcctataaccttcttgctcagttctctctaatgttaaaactgttatagttcactatcataataggagaactaacatttatgcaatccacaaacattattcggattttaccagttttatatgcactcatgttggtgtgttgcacactcacatgtgtgtgggtagtgtattgagttaaacgcaatttgatcacaggtgtaaatttctatgaccacccccacagtaaagacacaggacagcttcaccacaagaattcttcatgctactcctttatagacacagtcacctctctcccttccctaatccctatgatgttcttcatttctataatgtagtcatttcaagagtgctacataaatggaatcatattgtatgtaactattccaaattggctttttgtactcggaataaatcctttgagacccatccaagttgttgcgtgagcaatgtgttcctttacgttgcagattagtattccatgacatgaatgattcagtttgtttaaccattcacccattggatgacattttaattatttgcagttcagagttattacaaatacaactgctataaacattcatgtataggcttttgtgtgagcataaattttcatttttgtgagataaatgaaaggatgctattgccaagacttatggtaaacccatgttcagctttataataaacttctgacttgtttttgactcaaatttgtttacacaaatattaagggaatgcctatttaatatcaagaactatgctaatacctaagaaaaagtataacataacagatactgtccttgttcttacaaactagaggagaagattgtaaaaaaatcaaataaatgtaataacattttttatgaaggaatatctctgtgtctggatgggagaggacttctcaaatctaagggtcagggaaagatttcatgaggcatttaagcctgtgcatagrctatcattcttgcttcttctctagaattgctttgaaatatcccttctgagaggtcctatgtagatttcattgcccagctcaactctggcttctaatgtgaccactgtgtctaactctggtttaattcatatgaaaaatgaggatggaaatagaacatcttctcaaggtttctataagaattaaataaagagtagatttaaaaatctttatcaagtacctggtttagagaaatgtaattcttattactattatatggcttttcattaacccaactcctgtaaaaaattatctctgccaaagatagccttgtgggatgatgtttagctttcattaagggatcttgcatgttttttctctggtgatagcagaagtgggttttctgtgttattttccaaagcaaagg

SEQ ID NO: 48884 - DNA, 1417 bp, Homo sapiens
gcccagtggtaaggacctaggtcaataaagaccaatccattgtaagaaataatacagagaaatatcctataaccttcttgctcagttctctctaatgttaaaactgttatagttcactatcataataggagaactaacatttatgcaatccacaaacattattcggattttaccagttttatatgcactcatgttggtgtgttgcacactcacatgtgtgtgggtagtgtattgagttaaacgcaatttgatcacaggtgtaaatttctatgaccacccccacagtaaagacacaggacagcttcaccacaagaattcttcatgctactcctttatagacacagtcacctctctcccttccctaatccctatgatgttcttcatttctataatgtagtcatttcaagagtgctacataaatggaatcatattgtatgtaactattccaaattggctttttgtactcggaataaatcctttgagacccatccaagttgttgcgtgagcaatgtgttcctttacgttgcagattagtattccatgacatgaatgattcagtttgtttaaccattcacccattggatgacattttaattatttgcagttcagagttattacaaatacaactgctataaacattcatgtataggcttttgtgtgagcataaattttcatttttgtgagataaatgaaaggatgctattgccaagacttatggtaaacccatgttcagctttataataaacttctgacttgtttttgactcaaatttgtttacacaaatattaagggaatgcctatttaatatcaagaactatgctaatacctaagaaaaagtataacataacagatactgtccttgttcttacaaactagaggagaagattgtaaaaaaatcaaataaatgtaataacattttttatgaaggaatatctctgtgtctggatgggagaggacttctcaaatctaagggtcagggaaagatttcatgaggcatttaagcctgtgcataggctatcattcttgcttcttctctagaattgctttgaaatatcccttctgagaggtcctatgtagatttcattgcccarctcaactctggcttctaatgtgaccactgtgtctaactctggtttaattcatatgaaaaatgaggatggaaatagaacatcttctcaaggtttctataagaattaaataaagagtagatttaaaaatctttatcaagtacctggtttagagaaatgtaattcttattactattatatggcttttcattaacccaactcctgtaaaaaattatctctgccaaagatagccttgtgggatgatgtttagctttcattaagggatcttgcatgttttttctctggtgatagcagaagtgggttttctgtgttattttccaaagcaaagg

SEQ ID NO: 48885 - DNA, 844 bp, Homo sapiens
tgcaataaccaacacttgtccactagatcctacacattattgtttacttaagaaagttgttctagaaaacctcacccctttgtttaattgataagtatccctctctcaaagattactcccatcaacatatagacacgctgctgctcttaaaaagcaaaatcaaaacacctctcgtgagtcaagcagccgtgacctgaccctgatcagtcttttagcatcattaacagtgagacatctagatagtgtgtgccttctgatgtgacgtgacatgaagcacctatgaaaaattctttttttttttttttttttttttagagacaaggtcttgctttgtcacccaggctggagtacacagtggcacaatctctgttcaccgcaacctccacctcccaggttcaagcgattctcctgcctcagcctcccgagtagctgggatcacaggcgtgcaccaccacgccctgctaaccacctatgaaaaattcttgcccaaaatgtttaatctgtatattatcaagctgtcatacacaattccagtttttaggaaatacagaagaaagaagaacaagtcaaatagcgccaaaggaaaattatcagacaaatccagaaggtaggacttcctatgggacaactgaactggtttcatcaacaagtaaatgggaataaaaaacaaatggcttcrcagatataataatatgtaatacgtacaccttgtctgaatcttggtttgattcaccttggggacaaatggggatattggaacatagattggttattatatggtattaagaaattattgttaattttgttaggtgtataaaagtattgtggttatataaagaaaaag

SEQ ID NO: 48886 - DNA, 560 bp, Homo sapiens
cttgttgtcaccattttctaggtactcatcttggtatcagtcaggatagcctaagttatgctgtgggaaaaaacaagtccccaaactcactcagactatgctcattgaaggttggctgggtctatgctgtctctgtgcgttcataattgcgatggttgattatatgtgwcaattttactaggccatagggtgcccaggttaaatgttatttctgaatgtgcctgtgagggagggtcattctggatgagattagcatttgaatcagtgggctcaatgaagtaggtggccctacacaaggtgggtgggtatcatccaatcttttgaggacctgaatagaacaaaaggtggaagaaggagaaatttcccccactttttcctgcttcactgcttgagctgggatatctcatctcatccccttctgaccttggatacaaatttacaccatttcctctaggcctttagattcagaatgaattatatcactggatttctgtgtctccagcttgccaatgacagatcatgggccttctcagacttcatcgttgcattagccacttcct

SEQ ID NO: 48887 - DNA, 575 bp, Homo sapiens
tcttaattatattaattgtttggatgtacataatctagaaggatatataataaatggttatttttgagtgataggattattgacatttttacttgcttttttggctaatttacattttctaatttgtctacaacctacttgttttgttgcaataatataaagttacttataattaaaaaattaaagtgacaacttttttcagtttaaaaaaaattcaatttgaaatacaatttcaaaaaaaagaagttgacttgttttgactcaagaggtgtaaacatacagttacaaagtgatatatgcaagttaacaaagaacaggattcaccacagagagtggaagaatgagctgtttctgggtgtgtgagttgaacagattaattaacagtaactrggtggtgtacttgtctataagtgtcctgtacggggagctaaggcaaaaaggaaccacaggaggtgagactgttttcattttcctgaaaggaaaggcaaacagattcacctgcccaggcacattcctccagatataaagatgctttatgtgtagataatgctgtttaaaaaattacataggtcatc

SEQ ID NO: 48888 - DNA, 547 bp, Homo sapiens
gcattatatatcaatgctcaaaacatttcagattttacagcatgtcagatttcagattttcagattagggatgctcaacctgtgtatgtatgctttcagtatgtgtgtgtgtgtgcatctatactaaatgcttaagaggatattaaatgtttaaaaggataccagttctgggccaggcatggtggctcacacttgtaatcccagcattttgggaggccaagtcgggcagatgacaaggtcaggagttggagaccagcctggccaacatagtgaaaccccgtctctactaaaaatacaaaaactggccgggcatggtggcacgtgcctgtagtctcagctacttgggagtccgaggcaggagaattgcttgaacctgggaggcagaggttgcagcgagtcgagatcatgctactgcactgcagcctgggcgacagaacaagactctgtctcaaaaaacaaacaaacaaaaaaggataccagttttgtaatatattatgattccacatgtcattctgaagtattccacacatattartaccttagaaaa

SEQ ID NO: 48889 - DNA, 536 bp, Homo sapiens
taacaggtaaatgtctcacaaagaactttttagtattagctgagtttaatgatagtttggggaaatggaaagggttcacagtgcagcgttgtaaatgtcaaaattgcatattaaacatcttggtcctttaaaaatatccatctgtaggtatttttgaaaatcaggctttagcctttctctgtattatttatttatttgtttttgaggtggaatcttgctctgtggccaggctggactgcagtggcacgatcttggctcactgcaacctctgcctcttaagttcaagtaattcttctgcctcagcctctsgagtagctgggactataggcgcgtgccaccacgcccagctaatttttgtatttttagcagagacggggtttcaccatgttggccaagatggtcttgatctcttgacctcatgatccgcctgcctcggcttcccaaagtgttgggattacaggcgtgagtcaccacgcccggccctttctctgtgtttttagagcctccctctcctctcattctcttgaaagccaaac

SEQ ID NO: 48890 - DNA, 599 bp, Homo sapiens
tgaccaggctggtcttgaactcctgacctcagatgatccacccacctcggcctcccaaagtgttggaattacaggcgtgagccaccgcacctggccgakagtttttcttgtgtctgcttcatcttcattgccttcagctcaaaatgatcttaaggttaaagtgttgtactttggggagtggcatgttgaccccttcacagatgttcttcataatgaatagtgcttctcctctgctccgtttcccaaatctttcatttcaaccagtcacagccttttattgctccattccaactctgatcctatttcattgagtttcatcattgatatcaaaacaaggataaatgtcaaaccccagagtaatctggtgtccactctaaaatctgctcatctggcctttcaagtcttctttggttactcagtgatgggcaaaaaccccaacgttttcctgaggatgggctttttatctatattattcaaactcttaggcatttttatctaagatatatttccagtgatgatataaatcaattccagaatcatagattaaagtgaattcaaagcatatataacaatttcaaaaatattcatacccaataatt

SEQ ID NO: 48891 - DNA, 599 bp, Homo sapiens
tgaccaggctggtcttgaactcctgacctcagatgatccacccacctcggcctcccaaagtgttggaattacaggcgtgagccaccgcacctggccgagagtttttcttgtgtctgcttcatcttcattgccttcagctcaaaatgatcttaaggttaaagtgttgtactttggggagtggcatgttgaccccttcacagatgttcttcataatgaatagtgcttctcctctgctccgtttcccaaatctttcatttcaaccagtcacagccttttattgctccattccaactctgatcctatttcattgagtttcatcattgatatcaaaacaaggataaatgtcaaaccccagagtaatctggtgtccactctaaaatctgctcatctggcctttcaagtcttctttggttactcagtgatgggcaaaaaccccaaygttttcctgaggatgggctttttatctatattattcaaactcttaggcatttttatctaagatatatttccagtgatgatataaatcaattccagaatcatagattaaagtgaattcaaagcatatataacaatttcaaaaatattcatacccaataatt

SEQ ID NO: 48892 - DNA, 553 bp, Homo sapiens
taaaaacttttgttctgtctttctgtccatcttcttgctgtttgaagaagcaaagagcttattgcaaaaagcaagattgtgcattgaagcaatgcacaggatattgattgcttctattccctgaggttctgagtcaatctatatacacaccagtagtgtctaacttacaatttatgctcccaacatttgcttgtaaattggctttttggaatgctgaatgcaatttccctggaaaacaaagttataaatcatatttgggctccccagcgagtccacagcaacctatttaacccataacacagcacttttcctgatagggaatrcactaaccataacatttcagaaagggcaggtgtctttttagcatcccctcgcctatacttctatatatctctcacacattgcagtacctctccttgaactcttgattttataccttctttgaagagtagggcaagttaggaattttttcaagagggttgttgataacacaaatacatccaactgatgatatttcaagtagcttagaaaagtgaaggaaaacattttacat

SEQ ID NO: 48893 - DNA, 525 bp, Homo sapiens
tgatcrcttttatcagaaacaaaaatttcagaagagtctgctcacttgtgtgtcacaaatcgtgaaagggaaagggaattatgtccatgccatatgtgaaccatagagttaggcagtaatatcatatcatctgcagtacagctgcttcatttaaattcaaactctaacatttatagtttcaatagttgttattgtgggctgtatacatgacattaaaaatcatatttgaggaagttcttgaatttggtagctgatttagattataaggtctcttccaactctaagatattagagtctattaggacacaaatgtagtcttgggaataagaacttgagggtgaaatatccagagttcaacaccagtgtttaatgctgcattgctaccattttggataataaaaatgacaattattttggtttcataaaatctgtttatctgtttatagtgtttggctggaaagatgttatcacttactgccaaatttttaaagcaaataaaagaaaaaggagtatcaaccaaaaacc

SEQ ID NO: 48894 - DNA, 526 bp, Homo sapiens
atatatataactatatgtatattcaagtatatatattgtagactatatatattcaatatatatattgtcttctatatatatatgtcttgaatatatttgttaaattgaattgaattatctatggttttagaaccctgaaatttggccttttccttgtttttgcatttgtttaaacttagatataatggagttttggggctttgagttcaggtgttgtttgcttttttatttcaaggttttaaccagtattgcttagttatttaaaaattagtgtamttttatcattttagtattctaaatgctggtaaatgtgtgtgtatatataaaatatatataatatattaatatctattattaatttctatattaatatattgttatttattaatttatacattaatatattatgttatatattaatttatatattaatgtactatgttacatatttatatatgaatatattctgttatatagttatatatgaatatatattgatatattctgttatatattaatttatata

SEQ ID NO: 48895 - DNA, 598 bp, Homo sapiens
ggggtctttgcagatgtgactaaattaaggatttgcagaggaaatcatcctggattgggtgggtcctaaatgcaatggcaagtcctaagaagggaagaagagaaaggaagggaaaggaagagaagagaaggggtgggtgggaaacagacacagcaacacaggaaagaaggccgtgtaaagacccayatgaagatgaaggcaggcattcacgttaagctgccacaacccaaggaataccagaaaccactagaaactggaaacagcaaagaagaatcctcctctagaccctagagtgtctggaggaagcctggccccacccacaccttgatgcctgactatggcctcaagaactgtaagagaatacacttccattgtcttaagccacccagcgtgtgataatgtattactgcagccctaggaaattaatacaggcacctgagccattaatgaagtaattgtgaaaagccatcctttgcctgtggttaccacatgtgacctgcagtctcatgggaaacaggtatcatccacatggccagaagcagaagctttcagattgaagagacctaggctgaatccagattctgacaattactcacag

SEQ ID NO: 48896 - DNA, 598 bp, Homo sapiens
ggggtctttgcagatgtgactaaattaaggatttgcagaggaaatcatcctggattgggtgggtcctaaatgcaatggcaagtcctaagaagggaagaagagaaaggaagggaaaggaagagaagagaaggggtgggtgggaaacagacacagcaacacaggaaagaaggccgtgtaaagacccacatgaagatgaaggcaggcattcacgttaagctgccacaamccaaggaataccagaaaccactagaaactggaaacagcaaagaagaatcctcctctagaccctagagtgtctggaggaagcctggccccacccacaccttgatgcctgactatggcctcaagaactgtaagagaatacacttccattgtcttaagccacccagcgtgtgataatgtattactgcagccctaggaaattaatacaggcacctgagccattaatgaagtaattgtgaaaagccatcctttgcctgtggttaccacatgtgacctgcagtctcatgggaaacaggtatcatccacatggccagaagcagaagctttcagattgaagagacctaggctgaatccagattctgacaattactcacag

SEQ ID NO: 48897 - DNA, 598 bp, Homo sapiens
ggggtctttgcagatgtgactaaattaaggatttgcagaggaaatcatcctggattgggtgggtcctaaatgcaatggcaagtcctaagaagggaagaagagaaaggaagggaaaggaagagaagagaaggggtgggtgggaaacagacacagcaacacaggaaagaaggccgtgtaaagacccacatgaagatgaaggcaggcattcacgttaagctgccacaacccaaggaataccagaaaccactagaaactggaaacagcaaagaagaatcctcctctagaccctagagtgtctggaggaagcstggccccacccacaccttgatgcctgactatggcctcaagaactgtaagagaatacacttccattgtcttaagccacccagcgtgtgataatgtattactgcagccctaggaaattaatacaggcacctgagccattaatgaagtaattgtgaaaagccatcctttgcctgtggttaccacatgtgacctgcagtctcatgggaaacaggtatcatccacatggccagaagcagaagctttcagattgaagagacctaggctgaatccagattctgacaattactcacag

SEQ ID NO: 48898 - DNA, 598 bp, Homo sapiens
ggggtctttgcagatgtgactaaattaaggatttgcagaggaaatcatcctggattgggtgggtcctaaatgcaatggcaagtcctaagaagggaagaagagaaaggaagggaaaggaagagaagagaaggggtgggtgggaaacagacacagcaacacaggaaagaaggccgtgtaaagacccacatgaagatgaaggcaggcattcacgttaagctgccacaacccaaggaataccagaaaccactagaaactggaaacagcaaagaagaatcctcctctagaccctagagtgtctggaggaagccyggccccacccacaccttgatgcctgactatggcctcaagaactgtaagagaatacacttccattgtcttaagccacccagcgtgtgataatgtattactgcagccctaggaaattaatacaggcacctgagccattaatgaagtaattgtgaaaagccatcctttgcctgtggttaccacatgtgacctgcagtctcatgggaaacaggtatcatccacatggccagaagcagaagctttcagattgaagagacctaggctgaatccagattctgacaattactcacag

SEQ ID NO: 48899 - DNA, 631 bp, Homo sapiens
agtatttttagtaatttctagtgtagcagcatatacttcagtagatttttctgctaaaggtctgctaaaactgtgaagtcaaggtttaactttctttcggtaactatgtgtacttgcaaagtccattttctcacactaaaagtttggggaaataattatcaatacaaacctaatattaagacagtttcttttctgatgtaacaatgagaaattcttttgattcctttggttcaaatgatgtttttcaaaggaatttaagttatgataaatttgcatctttcttaagaaagagtaacagacttaggtcattagtgtgtgctcatataaatcaatatatgttggggacaaatacatttgagaagttaatattaaacagactgttaaactggagatgtgacatctcttatcagagccaggaggtaagtgaatgaggaacaaagataaaagagtcttatttagaagataaatggaattgaggaagttctctgtcctaggagacagtgttcccatttactcttcaaagtgttatctgatcttttattatcaaatcctatggggaaactgttctgacccagaacaatctaatctgaagaaasctgtatctggaccactaatgctcttcaaattgttc

SEQ ID NO: 48900 - DNA, 395 bp, Homo sapiens
cagacaaataaaaccgcctccccttcccacctccccacccttctgtgacagaggtcattcccccacccaaccccattccactggcctccctcctccaccctgaacaccttcatggggctaccacaattagaccctgaaatgtagaggaaatatttgggaaatcccagagggaagggggctctccaattttcttctctctcttggccacacagarccagggtaaggttagctacttgacccaaactctttctgaaccaagaatatcctctttataaaaccatagtattttcttaaaaatcgtgactggttcctacaaggaaacacagtaggagccgcttttgtttatttattaacttttttgagacagggtctcgctctgtcgctcaggctggagt

SEQ ID NO: 48901 - DNA, 1652 bp, Homo sapiens
ttacaatggcaggactgactagatgtgacagaaattctatgtctcacaaaaccaaaaatatttactctctggtcctttgcagaaagtttgccattccctgctgtgtgctccttctgggcamgtcattgaatctatggattcaactattgcctctgtgcacgaactctcatgctggaatgaaacagaagaaagaggagaaatggcaccctcccccacaccaagttataatagtcccaccaataaaatcccaacaacgcagacagggaacacattacacctgtcaaaaaagtggcagaatctgaagcatggtagtcagtggaaccggccacagtcattgtgacacacaatttatcagtgtgtctttttcttttcctgaggtagtaaaaacatcatatatatttttcaagatgcaaaataaaaacctataaaatctatgatgactgagaaaagaaaataaatcttatttcaataaagctggagggattagcagatgccctgagtgcccccacactcaaagcacagtgtgtggtatgaactcatttaaataaatatttgctgaaaaatgaatgtatgaaagcagaaaggaggggctaacccaatacaaaaatcagcataagggaaaataatatttaggaggtaaaaccctgtatcaggccattcttgcattgctataaagaaatacctgagattgagtaacttataaagagaagaggtttaattggctcacagttgtgcagtctggatagaaagcatggtgccaacatctgcttggcttctagaggagcctcaggaagcctacaatcatggcggaaggtgaagcaggagcaggcacttcatatggcaaaagcaggagagagggagagagagagagaggagtgtaggagggtaagtgccacaccctttaaatgaccagatctcatgagaactcactcactatcatgaagacagcaccatactgtgagggatccaccccagtaatccaaacaccttctaccaggctccacctccaacattaggattacatttttttttttttttttttgagacagagtcttgctctgtcgcccaggctggagtgcagtggcttgatctcggttcactgcaacctctgcctcccaggttcaagtgggaattacattttaacatgagatttgggggcggtgacaaatacccaaactgtatcaaaccctatacctgagacgttccttttctaagaataaagaaggtcagtgagctggagataaaccaaaggtacatgttggtggagaggagggagaaggacaggcaggcagaaggcaattacaatctccagtattccaagaacactcatgtttcagagtttccaaagcttgcctcccaggtgctgagcttgcctctgagtgcagcttctaattttccatttatttttccttccttcatcttccttcacagaagataatttgttcacatttttttttgcaaatgagatgacagaatgcaatgcatattccaatggcatacttgaagagttttagatcttctctagttttagaatcatgtgtaagctgttttagggcctatacatatttgcttcagaaatgtatcatgaacattaattgatatttttctatttcattattgctttcggagaatttgctgcccactttaataac

SEQ ID NO: 48902 - DNA, 1652 bp, Homo sapiens
ttacaatggcaggactgactagatgtgacagaaattctatgtctcacaaaaccaaaaatatttactctctggtcctttgcagaaagtttgccattccctgctgtgtgctccttctgggcaagtcattgaatctatggattcaactattgcctctgtgcacgaactctcatgctggaatgaracagaagaaagaggagaaatggcaccctcccccacaccaagttataatagtcccaccaataaaatcccaacaacgcagacagggaacacattacacctgtcaaaaaagtggcagaatctgaagcatggtagtcagtggaaccggccacagtcattgtgacacacaatttatcagtgtgtctttttcttttcctgaggtagtaaaaacatcatatatatttttcaagatgcaaaataaaaacctataaaatctatgatgactgagaaaagaaaataaatcttatttcaataaagctggagggattagcagatgccctgagtgcccccacactcaaagcacagtgtgtggtatgaactcatttaaataaatatttgctgaaaaatgaatgtatgaaagcagaaaggaggggctaacccaatacaaaaatcagcataagggaaaataatatttaggaggtaaaaccctgtatcaggccattcttgcattgctataaagaaatacctgagattgagtaacttataaagagaagaggtttaattggctcacagttgtgcagtctggatagaaagcatggtgccaacatctgcttggcttctagaggagcctcaggaagcctacaatcatggcggaaggtgaagcaggagcaggcacttcatatggcaaaagcaggagagagggagagagagagagaggagtgtaggagggtaagtgccacaccctttaaatgaccagatctcatgagaactcactcactatcatgaagacagcaccatactgtgagggatccaccccagtaatccaaacaccttctaccaggctccacctccaacattaggattacatttttttttttttttttttgagacagagtcttgctctgtcgcccaggctggagtgcagtggcttgatctcggttcactgcaacctctgcctcccaggttcaagtgggaattacattttaacatgagatttgggggcggtgacaaatacccaaactgtatcaaaccctatacctgagacgttccttttctaagaataaagaaggtcagtgagctggagataaaccaaaggtacatgttggtggagaggagggagaaggacaggcaggcagaaggcaattacaatctccagtattccaagaacactcatgtttcagagtttccaaagcttgcctcccaggtgctgagcttgcctctgagtgcagcttctaattttccatttatttttccttccttcatcttccttcacagaagataatttgttcacatttttttttgcaaatgagatgacagaatgcaatgcatattccaatggcatacttgaagagttttagatcttctctagttttagaatcatgtgtaagctgttttagggcctatacatatttgcttcagaaatgtatcatgaacattaattgatatttttctatttcattattgctttcggagaatttgctgcccactttaataac

SEQ ID NO: 48903 - DNA, 604 bp, Homo sapiens
agcagagtgcctggtggagaatctactttcaaaatggctggaggctgacatttgtcattctttttgactgtccattaacttcactgatttactatgtttggaaaattccttatgttatgggcttaattgggatgcaaaaccagggtttcactaacagaaccttccagaaaataccagatttttcctttcccagcctcccatgtggcttgagtggccatgtgacctaggctcagtcaatcagacactcatacacagattgagtcaggagttaagaatcatgaaagggcaggataggggaatgtgtcctggtgatagagggtggtagctctaatagctcatgcagtctgtggggaagcagagttgcagtgctgtggaagcttccagagttctaactctggcagaagtgctgcaagtgctgatatccagggtacagcagtgggggcagcaagtcctctctggactggatttttgacatgaaatgtggtcctacctgctgccttgcctttcttgtttctgcccattctgagtctagttccccagcctttccagygattctgtgaactaatgaatttcatttcaataaattctatttttccttaagtca

SEQ ID NO: 48904 - DNA, 639 bp, Homo sapiens
atttaacaatgataccttaattcattcagcatagctgaggtgctgttaagaaaattctgatgtctgggtctcactccgaaccgattagatcaaaatctttgaagggtgayagggttagggcggtgggatgttgggtattggtatttatgaaggtgctctaggtgattctagtatgtaaccaggggagaaccagtgttttggagcattcatttaaaaataaactgactttggcgggcgacatggctcatgcctgtaatcccagcactttcggaggccaaggcaggtggattgtttgagcccaggagttcaagaccagcctgggcaacatggtgaaaccccatctctacaaaaaagaccaagaaaaaaaacaaacaggcatggtggtgcgtgcctgtagtcccagctacttgggaggtgagaagatggtttgagctcaggaggcagaggttgcggtgagccgagatctccactccagtctgggctacagagcaagaccctgtctcaaaaaataaaataaacagtttaaaattctgtttgaagaactttgggattcactttgaatagtcagtaattacccaggattattgcaaaacagagaccagcactcacagtactgagcaatacctcagcagcgtgctc

SEQ ID NO: 48905 - DNA, 639 bp, Homo sapiens
atttaacaatgataccttaattcattcagcatagctgaggtgctgttaagaaaattctgatgtctgggtctcactccgaaccgattagatcaaaatctttgaagggtgatagggttagggcggtgggatgttgggtattggtatttatgaaggtgctctaggtgattctagtatgtaaccaggggagaaccagtgttttggagcattcatttaaaaataaactgactttggcgggcgacatggctcatgcctgtaatcccagcactttcggaggccaaggcaggtggattgtttgagcccaggagttcaagaccagcctgggcaacatggtgaaaccccatctctacaaaaaagaccaagaaaaaaaacaaacaggcatggtggtgcgtgcctgtagtcccagctacttgggaggtgagaagatggtttgagctcaggaggcagaggttgcggtgagccgagatctccactccagtctgggctacagagcaagaccctgtctcaaaaaataaaataaacagtttaaaattctgtttgaagaactttgggattcactttgaatagtcagtaattacccaggattattgcaaaacagagaccagcactcacagtactgagcaatacctcagcagcgygctc

SEQ ID NO: 48906 - DNA, 1823 bp, Homo sapiens
tcatagatatcatggctccttccacacaggatctgagtagtatatggaatacagtctatcttttaatttttatctgtaccattctttgtgtttttcttccaattacccctctctccttgtcatatttgcttttctatgttccttccttccttacttttcactgttaactataatttctggtctcttttcttttcttttttgagtcagggtcttgctctgtcatccaagctgcagtgcagtggaacaatcatggctcacttyagccttgacctcctgggctcaaacaatcctcccacctcagcctccccagtagctgggacttcaagcgtgcaccaccatgcctggctaattttttgttttttgtagaggcggggtctcactatgttgcctaggctgatcttgaactcttgggctcaagcaatccatccccctcaacctcccaaagtactgggattacaggcatgagctaatgcacccagctgctggcttctttttctgttcctcttgtgtccaacagaaattaaaccctctattcatcatggcctagatttgattttgtcctccatttggtacagtctcacatctttgggaggtcagcgtatccctggtcaggctgaaggttaagagacacataggctaattgttaaaaacatacgctctgtcgaccatcaccaccactggtgctagtcaggcaatggtgagagatcaactccaactcccgagatgggaaggaagatttagttagcctctgcaggagttttatcacgtcatatccccattactcagataataacaggagtactcctgcttttcctttctcaacaatgtgataccagaaatacctttctttttagcacttaggtaaaggggagggtccataagctcaaaattgtatgcaagatattgtgcccatcgtgttatgtgcatttttctagagtatcatcgagttatcatagtgccttttgaaccctcggtggttaaaccatttctcaggaagtgaggaaaatgtttgagatccattaactgaggttccaagtacctctgcttgtagcaaagcagtaataggactttggcttctagaataaaacagcaaaccctcgtttcttagaattgaggagcagggctttgctgatgcctgtaaataccacacttacagtattcagtcctgcttgcaggtgatgtttctatttcacatacatgttgatgtcaacatttaaagaaaaactagaaatttaaattaaacctctgtcatttccataaattacttgcataaagtgtcccaaagcacactgctcaatgagaccatcgaagggatttttcctcctgaccccaagtatacggtgtcttctccacaccattttgcagcaataaccacatatcctactattgagttcaattctgacaccaactatccagagctggcatcagattccatggattatgggctcggtatcacaagactgccctcatttcagaagccagtagcaagtatcaggtctccaggtcacccacacttctgcctgactcggctactgctaattcagggattcccatgatcctaccccctcagatttgataatttgcaagaacaactaatagaactaaggaaaatgctgtatttactattacagtttataataagggatacaaatgaacagccaaaagaggctcctagagtcccaagtgcaggagactttgtccctggggaactgaggtgcataattctcttgacactgggatgtgttcaccaacttggatgcttcccgatcatctaggggtttttatgatggtctcattttacacaagcatgattgattaagtca

SEQ ID NO: 48907 - DNA, 1823 bp, Homo sapiens
tcatagatatcatggctccttccacacaggatctgagtagtatatggaatacagtctatcttttaatttttatctgtaccattctttgtgtttttcttccaattacccctctctccttgtcatatttgcttttctatgttccttccttccttacttttcactgttaactataatttctggtctcttttcttttcttttttgagtcagggtcttgctctgtcatccaagctgcagtgcagtggaacaatcatggctcacttcagccttgacctcctgggctcaaacaatcctcccacctcagcctccccagtagctgggacttcaagcgtgcaccaccatgcctggctaattttttgttttttgtagaggcggggtctcactatgttgcctaggctgatcttgaactcttgggctcaagcaatccatccccctcaacctcccaaagtactgggattacaggcatgagctaatgcacccagctgctggcttctttttctgttcctcttgtgtccaacagaaattaaaccctctattcatcatggcctagatttgattttgtcctccatttggtacagtctcacatctttgggaggtcagcgtatccctggtcaggctgaaggttaagagacacataggctaattgttaaaaacatacgctctgtcgaccatcaccaccactggtgctagtcaggcaatggtgagagatcaactccaactcccgagatgggaaggaagatttagttagcctctgcaggagttttatcacgtcatatccccattactcagataataacaggagtactcctgcttttcctttctcaacaatgtgataccagaaatacctttctttttagcacttaggtaaaggggagggtccataagctcaaaattgtatgcaagatattgtgcccatcgtgttatgtgcatttttctagagtatcatcgagttatcatagtgccttttgaaccctcggtggttaaaccatttctcaggaagtgaggaaaatgtttgagatccattaactgaggttccaagtacctctgcttgtagcaaagcagtaataggactttggcttctagaataaaacagcaaaccctcgtttcttagaattgaggagcagggctttgctgatgcctgtaaataccacacttacagtattcagtcctgcttgcaggtgatgtttctatttcacatacatgttgatgtcaacatttaaagaaaaactagaaatttaaattaaacctctgtcatttccataaattacttgcataaagtgtcccaaagcacactgctcaatgagaccatcgaagggatttttcctcctgaccccaagtatacggtgtcttctccacaccattttgcagcaataaccacatatcctactattgagttcaattctgacaccaactatccagagctggcatcagattccatggattatgggctcggtatcacaagactgccctcatttcagaagccagtagcaagtatcaggtctccaggtcacccacacttctgyctgactcggctactgctaattcagggattcccatgatcctaccccctcagatttgataatttgcaagaacaactaatagaactaaggaaaatgctgtatttactattacagtttataataagggatacaaatgaacagccaaaagaggctcctagagtcccaagtgcaggagactttgtccctggggaactgaggtgcataattctcttgacactgggatgtgttcaccaacttggatgcttcccgatcatctaggggtttttatgatggtctcattttacacaagcatgattgattaagtca

SEQ ID NO: 48908 - DNA, 1201 bp, Homo sapiens
catgcctgtaatcccagaactttgggaagccgaggtgggcagatcacttgaggtcaggagtttgagaccagcctggccaacatgttgaaactaaatatacaaaattactctactaaaaatacaaaattagccgggcctggtagtgcatgcctgtaaatcccagctactcaggaggctgaggcacgagaactgcttgagcctgggaggtrgaggttgcagtgagctgagatcgtgcaactacaccccaacctgggcaacagagaaagactccgtctcaaaaaaaaaaaaaaagagagaaagaaagaaagaaagaaagaaagaaagaaagaaagaaagaaagaaagaaaaacagaaaaaaaagaaaaaacctctatagatctttaaatgtatgcatacatacacacgtgcatgtggtctgaagaccccttggtgctttgtttccagggactctgttctatctcagctgggaccattctgcagcctggtgctggatgaaaagatatagcaagtcttgtaatgttgcctctctcttctccaggtcactgaagatctttgtcatcttcccactgacctggtggggcccagcaaagggatgagaagtgatgataagcctagagacctagggccattgtggggaatccagggagtaaagagacttagatctcagcgacaattccagctccatcactttttcctgctgggggactttgtccaagtttcttgacttctctggtcttcagtttcttcctttgaataatggggagaaataataatacctaccacatagactgttgtgaggatgaaggagcatgcaaagtgcctggcatgagttagggtataataaatggtcactattttcactgcctctgtcagcagtgaccaattatctcgagccctaactctggaaacttgtgggtaacagaagtgggggatagtctttctactaaaaaagaaaagtatcaaaacaagaagtcagaggccaggcacagtggctcatgcctgtaaccccagcactttgggaggccgaggcgggcagatcacctgaggtcaggagttcgagaccagcctggccaacatggcaaaaccccgtctgtactaaaaatataaaaatgagccagacctgtagtctggctacacctgtagccagatgtacacctgtagtcccagctactcaggaggctgaggtaggagaattgcttga

SEQ ID NO: 48909 - DNA, 1201 bp, Homo sapiens
catgcctgtaatcccagaactttgggaagccgaggtgggcagatcacttgaggtcaggagtttgagaccagcctggccaacatgttgaaactaaatatacaaaattactctactaaaaatacaaaattagccgggcctggtagtgcatgcctgtaaatcccagctactcaggaggctgaggcacgagaactgcttgagcctgggaggtggaggttgcagtgagctgagatcgtgcaactacaccccaacctgggcaacagagaaagactccgtctcaaaaaaaaaaaaaaagagagaaagaaagaaagaaagaaagaaagaaagaaagaaagaaagaaagaaagaaaaacagaaaaaaaagaaaaaacctctatagatctttaaatgtatgcatacatacacacgygcatgtggtctgaagaccccttggtgctttgtttccagggactctgttctatctcagctgggaccattctgcagcctggtgctggatgaaaagatatagcaagtcttgtaatgttgcctctctcttctccaggtcactgaagatctttgtcatcttcccactgacctggtggggcccagcaaagggatgagaagtgatgataagcctagagacctagggccattgtggggaatccagggagtaaagagacttagatctcagcgacaattccagctccatcactttttcctgctgggggactttgtccaagtttcttgacttctctggtcttcagtttcttcctttgaataatggggagaaataataatacctaccacatagactgttgtgaggatgaaggagcatgcaaagtgcctggcatgagttagggtataataaatggtcactattttcactgcctctgtcagcagtgaccaattatctcgagccctaactctggaaacttgtgggtaacagaagtgggggatagtctttctactaaaaaagaaaagtatcaaaacaagaagtcagaggccaggcacagtggctcatgcctgtaaccccagcactttgggaggccgaggcgggcagatcacctgaggtcaggagttcgagaccagcctggccaacatggcaaaaccccgtctgtactaaaaatataaaaatgagccagacctgtagtctggctacacctgtagccagatgtacacctgtagtcccagctactcaggaggctgaggtaggagaattgcttga

SEQ ID NO: 48910 - DNA, 253 bp, Homo sapiens
catttgtattattattatttgtagagactgattctcaccacatgtcccaggctggtcttgaactcctacaatcaagcattctttctgccttgacctcccaaaatgctgggattacacatgtgagccaccacacctggccttattttgttttaaaatwtaaatctttgtcccatgattttcatgactttcattggtctaggaaaaatacaattttctgcttatagagtgatcaaatgaaagctcttgttccaag

SEQ ID NO: 48911 - DNA, 546 bp, Homo sapiens
aactttcttttaaaacaatatataacatttctcctttttataaaacttccaaccttctctttgttctttggacatactaaagaccacccagtctgtgtgtatgcctcaagttkcaattctggcttcccaaagaaaacgttctaaatttagagatttgtctctatattttatttgacattgatagaggaaaggccacatgaggacacagtgagatggtggccacctgcaagccaaggagacatgccttcagaagaaactaaacctgctgacactttgatcttggacttccaacctccaaaatggtgagaaaataaaattctgttgtttaagccacccagtgtgtggtgttttgttatggtggcccttgcaaagtaatacaatcactttctctgatgactcttcatcttttcaagtatgaagactttttgttttattatttgtttatcactgcatgtatatctacctcattgaaccagcacagaaacacacagaaaatcttaactctataacgactttagcaggcagccccagaaagaagggctggaa

SEQ ID NO: 48912 - DNA, 621 bp, Homo sapiens
accccagatgacttaygtttctggctttcttaattgttggttagctttcaatgcctgaattcagaaaaattagagatggaaaaatctcccaacaggtcacccagctcatttctttaaaggaattaacagatgaatctcataatgtagtccctggttttaacgttcttgaggatgggccggggtttcattttaaattcagaaatattggggccaatttcagtcctaggatgaattcagagaccaccaagagaggttcgtatatcctacttctgctttcccattactcagaatgtgtaaagtcataaactgagtagttaagtcatgatagatcttggcttttcaacatggagctgacaagggaagggtagataagaaagatgcaaccacaagactgaaaaatgtcagtgtcaggggaagagggctaggtgtttatatccctgcattgaccagtttttggatacagactgcttctggagagagatgaaaattggggcaagatgactttcttcagttaagagcggtttcaggaaagagactcaggcaactgagaaaatgaatgcctcagtcctgaaggatctggacaatgcaccacatcattcattacacctacccatcatgctt

SEQ ID NO: 48913 - DNA, 621 bp, Homo sapiens
accccagatgacttatgtttctggctttcttaattgttggttagctttcaatgcctgaattcagaaaaattagagatggaaaaatctcccaacaggtcacccagctcatttctttaaaggaattaacagatgaatctcataatgtagtccctggttttaacgttcttgaggatgggccggggtttcattttaaattcagaaatattggggccaatttcagtcctaggatgaattcagagaccaccaagagaggttcgtatatcctacttctgctttcccattactcagaatgtgtaaagtcataaactgagtagttaagtcatgatagatcttggcttttcaacatggagctgacaagggaagggtagataagaaagatgcaaccacaagactgaaaaatgtcagtgtcaggggaagagggctagstgtttatatccctgcattgaccagtttttggatacagactgcttctggagagagatgaaaattggggcaagatgactttcttcagttaagagcggtttcaggaaagagactcaggcaactgagaaaatgaatgcctcagtcctgaaggatctggacaatgcaccacatcattcattacacctacccatcatgctt

SEQ ID NO: 48914 - DNA, 622 bp, Homo sapiens
ccaggcctatagattggaattgtagggatttaaagtataaattcctcatgtggcttacaaatgatgacaagtaaggccactcctgcttccacaccttattgtcggacacatatagtctacctactggggacacagccctatgcaatgcttggtagtttagggtatgtaacacatcctggattaaggtgtctcattcttgccagtgaagcagagtagattaaagtgttttgttctgaactgacattaatggccagggatacttactggtgtaagggacatggcagaaggtatatctaggaataatcagaygggtagcaatgtctgggttccagaggagggccaactaggataaaatagaaccctagttcataaatagaggcaaatataggcaaagcagaggcaatagaggcaaagtttcagggttccaaatcagcatgagtttaggatagaattcactctcattagagctctgtattataacaaggaagcattaaaattgaagaactgatggaaaggctactaatgatagataattaaggacatcaagaacttaaggtacatataacaacagattatttacagattccctccattcaaaggataagggtacatggtgcttgca

SEQ ID NO: 48915 - DNA, 550 bp, Homo sapiens
cactttttctaattacataggtacaaagacagtgttctctactgtaagaataagcagtggaagtacactgactgtggtcatttacacttggcttcaacatcagtgacaaactagaaatgatggagactatgaaaattgttactaatgcctctcattcaggggttcattcaataatctactttggctgaaaatgtaggaccagttttgccagatctaatttttcagtgaaagggaacatttaggtttctatgggaaatctcttcattttaaactttggatcwaattaaaacaaacaatcaaataaaatacagctgtgctaaacatagcagaagtttagctctgtccaaggctcatgagtttgcagcctccatcctaaaggatgaaacaccagctgccattatttaatcctccacagagtgtatggatgggcatatggatggatgaaatataagttcttctgatttcttctccctttaatctgtcttctacatagttgctggaatgatctttataaaatgcaaattatatcatgttgtttctaaaaacacca

SEQ ID NO: 48916 - DNA, 550 bp, Homo sapiens
cactttttctaattacataggtacaaagacagtgttctctactgtaagaataagcagtggaagtacactgactgtggtcatttacacttggcttcaacatcagtgacaaactagaaatgatggagactatgaaaattgttactaatgcctctcattcaggggttcattcaataatctactttggctgaaaatgtaggaccagttttgccagatctaatttttcagtgaaagggaacatttaggtttctatgggaaatctcttcattttaaactttggatctaattraaacaaacaatcaaataaaatacagctgtgctaaacatagcagaagtttagctctgtccaaggctcatgagtttgcagcctccatcctaaaggatgaaacaccagctgccattatttaatcctccacagagtgtatggatgggcatatggatggatgaaatataagttcttctgatttcttctccctttaatctgtcttctacatagttgctggaatgatctttataaaatgcaaattatatcatgttgtttctaaaaacacca

SEQ ID NO: 48917 - DNA, 620 bp, Homo sapiens
aacttaaaatctagcagggaatggacaaccattattcaaaaagtcatgccaataagaacacaattataactgtgataagtgcatagaaaatgctcacagcaacatgcyagtagtgtatagtgagggctttttgatccctcctctagaggctaaagcagtattgcttatgtcgtaggggttgggtttaagactggggaactggggccaggaagttggaactgctccaggcagaggggacaacatgtgtgaaggccattggtgtgagtatatgaggaactaggaggtgaccaggacactgaagcacagagaatgacatggacattgagtcaagctcatcacaggtttacttaaggataactctaagaaacagagttttttcagtcttattaaacctcaagactccccctatccctcttccagcattttatccagcacatggaaacaggcacatggtcttggttcagttcctcttgctttgaaatgtatgaagtcatagccagaaaatataaccaaatcctattcataatgactctttccaaatgttcttccattttctactaaaaaactactttgttgacgcaattactatcatcattaacctaagataacataatcatact

SEQ ID NO: 48918 - DNA, 583 bp, Homo sapiens
aacatggatagtctgaataaactcttgttacttaactccaatattgccctaatttcaaggagctgatccagaagaggaagatctgagttgggacttcagaccaatggcaagattcaagcctttcatctccatgctttctgcatttytctatagatattcagttgtgaaacacctggagtttatgtgtagttggctcacaccagctgcatttttgaagaaggggtaaaataagcattttgggttagatatgaaaaattttatgcaacaaatgcatatttggaaactgcaaaatgagcatgcaaatcaatttatatgcatcgatgaatgaatatagacgggctattttcaaagtataggcattctagtgtagcataatatatcgggacaaaaggaatgggaaggaggcaaattgctcagcttagtcatccatttgcaatggaaaattgcattgtcaagttccattatgcctgcacaaatttagacaaattaaagagtctactaagtaattattgataacatacatgtgtatgaagtagagcaggaaagttgtgagtcatttggaacttctcagatgtttctagga

SEQ ID NO: 48919 - DNA, 543 bp, Homo sapiens
ctgttagagaattgcatatcaatgtttctattctttcatctggtctctaaatcacccaagtatcactcaacgctacatcttccaagaaaaaaaaataactcagatattatgggaagagagccaaaaacatcccagctcatagcctaatacacacatttattgggaacctactatgtgtaagatactgtcccaggcatttgggataaatcagataacagcactgacaaagattcctgcccttgtggggcttatactctgcagagacaaacaaggaaacaatcattaaactttaagtaattcgtgtatatattagaaaatggtgtgtgctatggttttctaaaaaataaacaagtaaaagggattgggagggtgggagacaagtggcagaaggttgaagtatcyaatagaaaggttcagaattggccaggcgcagtggctcacacctgtaatcccagcactttgggaggctgaggcaggtggatcacttaaaatcaggagttcaagatcagactggccaacatggcgaaacgctgtctctactaa

SEQ ID NO: 48920 - DNA, 673 bp, Homo sapiens
ttctctgctttctaggtattcactaccagacctcgccaacctaaattttaactctctctttagtcttgttgaccaaaatgacttttcttcaatctaaaccatactgaagctgaattcaatctaactataggaagacattaacatggttcaaataaagctttgcataataactgtttctattatgttgatggtcttggaggtaactaactgttaattcatctttaactgaagaattattatagaagtattctggggraggtgtttttttgttttggtttttgttttttgtagtgacatgtgctctcagtgtaccacaatatcatagccccacccccacaacataccttatgggccttgtgcataagcattctgtaaattataacacaggataaaatggggcttacttgtatcttctcctaatggaaagcctctcctttagttgtgaaaacttgaaattatttcctctcaatacgtccttaggcaaagggagctgtgttggcaaaagccagagagagatgatgcttggctcagagctgaatggctcaaaggtactttcaggataaaattgaacttctgtgatttactcatttgaaataatgagatttggagtgttctaatataatccacaaatacaagacagtaagatctgaaacgccggctgtagccctgagat

SEQ ID NO: 48921 - DNA, 544 bp, Homo sapiens
ttttaaaaataatctcatcaagccacacctcattatatgttgctttaaaatgtgtggcaatacaatgataccattacttcaaaagctcctccctaaacatcagtaccagcatgtgtgtatctctctaacacatatgtgtatacatatacacacccaattggtatttcatttcataaacaaatccaaactgtgatatttttctcaataaaaatattttttctacaaaagttaacgtgaatagaagaaaaacatttataataaataatttgataagatcatcaataataacacaactactacatgaccacttytcctataaacattttaccttactaataataggcattaaataaattataaacttctcttttcctctttgtatctgttatttcaattttgtttgtacgtattagaaaaacagagtgttttctaactgcatgattgaatatgtaaccacagagacatatggcatatttctaagtaaaattaaaatttcagttccttagccatgttccacatgctcaatagccacatgtagccactg

SEQ ID NO: 48922 - DNA, 441 bp, Homo sapiens
caaaacaactttccctaggatcctagaggatacaaatttgtagcaaattccagaaggcagaaattacaggacattcttccaatacagcaccacagcaacttctctgttatttggaaaaccgtggaattggtctttacagtaaggttaggacctcggcactgtgggagaggagtgtctttctgggttgctctgtctcaaccctggaatagcagcagtttcttacatccgctattcttatatttcttaggkttctgtttttactatccaatcttttttgttccattccccttttttagtttaaaattcttttattaaactccctccccctgttagaattactgtgtgactcatctctcctgctaggactaagactgacacagcataaatttcacccaggatctggactaacacacaacacacttcaaataatgaatagggctt

SEQ ID NO: 48923 - DNA, 440 bp, Homo sapiens
gaattaatttgttgacttttctcacctctgtagttgagtttatggtaggaagagtcagtctttagtaaacagattcattcttactaaactcttttttatttattttatttatttattttttttgagacagagtctcgctctgttgcccaggctggagtgcagtggcacgatctcggctcactgcaagctctgcctcccggrttcataccattctcctgcctcagcctcccaagtagctgggactacatgcacccgccaccacgcccaactcattttttgtatttttagtagatacagggtttcaccttgttagccaggatggtctcaatctcctgacctcatgatccgcccacctcagcctcccaaactgctgggattacaggcgtgacgaccgcacccggcctaaactctttaaagttaagtaaaatatctcaaaatat

SEQ ID NO: 48924 - DNA, 550 bp, Homo sapiens
taatttgcccttgaacaaattactactaggtttctccaatgaggttatagagttgttgcgaaaatgaaatggcctaatgcagaacaggtgcttaatgcagcacttgacatgayaaagacagtcacaaaatagcagcttttgttactatatgggcaggggctactgcagatgatgcccagagacctgtgaagagtgaggggtcccagccgctctcaactgggacagcaggacacagcttgcagattggggtctgcccccttctgcattatactttgcttcttctttaggcatggattaggacaaaaagacatcaaaagggaagttaaaagggagacttgtgtgtgtatgagctttggaatggtgtgcggcgggtgcgtggtgaggtgaggaaacaaacatcagtaggttgacttttatagaatcccattttaaagggatatttaatggcttccatgggtctctttaaatgtattccaccatattatttggtagataggccaaataatgggatggggatgcaggtatgctagttaagttcccctagcagaag

SEQ ID NO: 48925 - DNA, 602 bp, Homo sapiens
ttgcaaaaattcaaagcaatgtgactcttatcactgattgttaaatcagatttttattttaaaatgaatttattttattctcaaatgaacaaatatatttaaattttacatttatattaatatatattttcatatatatttaaatrtataaaatatattttataatatattttaaaatatatttaaatatttttaaattaaaatttttaaaatatttacattttaatttctaacatagtaaataccatcaatagatgaaatccacctaacagaagctcttctagggccaccagtttttaagagtgtgaagggatttcaacagcagcatgtttgaggaccactggcgtggactatctttggctggatacagggacagatggtggtgtgattgcacccagtgaggggcctgggtcatgcagtagtaggatagacggtgtcctcacttgtcagtgtgtatactattaaaagtaaagtcagtgcagaaaatcacttacggaaatttgctcatctaggcattggttctacttcctaaaaatctcaagacattctcacttccctcggcaggcagccgacttggatggagaaattgacttgtccgcatg

SEQ ID NO: 48926 - DNA, 2208 bp, Homo sapiens
ttttttttttttttttttttgagatggattctcgctctgtctcccaggctggagtgcagtggtgcgaccttggctcactgcaagctctgcctcccgggttcacrccattctcctgcctcagtctccccagtagctgggactacaggctcctaccaccacaacataattttttgttttttagtagagatggggtttcaccatgttagccaggatggtctcgatctcctgacctcgtgatctgcctgccttggcttccctaagtgctgggattacacgcgtgagccactgcacccggccttaagtggcaactatttaaggaaataaaatgggtgtagtgagtgatccaggcataggagttacagaggttaaaagaaaaagcagcagataattaagcagagtaatctgaatcctgccagaggatgccttactccagatatcaatggttttagctttgggacaatggaatttgcaagaaaaaattgaaccagcttatcaaggtgttgtttaatatgtatttcagaaaacactgagcctaatgaagagttcttaaaccaccacaatggaatggcaggctcttagttctctgacgtaaatgcctttataaatgtggaatatttgaatgaatgagagatggggaaccccacagaaaagattatataatatcacacgctgggagaaataaaataacaaaatttttgtggacttattgatactgactacaatctaacatgcaaattctgtaggacccaggacaccactattttcattagccagaataaggtccttaagatatcatataatagttggaactctaatatgaatttgttgcacctttgtcccaatcagattctgaactcaacctgaagtttcacatagtccctgcttaaaacatgatgtctgactaattagttggatggtatgatctacattgtggttgtcaataatccttggcctggttcttgctcaaagtagcaacctggtagtgaaggaggcttatcacctggagtttatcacccagtattcacttcactaaggctaacttgtctgctagcattgctaaagtttgtttgtttgtttgtttgtttgtttgttttttgagacagagtctcactgtgtcgcccaggctggagtgcagtggcatgatctcagctcgctgcaacctccgcctctcagattcaagcaattctcctgcctcagcctcccgattagctgggactacaggcgcccactgccatgcccagctaatttttgtatttttagtagagacatggtttcaccatattgaccaggctggtctcgaactcctgaccttgtggttcgcccgccttggcctctcaaagtgctcggattacaggcgtgagccaccaggcctgacctgctgaagtttaaattggcaaagcacgctgactaatgaacagaaagtccatccatagtttacagggaagtcatgcatctgattgcaggtcagccagtttcactggctccccttgacatgtatttgtcactgttttgcctttacttagactccctctggttgtgtatttgctttcatggttatagtgtcatcatgtatgaatttactgaatgcgttatacaccactcagacattgccttagaccattcttcatagtataagaaatgaagctgaagtccacagtatttcttgttattatgctttttttgtgcttacaagtcagccatataagaaactggaacattttattgaaaattcaaccagactataagattgggaacctcattttgcaaagttacagctgtcttgcagaatgtgatatatgttctgaaccagtgaccaacaatgatactttccctcccatagtaaggaataagattccaggaaactagcagtgtacttgggaggggcactgctcatgattgcatgtaataatctgttttcagaatttttgtctcctcaacttgtaaccacaggcttttcagctctcaattctcagtacccaagagaaaggtggaatgtgataatagcggaaataaatttgaagtagaaactgccacctagccatttcaggctccatatgccatcagagcaagacgcaaaaaggatgtgacgactttagctgtattatagatcttgattacataggggaaatgaagaatacagcaagaatcctagggaacacctggggtcacctccttttactactatctaatggtgccagagtacctgag

SEQ ID NO: 48927 - DNA, 2208 bp, Homo sapiens
ttttttttttttttttttttgagatggattctcgctctgtctcccaggctggagtgcagtggtgcgaccttggctcactgcaagctctgcctcccgggttcacaccattctcctgcctcagtctccccrgtagctgggactacaggctcctaccaccacaacataattttttgttttttagtagagatggggtttcaccatgttagccaggatggtctcgatctcctgacctcgtgatctgcctgccttggcttccctaagtgctgggattacacgcgtgagccactgcacccggccttaagtggcaactatttaaggaaataaaatgggtgtagtgagtgatccaggcataggagttacagaggttaaaagaaaaagcagcagataattaagcagagtaatctgaatcctgccagaggatgccttactccagatatcaatggttttagctttgggacaatggaatttgcaagaaaaaattgaaccagcttatcaaggtgttgtttaatatgtatttcagaaaacactgagcctaatgaagagttcttaaaccaccacaatggaatggcaggctcttagttctctgacgtaaatgcctttataaatgtggaatatttgaatgaatgagagatggggaaccccacagaaaagattatataatatcacacgctgggagaaataaaataacaaaatttttgtggacttattgatactgactacaatctaacatgcaaattctgtaggacccaggacaccactattttcattagccagaataaggtccttaagatatcatataatagttggaactctaatatgaatttgttgcacctttgtcccaatcagattctgaactcaacctgaagtttcacatagtccctgcttaaaacatgatgtctgactaattagttggatggtatgatctacattgtggttgtcaataatccttggcctggttcttgctcaaagtagcaacctggtagtgaaggaggcttatcacctggagtttatcacccagtattcacttcactaaggctaacttgtctgctagcattgctaaagtttgtttgtttgtttgtttgtttgtttgttttttgagacagagtctcactgtgtcgcccaggctggagtgcagtggcatgatctcagctcgctgcaacctccgcctctcagattcaagcaattctcctgcctcagcctcccgattagctgggactacaggcgcccactgccatgcccagctaatttttgtatttttagtagagacatggtttcaccatattgaccaggctggtctcgaactcctgaccttgtggttcgcccgccttggcctctcaaagtgctcggattacaggcgtgagccaccaggcctgacctgctgaagtttaaattggcaaagcacgctgactaatgaacagaaagtccatccatagtttacagggaagtcatgcatctgattgcaggtcagccagtttcactggctccccttgacatgtatttgtcactgttttgcctttacttagactccctctggttgtgtatttgctttcatggttatagtgtcatcatgtatgaatttactgaatgcgttatacaccactcagacattgccttagaccattcttcatagtataagaaatgaagctgaagtccacagtatttcttgttattatgctttttttgtgcttacaagtcagccatataagaaactggaacattttattgaaaattcaaccagactataagattgggaacctcattttgcaaagttacagctgtcttgcagaatgtgatatatgttctgaaccagtgaccaacaatgatactttccctcccatagtaaggaataagattccaggaaactagcagtgtacttgggaggggcactgctcatgattgcatgtaataatctgttttcagaatttttgtctcctcaacttgtaaccacaggcttttcagctctcaattctcagtacccaagagaaaggtggaatgtgataatagcggaaataaatttgaagtagaaactgccacctagccatttcaggctccatatgccatcagagcaagacgcaaaaaggatgtgacgactttagctgtattatagatcttgattacataggggaaatgaagaatacagcaagaatcctagggaacacctggggtcacctccttttactactatctaatggtgccagagtacctgag

SEQ ID NO: 48928 - DNA, 650 bp, Homo sapiens
gacagcacttccccatccctctttgaagtgtgttgctgcatgtgacatgctttggccagtgaaatgcaagtggaagtgatgtttgttatttccacacccaggttgtaattgcccatgtggtcttccctgactgtgctaatcatggagagatgggtggaagtggtgcctgggctgcccaaatccctgaatggccacaggaatagagttcccygaaagcttgtgtttagacacagagcattagcaagaaatagtcttcttttataataagccactaactttcagggatatttgttactccggcataaccctgtatgccctgactgatacagcaagtaagtaaataacatagttctctcccaagagtctttattagcagcctgtgaagtgcttttttcctctgacttctcatttcctcttcaaggccaggacacctagcaactagtctcaataacccattcattttctttgtggatagctctggaggagaaatctacagccctgcccagctgtgctctctgtttctgaccctgcagccctggtttagactcagtcgaacatttacccattatgttctagacctgtgtgatggtgcatctcccctccccctccatcacattttggagcacatggaagcttttccaagactattt

SEQ ID NO: 48929 - DNA, 628 bp, Homo sapiens
gggaggctgaggcaggagaatggtgtgaactcgggaggcggagcttgcagtgaggcaaaactgcgccactgcactccagcctgagtgacagagcgagacyccaactcaagggaaaaaaaaaacaaaaacagaaaagggtttcctttaaaacattcagataggagagatacgtggggtagacatcaaacaagatcgggagaatatggcttatttttgaagctaagtgatgggtaagtacatggacagtcattccactattctcttaatttttgcatgtttgaacgttttcagaataaaaagtttttagatatgtaatgcatatataaaaatatgcacacatagcacttaaaacggtaccagatacatagtaagcactatctacacattttctgttattattaatattatttatgtgaggagaacaacagagagagggttccacccctaggagagctcacagtccccaagggagatggacattagacaaacacatgctccagtcaaagaaaaaggaccaatggggacagagtgggagagggaagtagagggtgttagcagctggtataacacatgaaaatcttgtctttgtggtcagaaaggctcccttcgtccagacctggaaggcaaa

SEQ ID NO: 48930 - DNA, 628 bp, Homo sapiens
gggaggctgaggcaggagaatggtgtgaactcgggaggcggagcttgcagtgaggcaaaactgcgccactgcactccagcctgagtgacagagcgagactccaactcaaggraaaaaaaaaacaaaaacagaaaagggtttcctttaaaacattcagataggagagatacgtggggtagacatcaaacaagatcgggagaatatggcttatttttgaagctaagtgatgggtaagtacatggacagtcattccactattctcttaatttttgcatgtttgaacgttttcagaataaaaagtttttagatatgtaatgcatatataaaaatatgcacacatagcacttaaaacggtaccagatacatagtaagcactatctacacattttctgttattattaatattatttatgtgaggagaacaacagagagagggttccacccctaggagagctcacagtccccaagggagatggacattagacaaacacatgctccagtcaaagaaaaaggaccaatggggacagagtgggagagggaagtagagggtgttagcagctggtataacacatgaaaatcttgtctttgtggtcagaaaggctcccttcgtccagacctggaaggcaaa

SEQ ID NO: 48931 - DNA, 628 bp, Homo sapiens
gggaggctgaggcaggagaatggtgtgaactcgggaggcggagcttgcagtgaggcaaaactgcgccactgcactccagcctgagtgacagagcgagactccaactcaagggaaaaaaaaaacaaaaacagaaaagggtttcctttaaaacattcagataggagagatacgtggggtagacatcaaacaagatcgggagaatatggcttatttttgaagctaagtgatgggtaagtacatggacagtcattccactattctcttaatttttgcatgtttgaacgttttcagaataaaaagtttttagatatgtaatgcatatataaaaatatgcacacatagcacttaaaacggtaccagatacatagtaagcactatctacacattttctgttattattaatattatttatgtgaggagaacaacagagagagggttccacccctaggagagctcacagtccccaagggagatggacattagacaaacacatgctccagtcaaagaaaaaggaccaayggggacagagtgggagagggaagtagagggtgttagcagctggtataacacatgaaaatcttgtctttgtggtcagaaaggctcccttcgtccagacctggaaggcaaa

SEQ ID NO: 48932 - DNA, 617 bp, Homo sapiens
tgaacttgcagatagcaatgccttgaatattcagaacctcctgctgttgcatgattactatggatgtgcaacgcacgttagtatccaagggtcaaccctgaaccatacaactgctttgattatctaagtgtgcgtgtgtgtgtgtagtgtgtaacatctggagaaaattaagaaaatagaaagtcccagctccatcatgcagaaacacgccattgttattaaacccagatgccccataaaaagttttctttgactcagaaaggaaatatttgttcctacacctgttgttgcctgttaccaagtgacttcctatggtctttggtcagctgcatttttttttcttttgttgacattttcttccctaaggtcattctgaattgctcccatgcactgttcatscacaaagcatggtgagacaccaaggggctggacagacgatttccagggatcgccattgctactgctccttctattcctattgtaaaaatgcctgcttggggagatgtactttaattcaactcaccaccctataaggggatgaaaaatagaaggcctacaggatagctacattgtgttgacaaatgaggtggtaaagagagtagattgactgcagtgca

SEQ ID NO: 48933 - DNA, 1778 bp, Homo sapiens
tagacatgtgcctggccaacttttttgtagagggcatttcaacatgttgcccaggctggtctcaaactcctggactcaagtgatccacccacctcagcctctcaaagtgctgggattataggcatgagctgctgtgcctggccaattaccagtaatttctgaggggctyattttcttctgtcctttctactcctgagcccctacttttatgagcactgtcttttcactgttccaaccacctcaacatgagcctttccctcagtttctacaaaaccccattcacataaagttttagtgagattttaagatttggaaaaataactttaaatttgtatattagacactcttgttctataaaaggtcaatttttttaccctttccccagagattcccattattccttaattctatgtaccacccagacttctccccttgacttgtctctcccctctcctccttgcttggctcatctcttctcaccactttatttttctttctctcagggggaaaaattaatttctctcggggttcaggcagggcagtttttcttgtgttgccagggcttccgctcgtacccatattttcagagtgtcattttatacccgaaacagcttatcagggtattttcccaaataaagacagttttttttttctccctaagaagaattctggtaccatgtcttactaatttctcttcattatattcaacaatgtagacttatttatgtacagtcatcacatttgcaaactagttagtattctacttttctcattatcttatacataatttcccatttattattataatatagcccatgtttgctactttaatacgtatcttcccagttattgggtatttgaatagttttgactataatcccaaatgtagattatgagctgaaaataaacgatttcatagatcgtgtgctttgctacagcactcttgaaaagttgttctaataaataattttctcaatttaactccatcaatattctcttttttaattttcaattagcactgcagcaaggctaataatttccccaaaattaacttttctgagtttcttcatgtgtgaactatttacacatatgttttgttttgtttgtttggtttgtgagacagagttttgctcgtcgcccaggctggagtgcaatggtgtaatctcgacacactgcaacctttgcctccgaggttcaagagattctcctgcctcagtctcccaagtagctgggattacaggcatgtgccaccatgcccagctaattttttgtatctagtagagacggggtttcaccatgttggccaggctggtctcgaactcctgacctcaggtgatccacctgcctccgcctcccaaagtgctgggattacaggcatgagccaccgtgcccagcctacacatatactttgacccttgttcagtaaaatctgggtattgattttaacacctttatcaagatataattcaaatacagttcctccattgaaagtgtacaattccatgaattttagtatattcagagagttgtacaaatatcaccacaattttacaacatttcattatcccaaagattgccgggtcatatggtaactctatgtttaactgtttcagtaactaccagactatttttcaaagtggtggtaccattttacaatcccaccagtggtatataagggtcccaatttctccacattcttgctgtattagtttgcaagggctgccaaaacaaaataccacagactgggtggcttaaacatcagaaatgtatttgctcac

SEQ ID NO: 48934 - DNA, 1778 bp, Homo sapiens
tagacatgtgcctggccaacttttttgtagagggcatttcaacatgttgcccaggctggtctcaaactcctggactcaagtgatccacccacctcagcctctcaaagtgctgggattataggcatgagctgctgtgcctggccaattaccagtaatttctgaggggcttattttcttctgtcctttctactcctgagcccctacttttatgagcactgtcttttcactgttccaaccacctcaacatsagcctttccctcagtttctacaaaaccccattcacataaagttttagtgagattttaagatttggaaaaataactttaaatttgtatattagacactcttgttctataaaaggtcaatttttttaccctttccccagagattcccattattccttaattctatgtaccacccagacttctccccttgacttgtctctcccctctcctccttgcttggctcatctcttctcaccactttatttttctttctctcagggggaaaaattaatttctctcggggttcaggcagggcagtttttcttgtgttgccagggcttccgctcgtacccatattttcagagtgtcattttatacccgaaacagcttatcagggtattttcccaaataaagacagttttttttttctccctaagaagaattctggtaccatgtcttactaatttctcttcattatattcaacaatgtagacttatttatgtacagtcatcacatttgcaaactagttagtattctacttttctcattatcttatacataatttcccatttattattataatatagcccatgtttgctactttaatacgtatcttcccagttattgggtatttgaatagttttgactataatcccaaatgtagattatgagctgaaaataaacgatttcatagatcgtgtgctttgctacagcactcttgaaaagttgttctaataaataattttctcaatttaactccatcaatattctcttttttaattttcaattagcactgcagcaaggctaataatttccccaaaattaacttttctgagtttcttcatgtgtgaactatttacacatatgttttgttttgtttgtttggtttgtgagacagagttttgctcgtcgcccaggctggagtgcaatggtgtaatctcgacacactgcaacctttgcctccgaggttcaagagattctcctgcctcagtctcccaagtagctgggattacaggcatgtgccaccatgcccagctaattttttgtatctagtagagacggggtttcaccatgttggccaggctggtctcgaactcctgacctcaggtgatccacctgcctccgcctcccaaagtgctgggattacaggcatgagccaccgtgcccagcctacacatatactttgacccttgttcagtaaaatctgggtattgattttaacacctttatcaagatataattcaaatacagttcctccattgaaagtgtacaattccatgaattttagtatattcagagagttgtacaaatatcaccacaattttacaacatttcattatcccaaagattgccgggtcatatggtaactctatgtttaactgtttcagtaactaccagactatttttcaaagtggtggtaccattttacaatcccaccagtggtatataagggtcccaatttctccacattcttgctgtattagtttgcaagggctgccaaaacaaaataccacagactgggtggcttaaacatcagaaatgtatttgctcac

SEQ ID NO: 48935 - DNA, 490 bp, Homo sapiens
gtaaatatgtgtggacatcgtggcaatttggacatcaaaaacactgccaaattcagaaagaggaagctgtaaactcatggctgttaggaagcttaacttctgtgtactagaacctatcaaaattaaatttctccatgtcaatccgtccaaacaaacattgagatgtttatttctatataattcctattgaatcctactgggyaggacccttctggccccatcctcacagcactggtgcagtgaaactgcacttgttcctgcttccccctatattgttaggagtggaaatatttagtaacagggtggattgggaggctactgaggcctcctgcgtgggtgggtcaggtctcctgcagcccaaacctttttacaataaataagttataggtaaaattagaaaaaaattaaaaaatggaactcattctgtttctttgctcaccacaaagagaaacagcatctagagatgtctgttggagccaggcttgtcctg

SEQ ID NO: 48936 - DNA, 490 bp, Homo sapiens
gtaaatatgtgtggacatcgtggcaatttggacatcaaaaacactgccaaattcagaaagaggaagctgtaaactcatggctgttaggaagcttaacttctgtgtactagaacctatcaaaattaaatttctccatgtcaatccgtccaaacaaacattgagatgtttatttctatataattcctattgaatcctactgggtaggacccttctggccccatcctcacagcactggtgcagtgaaactgcacttgytcctgcttccccctatattgttaggagtggaaatatttagtaacagggtggattgggaggctactgaggcctcctgcgtgggtgggtcaggtctcctgcagcccaaacctttttacaataaataagttataggtaaaattagaaaaaaattaaaaaatggaactcattctgtttctttgctcaccacaaagagaaacagcatctagagatgtctgttggagccaggcttgtcctg

SEQ ID NO: 48937 - DNA, 636 bp, Homo sapiens
tatccgactatcagtagcaaactctgtaaaccgaacagacatatagaaaacactcatcacagtgaatagattcaggaagctgaaggcccatgggacatgaccaactcagcattccactggaggctatatgatcaaacagcaaactgtttatcatgaatgcaggatgtgggcaaactcacactgccctgccaccaaaaggtttgctgagggcctcattccctggcaccaggctccttgaagttatctactgagaaatccartgcctattgttctaagaatgtagtctctcgagtcagctgtgaatcaagctgctggtggaaaaccaccccccgcttctcactatctctcttacctaataaatatggagggctgtgtaaagctcaggtaccttgttcactagaggcaaggtgcccctgacccctttttccaaatatacccctttgtctcttgtcttttattcctgcattcaccctgctttgttcagtccaataggtctgtgtaggctacaaatagaagtgaaaaaaaagaaaaaaaacacttcacacaacaatatcagaatacacactttttccaataggtcatgaaacattctcctgagtagataacctactaggacacaaaacaagttttaccaaa

SEQ ID NO: 48938 - DNA, 2346 bp, Homo sapiens
tgtagacgctggaaaattccaccatatactcatgagagaatgaaagggaagaaggcaaacaacatcttagttgttggaaaactagttttgaccttgtgttaagaaaatagttttgaccttgtggacccctgaaaaggtcctggggaccccaagggtccacrgatcacactttgagaaccactggtctaggcattcctctaggttctaactgtaagaaaaaataataaaagcaaaatgaaaccaagttctctctctgtctcttatattctgctaagagaagaaaaaatcatgtttatgatctttaggtggtaagtgccaggaagaagaggtacaggaggtgatggagaggctatttcagctcagcgggcacggaagtccacagacaaggcaatacctagaggcgcaccggtatctgggaagagcggttcgttggtgcccactcgggggtggttttacggattgttatgcttccctgcattgttcaaattttctttaaggaacaagtacaacttcaattttgaacaagttgggtttctttttttttttttcatgaaggcctcttgcaaggcagcattcatcaatgcaaccttgaagcaacggtcaacaacgttttgaagccgatttggagcccctgctgttgcccattgggtactccagaatcactttctgctggttccgctgtggtcatcctaatgatccttgagggaagggctctggggacacagccgtgcaggaggccaaggacagcccccaaaaatgggaaggacatgcatccagacaaaattaatacgtacctcattgttctctgtgggcactaacctgtttctgggcctcccctgatggactcagttctgcagggtgcagcatgtggcctgacctcctgtgggggtccattctctctgtggcctctcagctctgtctcctgcacatccttctgcttccattctaagacctgatcacatggccctcgccactgccctcctgaggcagtgagatcccagaaaaacaagccaggctttgcccaaatgaagaaacaacagttttactttgattttttacaaacaaacagttttcactttgttttttaagttttactttaggttggtgcaaaagtcattgcagtttttgccattgaaagtaacggtaaaaagctcaattactttcgcaccaatctaatataaataataaggttggatttcctagacatatcaatgaaaacgatgcctctgtgttccctatacttcagcacaaagagaagatgctcccaggcccagcggactgctcgggtcccttgtgtctcaggagctatagtggtttcttgtgactgccataacaaattagcataaaccaagtgacgtatgacaacagactctcattctctcagagttctggaggacaaaaacccaaagtcaggttgttgggagggctacgctgcatccaaagtctcttgggcaagaccattccctgtctctttggcttctgctggccccaggttttccttgactggtggcagcatctctcgagtctctgcctctgtcttcacatggccgtctttcctctgtgcttgtctgtgtcatgtcaccttcctttataaggacactgatcaaaccggatcagggaccacccttatcctatatgacttcatcttaacttgattatatctgcaaagaccctctttccaaaaaaggtctcattcatagatacgggggtgaggacttcgacatatttttggggggacacaattcaactcatattaggagccacacccaccaagggagagaccagaagagagtgcaggcaccaaggccaataggactgactaggaagaggactgtggacagggctttggacaagccaacctggaggtctttgctgaacccagcaagaggatcatcagggtaaggaggcagtgagggcagatccagctgcaaggaggctgtctgcagagggagcacaggacatgcagacagtgagtgtattctgtcaagaggctcgtggcagagggcaggtgtaaaattaagcactagctgaagggggacatgagaggcaggggataattgagttttgccgtgtttgtcttttgttcaactttggggaatgggcaagacgaccttatcggtagctttacatttgcggttcctcccagggccaacacattcaagtaattggctgatactgaaacttctgggcgttttcatttaaatatttattttattatttatataattaatacattgtctttgtagaaatactatacaatctagataagaaaaaagtgctaaaaggcaaccataattaacattttggtgactatatctctctagactttatgtccataaatgtatg

SEQ ID NO: 48939 - DNA, 542 bp, Homo sapiens
ccagggctgtgtttttggcttgyggatggccgtattctccctgcatgccctcacgtgacattctccctgtgtgcatatctctgtgtccaaagttccccctttcctaggcgcacaaccttattggcctggatccccccattcggtcatgacttcatcttaactaattacatctgcaacaacccaaataaggttacatcctgagttattgagggatggaacttcaacacataaatttgaggtttagggcacggttgaaccgataacagaggatttagctggataaactccatggaggaaagaggtttaaaatgtgagcagcagatggaaggggaacgatggaagcaaaaggaatgtttgggaatgttgattttgagatggtgataacacacccactaagcattcctgtggtgtgcaggggtgggtaaggagagcttctgggctggatggtgagaaggcacagaaaatgaggaggacataggaggcgtggggatagcaggaggtcttgggccttgtgtgtcaaagtgtgggcaaaatttagagcc

SEQ ID NO: 48940 - DNA, 542 bp, Homo sapiens
ccagggctgtgtttttggcttgcggatggccgtattctccctgcatgccctcacrtgacattctccctgtgtgcatatctctgtgtccaaagttccccctttcctaggcgcacaaccttattggcctggatccccccattcggtcatgacttcatcttaactaattacatctgcaacaacccaaataaggttacatcctgagttattgagggatggaacttcaacacataaatttgaggtttagggcacggttgaaccgataacagaggatttagctggataaactccatggaggaaagaggtttaaaatgtgagcagcagatggaaggggaacgatggaagcaaaaggaatgtttgggaatgttgattttgagatggtgataacacacccactaagcattcctgtggtgtgcaggggtgggtaaggagagcttctgggctggatggtgagaaggcacagaaaatgaggaggacataggaggcgtggggatagcaggaggtcttgggccttgtgtgtcaaagtgtgggcaaaatttagagcc

SEQ ID NO: 48941 - DNA, 581 bp, Homo sapiens
cgctgagcaggcggagggatgaaaaggaaccagagtattcagtagaagagggttgtgttggggttgggccttttctttaaacatttacctttgtccttctctgacccttgctcgtgttgtccatgtcgcgggactggatgaggcactctgctactgttgttcgaacaggagaggaaaaaaagatacaattcttacaaaatgattaatcctcagaggaaaccctgaaaaagtcattcccaccaattttagacacattctggtgttcagtcggattgcattgccatagcaaccactcttccgtaaccacataaacaggagctttacaataacaaaataatgaagtgtacagcctgagaattgagaactttctccagtggggttaccaggtaggagaggctcttgktgttttccatttatatagtgtaaagttggcaccttctctggtgaccttctatagggtgagggtggggcatcttaaaactgctcttggagacaagtaacttaactttgtatgtaaacgtacatacatatacacacagacacacacacatatagctgacagtaagtttgttatcaatcta

SEQ ID NO: 48942 - DNA, 581 bp, Homo sapiens
cgctgagcaggcggagggatgaaaaggaaccagagtattcagtagaagagggttgtgttggggttgggccttttctttaaacatttacctttgtccttctctgacccttgctcgtgttgtccatgtcgcgggactggatgaggcactctgctactgttgttcgaacaggagaggaaaaaaagatacaattcttacaaaatgattaatcctcagaggaaaccctgaaaaagtcattcccaccaattttagacacattctggtgttcagtcggattgcattgccatagcaaccactcttccgtaaccacataaacaggagctttacaataacaaaataatgaagtgtacagcctgagaattgagaactttctccagtggggttaccaggtaggagaggctcttgttgttttccatttatatagtgtaaagttggcaccttctctggtgaccttctatagggtgagggtggggcatcttaaaactgctcttggagacaagtaacttaactttgtatgtawacgtacatacatatacacacagacacacacacatatagctgacagtaagtttgttatcaatcta

SEQ ID NO: 48943 - DNA, 569 bp, Homo sapiens
tcgtcgtctagcaaaagaaaaggaaaaatagtgctcaagtattctttacaaaattattttaacatacaaggtggttacatttcataggtgatatagtatacaggaagtcgtataatatgtaagaacttattaatggtcatatcccaaacatcatttgcaaatggattgttttctttttgggggatgtttttggtctttttttttttttttttttttttagaaagagtcattctgtcrcctggcctggagtgcagtggtgtgatcttggctcactgcaacctttgcctctcaggttcaggtgattttcctacacagcctcctgagtaggtgggattaaaggcacacaccaccacgcctggctaacttttcttcctatttttagtagagatggggtttcaccatgtcagcaagcctggtcttgaactcctgacctcaagtgatttgcctgccatggcctccgaaagtgctgggattacaggtgtgagccaccactcctggccaaattggttgttttaggtgtagcaatagtgttaaaggggaacctgactaagaactgttttcattttttt

SEQ ID NO: 48944 - DNA, 550 bp, Homo sapiens
tttcaaaggccctcacacgtgtgcacttttgggcacatggacaggtacctgcacacacaccctcttacccagtgcttaaagctgccccaggcactgaggatgcctcagggacctccttccaggtagcccagagacagtagctgtctgagttcaaacctcggtttggggcccgattctttttctcagttcagcactggaggttctcggcacccagccatctggatygacactggaattcactcccgggagtggatcacccatgccaccggcatctggactgccaataaggtcagcatggacctgtagccaaggtgcacccacgatgggggctgcaactgggggcaggaacttactatttaagggcaccttcagttcaacagttacactcagggtgctgtctccatcccgccctttggagcagccaccgtgcactcttaccttttgcagcacggagcccacattgatcccctgccttctagttgtttaaaatccaagcctttggttctgcataaaagatatacctcaggggtttcatgccatcccttcctgc

SEQ ID NO: 48945 - DNA, 605 bp, Homo sapiens
ctccttcctacctgatccagatggtcctgtgcaaaccagggagtcccctgctgacctctccacaggtggcaggatctgtctggtggaggaggagacccaaagttatgcaggcattaggggatggcgcctgtgatatcaaaacccagatctatcctcctccaagggtgatggcttttgctgacccttctgggcctcagtttcccttccgtaaaaagggagtaacatcttacagatgtgtcatgagcactaatcgtgtatcctagcacaggggttggctttcctccttcccttcaagtgcaaggtcaggctacacccctaggatgactgtacccacctctctgggtttggctgttctcagccactttcagggcagagatctatcctgagagggcaatactatgactcatgtcacaagtgacacagctcattccacatcattaattctcccatgtttctagggcttacattttatctcctcattgggaaactgtaggggaacccccctccctccctccctctccttccttcctccatttactcccaggctcccctcagacactygcactctgggacttgattcaaagccagtcatttaccccaggcag

SEQ ID NO: 48946 - DNA, 667 bp, Homo sapiens
atgagagacagaattcatctagtggcagccaaacagccaagttgttcttgctgcttagcctctggagtcctccagccttctaacaatttagtgagcctcctttttccttctaataaatcctctttctgcttaagacrgccagaattaacttatatggcttgtaaaaagaactctgacaaaaattcctggatagaatttcactgggtccagaaatctgaacttaattaaagtacctagctattctacctttattctgatcatctttgttattataaccaagactcagtggtcacttactatatgtcaattattttctaagttttttgtaggcatcaccatattgaatagtcactgaattgcactgaattatagaaccactgaagttgatgctatcattactccctttctatagtttaagaaattgaagctcggagaaatcatgatgcccaagatgaccagcaaatacgaatagaagtgatatgcactcaggcaatccaagatcaaagtcagcattcttactaactacattatacactgactcttttaaaaaccttttctaggctgggcgcagtggcttatacctgtaactccagcactttgggagcccgaggcaggcagatggcttgaggtcaggagttccagagcagcctggccaacatggtaaaac

SEQ ID NO: 48947 - DNA, 667 bp, Homo sapiens
atgagagacagaattcatctagtggcagccaaacagccaagttgttcttgctgcttagcctctggagtcctccagccttctaacaatttagtgagcctcctttttccttctaataaatcctctttctgcttaagacagccagaattaacttatatggcttgtaaaaagaactctgacaaaaattcctggatagaatttcactgggtccagaaatctgaacttaattaaagtacctagctattctacctttattctgatcatctttgttattataaccaagactcagtggtcacttactatatgtcaattattttctaagttttttgtaggcatcaycatattgaatagtcactgaattgcactgaattatagaaccactgaagttgatgctatcattactccctttctatagtttaagaaattgaagctcggagaaatcatgatgcccaagatgaccagcaaatacgaatagaagtgatatgcactcaggcaatccaagatcaaagtcagcattcttactaactacattatacactgactcttttaaaaaccttttctaggctgggcgcagtggcttatacctgtaactccagcactttgggagcccgaggcaggcagatggcttgaggtcaggagttccagagcagcctggccaacatggtaaaac

SEQ ID NO: 48948 - DNA, 609 bp, Homo sapiens
gtatgcttttaaatgtggatcatggaggcttttatattggttttccaaaagtcgacaatagggatcagtcaggttaaaaccataagaaggtcgaaaaagctgcaaacacagattcaaaaatatgtaaaattaatgcattttcactttaaataatctatcaaaatgattagaatgttcattgaaaataaaatgtgccaaaagaatctgaaatggggaaaaacagccacagaaaaattggagttgggcatgctttcctgcctttcctttcctctctcctcacctgcataaattatcccaaagactcaccttaacccaatcagttcctcctctaatcctcttcagcccctgactctcagccaaataagaaaagagaagaggaaaagaaagggaatagcatatagtttgttttaaggtacaaagccaacgctaggattctctcwtttccttctccctctctcgaatcaaaatattctattcaaaagataaaaggattaatagtaattatgattatatttcaatcatcttaaaatgaacaaaaataacaaaatgtttcatcaaaatttatgaaaataactttaacaaatagtagaagtaaaacttagatgttaa

SEQ ID NO: 48949 - DNA, 609 bp, Homo sapiens
gtatgcttttaaatgtggatcatggaggcttttatattggttttccaaaagtcgacaatagggatcagtcaggttaaaaccataagaaggtcgaaaaagctgcaaacacagattcaaaaatatgtaaaattaatgcattttcactttaaataatctatcaaaatgattagaatgttcattgaaaataaaatgtgccaaaagaatctgaaatggggaaaaacagccacagaaaaattggagttgggcatgctttcctgcctttcctttcctctctcctcacctgcataaattatcccaaagactcaccttaacccaatcagttcctcctctaatcctcttcagcccctgactctcagccaaataagaaaagagaagaggaaaagaaagggaatagcatatagtttgttttaaggtacaaagccaacgctaggattctctcatttccttctccctctctcgaatcraaatattctattcaaaagataaaaggattaatagtaattatgattatatttcaatcatcttaaaatgaacaaaaataacaaaatgtttcatcaaaatttatgaaaataactttaacaaatagtagaagtaaaacttagatgttaa

SEQ ID NO: 48950 - DNA, 648 bp, Homo sapiens
gatctttcctggaagggaaacgatcaataataataagtcaaggagtagattgaatatttctttcagatgttgacatttagctgtaaacttttaaaaaatgttaacttttagctgtgacaggcatatgtttctcaagaccaaacctgagctcctgacctgtaaactaagaacacttttaaacaaatccacccatttgagccagagtaacttttctattgacaattaaaataactggttgcccttaaaaggtgactattaaccattacctcatgaaggagagtacactgaaagagaaaattcttctgagaaattrtatggtgactaatttcattaaatgaataaattttgggagaattaatgtaataaaaaatagaacatctttttgaaaagtagtagacaagtgaattaatggtcgacagagaaaatggcaatagagtaaaataatatatttaagggaggagacaaaagccacagttctaagtttatgcactaaagaggaattatatcacctgtaatggaataaatttcaagcacgtttttgcaaagttagtttgtgtggatgtgactcaagttgtgtgaagttggtatatttgtagttcacttgctctaatctagtagaacagattagttttttttaaagagcaatta

SEQ ID NO: 48951 - DNA, 648 bp, Homo sapiens
gatctttcctggaagggaaacgatcaataataataagtcaaggagtagattgaatatttctttcagatgttgacatttagctgtaaacttttaaaaaatgttaacttttagctgtgacaggcatatgtttctcaagaccaaacctgagctcctgacctgtaaactaagaacacttttaaacaaatccacccatttgagccagagtaacttttctattgacaattaaaataactggttgcccttaaaaggtgactattaaccattacctcatgaaggagagtacactgaaagagaaaattcttctgagaaattatatggtgmctaatttcattaaatgaataaattttgggagaattaatgtaataaaaaatagaacatctttttgaaaagtagtagacaagtgaattaatggtcgacagagaaaatggcaatagagtaaaataatatatttaagggaggagacaaaagccacagttctaagtttatgcactaaagaggaattatatcacctgtaatggaataaatttcaagcacgtttttgcaaagttagtttgtgtggatgtgactcaagttgtgtgaagttggtatatttgtagttcacttgctctaatctagtagaacagattagttttttttaaagagcaatta

SEQ ID NO: 48952 - DNA, 648 bp, Homo sapiens
gatctttcctggaagggaaacgatcaataataataagtcaaggagtagattgaatatttctttcagatgttgacatttagctgtaaacttttaaaaaatgttaacttttagctgtgacaggcatatgtttctcaagaccaaacctgagctcctgacctgtaaactaagaacacttttaaacaaatccacccatttgagccagagtaacttttctattgacaattaaaataactggttgcccttaaaaggtgactattaaccattacctcatgaaggagagtacactgaaagagaaaattcttctgagaaattatatggtgactaatttcattaaatgaataaattttgggagaattaatgtaataaaaaatagaacatctttttgaaaagtagtagacaagtgaattaatggtygacagagaaaatggcaatagagtaaaataatatatttaagggaggagacaaaagccacagttctaagtttatgcactaaagaggaattatatcacctgtaatggaataaatttcaagcacgtttttgcaaagttagtttgtgtggatgtgactcaagttgtgtgaagttggtatatttgtagttcacttgctctaatctagtagaacagattagttttttttaaagagcaatta

SEQ ID NO: 48953 - DNA, 546 bp, Homo sapiens
tttctgaaggccatttagaagataatgggtagctgcaaataatgatagttgtcaatgacaataattattcagaattagacctatrccaaactactaacatttctttaagcatcactttctaggaaagaaaattttgtacactacagtatttcaaacttcagatgcaacacctttttaatgtttattactgatactaaagtgatgaattatagtttcactttcagaatggcatcaaaagaatatgaaatatattaggaatactttagatgcacatagtctattcatttttaaagaattttcatataacttatctgtagtttcagaaagtgggattacaccttgggcaaaatgcaatcagttctccagaagttgaattaaagtattaaatagcaactctgataaggcaaaattaataattaatgtgtaaagatgggacagttatacaaagagcaaggaacaacttggcacaagttaataaacacatctaattttctacagaaactcatcaagaaacttaagattgtattctgattttgtaagaccatt

SEQ ID NO: 48954 - DNA, 546 bp, Homo sapiens
tttctgaaggccatttagaagataatgggtagctgcaaataatgatagttgtcaatgacaataattattcagaattagacctatgccaaactactaacatttctttaagcatcactttctaggaaagaaaattttgtacactacagtatttcaaacttcagatgcaacacctttttaatgyttattactgatactaaagtgatgaattatagtttcactttcagaatggcatcaaaagaatatgaaatatattaggaatactttagatgcacatagtctattcatttttaaagaattttcatataacttatctgtagtttcagaaagtgggattacaccttgggcaaaatgcaatcagttctccagaagttgaattaaagtattaaatagcaactctgataaggcaaaattaataattaatgtgtaaagatgggacagttatacaaagagcaaggaacaacttggcacaagttaataaacacatctaattttctacagaaactcatcaagaaacttaagattgtattctgattttgtaagaccatt

SEQ ID NO: 48955 - DNA, 589 bp, Homo sapiens
agaaattaagtggcagtaacagcatcatcatagagatcactgcaaatctagtctaatttataaaattagaaactcacaatagttggtaccttgagaaatattagtgacaaatctctggaaagacacaacagaccacaacatacaaaaatgtcagggcatcatgactatagagaaccatatatggttcttaaactatatggcacttaaactatcatagcattaccaacagcaatctactgctactaatcagtttttataggggaaaatgaacaaatttcagtcacatagatagcatgtataatggcctgggtctgacatataattacgatatgaaattagaaacggtggctaacagttaccaaaggtataaaactctaattttggatgaccrtttggttggccagttcaaactacagcatagccataagagttttgacaaaattatttaagacatccttctaactgcgaactttatggtgttttatatcacacattcctctaggaaaaaaattcaaaagctacatgctgtgattattcagatacaaaaagaaaactggaagaaacaacaatcaggaagaagaaaaaaggc

SEQ ID NO: 48956 - DNA, 589 bp, Homo sapiens
agaaattaagtggcagtaacagcatcatcatagagatcactgcaaatctagtctaatttataaaattagaaactcacaatagttggtaccttgagaaatattagtgacaaatctctggaaagacacaacagaccacaacatacaaaaatgtcagggcatcatgactatagagaaccatatatggttcttaaactatatggcacttaaactatcatagcattaccaacagcaatctactgctactaatcagtttttataggggaaaatgaacaaatttcagtcacatagatagcatgtataatggcctgggtctgacatataattacgatatgaaattagaaacggtggctaacagttaccaaaggtataaaactctaattttggatgaccgtttggttggccagttcaaactacagcatagccataagagttttgacaaaattatttaagacatccttctaactgcgaactttatggtgttttatatcacacattcctctaggaaaaaaattcwaaagctacatgctgtgattattcagatacaaaaagaaaactggaagaaacaacaatcaggaagaagaaaaaaggc

SEQ ID NO: 48957 - DNA, 583 bp, Homo sapiens
ccatttacttggataaatgcttaggaatgccattgctgagttgcatggtaaatctatgtttcattttataagaatctgccaagctagttttcaaactggctgtaccattttgcatttcaaccagcaatgaatgaaagtctctattgctatacgtcctcttcagtattttgatatggccagatttttaaaaaattagccatacaaataggtatgaaattgtcttttaggccagcacggtggctcacgcctgtaatcccagcactttgggaggccaaggcgggtggatcacctgaggtcaggagtttgagaccagcctggccaacatggtgaaaccccgtctctaataaaaatacaaaaattagctgggtgtggtggcgggtgcctgtaatcccagctactcgggaagctgaggcaggacaattgcttgaacccagaggcagaggttgcagtgagtcgatatagcaccactgcactccagcctgggcracaagagtgaaactctgtctcaaaaaaaagaaaagaaactgtcttttaatatttagcattacaggtaaacagtcgtatgtatttactctgtaaataa

SEQ ID NO: 48958 - DNA, 1006 bp, Homo sapiens
gtcaagattgcctatgtactaccagttaaaatgaagacaataaataaaagattaccgaagcttatggctatttattcccaaaaggcttaagagaactcccgttcgcacaatagtgcatgcacaaatatgtatatagtctgatttcaaaaaatgctatttaaaacaaagacgaagaaaaggaaaaaatctagtagaaatattagtacaactaggaatyaaaagaaagactttaataactgatagatgattagtgaaaattgtgaaagtaaaaaagcaacgagtttcaaaaaggcctaaaccaataaacatttagttatatacttacaaatttctgagggaaaaccacagcagtctgtgtataaacattacatatcattgtctgtgcttttaagctaagcattactatttctacattatacccccaatacataaactttctgaaactcgaaattttaaatgttctctctagaacttgaaaacttcattttaattacctcatacaagtaactgcccagcattgcttttctgctgttcaaagaaaaaagggttgtatctttttcaccgtatgtaaacctgagataaaaatgatttcttcttcttgtccacagtttacttgtgaattatatagaaaacatatatactttgttgtccatatgtctgtcctcatctgtatattatcctcaattacatgcttttaaagattcgtgaaatattctacaaacatttggcatagcagaacaaaaaagaggccacttaaacaattagaaataaaagtagcaactattttacatttcaagccttttttcttcatataaaagacattttcatttctagaaaatgaaatacacccatttaattttctatagtatctcttcatacttgttcttaccagtatccatttgccagacgtacacagaaccatctgaacaccccaccaccaggtaatcatcagaaggcctccatttgattacttgaataggaaaaaggtgacgagatgccaacatta

SEQ ID NO: 48959 - DNA, 564 bp, Homo sapiens
tatttctggaaaagatagtctcaggagcagtttaatctgacacgtgtacccataaaaatggaattaaactcagccaggtgcggtgactcacggcctgtaatcccagcactttgggaggccaaggcgggccaatcacgaggtcaggagattgagaccatcctggccaacatagtgaaaccccgtctctactaaaaatacaaaaattagctcggcgtggtggcgcrtgcctgtaatcccagctacacaggaggctcaaacaggagaatcgcttgaacttgggaggcggatgttgcagtgagccaagatcgtgccactgcactccagcctggcagtagagcgagactctgtctaaaaaaaacaggaattgaactcaaacttttcaagtttctgaaaaggaactgattgcccagctttttatagaatgaatcacaaacctcatttttacctataaataatattgctttattttatataataatcactggaatttttagaaagtgttaggaaggagttgttataataatcagttatatataactgaatttaatgattcagcctcatgct

SEQ ID NO: 48960 - DNA, 2369 bp, Homo sapiens
atgcatatattataaattatattatatatgcatatattataaattatattatacgtaaatatataattataaattatattatacgtaaatatataattataaattatattatacgtaaatatataattataaattatattatacgtaaatatataattataaattatattatatgtaaatatataattataaattatattatatgtaaatatataattataaattatatataaatatataattatattatatataatatataattataaattatatataaatatataattatattatatataattataattataattatatataaatatataattataattatataatagattgtctatccatttgcttcacatcacaaagattcctttgatctttctttgtgctgcctcacagccaagcttctcgtagcggcctcggacactcgtctcctccatgcccgaccacctctcatgtcttcaggacctgagtttggattgtggtggccatccggaccccctcagagactaagtcccctcatgtcttctcaagtccttttcctgggcttttcaccgcacttgacactgtgggctgctgacgctcccttctccccggcctccctgacctaacaacctctgctttctgactcgagccgactgtctccgtcctccttcctccctccctactccgccagcatcagttgcgcttcactcccagcactcgcacacacacctccagctgacacgtctatgtggatgactccccaaatgctgacagttcctgatattcagtctcagtgattggttacctttcccagggtcttccgctaatgccaccaacccagtttgtaacacataaaccaggcatctatctgctagcattgcttcctaccacgccttcattttctgtttttaagaagcaatactctccttgcagcgactcaagcttgaaaatgtagcttcatctctgcctccacctctatagcacccggtgctctcagctttccaggagctgccatttctgggtgtgtccctggggtgattttctatctccgccctctggatttgttttctgaaagtctccatatgacttcatggccctggcccgggacaatcttccagtttcttctgcagtcattctggtcccaatatgaagctcatgctaaacacaccagaatcggcatccactgctccctaaacacacatgcatcttcatacctctgctcattgtagtctttctctttggaatggccttcttcccatttctcctgtgacccaaatgtgttcttccttcaaggtccctggggtacttaatgccagtcagtaaaggagactgaaaaaatgcacccagagatgtaagactataacggccatgggagaacagcatttaaagaaggatataatcaaaagcaatgatatttaggggaaaatgaaaataaggatttagaaaagtccactgatgactcttctctaaggagctgtctgttcttgcgatttccaattctggtctcccttctctcttagatccactccagtcgggcttctacatcactccacggaaactgctcctcagggtaacagtggtccccatgtgtgaaaccccatggtcaattcccagacctcttcctactccaaaacccactcctcatcccagttgatggtaaccccatgcttccaagtgagccaataattttggtgccatcttagacacctttctctcaaatccccaagccmgtgggctctacccttcagaatccccacttctcatactctctgcttccaccacagtgctgcaagccatcattgccatctgattcttggattcttttttttttgagacggagtcttgctctgtcaccaggctggagtgcagtggtgatcttggctcactgcaacctccgattcccaggttcaagtgattctcctgcctcagcctctcgagtagctgagattacaggcatgtgccaccacacccagataatttttgtatttttagtagagacggggtttcaccgtgttggccaggatggtctcgatctcctgaccttgtgatccgcccacctcggcctcccaaagtgctgggattacaggcgtgagccaccgcgcccggccacttcttgcattcttaactggtgtccctgtttcttctcacccccacccccaccccaagtctattcataacacagcagccagaaaggtcctgttgaaacctaagtcagatcacttcacttctttggcctcaaccccatttcagtcagggtaaagcgaatcctcctctctgctgcttttactctggcctgggctccccctgaaacattttgcaaacacacaggttgttccttatgcctgggaagcatatccttcagatgacaa

SEQ ID NO: 48961 - DNA, 568 bp, Homo sapiens
ttttctctctgtcccctcaccttgcatgccctctgtcctgcacgcataatctggtttccacatccctccactgaattccctccagtgacatcagtgacattttcaatgaccttctctgcagttgtctcctaggcctccctccagcattgatgctggtgacgccatcctttcttggatgctctttctcagggtctcctgtcactggggcctcatgatagtcttaccgattgycctgcccttgccactggctcctatgctgtttcctcttcttccgattcttccattgggtccccagtgacctctgactcctatcattccttgcatatgggctgaacctagtgaactgctttcaatgaataaaagagagaaaaagagatgggatatcacttctgtgattgggctacaaaagactataatttctgtcttgccagcagcctctctgtctctgtctctgcctctctctttctctttccattggtgaagccagttaccatgtcagagacgctcacatggcaaggaactgaatccctcagcccaacagcccacaaggaactgcatcctgccaaca

SEQ ID NO: 48962 - DNA, 539 bp, Homo sapiens
gacaagaatgtgtactagacacacatgaagcatctcattgcttcataacctctgagggcttagttttcccacygctggtctctaggtagctttcttctctggacagtgaagagaggagcattgggacctttctctctttctgttcagaggctgagagtttcctttcccttggagcctggactttactgcacgagtcactgcatctttcctccttcctccactaagccactcaaaccatccatgacttatctgcagggttcaagatggctgagtgttttgcccttctatgccaggtaaccttgtgaacaggtggacaccctcatgccctggggtcttgccgaaggggagtgagggaggtgctggggcaacccctctgcaggtgctgcttgggctcagattgcatgctggtgtccaggcccctcctggtggtgattaatctgggacacgggccgacagaggtcccagccagggctgctttggtccctcactgtgaagacctttggcttggagactgaactgatctctatagcctgcttcgg

SEQ ID NO: 48963 - DNA, 544 bp, Homo sapiens
agaacctggacactcatgagtggttttccttcaagggctggcaaatttcttctgtaacacgccacacagtaaatatgtgagcttttggggagcatgttcagtctctatcacatattctttgtgtttaaaaatataatcctttataaatgtaaaactacccttagctcacagaccatacaaaatacgccacaggccaaagtggcctgtgggccacagtttgtcagcccctgttgtactttgatggaacctgtctgtgtgcctctaccgtatcctgtgattacaaaggagccgtgggaaggacaaatcaaggtgggccccactctacgcagagcaggacactcttactattccacagctgaagatgtccactcgctttgtcasctgccccacccggatgaaatcctctggcagatacgcggctgacgtccggagcaggtgagtcttcatcatggtgtattttgaccttttgttgacaggacacagatgagccattgggtgagcaagtttgggggtgagattttggtccagcaagacattagagctg

SEQ ID NO: 48964 - DNA, 649 bp, Homo sapiens
tgcaggctgtcagcaaatacaacccagagatcttagctctggaaaatgctatggcattgcagaactgccagtggcgggggaacaagagctgctgaggtaatggaatctgctgggggtgattatcatcacatactccccggaaccacaaaatcagccacatcctgggcccgtgtgcagggtttctgcttcagtctcytctgatcccctgctctgactaacaaagcccagaaaggaagagacttcatggatttttgtgtctctaaaagctgagggcctttctctcccaactcattccagtgaaatgaagtttccctcccacccaggacagcagatgttttgttgtgtgtttcctggcagatcttggattctgcctcagacctttttcttgatctgatgctcatctttccaactgaggacaagggtcctcagctgtgttccggtcatcaggggccaaagagctcaatgctgtccactttttcctctttgtagagcagaatattctccatcagtttccttttggcctcattgatctcaatttgccacgaagtttctgtaactgatgttcaacagaaagcaaacaagagcgacttgaatgaaagttactattattataattcttaaagtcacttaaatcaggttcctgaatcag

SEQ ID NO: 48965 - DNA, 634 bp, Homo sapiens
ggtttctccccaccaatattttaccttcctcacctccttctggggatattataaatagctaagtgwtactgtaaaatgttcacaggggtttctctcctaacacatatgattacttaaaaatgtaaaacatctgtacagcacaacagccatgaacacggttttgggggaataaaagataaactgacaaataaaaaaattcacagtacatcttataagcaaagagccaatttcctaaaatatagttatttcaaagccataggaaaagatcaacaacccaatacaaaattaagaaaaggacttacaaatggtcaataacctttctaataatgagagacattcccattcaaatgactatgagagatttttcacttatgagattagactattaattccggcccatattgacaagtgtgtgaggacagtggtggcataaattaggggcaacttctcttagaagaccactttgatgctagctattgaaatttcaaaggtttatagccactgatgcagaaccttcccttctaaatacatatccttcaaaaacagtccctcatatatacaaagatgtatgtacaaagatggctgataaagcattatttatatcatcccaaaaagttgaaaaccaagtaaattg

SEQ ID NO: 48966 - DNA, 634 bp, Homo sapiens
ggtttctccccaccaatattttaccttcctcacctccttctggggatattataaatagctaagtgttactgtaaaatgttcacaggggtttctctcctaacacatatgwttacttaaaaatgtaaaacatctgtacagcacaacagccatgaacacggttttgggggaataaaagataaactgacaaataaaaaaattcacagtacatcttataagcaaagagccaatttcctaaaatatagttatttcaaagccataggaaaagatcaacaacccaatacaaaattaagaaaaggacttacaaatggtcaataacctttctaataatgagagacattcccattcaaatgactatgagagatttttcacttatgagattagactattaattccggcccatattgacaagtgtgtgaggacagtggtggcataaattaggggcaacttctcttagaagaccactttgatgctagctattgaaatttcaaaggtttatagccactgatgcagaaccttcccttctaaatacatatccttcaaaaacagtccctcatatatacaaagatgtatgtacaaagatggctgataaagcattatttatatcatcccaaaaagttgaaaaccaagtaaattg

SEQ ID NO: 48967 - DNA, 631 bp, Homo sapiens
tgctgtagttggttttattgatttgctggcctaacagaacgtttttccttggagcaaagtacaaatccttcaagtttgaaattcataacctgagatcaatgcctgtggcagcctgtggggatgaggaaggagagccacaggtgccgttaggctgcagcckaatgaaaagagagtgcccagcgcctcagactttgcgcctgggattctgagcacctgtccgagatccccgcttcctgccatcctacctttctgagagaggcaccactgtgaccttcctcgtgccccaattgctttttcctcatgacacaatttgaaatttatgattggatgacttttgtccttctttcttccaatctgttctcagggcattttgagtcaaataaatgatcctgactgatcttaaccattagcacagagttcctcagccaactctgctaagagacctcagtacacacaaaacagtgttcctgcccctcaggacttcaaagcgatagacccaggtggcaaatactgtttttctctgtttacagatgttgcagattttagtgggattgggaggagcatatttccatttaacttgggaggaaaagaggtacataggaaaatcatcttggtttgcttgaatgattga

SEQ ID NO: 48968 - DNA, 631 bp, Homo sapiens
tgctgtagttggttttattgatttgctggcctaacagaacgtttttccttggagcaaagtacaaatccttcaagtttgaaattcataacctgagatcaatgcctgtggcagcctgtggggatgaggaaggagagccacaggtgccgttaggctgcagcctaatgaaaagagagtgcccagcgcctcagactttgcgcctgggattctgagcacctgtccgagatccccgcttcctgccatcctacctttctgagagaggmaccactgtgaccttcctcgtgccccaattgctttttcctcatgacacaatttgaaatttatgattggatgacttttgtccttctttcttccaatctgttctcagggcattttgagtcaaataaatgatcctgactgatcttaaccattagcacagagttcctcagccaactctgctaagagacctcagtacacacaaaacagtgttcctgcccctcaggacttcaaagcgatagacccaggtggcaaatactgtttttctctgtttacagatgttgcagattttagtgggattgggaggagcatatttccatttaacttgggaggaaaagaggtacataggaaaatcatcttggtttgcttgaatgattga

SEQ ID NO: 48969 - DNA, 658 bp, Homo sapiens
caccatcaatcatagtcatcacaaagcaattaagtacctaattgttcatggctctgagtttgctactgaaacagaaaacttcttaggcttgctaagaaaacttcttaggcttctaagccctcctggggcttggaatccaagaattcagtagaagacggaagcgtggtaaggagaacaagaactgaagacataaacaaatttatttgaaatatggttgcagtggagcagggagagtgaattcaggggaaagaaaaataaaatgaaataagatgctgaggttcaagaaaggataaaaggtaaagtggctgaatttaaatgacctgggtttcagtttttaacaaaacataaaaataactgaagaaaggctctatattttatttaacaataacaacaacaaaaatcaaagtgcttgtttatcattgggactcaacttttgcagagtttttgccttaatttttttctctctaaagcagaakttcccatcactttagattcctttccgtgtcaatgatggcttttaatcccaatttccatcattacccctcagtgaaatgattgcttccatgtttgagtatatatacatatgtctgagacttaggtcaattattttcatgcagaaatcggggagggtgctcctgtttttcatatgcatttgtaa

SEQ ID NO: 48970 - DNA, 540 bp, Homo sapiens
acaatccctgcctcttacatttgttggcaggccaactctttcttccaaggccagaaactgtatcccggaataatcttccctgtgtagtcccatatccccattcaatgagcaatgcacaccacagccagaggccctgacagactctgggaccaaccttattaatgggaggcctgagaaaacacccagaaatgatatctattatttataattacatagtgcctgccatttttatgagatttttttcatatattatttaactgtaataacggtccaatgcaggagatactgttagccccatttttcggataaagaaagtgaagcaaagacacgctgaatgaataagttgtccaaagccacactgctacgaagtggtagagcgagtttttgcatctcaacagtctgttctggatcttgactttgtactgctgtgtctctgaatattggacttactttccagtgaagtaaaaagacatataaacagttgattcgaaagcaaggtggtaggcccagcratggaggcatgaagatgttaactcaagg

SEQ ID NO: 48971 - DNA, 1188 bp, Homo sapiens
aatgaaatactgagaacttgggagagtcaatatacattttctatagccttcctcccttgttagacttcgtaactgtggaagtcgcttttgcttgtctgatttctgtaaacatctgagatctgtgtttacttctgtaaagytggttaatagaagtcagtttctgattttttaattttttaatatgttaagtatcttaaaaggaaaaaaacttgttaatctaaatatatgcatttatatatgttatttatatataacttgatctgctgatcttacagggcatttttttaaagaaataataagtaaaaatttcagaagctctaagacattcttccttagaattttgctttgctgttaacgcccggcaactcatgaactttttttctcaagttatttgctggtaccaggagagtgtaggattaaaaatttttttttttactctgaatattattcaaagtgtaacttaagtttaaaatatttaaactgttctttttaatgttattgttgtcatcattgctataaatctgtattacatgagaaatacacaaagttatatgtattttaatgcagtcagatgggggagattttttaaatcaatttttgcaataaatctaaccctctgagcttccttttgaattactctaacaagatatttgaactaatgactaccagattcagacatgagactacagaaattaaccctgtagacaagaattttcattttgttcaaaagtagtacttttactcaccttttctgaaaatcttttaccctccccacctctaacctgaagaaagagctatgtggtatatgtttatgattagtccttagtcatgatttttttttttttttttttttgagacgcagtcttgttctgtcacccaggctggagtgcagtggcgtgatctcggctcactgcaagctccgccttccgggttcatgccattctcctgccccagcctcctgagtagctgggactacaggcgcccaccaccatgcccggctaattttttgtatttttagtagagacggggtttcaccgttttagccaggacggtcttgatctcctgactttgtgatctgcccgcctcggcctcccaaagtgctgggattacaggcgtgagccaccgcgcctggccagtcatgatatatttaaactaaccagatcatttaccatgtttgagactttgtgg

SEQ ID NO: 48972 - DNA, 1188 bp, Homo sapiens
aatgaaatactgagaacttgggagagtcaatatacattttctatagccttcctcccttgttagacttcgtaactgtggaagtcgcttttgcttgtctgatttctgtaaacatctgagatctgtgtttacttctgtaaagttggttaatagaagtcagtttctgattttttaattttttaatatgttaagtatcttaaaaggaaaaaaacttgttaatctaaatatatgcatttatatatgttatttatatataacttgatctgctgatcttacagggcatttttttaaagaaataataagtaaaaatttcagaagctctaagacattcttccttagaattttgctttgctgttaacgcccggcaactcatgaactttttttctcaagttatttgctggtaccaggagagtgtaggattaaaaatttttttttttactctgaatattattcaaagtgtaacttaagtttaaaatatttaaactgttctttttaatgttattgttgtcatcattgctataaatctgtattacatgagaaatacacaaagttatatgtattttaatgcagtcagatgggggagattttttaaatcaatttttgcaataaatctaaccctctgagcttccttttgaattactctaacaagatatttgaactaatgactaccagattcagacatgagactacagaaattaaccctgtagacaagaattttcattttgttcaaaagtagtacttttactcaccttttctgaaaatcttttaccctccccacctctaacctgaagaaagagctatgtggtatatgtttatgattagtccttagtcatgatttttttttttttttttttttgagacgsagtcttgttctgtcacccaggctggagtgcagtggcgtgatctcggctcactgcaagctccgccttccgggttcatgccattctcctgccccagcctcctgagtagctgggactacaggcgcccaccaccatgcccggctaattttttgtatttttagtagagacggggtttcaccgttttagccaggacggtcttgatctcctgactttgtgatctgcccgcctcggcctcccaaagtgctgggattacaggcgtgagccaccgcgcctggccagtcatgatatatttaaactaaccagatcatttaccatgtttgagactttgtgg

SEQ ID NO: 48973 - DNA, 572 bp, Homo sapiens
ttgcacctaactagatttttaaggaaagaagcagtggaggatggggagagtaactattgcagtgtccatactaattcctagattcctttcaagatttaggaccgacagcaatccamtttggctctgagaatactgtttaaatccctcctcagcaattcagtccttttccctcttcctttctttagtcagcaggctcccatggcgaccggttttaaaagaaatcatcctcttcagcagttacctagcaccatggcaactaggacgtcagcaaagcaggatagaccctgcacaaaacagctccaagcaggctccctccctgcctctccagttcagccctgcctgaggcctagggatggggctaatgacatctagacttgtacaccccagaattcctatgtgtttctgtggttttccccataagcatagatatttgggcatgcagtaaactatgttacaggaatctccctcccccccaccaaaaaaaaaaaaaagaccatatttaaagagtgaggatgggtgatgggatggggacagggaggtaggtatgggatggtcttttgggtttaaggaaa

SEQ ID NO: 48974 - DNA, 537 bp, Homo sapiens
ggagtgatgagtccatcctgttgaagtgaaatgagctcaggagtaactcatttattgattcaaggttatcctggatcccacgtgctggtagtggcctggatcctgaggatacacttaaacagagtctgtgccctcaaggacctgctyttccatagggtctcagtcgttctcacagtgggggccccagtgaaggggctctaatagagagaaccatgccttgccacagctgtgatccaaggagggagtgagtaatggccagagagaataatcaagcaaacattcattggagccacttgggttgcatcttacaacacacgcaggtgttcaacacacaagacaagaaaggaaatgtattccgggcaaagggaacagcatgcaggaaggcactggggggacagaagacagcaaagtcactttggggaactgtgatatttagtaggatggggaaaatgggacttctctaagagattgttctctctctgctttcttgagaacagtaccaaacattgccacatatgatatcacaggacaaaagtt

SEQ ID NO: 48975 - DNA, 2024 bp, Homo sapiens
tgataaaacagactttaaatcaacaaagataaaaaaagacaaaggcattacgtaatggtaaaggaaacagttcaacaagaagaggtgactattctgaatatatatgcacccaaggagcacccagattcataaaacaagttcttagagacctacaaagagacttagattcccacacaataataatgggagactttaacaccccactgtcagtattagatcaacgagacagaaaattaacaaggatattcaggacttgaacttagctctctatcaagtggacctgatagacgtctgcagaactctctaccccaaatcaactgaatatacattcttctcagtgccacatggcacttattctaaaattgaccacataattggaagtaaaacactcttcagcaaatgcaaaagaactgaaatcataacaaacagtctctcagatcacagtgtaatcaaattagaactcaggaaatgttatctttctagaaagacaaggaactggagatattgtaatgatagtttgtgtaaaacctttaacttttacagtatcttcatattaataatttccttcatttattgccttataagaaaggtgtaatagacaactggtgattgtggataaggggtagcaaaatcttttccctttttgcatgaaaactttacctttggttaactccctctctttgttcccttggtaatgtgataaaatatttcaactgtgttactaggcaacattatttatggtaagtataacttatgattgtcaaactgcatctgtactgggagaaactacaaactacaaatacttgatgtggactcttgtaactaaacatgccccttgagggaccctggaagctatacctatggagttgttacaagagatactggcttttgagggacattaggcttgtaaaccagagtggctttcatacatgctaatgtggaacttttctggtctgagtggtgtgttttatgcatgtaagactctgccttactattaattagtgtctgagtcacctattgttgggaggtagttgtttgtgtgtgtgagtaggggtgtgaaaatgaaatattttacataaattctttattagcttaggtacaagtatatttatttcctgttgcagttttctttaatttattgtattgggctgaacagaacttcctgtttttcttgtaaaccattccctacaaccaccataactttccctagcacctgtgagctctatacttgttgtgtttggacttgttccatcttaaatatttgtggtttctgcctctgtggattataccctgtaaatcttactccctagtcatacctaggttgatcagttggcagcctgactgcctctgaatgagaagtatgagcaggataactaggcttttgaaaatgccaggaatgtttagtttggagaagggatttgattttggttattttacgtattagattctaactgatcacttctgattatgggagaaagaagatgacagcagaatgattaattttttaatttctatgaaacacaggcagtgtgtttataaacattttcttacattaacttttaaaatgggcatatttgctcccattttataagtgaggaaacaggcttacaagggtaaggaaattgttcaagattacctagttgtaattttttaaaattaaaaaattactcttttttttgaggtatggtctcactctgtcacccaggctggagtgcagtggcacgatcacagctcactgcagcctcaacctccaggkcacaagagattctccacttcagcttcccaagtagctaggactacaggcggtgtactaccaaccatgcctggctaatttttttgtactttttatagtgacggggttttaccatgttgtccagacaggttttgaactccttggctcaagtaatcctcctgccttggcctcccaaagtcctgggattgcaagtgttagctaccatgcccgtaccctagttctaaatgttaatatggaacttgaacccagacatgtctgacagcaaagccta

SEQ ID NO: 48976 - DNA, 555 bp, Homo sapiens
gtcaagtgtataaataaattrtgctatactcatataattgagtactctacatacataataaatcaatgagctatttttatatgcaacaaaatgaaagaatctcaaaaacataatatggagcaaaagaaaccagacacatcacagtacattaatctaattatataacatacaaaaacagacaaaactaatacttcagttagaaataagtacagtggatgcccttgagggaggcataatgactgtaaagaggtgagagggaggctcctgtgttctcataatgttctagttctccatctgggtcctttatatatgagtatattcgtattttcactttgtgaaaatgcaacaatatgtatacttagaatttctgtatttttatatatgtgttttacttccataaaaaagtgtttttaatcattataaaaagatattcacatctttattatcttttgacctcccagattttaaagattttgttgtacttgtaacatctgtttatcccttcacctcccaacttttattactttaatgctttttcacaatctcttggtttat

SEQ ID NO: 48977 - DNA, 619 bp, Homo sapiens
ttcctttactgtatatctatcaaagaactatgtagtctgggaaagactggcaccaatttaagtaaggggattaataggccaaaacaaagcaaacactactgaaatggaaatgccaagargaaaagtgacatgataaagctgacattattgaaatggaaaacagtgtagagtttaatagcatgaatagctgagatattctcttgtcagaaaaaacattgcccttcattgaaatacttcaacttttgtttaattctacatcaaagatgtttctttgaatgtttgacataattagtaatttctcttgttattctttcaaaagaaattgaacaaagattgtgggcacacataatatgagttagaggacaagcacgaattagtttgaagacctagacctttatttactctagtgttgagtctagctataatctagaacatgtagacaatatgatgaccaacaagcattctattacttgactaaaatttgtgggatatgttaagcattactcagaaataatttctatgccagcttttccatttgtctggtgtgtaggtgctgggatgtgtgtgtgcacacatacgtgcacattcatctatgtgtaaattaaaacattcattaaat

SEQ ID NO: 48978 - DNA, 619 bp, Homo sapiens
ttcctttactgtatatctatcaaagaactatgtagtctgggaaagactggcaccaatttaagtaaggggattaataggccaaaacaaagcaaacactactgaaatggaaatgccaagaggaaaagtgacatgataaagctgacattattgaaatggaaaacagtgtagagtttaatagcatgaatagctgagatattctcttgtcagaaaaaacattgcccttcattgaaatacttcaacttttgtttaattctacatcaaagatgtttctttgaatgtttgacataattagtaatttctyttgttattctttcaaaagaaattgaacaaagattgtgggcacacataatatgagttagaggacaagcacgaattagtttgaagacctagacctttatttactctagtgttgagtctagctataatctagaacatgtagacaatatgatgaccaacaagcattctattacttgactaaaatttgtgggatatgttaagcattactcagaaataatttctatgccagcttttccatttgtctggtgtgtaggtgctgggatgtgtgtgtgcacacatacgtgcacattcatctatgtgtaaattaaaacattcattaaat

SEQ ID NO: 48979 - DNA, 560 bp, Homo sapiens
ggagtgcagtggcgygatctcggctcactgcaacctccacctcccaggttcaagcaattctcctgtctcagcctcccgagtagctgggatcaccggcgcatgccaccaagcctggctaatttttttttgtatttttagcagagatggggtttcgccatgtaggccaggctggtcttgaactcctgacctcatgatctgcccgcctcagcttcccaaagtgctgggattacaggtgtgagccaccgtgcctggccccaagaccagcttttcatgagagaaagccgcagtgggcttagcaagggcaggctgatgtgaggcggaaggtgagcacagcatttggggaggctagtgcaactgtccctaaagggcctgccctcagacagtggtggtgggaaagaagagaagggcctgatgcaagaggtgtctgaggggtagcattgatacaggactcagtggcccattggatggggacatggtgtgtgggctggtgtgtgtggtgtgttgagggcagaaagacacggcaggactgcatgaattatctgagtgccatggttggaggg

SEQ ID NO: 48980 - DNA, 560 bp, Homo sapiens
ggagtgcagtggcgcgatctcggctcactgcaacctccacctcccaggttcaagcaattctcctgtctcagcctcccragtagctgggatcaccggcgcatgccaccaagcctggctaatttttttttgtatttttagcagagatggggtttcgccatgtaggccaggctggtcttgaactcctgacctcatgatctgcccgcctcagcttcccaaagtgctgggattacaggtgtgagccaccgtgcctggccccaagaccagcttttcatgagagaaagccgcagtgggcttagcaagggcaggctgatgtgaggcggaaggtgagcacagcatttggggaggctagtgcaactgtccctaaagggcctgccctcagacagtggtggtgggaaagaagagaagggcctgatgcaagaggtgtctgaggggtagcattgatacaggactcagtggcccattggatggggacatggtgtgtgggctggtgtgtgtggtgtgttgagggcagaaagacacggcaggactgcatgaattatctgagtgccatggttggaggg

SEQ ID NO: 48981 - DNA, 575 bp, Homo sapiens
ttataccagaaaactaccaaaatgctcagagaataatggggacatgtcaaagggaacaggattcagtgtaaaagggctcccactgggaaaaccaagaacaaatttgaggatcaaaataagtcactgtaataataaattataacacactgaattaaataagattacatgaattcataacataaatcagtaaacagtagattatttgggggagaagttgataacaaaactaaaagttatagaaagaacaatgggtatacagaagcacatttgaccactatcatagagataatttgggaggactaattagtggctgtaaatatgctgggtagaggaytgatggggaacagagtattagtagaatctcagaatacctcttcaactttaaggttaagaaattgagtagcagaattatagatcaagattaatatcaccagtggtatgacaagttgacatcctacgtttcctggcacgtcatcatttgtgtggtattcttgccaagaatactgtaactaagtctgatcaggaggaaatatcacccaggttaaaggtcatcctgcggaatgtaaggcataaaa

SEQ ID NO: 48982 - DNA, 554 bp, Homo sapiens
tgcacaatcagattcctcaggttacctctgatggaaaaagacttcaggtataaaatttatcaatgcatcttaaaatgcatgtaaacaattgttatgtmtaatgttacgggatcccagggggtgttgcttttctggctggaaacctctgcggctagtgatgcccttgcccgggttttgctcagttccacccacttggcctggcaggctgtgctcagctctcactaccagcctggaccccatgcctcccaagggtgagccaggcgcggagtggtgaggcgtgtatgagcgaacgtggggtctggccatggcacacagccaggcacattggctgcggcagggcgggtagctccaggcactggcatgggcaccggctctctgtgaggctggtggccaggccccgaggcttcaggtcttccccagttgaaggtggggcttcaccggggactagcccccttccgcccaggagcctgtctgcctcctgctgctgttcatggtgcccagactgttcatgccaagggacacgtgcaggccagcactgggccgtcctcagcctg

SEQ ID NO: 48983 - DNA, 653 bp, Homo sapiens
tggtgtgtctgtgcagatcttttgcacactttttaattgagttatttattttcttatgattgagttttcaaagtttgttgtacattttggatataacccctttatctaatacatgttttgcaaacattttctcccagtctttagtttatctttttattctcttaacatgtcatttgcagagcaggagtttttaattttaatgaggtacagtgtataatttttttatggatcaaacttttggtactgtatctaaaaagtcgtcaccaaaccaatggtcatgtagattttcttttatttatgttctagaagttttatagttttgccttttacatttaggtatataattcattttgagttaaattattgtgagttctaataattttttattgctgtttctcatttgtattctgattttaatgttaagttctcaaaggggcctttcctaatcaycctagctaaagcagtccctcccaaccaatcactgtttgatccattattctaattttcccctagcattgccattatctaaaattatattgttctttatttattttcattcttactttttatttctctataagtcctacgtgagctgagactcagtttgttttgtttactgctctacccccagggtctaagacactacttgaaaa

SEQ ID NO: 48984 - DNA, 599 bp, Homo sapiens
tttgtcttacacaaataattaagttcctttaagttctttttaaaagtatttttttctgattttagatttacagaaaattcattatattcttaatataggaatcaacaggtaatatagtagaaagctattaaagtacaggtgacaaatggcaaataaaatacagatgacatayacaacatgcaatatagttactattttctgaataaaaaatctggaccaagataagcccttccatgggaaaaataaataatttgaaaacagaactatcttagaaaatccagaatgtgtcatgattgaaaatatacatcattataaatgcaaagaaagatatcattcatttaaagaatacaaagaggttccatttgatacttattttaccatctagaattcaactgcacattctgagcaaaaatatctttaaaaaagaaatggaaataaaagcagtacagggtattatgcttctgttaaactcagtgagcatgtgcccttgccaatggatatgatcaaacctaaatcagtcaagggatgttgacaacctgtggaaagaacatatgattttatttgaattgtatcctggacgatgggcaaatatgtcagaa

SEQ ID NO: 48985 - DNA, 581 bp, Homo sapiens
aacaaacaaacaaacactgtgatccttggagtaaatatgttcatgagccctcaatctctgccctcagttattttcagcaagtctcagtgtcattcagagaacatgctcagggagcagctatgttgcacagtggatgggacatgggattttgggggtcaggcagattggggctgggattcatactcccacatactagctgtgttatcttggaaagtgattaaaccccttatgtctcagttgtctcatccctaaaaaaagataataaaacctacctcttaatattgttgtaagagttagaaataacatattaaagtatcctttacccagaaaagttattcaatgaacaacagctattgttttaggaaaggagctgcctttgtgaaatagtttaactatcgactagttaaactagcgaaatagtttaactatcgactagttaagctagcgaaatagtttaactatcgactagttaagctagcgaaatagtttaactatcgactagttaagctagcgaaatagtttaamtatcgactagttaagctagcgaaatagtttaactatcgactagttaagctagcgaa

SEQ ID NO: 48986 - DNA, 562 bp, Homo sapiens
cccagttatcaaataccttgaaaataactgcaatatgttkttcttaatcatttaaaatttttggaaataagtgaagttggagtattactagtttttaaagttatatttaggtttcataaatacctgtatttttataatttgtttcagtcgtcattgaattttgagaagcattctgaaaactttgcatggacagagaatcgttatgatgtgaaccgtcgacgacacaactcttcagatggctttgattctgctattgggcgtcctaatggaggtaaaatttgctaaggaatgatgtttatggctaattttctttatgatttttaaagaatgttttgatgtgattcaatctttaagcttctcttctttgaatttatattactttgctattatcaaataaaggtaactttggaaggaaagaaaaaaatggatggcgtacacatggaagaaatggtacagaaaacataaatcatcgaggtggataccatggtggaagttcccgttctcgtagcagtattttccatgcaggaaaaagccaaggactacatgaaaacaacatacctga

SEQ ID NO: 48987 - DNA, 562 bp, Homo sapiens
cccagttatcaaataccttgaaaataactgcaatatgttgttcttaatcatttaaaatttttggaaataagtgaagttggagtattactagtttttaaagttatatttaggtttcataaatacctgtatttttataatttgtttcagtcgtcattgaattttgagaagcattctgaaaactttgcatggacagagaatcgttatgatgtgaaccgtcgacgacacaactcttcagatggctttgattctgctattggrcgtcctaatggaggtaaaatttgctaaggaatgatgtttatggctaattttctttatgatttttaaagaatgttttgatgtgattcaatctttaagcttctcttctttgaatttatattactttgctattatcaaataaaggtaactttggaaggaaagaaaaaaatggatggcgtacacatggaagaaatggtacagaaaacataaatcatcgaggtggataccatggtggaagttcccgttctcgtagcagtattttccatgcaggaaaaagccaaggactacatgaaaacaacatacctga

SEQ ID NO: 48988 - DNA, 1980 bp, Homo sapiens
gacaaatgtgtacagttgtaataaccaccgcaatcaagataatactcagttacccagaaaattccctcttctttcttgcagtcatcccccttccaagttgatctattttctatctctatagttttgtcttttctagattttcattataaatagaatcctatagtagtaagtagtaagatcattgtaatataaaggygctaatttttggccaggagctgcaggtctaattccttccatttttatgtgacagggacttgccatgaggtgttgaagccttgtttcactgagttggagagactggacctaaatggcgcagcatgactttgctccagcctggcttaatttccctactccaccatcatcaacaaaggtactctttctgcatctttctttctgtctgcttctcttgcattcattttttacacaaatgtaattaagtcatggaggagtaataatatctttgcagagaagtacatttgtggctgggcgcggtggctcacccctgtaatctcagcactttgggaggctgaggtgggtggatcacctgaggtcaggagttgaagaccagcctgaccaacatggagaaaccctgtctctactacagatacaaaattagccaggcgtggtggtgcatgcctgtattcccagctattcaagaggctgaggtgggagaatcacttgaatctgggaggcagaggttgtggtgagctgaggtcgcgccattgcactccagcctgggcaacaagagcgaaactgtctcaaaacaaaacaaaacaaaaacaaaaacccaaaacatttatattaacatctaagttatttaatttgttggctctattaaaattttttttttgagacagagctttgctctgtcgcctaggctggattgcagtggcatgatcttggcttattgtagcctacacctcctgggttcaagcgattcttctgcctcattctcctgagtatttgggattacaggtgtgggtcaccatgcctgactaatttttgtatttttattaatagtagaggtgaggttttgccatgttggctaggctggtctctaacgcctgacgttaagtgatctgcccgcctcagtctcccaaagtgctgggattacaggcatgcgccaccgtgcccagcctgttctattagttaacaagtcagtttttattacaccatcagcgtacactaagccatttatttcaaagttgtcttttgtagtaatcagagtttcacaaattttaattcttaccagtcatatactttgaacagagcatcttacctttttctatactgttttttactcttacatggattgacttgttaatgatatccaccatacatgatgtacttcagtttgcagagtgctttgctgaacattatctaatttgttcataattccatgaatgtggtgatttagaattattcttagtccctgctgtactcattttaaatattgatctcctttatgagggaaagtaaaatgattgaggtgcagagtaaagggtttgtgcacagtcactttgggatgagggtgatttatctgagttttctgtgtctttccccatctttctgtaaagctgtttgcctcatttgatatcaaacccatccgttaggctccattaattcccagctgattgctctattgttttcattaatgcctgaagggcctaaatttgatccatgctctgatccaatttagttatggcaggtgtagttttgaggcccagtctcctgaggttggttctgaccctagtagggctctccttacgtatctctttctcaggttcattcagaactagctggcctgtgattcagcttattgctcttcatgcagaggagctacttattttcttactaccagtatctccattgtttctgagagggctgttagtgtttgaataaagttagttcctttgagagactgcttcttacccttggcaaaatctttgagtcattactccacgtgctaggtggagcaat

SEQ ID NO: 48989 - DNA, 1561 bp, Homo sapiens
aaccttagaaagtatagatagtaattctacaatggcatatgtgctacaaattttattttaccccatacacttatagggactatgcttgggcatccacttacatgtctgtgaacaactgtttttagccaagtgacagataggaaggatgtttctacccaaggtgtgttatacataagagaactaatcacttttttcaractttatgcaaataaagccaaattagatttattaaggtgatgaaagagagtagggactttttaatgggtagcaatgctgtgcgttatctaaatgcaatgcagatgtaatgatgcattagaaatgctgagaaaatttaatcagtgtagaaaaaatataatgaaatggttgtttaaacactgtaaagcaatgttagagtaattacttcccattgagcagggcgtggaacacattacccaggctgtttgattagtcatcctgcctgcaacatctggctttttgatccattttgattttaatataatttctaaacttcccaattgaagttttagaatgaatgaataaataaaataacttcgataggagacaaagttttgactcactcatgacagattaaaactacccgctactcactcacctttacctctctgtcatgaaagagaaccccaaacgccgggatggtggactttctttttttgtttgtttgttttgtttgtttgtttgtttgagatggagtcttcctctgttgcccagcctggagtgcaatggtgtgatcttggctcacttggactttcttgtttttaagattaggtgtcaaatatttaaaatgtgttggttttctttgggtggtctttctattggtatataggtgggagtaggggtgatttttagaacaattatcatcttacagataggaaaggaatggaaagaatgggtcataaaaactaatatttctgctttctctttgtgtaagtttacatatttcttgtagaaaatttagaaagtaccgataagaaaaataagaaaatacatatcattcataattctatttcccagaagtaaacattattaatattttggggaattttttactaataactgatggttaatctactctactctaataattgtacaattcagaaattagcagcactgcagttaagagagtaggagctggagttcagatgacctgggtccaaatcctgacttcaccttgagtaagtatcttgtttcttgctgcctcattttccccatctacaaaatgaaggtaataataataactccttcataactttgttgtgagaattaaaagagataatatacccaatgagcctagaaaaaatgccaagcacttagtaagttttgataaatattagctattattacagctattattatcatgattgctgtctataagaattatatgctgcatatatttgtataatttacctttttcatttagcattatagtgtatctatcttttatgtcagcagatgttctatgatattctcctaatggatacattgtaggccattataaggactcactgtatcagtctgttttcaagctactgataaatgcata

SEQ ID NO: 48990 - DNA, 682 bp, Homo sapiens
tgccttgaacaaatgttcacatatctgatgtcataaagagaaaatggggagtttccatgaaatacarttgttgaactctctcccctgagatcctggtatatttggtcttgtgtgagtcctgagcacttatattttaatttctgataattctaaggagcagccaagatggggaccctccataagcaggccatcaccccaccaggaaagagtcttcacttggctcaaattggcactttctacagcttgggaggcatttgctgaagggagtgaagtatgcagcctttaaggactcttgtgctaacccatcaaatacatctagctggtgtcagatccttgaagccgtccctagagagctcctgtggcagccccaggtggctgtctcggtgcccacccccacccactcctgacagactctctgcacttgtccccttccacctgccttctgtgccttcctgcacctgcccatctggcacccaatctgttctgatcatctcttggaatcaccagttctttaccttcccttagtgaactcagtcaaaatttgcctctgaaacctccagggagcattctaccacctttaaagaagccagttgttggcttcccttggccctttgctctaaatcaaaaataacaatcgacaaaaacagcaacaacaaaagctgtttttttttcttttatgaca

SEQ ID NO: 48991 - DNA, 616 bp, Homo sapiens
atatttttaatgtaccaaaatactagaaaaaaactaatgtgaacataacaaaaaccttaaaaacataaacagttgctttctttgggaaaccattggctaaaaattgtttgattgccaataaaactatttctttatgtttactcaacaagaaaaataaaagtcaacaaatatcctactgcttgagaaacagaaaacttctaaattgagatcaccatcctttaatttaccttggatgtaaagtgaaaaccaaaagttaggtaacaaatacagttgtgatgccataaaaactactatgttttacatatctcctgtaagtcagacttcgtactagacaacttaaagatacagtgtcatttaatcgtcaaaactataactagcaaatagacagatatcaataacytcatttacaaatgaggtgtaaagaactcaagtaactttcccagggtcactatgcaagtgagtggataccaatattcaaaaattcagtctaacacagacctaacttctctttacaaaatcctactgtctcaagaatgactattacataaaaattattaaatgttatgaactccaaggggcaataaaaagatctcttcatttttgaaatacaactaaa

SEQ ID NO: 48992 - DNA, 527 bp, Homo sapiens
tcaaacgcactatccacattccattgattgcctttgtaactagtcattattatggcctaaaatggtcaattgagaaaataatcaattcaaacataccatgaagaccattgccagaayaggtattctgaaaccaaggttagcctagcaaaatatagtatagttggaaatatcaaagagttgcagccactaagtcaaggtttttatgttagtctgttctagcattgctataaagaaataccaggccagatgcggtcgctcacgcctgtaatcccaactgtttgggaggccgaggcaggtgaatcatctgaggtcaggagttcaagacgagcctggctaacacggcaaaacctccatgtctactaaaaatagcaaatcagccaggcgcagtggcaggcacctgtaatcccagctttcactcgcgtccgtccgtgtgaagagaccatcaaacaggctttgagtgagcaatgaggctctttatttcacctgggtgcaggcgggctgagtccgaaaagggagtcagtgaaggg

SEQ ID NO: 48993 - DNA, 1669 bp, Homo sapiens
ttagtagttagttgttgacatactcaaaacaaaaaaacaaaaaaacaaaaaaacaagggccgggcgcrgtggctcaagcctgtaatcccagcactttgggaggccgaggcgggcatatcacgaggaggtcaggagatcgagaccatcctggctaacacggtgaaaccacgtctctatcaaaaatattaaaaaattagcccggtgtggtggcgggcgcctgcagtcccagctactcaggaggctgaggcaggagaatggcatgaagccgaaagtcggaggttgcagtgagccgagatcgggccactgcactccagcctggaggagagagcaagactccatctcaaaaaaaaaaaaaaaaaaaaaaaaaagaattgttttatgtagtgctctatcatctccattggccaattctaccacatgggatatcaataactggaacacttatgtggaaaaaaaagtcccaaaagtacatttttaaattaggcctctgtttttgttttgacaaatatcatctattttaattttgaagtaacacatgaaaatgatgattccattactttttctctaacttagtgaaataattttatatagattttgctaaaatttccttactactattcaaagtagtactcataatgttccctgtcattccatcaagaataaacagtgacacaattaaatatgtaattactcatataaaagcataagtgaacattgccaaacacccagattctcaaagtgaagttcatgagaggaataaatgtatccactttcatctattttaagtcaaatctggctttattattgctgaagtaaataatacattcccgcatgtttgtatccaaattctgtatattaatctcatacaaatagaatttctttaaaatagatattctgtccacatattttcttaccaagtgtttgaatttacttctgcatggcaaggaagcaaacaagatttttatattgtgtcatggtaaatgaataaatagtctttccattcattagggtggacataatagaataataatgtattcgtggtggtcagttttcaataaatattggaattagtaattgctataaaactgcctgttatttactcatttggaagtcttaaaggaacatgaatatgcatgaactacttctataagtcgaaaaccatatttttcttttgtttgttgttctctttgcgttgctatagagatcttctgtactttttttcccccaatatccattacctttgccatctcaagctaggaagtatttgttgttgttgttgttgtttatattttattttatttatttattttttgagacagagtctcgctctgtcaccaggctggagtacagtggcgtgatctcggctcactgcaacctctgactccctggttcaagcgattctcctgcctcagcctcctgagtagctgggataacaggcgatcgccaccacgcttggctaatttttgtatttttagtagagacggggtttcaccatgttggccaggatggtctcgatctcttgacctcgtgatctgcccaccttggcctcccaaagtgctgggattacaggtgtgagccactgcgccgtctggaagtgttttaagtataattgtagcgcaatacagttcattatgcccgttctctcgcagtagcatgcttagaccttctt

SEQ ID NO: 48994 - DNA, 1669 bp, Homo sapiens
ttagtagttagttgttgacatactcaaaacaaaaaaacaaaaaaacaaaaaaacaagggccgggcgcagtggctcamgcctgtaatcccagcactttgggaggccgaggcgggcatatcacgaggaggtcaggagatcgagaccatcctggctaacacggtgaaaccacgtctctatcaaaaatattaaaaaattagcccggtgtggtggcgggcgcctgcagtcccagctactcaggaggctgaggcaggagaatggcatgaagccgaaagtcggaggttgcagtgagccgagatcgggccactgcactccagcctggaggagagagcaagactccatctcaaaaaaaaaaaaaaaaaaaaaaaaaagaattgttttatgtagtgctctatcatctccattggccaattctaccacatgggatatcaataactggaacacttatgtggaaaaaaaagtcccaaaagtacatttttaaattaggcctctgtttttgttttgacaaatatcatctattttaattttgaagtaacacatgaaaatgatgattccattactttttctctaacttagtgaaataattttatatagattttgctaaaatttccttactactattcaaagtagtactcataatgttccctgtcattccatcaagaataaacagtgacacaattaaatatgtaattactcatataaaagcataagtgaacattgccaaacacccagattctcaaagtgaagttcatgagaggaataaatgtatccactttcatctattttaagtcaaatctggctttattattgctgaagtaaataatacattcccgcatgtttgtatccaaattctgtatattaatctcatacaaatagaatttctttaaaatagatattctgtccacatattttcttaccaagtgtttgaatttacttctgcatggcaaggaagcaaacaagatttttatattgtgtcatggtaaatgaataaatagtctttccattcattagggtggacataatagaataataatgtattcgtggtggtcagttttcaataaatattggaattagtaattgctataaaactgcctgttatttactcatttggaagtcttaaaggaacatgaatatgcatgaactacttctataagtcgaaaaccatatttttcttttgtttgttgttctctttgcgttgctatagagatcttctgtactttttttcccccaatatccattacctttgccatctcaagctaggaagtatttgttgttgttgttgttgtttatattttattttatttatttattttttgagacagagtctcgctctgtcaccaggctggagtacagtggcgtgatctcggctcactgcaacctctgactccctggttcaagcgattctcctgcctcagcctcctgagtagctgggataacaggcgatcgccaccacgcttggctaatttttgtatttttagtagagacggggtttcaccatgttggccaggatggtctcgatctcttgacctcgtgatctgcccaccttggcctcccaaagtgctgggattacaggtgtgagccactgcgccgtctggaagtgttttaagtataattgtagcgcaatacagttcattatgcccgttctctcgcagtagcatgcttagaccttctt

SEQ ID NO: 48995 - DNA, 1669 bp, Homo sapiens
ttagtagttagttgttgacatactcaaaacaaaaaaacaaaaaaacaaaaaaacaagggccgggcgcagtggctcaagcctgtaatcccagcactttgggaggccgaggcgggcatatcacgaggaggtcaggagatcgagaccatcctggctaacacggtgaaaccacgtctctatcaaaaatattaaaaaattagccsggtgtggtggcgggcgcctgcagtcccagctactcaggaggctgaggcaggagaatggcatgaagccgaaagtcggaggttgcagtgagccgagatcgggccactgcactccagcctggaggagagagcaagactccatctcaaaaaaaaaaaaaaaaaaaaaaaaaagaattgttttatgtagtgctctatcatctccattggccaattctaccacatgggatatcaataactggaacacttatgtggaaaaaaaagtcccaaaagtacatttttaaattaggcctctgtttttgttttgacaaatatcatctattttaattttgaagtaacacatgaaaatgatgattccattactttttctctaacttagtgaaataattttatatagattttgctaaaatttccttactactattcaaagtagtactcataatgttccctgtcattccatcaagaataaacagtgacacaattaaatatgtaattactcatataaaagcataagtgaacattgccaaacacccagattctcaaagtgaagttcatgagaggaataaatgtatccactttcatctattttaagtcaaatctggctttattattgctgaagtaaataatacattcccgcatgtttgtatccaaattctgtatattaatctcatacaaatagaatttctttaaaatagatattctgtccacatattttcttaccaagtgtttgaatttacttctgcatggcaaggaagcaaacaagatttttatattgtgtcatggtaaatgaataaatagtctttccattcattagggtggacataatagaataataatgtattcgtggtggtcagttttcaataaatattggaattagtaattgctataaaactgcctgttatttactcatttggaagtcttaaaggaacatgaatatgcatgaactacttctataagtcgaaaaccatatttttcttttgtttgttgttctctttgcgttgctatagagatcttctgtactttttttcccccaatatccattacctttgccatctcaagctaggaagtatttgttgttgttgttgttgtttatattttattttatttatttattttttgagacagagtctcgctctgtcaccaggctggagtacagtggcgtgatctcggctcactgcaacctctgactccctggttcaagcgattctcctgcctcagcctcctgagtagctgggataacaggcgatcgccaccacgcttggctaatttttgtatttttagtagagacggggtttcaccatgttggccaggatggtctcgatctcttgacctcgtgatctgcccaccttggcctcccaaagtgctgggattacaggtgtgagccactgcgccgtctggaagtgttttaagtataattgtagcgcaatacagttcattatgcccgttctctcgcagtagcatgcttagaccttctt

SEQ ID NO: 48996 - DNA, 617 bp, Homo sapiens
tttctttgactgtgcggatgcttcttaatctaattaggttattttttaaaatttattttattttattttttatttttttttgtgacggagtcttgctctgtcacctagactggagggagtaatctcggctcactgcaacctccacctcccaggttcacgtaattctcctgcctcagcctcccaagtagctgggattacaggcgtgtgcaaccacacctggctaatttttgtattcttaataatagagatggggtttcaccatgttggccagcctggtctcaaactcctgatctcacgtgatttacaaagttgtaaaaaaccctagctgaaataaaataaactacaagggtggctttaatacttctgaagacacaatagcactcgccttggcctcccaaagtgcagggattacaggcatgagccactgtgcccagccctaattaggttctatttattcatttttgtttttgttgcatttacttttggggtcttagtcataaattgtttgcctaggccaatgtctgggaaagtttttctaggttttcttctrgaatttttatggtttcaggatttatatttgtttttaatccatcttcaattgatttgtgtatatcgtg

SEQ ID NO: 48997 - DNA, 617 bp, Homo sapiens
tttctttgactgtgcggatgcttcttaatctaattaggttattttttaaaatttattttattttattttttatttttttttgtgacggagtcttgctctgtcacctagactggagggagtaatctcggctcactgcaacctccacctcccaggttcacgtaattctcctgcctcagcctcccaagtagctgggattacaggcgtgtgcaaccacacctggctaatttttgtattcttaataatagagatggggtttcaccatgttggccagcctggtctcaaactcctgatctcacgtgatttacaaagttgtaaaaaaccctagctgaaataaaataaactacaagggtggctttaatacttctgaagacacaatagcactcgccttggcctcccaaagtgcagggattacaggcatgagccactgtgcccagccctaattaggttctatttattcatttttgtttttgttgcatttacttttggggtcttagtcataaattgtttgcctaggccaatgtctgggaaagtttttctaggttttcttctagaatttttatggtttcaggatttatatttgtttttaatccatcttcarttgatttgtgtatatcgtg

SEQ ID NO: 48998 - DNA, 849 bp, Homo sapiens
accatattggtcagctgctctcgaactcctgtcctcaggccgtccacccaccctggcctcgtaaagtgctggaattataggcttgagccactgtgcctggccaactttttaaaaaaaattgtggtaaaatgtacctaacataaaatttaccctttttttttttcctttttgagacagggtcttgctctgtcatctaggctagagtagtgcagtggtaccatcacagctcactgcagcctcaacttcctgggatcaggtgatccttccacctcagactccagagtagttgggacaataggcatacgctactgtgcctggccaatttttgtattttttttttttttagagacagggttttgccacgttgctcagactaaaatttaccatttataaagtacaaaacagtggcattaagtccattcaccatgtcataaaactatcagcagtccagcacttttctgtcctcccaaagtcaggtactttgtcatcctcctgacacaggaggatggctggcatgtccctaggcacatctgaattttgaggaaatcccacacaacatggcaaggaaaggaarcacctgccagctcatgagcagggtgtcagtggtcgccccttcagccgtgtgacatgagcaacagtcaccctttgctttccttccgactcaggaccaaggtcagaattccagcgagtagactgccagaggacatcctgattgcaggaagaaccaggaatctgctccagtctctttcttttcttaagcaaaatcgatgcatttcactaacttcactcctttcattagaaatagggcacgtgttttgtaactcacctcaaagctgaatgccacccccc

SEQ ID NO: 48999 - DNA, 849 bp, Homo sapiens
accatattggtcagctgctctcgaactcctgtcctcaggccgtccacccaccctggcctcgtaaagtgctggaattataggcttgagccactgtgcctggccaactttttaaaaaaaattgtggtaaaatgtacctaacataaaatttaccctttttttttttcctttttgagacagggtcttgctctgtcatctaggctagagtagtgcagtggtaccatcacagctcactgcagcctcaacttcctgggatcaggtgatccttccacctcagactccagagtagttgggacaataggcatacgctactgtgcctggccaatttttgtattttttttttttttagagacagggttttgccacgttgctcagactaaaatttaccatttataaagtacaaaacagtggcattaagtccattcaccatgtcataaaactatcagcagtccagcacttttctgtcctcccaaagtcaggtactttgtcatcctcctgacacaggaggatggctggcatgtccctaggcacatctgaattttgaggaaatcccacacaacatggcaaggaaaggaagcacctgccagctcatgagcagggtgtcagtggtcgccccttcagccgtgtgacatgagcaacagtcaccctttgctttccttccgactcaggaccarggtcagaattccagcgagtagactgccagaggacatcctgattgcaggaagaaccaggaatctgctccagtctctttcttttcttaagcaaaatcgatgcatttcactaacttcactcctttcattagaaatagggcacgtgttttgtaactcacctcaaagctgaatgccacccccc

SEQ ID NO: 49000 - DNA, 524 bp, Homo sapiens
cactcactgcagtctcaacctcctgggctcaagtgatcttcctgcctcagccccctgagtagctgggaccacaggtgtgcatcaccatgcccggctaatttttaagttttttctagagatgagggtctcaccatgttggtcaggctggaaaatactttacattttaatgagasgtatacaaacctagatttttaaaactataaacttctattgaagtatataaacaaaatatgaatatgcaatgacagcatgttcttggatgggaagatctaatctcaaaatatcacttccccaaaattaatgtataaattttgtgcaatcctgattttattccagaaaagagatatttttatttgattttttaaattgaatgaaatggtctgatagtttttatggaaaaaataatgtctgaaataagtaataaaattatgggaaaataatatcgaggtgggattaatattactggctattaaaacatactataaaccactgaattaaactaagaacttggtaatgaggggcca

SEQ ID NO: 49001 - DNA, 524 bp, Homo sapiens
cactcactgcagtctcaacctcctgggctcaagtgatcttcctgcctcagccccctgagtagctgggaccacaggtgtgcatcaccatgcccggctaatttttaagttttttctagagatgagggtctcaccatgttggtcaggctggaaaatactttacattttaatgagaggtatacaaacctagatttttaaaactataaacttctattgaagtatataaacaaaatatgaatatgcaatgacagcatgttcttggatgggaagatctaatctcaaaatatcacttccccaaaattaatgtataaattttgtgcaatcctgattttattccagaaaagagatatttttatttgattttttaaattgaatgaaatggtctkatagtttttatggaaaaaataatgtctgaaataagtaataaaattatgggaaaataatatcgaggtgggattaatattactggctattaaaacatactataaaccactgaattaaactaagaacttggtaatgaggggcca

SEQ ID NO: 49002 - DNA, 555 bp, Homo sapiens
tcagccttgtttttccagagccgtattctatacaacagcaaaaatatttccttctgggcagtggtctttgggctgtcttctactaacactctctttgggttctttgagaatmcctaagtccagccttggcacccactgtttttctctgtacctcccctcttccctttccagccaggccagtctcactgggactgaccctactcgacgctggagcacaagctgctacccacgcagtgccccagaacaccctgccatcacccctccaccttcccttggccacctctgtccaaccccacctctgtcctggtctcagcagcaaaggcacctgctcaaaacccagacagcactaaccttgtccctgctccagagcttctgcctatccccttatagacagtctccctgtgctgttccccagggaaattatgtctccctgccaacccacgagagttccctgtggctcctggacacacctgaagtcccaggaatagaggaggaaacctggcgagggatgaagtgagataagccagcaagctaagccttatcccattttgacca

SEQ ID NO: 49003 - DNA, 555 bp, Homo sapiens
tcagccttgtttttccagagccgtattctatacaacagcaaaaatatttccttctgggcagtggtctttgggctgtcttctactaacactctctttgggttctttgagaatacctaagtccagccttggcacccactgtttttctctgtacctcccctcttccctttccagccaggccagtctcactgggactgaccctactcgacgctggagcacaagctgctacccacgcagtgccccagaacaccctgccatcacccctccaccttcccttggccacctctgtccaaccccacctctgtcctggtctcagcagcaaaggcacctgctcaaaacccagacagcactaaccttgtccctgctccagagcttctgcctatcyccttatagacagtctccctgtgctgttccccagggaaattatgtctccctgccaacccacgagagttccctgtggctcctggacacacctgaagtcccaggaatagaggaggaaacctggcgagggatgaagtgagataagccagcaagctaagccttatcccattttgacca

SEQ ID NO: 49004 - DNA, 555 bp, Homo sapiens
tcagccttgtttttccagagccgtattctatacaacagcaaaaatatttccttctgggcagtggtctttgggctgtcttctactaacactctctttgggttctttgagaatacctaagtccagccttggcacccactgtttttctctgtacctcccctcttccctttccagccaggccagtctcactgggactgaccctactcgacgctggagcacaagctgctacccacgcagtgccccagaacaccctgccatcacccctccaccttcccttggccacctctgtccaaccccacctctgtcctggtctcagcagcaaaggcacctgctcaaaacccagacagcactaaccttgtccctgctccagagcttctgcctatccccttatagacagtctccctgtgctgttccccagggaaattatgtctccctgccaacccacragagttccctgtggctcctggacacacctgaagtcccaggaatagaggaggaaacctggcgagggatgaagtgagataagccagcaagctaagccttatcccattttgacca

SEQ ID NO: 49005 - DNA, 417 bp, Homo sapiens
ggatttttttctgagacagattcycgctctcttgcccagtctggagtgcagtggtgcaacctcagctcactgtaacctctgcctcccgggctcaagcaattttcctgccttagcctcctgagtagctgggattacaggcatgcaccactacccttgcataatttctgtatttttagtagatatgtggttttgccatgttggccaggctggtctcaaactcctgacctcaagtgatctgcctgcctcagcctcccagagtgctgagattataggccactgcacctggctgaatattttttttttttttgagcctgtctctgagtacttttttcatgtagggctcttggtggcaaatttttttagttttagaaagcctcaaatagctttatcttcatatttgctttgaaagtttagatg

SEQ ID NO: 49006 - DNA, 417 bp, Homo sapiens
ggatttttttctgagacagattctcgctctcttgcccagtctggagtgcagtggtgcaacctcagctcactgtaacctctgcctcccgggctcaagcrattttcctgccttagcctcctgagtagctgggattacaggcatgcaccactacccttgcataatttctgtatttttagtagatatgtggttttgccatgttggccaggctggtctcaaactcctgacctcaagtgatctgcctgcctcagcctcccagagtgctgagattataggccactgcacctggctgaatattttttttttttttgagcctgtctctgagtacttttttcatgtagggctcttggtggcaaatttttttagttttagaaagcctcaaatagctttatcttcatatttgctttgaaagtttagatg

SEQ ID NO: 49007 - DNA, 631 bp, Homo sapiens
taaaactactctagatgttactattttcatacaaagtattattttccatatggcttaaatgatatgacactattatactcaaggctataatattatttgcttttccaagaataacctctgaagaaggctttcaaatactttattttttttaaggcagattctcactctgtcactcaggctaatgtgctgtggcctaatcacagctcactgaaaattatacctattgagctcaagtgatcctcccacctcagccccaccaagtcgctgggactaatgacacatgccaccagcctggctaaatttaaaatttttttttttagagatgaggttttgccatgttgccgaggctggtttcaaactcaagggttcaagcgatcctcctgcactggcctcacagagtgctgagattacaggtgtgagccacgtccccagcctcaaaaagactgtctgtaacrtatacgcattcaaattttcttcctactcactgccgaaataaattacggaaaattaagcataaccttttgtgacaacatttgtccaaatcttctgtgaccacatttgcccaaaactaaatcaatgatataataaatacaatggcttaaaagtcaggccgggtgtagtggctcacgcc

SEQ ID NO: 49008 - DNA, 631 bp, Homo sapiens
caaaaccaaacctaacataaggctgagtggtataatttcctagagcagagatctgtaaactttttctgtgaaagatgaaataataaatattttaggctttgcaggccagatggtttctgtcacaactgcttaactctgtccttgcagcacaaaagcagccaaagacaatactgtaataaaagaagggtgggtttggatgtatttcaataaaacattatttacaaaagcagataggtaagcagaatttagcctacatatgctgggcgcrgtggctcacgcctgtaatcccagcactttgggaggctgaggcaggacaatcacttgaggccaggagttcaagaccagcctggccaatatggtgaaaccccgtctctactaaaattacaaaaattaacccggcatggtggcgtggacctgtaatcccagctgctcaggaggttaaggcacaagaatctcttgaacctgaaagacagaggctgcagtgaactgagattgtgccactgcactccagcctgggcaacagaagcaagatctgtctcaaaaaaacaaacaaacaaaataatagaatttagcctacaggctgcagtttgctaaccccttgctctaatctctgaaaatcttttctaggtga

SEQ ID NO: 49009 - DNA, 631 bp, Homo sapiens
caaaaccaaacctaacataaggctgagtggtataatttcctagagcagagatctgtaaactttttctgtgaaagatgaaataataaatattttaggctttgcaggccagatggtttctgtcacaactgcttaactctgtccttgcagcacaaaagcagccaaagacaatactgtaataaaagaagggtgggtttggatgtatttcaataaaacattatttacaaaagcagataggtaagcagaatttagcctacatatgctgggcgcggtggctcacgsctgtaatcccagcactttgggaggctgaggcaggacaatcacttgaggccaggagttcaagaccagcctggccaatatggtgaaaccccgtctctactaaaattacaaaaattaacccggcatggtggcgtggacctgtaatcccagctgctcaggaggttaaggcacaagaatctcttgaacctgaaagacagaggctgcagtgaactgagattgtgccactgcactccagcctgggcaacagaagcaagatctgtctcaaaaaaacaaacaaacaaaataatagaatttagcctacaggctgcagtttgctaaccccttgctctaatctctgaaaatcttttctaggtga

SEQ ID NO: 49010 - DNA, 554 bp, Homo sapiens
tcaagatgccatgattgtctatatgaaaaattcatggactggacacagtggctcttgcctgtaatcccagcactttgagaagctgaggcaggaggatcacttgagcccaggagtttgtgaccagcctgggcaacatagggagaacctgtctctaaaaaaaaaaaaaaaaaaaaaaaaattagtacaggtggtatgcgcctgtagtctcagctactggggaggctgaggagggggaatcrcttgagtctgggggtttgaggctgcagtgagctctaattgtgctactgcacttcagtctggtgacagagaaagaccatgtctctaaaaataaatagataagtaagtaaataaataaaaattagacaacaatcattttatttgctcatgattctgtggttagcagttcaggccaggcacatctggacagttcttctgctggtcttacctagggacactctggcagtgaccaccatctggcagctcttctggctctggacaatccaggatgccctccctcacgtgtctagcagttggtgctggctgtcagctgagtc

SEQ ID NO: 49011 - DNA, 613 bp, Homo sapiens
gtccagcccccagctgttccaaatccaccacaggtagactttgagttacaaccgtccaatctaattcctcacccacagaaaccagggaagaagataaaataattgcacttttttgaagccactaagtaactggctgcgcttatgttactggttcctgtttaacaccattttatgtcttcacgccagttttctgtggtgatatctaaatctaagaaagaattaatgttgttgcagtgggggcgacattgttcaaatggtaaggaaaatctttaaagaaaggcaagmcttagaaaaacaaagcatggtgaaattggggtgttgcgatactgtcaatgtaaggtaacagggtcgtgaaagagaaaatggcaatcacttgtgcagtgatcattctccgtggggcaggtaggagcaagggaaattaggttatggaaaaaagttgggaccagattataggggttattaagtggcatactgagttaggctttcatctgtggacaagcagaactgattgatgctgcattttgtatatatatgaagtggttgtgggggatggtggtgctgacctaattaccatgtggcagagttctgattgtgcataatgtggatgaaacat

SEQ ID NO: 49012 - DNA, 717 bp, Homo sapiens
tcattggcatctgggaagaacggaacccacctcacttgctgttgacaccagcaygacgaactccccacaaagcccgtccagtggatggatgcacaatgccaaatggaattcccgatgccgggaaagcgtggggcccaaggcgacttcctccttttgtaacccatgaagggacaaaaatggaggaatcacaacaagctggcagcggtgggattcgaacccacgcctccgaagagactggagccttaatccagcgccttagaccgctcggaccacgctaccctccttctgggcttcacctacatcttttccttccttataaaacatccccagggtccccgggccaacaaggcgtcgaggcgaatccacagggcatcgcagaaccaccgccttccagcaggattcgctgggccagaggccccggctgggaaacggctccaccagcgccccggcagagaaggttcgcgaagcgcaggtctcgggatttgctttgggggccactcagaaagtcacccacattggccctctttggggaggcggcgtgagaggaggggaagccttctgcactctttaaagaaagataaaaataaataaaccagggcagacccggtccgctcggggccgcctagtcctgcagccgccgcgccgcactccacaggcagcagcgcacagggcgcgactccggggaggccgcggcccgcggggtccgtccgtcctgcg

SEQ ID NO: 49013 - DNA, 516 bp, Homo sapiens
gcagacatatgcagcttacggccgtgccctgtctcacacggaaaacaccaagccccacacctcaggtgtgaaccaactgaccccagtgaagacacctttgcaagtgcctctgccccrccccatgcagatgagtgccctggggggctactcctcggtgagcagctgcagtggttatggcagaatggaccttctccaccaggagaggcttccaagtgacttggacggcatgctcactgagcccttggactgtgacatggaatccaaatcttcatttggaatgacctcatggatggagacacgctggatttttcaccttggcaatgttttgcccagccaaagctcctcacacagtgtcaagacaaggacacatagctgcgtgtcaggctgagaactggtgagcccgctacacttaaaagtacttcatcggctgggcacagtgtctcccgcctgtaatcccagcactttgggaggctgaggtgggcggatcacgaggtcaggagatcgggaccaacctga

SEQ ID NO: 49014 - DNA, 584 bp, Homo sapiens
ttggctatttattttgctatggaggagctttttagtttcatacaatgccacttgttcatttttgcttttgtcgcctctgcttttggtgtcatacctaaaaaaaattattgccagaactaaagtcaaagatcttttccatttctccttctcgaatttcttccattactggtttttgttgtcagcgtacggatcttttgcctcactggttaaatttatttctaaatattttattcttttgaaattattgtaaatgggattgttttcttaatttgttttttctggatagtttcttactagtgtataaaactgcaactgctttttgtgtgttgatcttgtattttgaaactttactttgtatcctgaattcctttcttagctccaacattttttttctggrgtatttagggttttctacatataggaatatgtcatccctatcagtcctgttgaaataagcctagttaagagcttcctttagtgactggtgctgattaggcccccagtcatgtgtgaaaaaaaaatatatatatataaataatatacatatattaaaatatataatataatatatatgtgtttatata

SEQ ID NO: 49015 - DNA, 582 bp, Homo sapiens
tgtaatcccaacactttgggaggccgaggcagctggacctcttgagcccaggagttcaagaccagcctaggcaacatggcaaaaccccatctctactaaaaatacaaaaattagcctggcgtggtggcgggcgccgtatgggcaccatggttgtcccagctactcaggaggctgaagtgggaggatcacctgagcccgggaggtcggggctgcagtaagccgtgttcgcaccatggcactctagcctggacgacagaaaaagaaaaaagaaataaaggtataaaagaaaaaaaagaaaagtaaacagcttcttccaggggatgaagtaggtttatttcggtgagattgctgctcagracttaggagagccatcaaaggcagaagaccgctcctggggcccggtcacctgaacactacaagtcccagcaagcgccgcgcgggggcggggcttgctgaccgttgtgacgtgtgggcggggcaggcgggtcgggctctcccttgggtgcttagccccgcccccgtcccactctgccctgttgctgtcgcgccgctgctggttgctgtccctggtgagtgcctcaa

SEQ ID NO: 49016 - DNA, 601 bp, Homo sapiens
catataccaaaccataagcccctgggcaaactattttacttttctgagcctcagtttcttcatctgtaatatggagatagcatcagtatctcctacagccactactgggtgggcattccaagcatagtgyctggagtataataaaccccagataagttgcaccactattgttatttttctattatctttactatagagtcatcattcctcatgttaagccctctagccttcagccatagaatcttaagcccttggggtttaagaacacttttaatttttcaaagccttttaatacccattatttcatttgatcctcccaacaatacaaggaggtaggcagggcagggattaccttgtatgacagatgagagaatgaaggcaggaaaaggttcagaggatgtccaaattcacacagacataggctccataaccctgtgttttcttgtagttattagacactccaaggaggaagtgggggatagggaagaccactaaaagtagaagcattacatgtgtccgtgggtgcctagacatttcacagggatcacaacacaactaactgcccaggaaaaagatataagaactcttctgaagtaacata

SEQ ID NO: 49017 - DNA, 585 bp, Homo sapiens
gctttgttaaacagatgcttgaaggcagcatgctcgttaagagtcatcaccactccctaatctcaagtacccagggacacaaacactgcggtaggccgcagggtcctctgcctaggaaaaccagagacctttgttcacttgtttatctgctgaccttccctccactattgtcctatgaccctaccaaatccccctctgtgagaaacacccaagaatgatcaataaaaataaaaatgaaaattaaaaaaagaaaaaggaaagaatagaaatgcagaatgcatctaataatataaaaatgctgtttgagaaagcttattgcttcagtttttatgtgtgtgtattactaaaatataaagtatactttcttacagttggtcgtgagcaaaagtttgaaaccatactgcaatggctttccaaagtcatcatcttcttcatcttgtttttttgagacagggtcttgctcttttgcccaggctggrgtgcaatggtgtgaacatggctcactgcagcctcaacctcctgggctcaagtgatcctcctgccccagcctcccatgtagttgagaccacaggcactcaccaccac

SEQ ID NO: 49018 - DNA, 580 bp, Homo sapiens
tcattaatatgtgatgattctgaacagccattcttgtccagttctaagttttaatatttcccctaaggaccagaaattatatgacctctgtgttacagtgttaaatactaaactgggcagggcacagtgggtcacacctgtaatcctggcactttgggaggtcaacataggcagatagcttgagcccaggagttggagaccagcctaggaaacatggcaaaacccagtttctacaaaaacaaaaacaacaacaacaacaacaacaaattagccaggcatggttgcccatgcctatagttccaactacctaggaggctgaggtgggaggatcacctgaacccagggaggtcaaggctgcagtgagctgtgatkgcaccactgcaccccagcctgggtgacagagaccccaactcaaaactgattctgcctaattcttaatacatatcagaaaatctgaagttgttgtgtccctttcgaaaaagataaaatacactgataacatgcttccattttaagagttcacaacctactggcttttgtcactttaaaaggaatctttacctttaatatgttgtcagca

SEQ ID NO: 49019 - DNA, 330 bp, Homo sapiens
gaggaaccacacacgacccctgctgagggtcatggtggagtggggcgctctccagtcagccaggccacacccggagagtgggacctgcttttcaaagttgaaatactccttaatgattggtatacagygcctactcagggccctgagggcaccctgattccccaaatccagcagcgacactgctccagggctgtgcctggcctccgtccactggctctgattgtttggtgcttttaccatacctgttgttaaatacttttaataagactcgttggagacagatgcacgatcattctggaattcactaatagcttcaaccggacgtgtcaa

SEQ ID NO: 49020 - DNA, 330 bp, Homo sapiens
gaggaaccacacacgacccctgctgagggtcatggtggagtggggcgctctccagtcagccaggccacacccggagagtgggacctgcttttcaaagttgaaatactccttaatgattggtatacagcgcctactcagggccctgagggcaccctgattccccaaatccagcagcgacactgctccagggctgtgcctggcctccktccactggctctgattgtttggtgcttttaccatacctgttgttaaatacttttaataagactcgttggagacagatgcacgatcattctggaattcactaatagcttcaaccggacgtgtcaa

SEQ ID NO: 49021 - DNA, 509 bp, Homo sapiens
catttactactagttgtgattttacccagtcccttctccgaacttggggtttcaatgtgggttttagagcctagaccgtatcattcccaagatggaactcctctgaggcccttaataacaaacttcgaaaccaagtagataagcaagcgtgctttagaatttccacctgttccgtactcaccackgagaagctggcattaaacacaatgatttgaacacacagtcatcaccattttatagctgtttattccttttctctagctcattgttttgcagactagtacggcgttgaattaagataaattgtagaaacagcacccttattttgcacttcatcattgataaaaggagatttggtgcctagtttagatcctaatgccattggtcagtcccaccagtaaaacgctatttcactttacctactcgtcagggtggtttggattcaatgaaataatgggtgttaagtatcagacatacagtagttgctggaatgttcattttcttccttt

SEQ ID NO: 49022 - DNA, 509 bp, Homo sapiens
catttactactagttgtgattttacccagtcccttctccgaacttggggtttcaatgtgggttttagagcctagaccgtatcattcccaagatggaactcctctgaggcccttaataacaaacttcgaaaccaagtagataagcaagcgtgctttagaatttccacctgttccgtactcaccacggagaagctggcattaaacacaatgatttgaacacacagtcatcaccattttatagctgtttattccttttctctagctcattgttttgcagactagtacggcgttgaattaagataaattgtagaaacagcacccttattttgcacttcatcattgatwaaaggagatttggtgcctagtttagatcctaatgccattggtcagtcccaccagtaaaacgctatttcactttacctactcgtcagggtggtttggattcaatgaaataatgggtgttaagtatcagacatacagtagttgctggaatgttcattttcttccttt

SEQ ID NO: 49023 - DNA, 557 bp, Homo sapiens
agctgttccttctgagaattccaggttgttttagttcttgaagatagtgttttttcaggcatatcttatctgagacctttgttgcttcagcccagtggttctcaaagcgtggtgcttggattaacatcagcatcacctgagaacttgttagaaatgcacattttgggccccaccccagactgctgaagtatttaggggaaattgaacagatgtctgtaatttactttgcactgtaatttactttgaactgataagtgaacaggtggaggggttggtagtacagtaaaacgttatgagtgggctcatgagttsctttgacttcttgaactgagatgattctgtatcgcctgggtttgttacgtgttttggtggtgatgttcactgtcctttgtcctttttcggtaaacagttcgtatcatctcaaaccaggtgcgttattttgagtagacggtatggcatcaggatttatgcttacaagggacaaaaataatcctaactgctttatgcaaaggggagaatctattgtcttacggaatccagggaaggattgaacgaac

SEQ ID NO: 49024 - DNA, 528 bp, Homo sapiens
aatgctggcattacaagtgtgagccaccatgcccggccttatttttatttttattttttttgtgagacagagtctcactctgttgtccaggcggaagtgcagtggcaccatcttggctcactgcaatctcggcctcccgggttcaagcgattctcctgcctcagcctcctgagtagctgagaycacaggcgtgcagcaccaggcctggctaattttggtattatcagtagagatgttgtttcacagtgttggccaggctgctctcgaactcctgacctcaagtcatccacccgcctcagcctcccaaagtgctgggattacaggtgtgagccatagtgcctgacctgtagttgttgaatatttattattaatctacaagttgggtgtgatgcaagtcctatatatggagtcccccaaacttctagagcaagggcttccccataatcctggcaggcaggcctcccctggggtttccaacttctgaccccactgaagtgtttatcctcttctctaatcccagcctccttt

SEQ ID NO: 49025 - DNA, 528 bp, Homo sapiens
aatgctggcattacaagtgtgagccaccatgcccggccttatttttatttttattttttttgtgagacagagtctcactctgttgtccaggcggaagtgcagtggcaccatcttggctcactgcaatctcggcctcccgggttcaagcgattctcctgcctcagcctcctgagtagctgagaccacaggcgtgcagcaccaggcctggctaattttggtattatcagtagagatgttgtttcacagtgttggccaggctgctctcgaactcctgacctcaagtcatccacccgcctcagcctcccaaagtgctgggattacaggtgtgagccatagtgcctgacctgtagttgttgaatatttattattaatctacaagttgggtgtgatgcaagtcctatatatggagtcccccaaacttctagagcaagggcttccccataatcctggcaggcaggcctcccctggggtttccaacttctgaccccactgaagtgtttatcctcttctctaaycccagcctccttt

SEQ ID NO: 49026 - DNA, 673 bp, Homo sapiens
ttttatcttcttataaagtaaaaactagtgttwtgtgataatgttatatgataatgtgataatgtttgatagaatgggattcctaatcaggtaaacctgggtttaagtcccaactacacctattcctattttattattaagtcccaactatactattcctagttgcaagagaatctatgctgttaatttctctaagcttttgtaagtctaatatgggcctaattatactaccctaatgagatcgtcatgaggattaaatacagtaatagacttgaaatgtttagtatgataccaaacacataacagcctttagctatatctttatattatttatataggtcatcttctaaacaggtatttttttctgttttgtctgttttttttttttggttttctgtatttgtgtgtgtgtgtgtgtatgtttcctttcacagatggatacacaactgatgacattgagttttactggcgtggcgatgataatgcagtaacaggagtaacgaaaattgaacttccacagttctctattgtagattacaaacttatcaccaagaaggttgttttttccacaggtttgtatcatggaaaagtgttaagggaaaataatcttcaccgtattttgttaaacatgttcacttatattagagttctgtcccagggaagcaccatgact

SEQ ID NO: 49027 - DNA, 673 bp, Homo sapiens
ttttatcttcttataaagtaaaaactagtgttatgtgataatgttatatgataatgtgataatgtttgatagaatgggattcctaatcaggtaaacctgggtttaagtcccaactacacctattcctattttattattaagtcccaactatactattcctagttgcaagagaatctatgctgttaatttctctaagcttttgtaagtctaatatgggcctaattatactaccctaatgagatcgtcatgaggattaaatacagtaatagacttgaaatgtttagtatgataccaaacacataacagcctttagctatatctttatattatttatataggtcatcttctaaacaggtatttttttctgttttgtctgttttttttttttkgttttctgtatttgtgtgtgtgtgtgtgtatgtttcctttcacagatggatacacaactgatgacattgagttttactggcgtggcgatgataatgcagtaacaggagtaacgaaaattgaacttccacagttctctattgtagattacaaacttatcaccaagaaggttgttttttccacaggtttgtatcatggaaaagtgttaagggaaaataatcttcaccgtattttgttaaacatgttcacttatattagagttctgtcccagggaagcaccatgact

SEQ ID NO: 49028 - DNA, 550 bp, Homo sapiens
attcggtgctcataatgagccagacaccactctgaatgcctaatataaattatctaatttaattctcaccaagaaaaaaaatcctatttcatttgatgtcccactttatccacaaggaaaccgactcagaagtgatggagacaggtttcaggtcagctggtccaatcccaaagcccattctacacgcgcccctactctggctacctcccactccaacagaggcgttttgtctccgacacctcccccctgctgttcacacaaagggaggacaaccctgggggttctggtaatcctggaaggcttcctgtcagaggtgggccgggggaaacgcgggcaggagaagggaagtctcgctcaggggagtggtgtgcatggggcagaggctgccagggacgctgaaggctgatagccgggttggcgcggaaatgggacgccgcagggtgggacaggcgggagggatgggatgggcagggtgkgatgccggacgaaggaaacgggcctgcccggcaggtggcagagagccacagaagagctccgagggggtggtgcg

SEQ ID NO: 49029 - DNA, 514 bp, Homo sapiens
ggtcataagacacactgaagcttcctcggtttcttcaattgctccctccctggagaaagccatccaccatgccatgaggacactcaagcagcgccgtggcaaaggaccaactttccagcaccacattgctaggcagaagatgagccaccttggaaagagatcttccagccccaaattttgaactctaattaatgatatgtatgttaaaaatgtttaggggagaaatctattgctgtctgcaacctacttcaaaatgcaaaawaaaaataaaaataaaaaaagatgggttgatgaatgatacagagatcaatgtggtcaggcaagtataataaagtatcactgatggaatctagatggtagattatattagtttggtagggctactataaaataccacagacttgctggtgaaaagtagaaatttgggccaggcccagtggctcacacctgtaatccagcactttgggaggccgagggtggtggatcatttgaggtcaggagttctagaccagcg

SEQ ID NO: 49030 - DNA, 561 bp, Homo sapiens
gaaaagcagccgcatttcttacgggagctgttacatctggaagattagatctggaggggctgggacctctggcatcggcaccctcttctctcccagctttacaggctggaacaggaggaggcttgcttggaggcaggagttggaccaaatcagcctggggtaatgatcccctgggaatcactggcaatgcctggagatatttttggaactgggggtggggtgctactggcatctagtggccggaaatgctggtaaacatcctacagcacacaggacagagccccccaccctgcccrccaaaggatgatagggcaggccccaaatgtcaatagggcagaggttgagaagccctgctttctaatagcacagctctgtccccccaagccctcgcttacggcctatcctaatcagagtcatcattaattgagtggcagctgccccatcctgagcaccagccacaggccaccatggcgccaagcaccacagcgttctcagcctctctgctctccaattctcacaccagctccaggaaatggggacgcaaaccctgcactgcccggc

SEQ ID NO: 49031 - DNA, 578 bp, Homo sapiens
cccagaacaaagggacagggagggagacagctgccgatggacccacccagcaggctggggcaggcagagggaagcttggcccgcctggccctgcactagctcatcctctccatgctggcaagattctacgcccattctgcagcagggaaaactgaggctgggggagaggaagtgcctgcccaaggtcactcatccagtaagtgcagaagttgtccagattcaaaacccagttctttgcatgacttcaaaaaggtagatacatcagaggagtgagacagacagacagacagacaaggcgagggggcagaaacggggaaragcaagcgaggtggcgaggacctcgctcccatcccaacacccgcccggtccccttgccacctgcgtgatcacctgggaggtgggtcccagcctcctctcccctccactccctccccctctccccatcccagggatgttagcgaagagatgcatttcccccaccccctgtgccctcagctaaaccgaaagaccctccgctgcacaccctcctgtcactgcccaccctgtccaggccctgtgggggcctcacagcagcttca

SEQ ID NO: 49032 - DNA, 850 bp, Homo sapiens
ggtcttctggcaggctcccttcaccaggcccttcccatggtatgtgcaccacagcttactaacgatgaagagctcctcacgctttaccacctgctccctgagcttctcctgaatggccacccccacctcattctcatgctagtacacgtgggcacagtcaatgtggcagtacccgacattgatggccacattcacggcctcagtcacccggcctggaggggacttccaggtgcccagccccaggatgggcatcttggtgccattgttgagcacaaggtggctggccatggctgctgcgctccctggaattgtttcatactgtcttgtgtgccttggaagacttatctcctgttctctgccatgctaaccagtgctatgtataaccctgcctagtacagggtggtgagggaggggtgcctgtctcttcagcacaaggctacttccactccccactcccagcaaaagctgatctgaccggaacaatgatcaaaagtaggaaaataacattggccaggtgcagtggctcatacctgtaatcccagcactttggaaggccgaggcaggaggactgtttgagcctgggagtttgagaccagcctgggcaacatagcaaaaccccgtctctacaaaaaatttaaaaattagccargtgtggtggcacatgcctgtagccccagctacttgggtggtggaggtgagaggatcccttgagcccaggagagccaagattgccccactgcactccagcctgggcaacagagcaggaccctggctcaaacaaacaaacaaacaaaaccaaaaaacccaaacccaccaaaaaaaaaaagacaaaaaaaaattaaggaaaata

SEQ ID NO: 49033 - DNA, 595 bp, Homo sapiens
taacgtggggagagtgattcagttcaaggtcagttgcaacttggaacctcacctgaggggcaagtatatatgttcagtaccagtcggaagaagaatgccaagcagctctttctctgtttaacggacgatggtatgtacgcaggacgacagcttcagtgtgaattctgcccagtggctcggtggaaaatgatgatttgtggtttatttgaaatacaacaatgtccaagaggaaaacactgcaactttcttcaggtgttgagaaatccaatagagacctctgcttgtctcctcctttggcaagagctccaaggggagagagaggrtgggccaccacgatgaatactacaggctgcggggaaggagaaccctagtccagaccattcctacaaaagaaatggggaatccgaaaggaaaaggaagaaatctcactagcacatgtcaaagagccaggagaggcacaattcacctagcagaggaagaaatagtgaccgcagcgggggccggtgcagccgcagtgagaacggccggagccgtcacagccggagccaaagctcctctagatcccaaagtcgtggtaggaggagatcaggtagta

SEQ ID NO: 49034 - DNA, 595 bp, Homo sapiens
taacgtggggagagtgattcagttcaaggtcagttgcaacttggaacctcacctgaggggcaagtatatatgttcagtaccagtcggaagaagaatgccaagcagctctttctctgtttaacggacgatggtatgtacgcaggacgacagcttcagtgtgaattctgcccagtggctcggtggaaaatgatgatttgtggtttatttgaaatacaacaatgtccaagaggaaaacactgcaactttcttcaggtgttgagaaatccaatagagacctctgcttgtctcctcctttggcaagagctccaaggggagagagagggtgggccaccacgatgaatactacaggctgcggggaaggagaaccctagtccagaccattcctacaaaagaaatggggaatccgaaaggaaaaggaagaaatctcactagcacatgtcaaagagccaggagaggcacaattcaccwagcagaggaagaaatagtgaccgcagcgggggccggtgcagccgcagtgagaacggccggagccgtcacagccggagccaaagctcctctagatcccaaagtcgtggtaggaggagatcaggtagta

SEQ ID NO: 49035 - DNA, 617 bp, Homo sapiens
cgaactcctggcctcaagtgatctgcccgccttggcctccaaaagtcctgggattacaggcgtgaacctccacgcccaaccctatatacacttaagacacttttaacagtggcctaaaaatggaaccaagccaggagactagagtctcacttcagtaarttgtggtgagtccacaccatggcatcctatgcagcctcaaaaatcacaacatcgcccgggcgcagcagctcacgtctgtcatgccaacactttaggaggccgaggcgggtggatcacgaggtcaggagttcaagaccagcctggccagcatggtgaaaccctgtctctactaaaaatacaaaaattagctgggtgtcatggcacatgcctataatcccagctactcaggaggctgaggcaggagaatctcttgaacttgggaggcggaggttgcagtgagccgagatcatgctactgcactccagcctaggcaacagagtgagactctgtctaaaaaaaaaaaaaaatgacaatacagattcattaacctgttctgattgaggagcctattaagaatcctgtaaacgctgtgtatcttcaaccctcaaaaaggcatttattttgctaccaattttgtt

SEQ ID NO: 49036 - DNA, 624 bp, Homo sapiens
aaattaactaaatataccattctatctagttactaacattctgatatttttagagcttttattcaatgacaaaaaaataaattatgagtttaaaaaacttgtatataaccacaggcaactaatcttccacgttctaatgaaatagaaatgattcttaaataattcatatatatttttaaaggtctttggataatgccacatgactttggaagactctatataaaaacttgactgacctgagaagtcaaagcaatgaaataaatacaattagatacaagaatcacagagtctacaagataaaaacaaactaatgatgataaataactatgcaataagtttgacaatccagataaaattgacaaatttctttttaaaggcagcacactaaagctgacataagaagaaactgaaactctggatagcctttattgaagaaactgatttgttaattaataagaggcatatcaatgaaattctactacttcagttaataataatgtatcagtaatggctcatcaattgtgacaaatctactacayggatgcaagaactgggacctcatgagggtggagtaactgggaactctgtactttattttcaatttttctataaaccactcaaaaa

SEQ ID NO: 49037 - DNA, 577 bp, Homo sapiens
tgagagatggagggtgaaggagacttaagtatatgaattgtcttaagcactgatgtgtttgtgtatatgcatatatatatatctgcatacgtgtatatggatatatatgtatagatgtgtgtatgtgtatatatgtacatgcatacatatgtatagatgtgtgtgtgtgtgtgagactaagatgtttatgctaggattatgctagcagagattcattgatcatttcycaaaagtaacacaggatactttgcaggctatgccaaatttgagacacatatgaatttagcaacactgcaagatgttgctgaggccttctactcttagatatgtttccacaaaaagaggaaaatcaaggcatttttgtggtgtcatttaaagcgaagcaatcttgctcaaatttaatatttaagtaaattgtaaaaatactgacgacataaattcacttttctaaaatgcatttttaacatttatttatttacgatatttttttttttaattttttgagatggagtcttgctctgtcacccaggctggagtgcaatggcacgatcacagcccactgcaacttccacctcct

SEQ ID NO: 49038 - DNA, 577 bp, Homo sapiens
tgagagatggagggtgaaggagacttaagtatatgaattgtcttaagcactgatgtgtttgtgtatatgcatatatatatatctgcatacgtgtatatggatatatatgtatagatgtgtgtatgtgtatatatgtacatgcatacatatgtatagatgtgtgtgtgtgtgtgagactaagatgtttatgctaggattatgctagcagagattcattgatcatttctcaaaagtaacacaggatactttgcaggctatgccaaatttgagacacatatgaatttagcaacactgcaagatgttgctgaggccttctactcttagatatgtttccacaaaaagaggaaaatcaaggmatttttgtggtgtcatttaaagcgaagcaatcttgctcaaatttaatatttaagtaaattgtaaaaatactgacgacataaattcacttttctaaaatgcatttttaacatttatttatttacgatatttttttttttaattttttgagatggagtcttgctctgtcacccaggctggagtgcaatggcacgatcacagcccactgcaacttccacctcct

SEQ ID NO: 49039 - DNA, 588 bp, Homo sapiens
tgagattacaggtatcagccatcacacccggctcacctccaccttcttagtggccagtcacctttcctatatgagagtatataaaaaagaacagtcacacttgtctaagagtgaaagtaattcttgggcttagaattttctggtactcaagctattcaaagataggatgtttaactgcttagtaggcaattgacagaatgtgttcaagttcagttagttatttgggctcaataatcttcatggtcccttccaatctgacattctaaagcctttctatttagtctaatggccagtgcctctgaatgaactaatcactgccattgctcctcttttatttctgagatggtcatgaagattttaacatagtccttgcagcattggtctgtatcttcccccgaaattattctttcaagtaaaccatcaggaccttcaaagggccattcaaagtgcacattaggccagacaaggtgatgcatgcctataatcccaacaccttaggaggctgaggcaggaggattgcttgagctcaggagtttgggaccagcctgggyaacatagggagaccttatctctacaaaagtaaaaata

SEQ ID NO: 49040 - DNA, 360 bp, Homo sapiens
cctcttcctgtgataatgatgattccactctcattctatttttctattttaatctagtaaaactgaatccatctccaggtatgaaatgcrtaatttatgcttagccaatcagaattttgcaactgctcaatcacaggattggttgagggaggtcacaagatccacattagaccaattatggcaaaaggtctaaaagctaaaattcaggttccccttccccctaaaattggttttgtgatgctaataatttgttactcctggagaaatgaggccaacacagtagaatgcagagctaagagatgagagaaagttgaattctgatgacagttttatagcccattaatccagttgcactctagg

SEQ ID NO: 49041 - DNA, 629 bp, Homo sapiens
tgttcatgaatcaaccccttttagatatctgaagggtcaccatttgtaaaactgaagtcattacttttcctcctctaaactggactmtctacttttgttttttgttttactaaacggtaccactaaccattcagttgaccagcctgaaacgggttgttgttctaaattaaatgcctctctgtctctcacctcccctatgtaataatcagcaagtccttctgattaaacttaactacaatctcttgattgagtcacatattcccctcattcccactgctaccattttgtcttttctcaattaacctctgactagttccttgccatcactcttgatccttctttccagcctccttattgcactgaaaggagcttttctcaaacagaaattactggtcaatcccttgtttctttgcttaaaattaaactttaaaaaaaaattttattttaagttctagatacatgcacagaacgtgcagttttcttacatagatgaacatgtgccatggtggcttgctgcacccatcaacccatcaaccctaggtattaagccctgcatgcattagctgtttatcctgatgctgtccctccctgcctccacaggccccagtgtgtgttgttctcttccctgt

SEQ ID NO: 49042 - DNA, 622 bp, Homo sapiens
atttctacagcactgagcactagagagcctagacattttgacccaaaatttctgctgcagaaaaaaaaaaaaaagaaagaaactgaagacttcctgaaattctagtacctcaatccaattggaaaaaaaatttgcctaatccaatcaagcaagtcctcagtgagtagcaacataaacaaacacataaatttaagtcaatatttaagtcaatatttttattaaaatgcatactgctaaagccaagacaaaagatattacaggaaacatctttttccataaaatatgagttttggtatctttttggactaatacttggagggcatacaagaaagatgccaagactttagctcagagcctggaaaggacaagagaggcaggtgtgatttggtccttgagaaaggattggttacggctgcaaccaagggtcatctggtatgctgagttgaggaaaaacagtgaattcagtatggctgctggcttaaaaacrgcaaagtacagcccaaccttctctaaccctagagacaaggattaggaatatttaccttaatgtatatcatacagagcttcttgaaatatgaatgcttcctgagaagtgatctttatcatatttctatggagaaaa

SEQ ID NO: 49043 - DNA, 622 bp, Homo sapiens
atttctacagcactgagcactagagagcctagacattttgacccaaaatttctgctgcagaaaaaaaaaaaaaagaaagaaactgaagacttcctgaaattctagtacctcaatccaattggaaaaaaaatttgcctaatccaatcaagcaagtcctcagtgagtagcaacataaacaaacacataaatttaagtcaatatttaagtcaatatttttattaaaatgcatactgctaaagccaagacaaaagatattacaggaaacatctttttccataaaatatgagttttggtatctttttggactaatacttggagggcatacaagaaagatgccaagactttagctcagagcctggaaaggacaagagaggcaggtgtgatttggtccttgagaaaggattggttacggctgcaaccaagggtcatctggtatgctgagttgaggaaaaacagtgaattcagtatggctgctggcttaaaaacggcaaagtasagcccaaccttctctaaccctagagacaaggattaggaatatttaccttaatgtatatcatacagagcttcttgaaatatgaatgcttcctgagaagtgatctttatcatatttctatggagaaaa

SEQ ID NO: 49044 - DNA, 641 bp, Homo sapiens
ttattcctgtgcaactgaatgaatagaaggtggtaccattcatcacagtaagaacaatggaaaagtaccagtctaagggaagatcatggattcagtcctgatcatgttcaagtgagaaattttatttcaagtagttaaatgtataagtctgggctaaatattatatttacataataatagtaactgaagctttgaacttggttgagattaagaataaagtatgacatgagaaaaagatagactctaagagaagaatgtcaacatgtaatttctgggtagaaggagaagagcctgcaaaagatacagaacaaaatggccattgaggtaggtgaaaagcctagtgagttttaaaatgtatccgttgyatatagcattattgagcttattactgactatagcaagggctgtttcagtgagacaattggggcaaagtcatatggagtgaattggaaaaaagaccaggaaataaagaaataaaaatggtgaatatggacaattctttgaagaggtttagctattgtgctaatcaacttttgctgtgataataaacatcttcaggatccttgtagtttagagcaacaaacatttgtttcagtggaccagctatagttctgctgggtttgactgggctccactcaact

SEQ ID NO: 49045 - DNA, 599 bp, Homo sapiens
tagaaaacacctgaggtttaccaattttagaggggaccgagggagaggcaggaaatggtgcctggtgagagcacgctcccttcctgtctcagagggttgctgtctggacgggaattgaagaagaatcagaaatacgtactgaattaggattgytagagttaataaaacaaacgcacacgaatttttgtgtgggtcatactcatgctcaaaatttgtcgttgtctatctgatattcatatggaactcagtgtgctgtatttcagctggcaaccctttactgaatggataacccagatttggacgaaacagtggctggaaggtggaggccctcaaagtctcaaagagagaggtcctcaagatttcttttctagggcatcctctagtactcagggtagaaacacagagtctgtggtggccttgggggcaaagacgaatgtgtcctctaaggctggcccaccatggggaggaatccgtgttgaatggagacaaagagaggtgttaggaagcagcactggcgtcctgcttcctctccctatgggttccctctgcctttctccctcgtctctcccggagggctctctcccctccacacgcctcct

SEQ ID NO: 49046 - DNA, 674 bp, Homo sapiens
attgtcttttgatctttttaaaaatcatttcttgcttatggaaatttcccatataatttgctgcttcccatttgctgtgggacagaaacattcctctttcrggggaaaacaataacccatcctgttgcttagccatactcaatcttagaaatgggcataccagcttgtggtgctccctagagagaatgagactcagggatgagacccacaaataccttggaagcagatttgaggcctgttggacagaaattctgggattgcagtgcccaaaccctagaaggggaaccgtggactgtaggtgggcacatccctttgatcctactgactcctcgcctggtggggacagacatagtcagaggaatgccaaaacagtgccctctcaagcccagggcagggtcccaggttgtggggcaggagtatattaaggaaattagtatattatctcagctaactttttaaaaatataatagcctgtttatttagctttcttgtttcataactgtggtatacttttatttatgttttagtttttaatggatgactcaatggtataaacatcttatttaattcagtagctctgagatggaaataagtcttagtgacttaaaaaaattcttagtttaaatgtggtctaggtagaagacatgttattaatattatgagctttttttttt

SEQ ID NO: 49047 - DNA, 596 bp, Homo sapiens
gacctccatgcctctttcttatcttccagtggtttgcgggtgatctttggtgttacttcgctgatagatacatcgccctgatctctgttttcattttcccatggtgttctctctgtttgcacgtctctctctgtgtccaaatttcctcttttttataacgacaataatcatataggattagggcccatactaatgacctcattttaacttgactgcgtctataaaaactcaatttccaagtaaaacacaytctgaagtaccaggggttaggacttcaacatatccttttaaggggacataaataattaaaaacatttggtaaaacttcattaataaatttgtcaatttcatatataaatgcattagcaaacattattggtggcatttaataaacacctatgaactgactaaagaaaagcatagattgcagatgctaaagggttagtttagtggaagcttaaaaaactaaaactataatacaatcaagcatttgttaacatcagcggatattggtaaggatagcatttaaaataagttttagaatcataatatctgtatttattaattccaaatattttctgtgctagtatgcttca

SEQ ID NO: 49048 - DNA, 608 bp, Homo sapiens
tgggcaatttaagccattgtgccaacatggcatatggaatgattctgagagagtgtgatagggccaacccaaggcagagctctagccgagagggtgtgtttgtctttagagccccgactttcttgatgctgtcttctgtatcatctggctatcaacttaaccctgcatgtaattagcctgtgataatggagtcagaagataaatggcttaaaagggtcttggcacagtttatttcatcgtaaaggagaacacctgacagtgggcagaatcttacccccttcatgmgaggaagaaaaatcaaccattggcaatccaaaaatgtctgattgtgcactgctaggtgtgtgttcctgtgggagttacctgggggttacagaaaagtacaaggtacagctctgccctcctggaacttacaacttaggtgtggacaaaaacaccacattgaagctgtaacacttagtacagagccacatgagggaaatgtaaactaaatagcacaggccataagtgccaaaggagtggtgacgaaatgatggtttctcacagctgcttaacgggatgagatcaaaatagggatcaactgattatcatcgcaggaggaaaaaaaa

SEQ ID NO: 49049 - DNA, 1515 bp, Homo sapiens
cagcttccttgggtgaatgccctatcccttgtgattcccgaacactctgccctccctcccccrtgaataatcttgatctgagggtgctgtctgcattccactgtgactcagactgacaggtcccctggcatcttgtgggaggctgtattaaaacaagaggtcttagtgtctccgccaataactaaaggacacaggagagcaacattttaaaaagagatttgctgaagtctaggaaaataaggcagtttttcctacctttctgcctgagttttttaaaggctttacaataccttttaggaaaaataaactcattataataatactaagttaaaaaaggaagttatcaggatgcattttatatgttatagtttattctttagcaaagaaatatcaagattccaaccacacattaagcttaacactcatagcttcttggtcttccaaagtgtaccttgtacttcttttggatgggaggttgaaaaacttccttcgtttcttcacccccaattatttctctaatgagaggcttagactagatgatctcaagtatcccttgtatactcataagggatacgaaacattccctgtttcagtcaagtttgtggcgtatattgattggtgaggaaaatgtttagagatctttttgaagcactaggtgagtatattgtgaaacaaaatttaccttcccatttcactaagagaatgagagacattttcactaatacctttgaaagcattatgcaaaagagtgcatggttctaatagaaccccagcctagttcaggagttggcaaacaatggcctgtgagtcaaatccagcctgctgcttgtttttgtaaattaacttttactgaaacagagccatgcttatctgtttacatattgtctatggctgctttctcactaccactacagagctgagtagttgcaacaaagtttatctggcccacaaagcttaaaatatttactacctggcccttaacagaaaaagtttgccaacccctagtttaagtaataaaatttgtaagcagctctcttcaagtaaaattccctctctagatttttcagaaaagatataacctgagatcctaacaatgggtaacttagagtacaaataaatgtctattttggatgcatgaaaattatagtacctcatataatacgtcagaggcagcctgatagccctgggatctaatctcaattttgttatttaccagcttaatgaccttgtgcaagttacctaatctattctcagttgtaaaatcgcatgaaagagtatgtgaagcaccctaaatttctatccaaaataatccaaaagtgaaggattattgaatattaatttttacactgaagaaagatgaaagatctgaatctatggggttagaaggttggaaatgcatcatatgggtatagaacttagaatgcaatgtactctaaattattaaacaacattttcttcccattgctcccgtaaagccactccttcaacagaaaaacttgactctcttaggcaaca

SEQ ID NO: 49050 - DNA, 1515 bp, Homo sapiens
cagcttccttgggtgaatgccctatcccttgtgattcccgaacactctgccctccctcccccgtgaataatcttgatctgagggtgctgtctgcattccactgtgactcagactgacaggtcccctggcatcttgtgggaggctgtattaaaacaagaggtcttagtgtctccgccaataactaaaggacacaggagagcaacattttaaaaagagatttgctgaagtctaggaaaataaggcagtttttcctrcctttctgcctgagttttttaaaggctttacaataccttttaggaaaaataaactcattataataatactaagttaaaaaaggaagttatcaggatgcattttatatgttatagtttattctttagcaaagaaatatcaagattccaaccacacattaagcttaacactcatagcttcttggtcttccaaagtgtaccttgtacttcttttggatgggaggttgaaaaacttccttcgtttcttcacccccaattatttctctaatgagaggcttagactagatgatctcaagtatcccttgtatactcataagggatacgaaacattccctgtttcagtcaagtttgtggcgtatattgattggtgaggaaaatgtttagagatctttttgaagcactaggtgagtatattgtgaaacaaaatttaccttcccatttcactaagagaatgagagacattttcactaatacctttgaaagcattatgcaaaagagtgcatggttctaatagaaccccagcctagttcaggagttggcaaacaatggcctgtgagtcaaatccagcctgctgcttgtttttgtaaattaacttttactgaaacagagccatgcttatctgtttacatattgtctatggctgctttctcactaccactacagagctgagtagttgcaacaaagtttatctggcccacaaagcttaaaatatttactacctggcccttaacagaaaaagtttgccaacccctagtttaagtaataaaatttgtaagcagctctcttcaagtaaaattccctctctagatttttcagaaaagatataacctgagatcctaacaatgggtaacttagagtacaaataaatgtctattttggatgcatgaaaattatagtacctcatataatacgtcagaggcagcctgatagccctgggatctaatctcaattttgttatttaccagcttaatgaccttgtgcaagttacctaatctattctcagttgtaaaatcgcatgaaagagtatgtgaagcaccctaaatttctatccaaaataatccaaaagtgaaggattattgaatattaatttttacactgaagaaagatgaaagatctgaatctatggggttagaaggttggaaatgcatcatatgggtatagaacttagaatgcaatgtactctaaattattaaacaacattttcttcccattgctcccgtaaagccactccttcaacagaaaaacttgactctcttaggcaaca

SEQ ID NO: 49051 - DNA, 477 bp, Homo sapiens
  misc_feature (1)...(477): n = A,T,C or G
tttgttggtcaccctcgaggtgctataacttagttggtcaccctcgaggtgctataacttaattggtcaccctcgaggtgctgtaacttagttggtcaccctcaaggtgctgtaacttagttggtcatcctcgaggtgctataacttagttggtcacctcgaggtgctataatagggtcctaccttacttaccctgattctagtttgtgaagataacgttttttcacgggattgaatctaaaaattttagaagtaagatgtggaaagttgttgacatcatttaacatggatgtttaatactctctagggggaaacacttttggragagcactgtnagtgtctataactttgatctcaagggttaaattggtatcataaacttccatagggacccttaattgcttagttttgtctgatttatcattttgctggctggctttcctggcatgtgtcagggaatcactcactgtttttatt

SEQ ID NO: 49052 - DNA, 477 bp, Homo sapiens
  misc_feature (1)...(477): n = A,T,C or G
tttgttggtcaccctcgaggtgctataacttagttggtcaccctcgaggtgctataacttaattggtcaccctcgaggtgctgtaacttagttggtcaccctcaaggtgctgtaacttagttggtcatcctcgaggtgctataacttagttggtcacctcgaggtgctataatagggtcctaccttacttaccctgattctagtttgtgaagataacgttttttcacgggattgaatctaaaaattttagaagtaagatgtggaaagttgttgacatcatttaacatggatgtttaatactctctagggggaaacacttttggaagagcactgtnagtgtctataactttgatctcaagggttaaattggtatcataaacttccrtagggacccttaattgcttagttttgtctgatttatcattttgctggctggctttcctggcatgtgtcagggaatcactcactgtttttatt

SEQ ID NO: 49053 - DNA, 590 bp, Homo sapiens
ggcggtcccgaggaaaacggggctcaggagggggccctcggtctcttcagggggtggcctggggcgcgggacccccggggctgcctcgggcctcccgccggctcctgggggacttctccaggcaggcgaacgggtgctggggtgcaggctgctccttcaatgcatggaggctctaggcggcgattgcagggtgcagaggtgcagacgatgcccgcccgctccgtccgagccccagccagtcctggggtgctacggcttactctcctccaggagaggagaggaggggtcacttgggccccagcctctgctcctcrttcaggagcgcccggggcaggaccagggatggaatggaacccaccacaatacccagcaccgtcgtatttcaggcctcccgggagaaccctcacaccccggagcagacagccctccctggcagggagcgtttgggtgcaaaaccgtgagaactatctgtgccatgggttttagtttcttgtataagaactcagttggtgctttcattgcggacgggaacgagaagctttcccctggtccttacatgtttcgttttgttttacgtttttaaatttcaa

SEQ ID NO: 49054 - DNA, 2600 bp, Homo sapiens
ttttaacattatttcttatggtagaatctggctggttagtaaaacgatctggctccctactctttctctgacctcatctcccacccacattcctcattctgcaccaccttgctgctcttcaacaatgctgagcatgttatcttgttcattgttctccctctgcctgggtagagggagaatctacccagattttcccacagcttgcttcctctctgtacatctctggtaaaatgtttctctttccagaagcttacatcaccttccataaaacagtaacttaccttacattccttcattttcacttttattactcactcccacttaacrttatatttattttttattttctgtctttctccttctgtcttgctacttaagaattgaagcctacaagtatgactggcacaaaataggtatgaaatatttgttttatgagggaatgaagctctccctgtttattgaggtcttttacgcctctcaagaatattgtgtagtttttgtataaagctcttgcagtttcttaggtctgttcctagttttcactgctaattgctaatgttacatttttttacctttcacattttctaattggttttttgctggtctgtatgaatgctattaattttaaaatatatttaacaactgggctgacctttctaattagttttaacatattttaattagtttaatacattgaccttttaaattaattttaacataatgcgttaaactaattaaaaaggtcagcccagttattaaatatatcctttaagttctcttgtattttttttgaaagataagtaagtagtctggaaaaattgcaatttttattttaatccttaaacttctttcttttctgatcttttgttgttgttgtcattttacgtagtgaggccttcactacaaggtgaataggtcagcagtggctggcattgctgcctaattccccactgttcattctataaatgagtaggaggaagctcagaagtttagatgatgtaatgacacagcacagctggctggtgactgactctgtatcagactctgtgaagttttgctactccacatcctcatacagtgtagcactttataataaaaaggatttgggaactagaactagcagacttgtgcatcaccattttgcaatgaccttgtgcaaattaattcagcatttgagactgtttcctcccatgtaaaataagaatattgatatatactacatagagtttaacaaatgaattgatttcatataaaacgtttagaagacggcccagcaaactagttactgaataaatgttcgttaaattaacataaacttaacattaacttaaacctacctacattttatgattttttatttgtggttttctagtcatatgtcatgtatgagacatatctgaggcccttttatggagacttttaaatttctatcatgccactcagatttaaatttgtggttgaccttgttctagattatcacctaagtagatacaatcaactttaattgtgaagatctttctctcgtttcttctttcttactccatattatccccttttccacactcataagccatgattcattcaatattttatgacattcttatgaatttccggattgcaaattatgcacaagttactggcatatagaatcatataaccctttggggctttgagtccctacgtgcatacagtaaggttattcaagggatttttttaatggtaccttctaatcctttaggctcataaaattaaacaatgtttgatggaagaattttctaatggtacactatattactacagtgcttttgttttaggcagaactaatgagattctttatcatctttcttaattttacatgaaatacaggtaaaggaattggcattgagatcagattataattcactcaggattttaatttatacttttcttcaaatcaggatagatcaacctatcagcaaatttttcttaaacatgacagtaatcctcagttattatttggagacaaaattcaaataacattgaggttacatccaatatccttttaagatggacactgaaagattctgagagcagacacatttttgtcgtaagactgtatgacaatataagaaaacattttacttatttatctactgaaaacctatattatgaaattataacattgcattcaaaaccttgccatcaggtcaattttctcatgctttatgttttagattattcataaactctccctccttctttcttttctccttcccttcactcatgtttaggcttaaataaacagatagaattgacatgttacagacataacatgatatcatggaaaatgaaaagactatttgtaatgaaagcgcctactgactagttgtattattagtctgttctcacactcctataaagaaatacctgagactgggtaatttataaagaaaagaggtttaattaacttactgttctgcatgctgtacaggaagcataataccagcatctgctcagcttctgacagggcctcagaaaacttctaatcatggcagaaggcaagggggaagctggcacttcacatggatggagtaggaggatgagagagagcggggaggtgc

SEQ ID NO: 49055 - DNA, 2600 bp, Homo sapiens
ttttaacattatttcttatggtagaatctggctggttagtaaaacgatctggctccctactctttctctgacctcatctcccacccacattcctcattctgcaccaccttgctgctcttcaacaatgctgagcatgttatcttgttcattgttctccctctgcctgggtagagggagaatctacccagattttcccacagcttgcttcctctctgtacatctctggtaaaatgtttctctttccagaagcttacatcaccttccataaaacagtaacttaccttacattccttcattttcacttttattactcactcccacttaacattatatttattttttattttctgtctttctccttctgtcttkctacttaagaattgaagcctacaagtatgactggcacaaaataggtatgaaatatttgttttatgagggaatgaagctctccctgtttattgaggtcttttacgcctctcaagaatattgtgtagtttttgtataaagctcttgcagtttcttaggtctgttcctagttttcactgctaattgctaatgttacatttttttacctttcacattttctaattggttttttgctggtctgtatgaatgctattaattttaaaatatatttaacaactgggctgacctttctaattagttttaacatattttaattagtttaatacattgaccttttaaattaattttaacataatgcgttaaactaattaaaaaggtcagcccagttattaaatatatcctttaagttctcttgtattttttttgaaagataagtaagtagtctggaaaaattgcaatttttattttaatccttaaacttctttcttttctgatcttttgttgttgttgtcattttacgtagtgaggccttcactacaaggtgaataggtcagcagtggctggcattgctgcctaattccccactgttcattctataaatgagtaggaggaagctcagaagtttagatgatgtaatgacacagcacagctggctggtgactgactctgtatcagactctgtgaagttttgctactccacatcctcatacagtgtagcactttataataaaaaggatttgggaactagaactagcagacttgtgcatcaccattttgcaatgaccttgtgcaaattaattcagcatttgagactgtttcctcccatgtaaaataagaatattgatatatactacatagagtttaacaaatgaattgatttcatataaaacgtttagaagacggcccagcaaactagttactgaataaatgttcgttaaattaacataaacttaacattaacttaaacctacctacattttatgattttttatttgtggttttctagtcatatgtcatgtatgagacatatctgaggcccttttatggagacttttaaatttctatcatgccactcagatttaaatttgtggttgaccttgttctagattatcacctaagtagatacaatcaactttaattgtgaagatctttctctcgtttcttctttcttactccatattatccccttttccacactcataagccatgattcattcaatattttatgacattcttatgaatttccggattgcaaattatgcacaagttactggcatatagaatcatataaccctttggggctttgagtccctacgtgcatacagtaaggttattcaagggatttttttaatggtaccttctaatcctttaggctcataaaattaaacaatgtttgatggaagaattttctaatggtacactatattactacagtgcttttgttttaggcagaactaatgagattctttatcatctttcttaattttacatgaaatacaggtaaaggaattggcattgagatcagattataattcactcaggattttaatttatacttttcttcaaatcaggatagatcaacctatcagcaaatttttcttaaacatgacagtaatcctcagttattatttggagacaaaattcaaataacattgaggttacatccaatatccttttaagatggacactgaaagattctgagagcagacacatttttgtcgtaagactgtatgacaatataagaaaacattttacttatttatctactgaaaacctatattatgaaattataacattgcattcaaaaccttgccatcaggtcaattttctcatgctttatgttttagattattcataaactctccctccttctttcttttctccttcccttcactcatgtttaggcttaaataaacagatagaattgacatgttacagacataacatgatatcatggaaaatgaaaagactatttgtaatgaaagcgcctactgactagttgtattattagtctgttctcacactcctataaagaaatacctgagactgggtaatttataaagaaaagaggtttaattaacttactgttctgcatgctgtacaggaagcataataccagcatctgctcagcttctgacagggcctcagaaaacttctaatcatggcagaaggcaagggggaagctggcacttcacatggatggagtaggaggatgagagagagcggggaggtgc

SEQ ID NO: 49056 - DNA, 2600 bp, Homo sapiens
ttttaacattatttcttatggtagaatctggctggttagtaaaacgatctggctccctactctttctctgacctcatctcccacccacattcctcattctgcaccaccttgctgctcttcaacaatgctgagcatgttatcttgttcattgttctccctctgcctgggtagagggagaatctacccagattttcccacagcttgcttcctctctgtacatctctggtaaaatgtttctctttccagaagcttacatcaccttccataaaacagtaacttaccttacattccttcattttcacttttattactcactcccacttaacattatatttattttttattttctgtctttctccttctgtcttgctmcttaagaattgaagcctacaagtatgactggcacaaaataggtatgaaatatttgttttatgagggaatgaagctctccctgtttattgaggtcttttacgcctctcaagaatattgtgtagtttttgtataaagctcttgcagtttcttaggtctgttcctagttttcactgctaattgctaatgttacatttttttacctttcacattttctaattggttttttgctggtctgtatgaatgctattaattttaaaatatatttaacaactgggctgacctttctaattagttttaacatattttaattagtttaatacattgaccttttaaattaattttaacataatgcgttaaactaattaaaaaggtcagcccagttattaaatatatcctttaagttctcttgtattttttttgaaagataagtaagtagtctggaaaaattgcaatttttattttaatccttaaacttctttcttttctgatcttttgttgttgttgtcattttacgtagtgaggccttcactacaaggtgaataggtcagcagtggctggcattgctgcctaattccccactgttcattctataaatgagtaggaggaagctcagaagtttagatgatgtaatgacacagcacagctggctggtgactgactctgtatcagactctgtgaagttttgctactccacatcctcatacagtgtagcactttataataaaaaggatttgggaactagaactagcagacttgtgcatcaccattttgcaatgaccttgtgcaaattaattcagcatttgagactgtttcctcccatgtaaaataagaatattgatatatactacatagagtttaacaaatgaattgatttcatataaaacgtttagaagacggcccagcaaactagttactgaataaatgttcgttaaattaacataaacttaacattaacttaaacctacctacattttatgattttttatttgtggttttctagtcatatgtcatgtatgagacatatctgaggcccttttatggagacttttaaatttctatcatgccactcagatttaaatttgtggttgaccttgttctagattatcacctaagtagatacaatcaactttaattgtgaagatctttctctcgtttcttctttcttactccatattatccccttttccacactcataagccatgattcattcaatattttatgacattcttatgaatttccggattgcaaattatgcacaagttactggcatatagaatcatataaccctttggggctttgagtccctacgtgcatacagtaaggttattcaagggatttttttaatggtaccttctaatcctttaggctcataaaattaaacaatgtttgatggaagaattttctaatggtacactatattactacagtgcttttgttttaggcagaactaatgagattctttatcatctttcttaattttacatgaaatacaggtaaaggaattggcattgagatcagattataattcactcaggattttaatttatacttttcttcaaatcaggatagatcaacctatcagcaaatttttcttaaacatgacagtaatcctcagttattatttggagacaaaattcaaataacattgaggttacatccaatatccttttaagatggacactgaaagattctgagagcagacacatttttgtcgtaagactgtatgacaatataagaaaacattttacttatttatctactgaaaacctatattatgaaattataacattgcattcaaaaccttgccatcaggtcaattttctcatgctttatgttttagattattcataaactctccctccttctttcttttctccttcccttcactcatgtttaggcttaaataaacagatagaattgacatgttacagacataacatgatatcatggaaaatgaaaagactatttgtaatgaaagcgcctactgactagttgtattattagtctgttctcacactcctataaagaaatacctgagactgggtaatttataaagaaaagaggtttaattaacttactgttctgcatgctgtacaggaagcataataccagcatctgctcagcttctgacagggcctcagaaaacttctaatcatggcagaaggcaagggggaagctggcacttcacatggatggagtaggaggatgagagagagcggggaggtgc

SEQ ID NO: 49057 - DNA, 2600 bp, Homo sapiens
ttttaacattatttcttatggtagaatctggctggttagtaaaacgatctggctccctactctttctctgacctcatctcccacccacattcctcattctgcaccaccttgctgctcttcaacaatgctgagcatgttatcttgttcattgttctccctctgcctgggtagagggagaatctacccagattttcccacagcttgcttcctctctgtacatctctggtaaaatgtttctctttccagaagcttacatcaccttccataaaacagtaacttaccttacattccttcattttcacttttattactcactcccacttaacattatatttattttttattttctgtctttctccttctgtcttgctacttaagaattgaagcctacaagtatgactggcacaaaataggtatgaaatatttgttttatgagggaatgaagctctccctgtttattgaggtcttttacgcctctcaagaatattgtgtagtttttgtataaagctcttgcagtttcttaggtctgttcctagttttcactgctaattgctaatgttacatttttttacctttcacattttctaattggttttttgctggtctgtatgaatgctattaattttaaaatatatttaacaactgggctgacctttctaattagttttaacatattttaattagtttaatacattgaccttttaaattaattttaacataatgcgttaaactaattaaaaaggtcagcccagttattaaatatatcctttaagttctcttgtattttttttgaaagataagtaagtagtctggaaaaattgcaatttttattttaatccttaaacttctttcttttctgatcttttgttgttgttgtcattttacgtagtgaggccttcactacaaggtgaataggtcagcagtggctggcattgctgcctaattccccactgttcattctataaatgagtaggaggaagctcagaagtttagatgatgtaatgacacagcacagctggctggtgactgactctgtatcagactctgtgaagttttgctactccacatcctcatacagtgtagcactttataataaaaaggatttgggaactagaactagcagacttgtgcatcaccattttgcaatgaccttgtgcaaattaattcagcatttgagactgtttcctcccatgtaaaataagaatattgatatatactacatagagtttaacaaatgaattgatttcatataaaacgtttagaagacggcccagcaaactagttactgaataaatgttcgttaaattaacataaacttaacattaacttaaacctacctacattttatgattttttatttgtggttttctagtcatatgtcatgtatgagacatatctgaggcccttttatggagacttttaaatttctatcatgccactcagatttaaatttgtggttgaccttgttctagattatcacctaagtagatacaatcaactttaattgtgaagatctttctctcgtttcttctttcttactccatattatccccttttccacactcataagccatgattcattcaatattttatgacattcttatsaatttccggattgcaaattatgcacaagttactggcatatagaatcatataaccctttggggctttgagtccctacgtgcatacagtaaggttattcaagggatttttttaatggtaccttctaatcctttaggctcataaaattaaacaatgtttgatggaagaattttctaatggtacactatattactacagtgcttttgttttaggcagaactaatgagattctttatcatctttcttaattttacatgaaatacaggtaaaggaattggcattgagatcagattataattcactcaggattttaatttatacttttcttcaaatcaggatagatcaacctatcagcaaatttttcttaaacatgacagtaatcctcagttattatttggagacaaaattcaaataacattgaggttacatccaatatccttttaagatggacactgaaagattctgagagcagacacatttttgtcgtaagactgtatgacaatataagaaaacattttacttatttatctactgaaaacctatattatgaaattataacattgcattcaaaaccttgccatcaggtcaattttctcatgctttatgttttagattattcataaactctccctccttctttcttttctccttcccttcactcatgtttaggcttaaataaacagatagaattgacatgttacagacataacatgatatcatggaaaatgaaaagactatttgtaatgaaagcgcctactgactagttgtattattagtctgttctcacactcctataaagaaatacctgagactgggtaatttataaagaaaagaggtttaattaacttactgttctgcatgctgtacaggaagcataataccagcatctgctcagcttctgacagggcctcagaaaacttctaatcatggcagaaggcaagggggaagctggcacttcacatggatggagtaggaggatgagagagagcggggaggtgc

SEQ ID NO: 49058 - DNA, 1919 bp, Homo sapiens
  misc_feature (1)...(1919): n = A,T,C or G
tttccttctaagaatttgatttaaaagttgatgraaaaaatgtgcataaatatgttcattacagtgtattatgtaagaacaaaaggctgaccaatttcagagaacagtttaatacattgttattccaacctaacagactctcataggaaaactatagaaaatgttcttataaacataaaaaaaaattatatatgcattttacattttttagctacacaaaaaaattcatataaaaatgttaatatgctaaaatgaaaagttattccactgtgatcctttttgaattttacttgctgctttgtattcttatcagttagaaaaaaaatttccaaggccgagtgcggtggctcaagcctgtaatcccagcactttggaggacgaggtgggtggatcacaaggtcaggagttcgagaccagtttggccaacatgctgaaaccccatctctactaaaaatacaaaaaaaattaaccaggcgtgttggcacgcacctgtaatcccagctacttaggaggctgaggcaggagaatcgcttgaacccgagaggcggaggttacagtgagcggagatcatgccactgcactccagcctgggcgacagagcgagactccatctcaaaaaaaaaaatttccaaaggggaaaaaaacaattggaagtagtattagcagattcaccttttttggaagtagagttgaatagggttgaacccctaattccaattgcacatgtgaaagcagtatgtatacaagcatagattttatagtcgcacagacctcggttttattcctgtttgaaggtacttactagatgtttgacttgggcaagttaaagaaactacaaccttctatttactcatctttaaaataagaataccacatactccataagggtgactataacagatacatggaatagtgtttgtaaagcactttccacaatgcctggcatatagcaagtgattgataaataaatggtagcctttattatttagggttatttattttccactgctcccagacctgttcccccatctgtatctaatcagccctgaattatttgttttaatctctgaatagccagttttatctcagctctgattggtgatacctatccatgtagatgcaataacattcctttatccaggtacataagtgctaaataaataatagctgtcattttaatgtatctagctcccattcccatatacttgcagatcccttccgacagcgcgcaggcnttcacaaccaaacttccataaccgccgaccaaaccactaaccaaaccaatcctcagatttctaccttccaaagttcaactcatttcctgactttggttaatgttcaacagattactatcagacatatatacacataacaccaatccttgacagtgatttcacctactacaggaacacttgtttggtcacagaagaacacagaggaaaaaagcagcttaatttgatgtgagttttaataaacaagggctctttttttaacaaaaacaattttttacaacataaatctagttcctttacaatacataattaaagtatacaacttactagttaatatttgcagcatactcactttgtacccaaacatactgacacactctcaccaacctggaagacttggcattattagcaacattttacaggaaactgaggcacagaaagatgaaataacttgcccaaagttacacagctaatgagtggaaaagccaaaacttcaacccaggtcagactcttaaagttatgctttttccgaacatggttaagtgaaatttgatttttttaaaaagataatcctcagaagacatgtaaaaatacacatccttttaataaaacataaatggaagttaaacatatcagagaaattcttaatgtatatacagttttgaaaagaatagactgaattccttg

SEQ ID NO: 49059 - DNA, 1948 bp, Homo sapiens
gtgagaatattcatatttgtttcagatacaagtccattatttatgtcaaataattaaatacctctttagatatccattccaggggaggctcttgagcctttcacctctctcatgtccaaacttactagttatttcaatactgaaataattccagttgttcatgaattatttgatgagatttagagtgatctatattagttaattcatttatcagatttgttgaatacctgttatgtgcactggatggcaattggtgccatgttgtatatacattggacaaaggcaaaattctgtcttgggatgcttaagtatagtgaagaagaatgacaagtgcaaaaatatctaattccaaagctgagagaggagagaaagattatttaagttggtatggtcagatragtaaaacagtattttaactaagctttgagaaatagatagaattctacttggaacattgaggaggactccatggaaaagtaataaaatgaatgaagaccagagccaggctggaaaaaaatctttttaatggaatagcagtgagcaatgcagaaaagctagagatcatcttactgctgtgcactctaaatattccccatggctgctaccttgtccaattccctcacagtcctgcctgctacagaaagcgtagcagttttctctttatcgatgatgagcaatagaaagaaatgcttcactctgcctaggcaacaggcacatttaatatgggatttctgttgacagtgccttaagccatggagctagctaatcagcaccttactcattgtatgacaggaaagagaagagatctgggaatgagcagatcattcagcattcctgcaaacatggagaaacagagccagacagctagctctcccctcccagtttctatgagttccaatgtgaccaaaagccttatcttggcctttgcacctggaggtcaccgctgccgctgggaggatgagtggaggaacttgggatgtacatgatagggtcagccagccagcaaatgagtgtttgcagagtgactagggaggagcaaaggagagctttcactgctgtaatagtccagaagttgctgctgaatcaagcgaaaagaataagcaaagtgtttcagaagtcagcctgcttcacatcttgttgttcatttattccctctattctgaccactgagcccaccaagctctccttcttgatataacttttatcatatttaatattagggcaagactagtttgggatcttatgtgtctaatttatataaatgtagcaaatagtctttttgatggtaagataaactagtgaattatctctaacataatcaataaattttcttattgctgggtgtttctcaaccatggtttcgcattaaaatcatctagcgagcttaaccgccccctccccaaaacacacacacatacacacacacacacacacacacacacacacacacacacacacacacaattcccaagctgctcctaggtcatttataccagaactcaggttaggactcaggcaatggcgttctttaaagctctgcaggtgattctaatgtgccgctggagttgacagccactgttccaaatgtcttgaagatgaataataaaatccagattggtagtgagtaaaaatatatgtgtgtctaatgtgtaagtctcaaattattaacatttctcaacaatgtatttccattttaaaaatcatattttaaggaatgaccttcaaaattttgttatagaatattattttagtgatgtttctctgttagtaatgtgaagcatgttgcacataaactgtctggagaatgtggcattatttgcaaacatgtcagagaatgcagcagattttacaaaggtttatgaaaacaatatgcttcattatttgttcacataaaaagtaacaaaattagcttcctgttaaacagaaagcccatagagtagaagagaaa

SEQ ID NO: 49060 - DNA, 1948 bp, Homo sapiens
gtgagaatattcatatttgtttcagatacaagtccattatttatgtcaaataattaaatacctctttagatatccattccaggggaggctcttgagcctttcacctctctcatgtccaaacttactagttatttcaatactgaaataattccagttgttcatgaattatttgatgagatttagagtgatctatattagttaattcatttatcagatttgttgaatacctgttatgtgcactggatggcaattggtgccatgttgtatatacattggacaaaggcaaaattctgtcttgggatgcttaagtatagtgaagaagaatgacaagtgcaaaaatatctaattccaaagctgagagaggagagaaagattatttaagttggtatggtcagataagtaaaacagtattttaactaagctttgagaaatagatagaattctacttggaacattgaggaggactccatggaaaagtaataaaatgaatgaagaccagagccaggctggaaaaaaatctttttaatggaatagcagtgagcaatgcagaaaagctagagatcatcttactgctgtgcactctaaatattccccatggctgctaccttgtccaattccctcacagtcctgcctgctacagaaagcgtagcagttttctctttatcgatgatgagcaatagaaagaaatgcttcactctgcctaggcaacaggcacatttaatatgggatttctgttgacagtgccttaagccatggagctagctaatcagcaccttactcattgtatgacaggaaagagaagagatctgggaatgagcagatcattcagcattcctgcaaacatggagaaacagagccagacagctagctctcccctcccagtttctatgagttccaatgtgaccaaaagccttatcttggcctttgcacctggaggtcaccgctgccgctgggaggatgagtggaggaacttgggatgtacatgatagggtcagccagccagcaaatgagtgtttgcagagtgactagggaggagcaaaggagagctttcactgctgtaatagtccagaagttgctgctgaatcaagcgaaaagaataagcaaagtgtttcagaagtcagcctgcttcacatcttgttgttcatttattccctctattctgaccactgagcccaccaagctctccttcttgatataacttttatcatatttaatattagggcaagactagtttgggatcttatgtgtctaatttatataaatgtagcaaatagtctttttgatggtaagataaactagtgaattatctctaacataatcaataaattttcttattgctgggtgtttctcaaccatggtttcgcattaaaatcatctagcgagcttaaccgccccctccccaaaacacacacacatacacacacacacacacacacacacacacacacacacacacacacacaattcccaagctgctcctaggtcatttataccagaactcrggttaggactcaggcaatggcgttctttaaagctctgcaggtgattctaatgtgccgctggagttgacagccactgttccaaatgtcttgaagatgaataataaaatccagattggtagtgagtaaaaatatatgtgtgtctaatgtgtaagtctcaaattattaacatttctcaacaatgtatttccattttaaaaatcatattttaaggaatgaccttcaaaattttgttatagaatattattttagtgatgtttctctgttagtaatgtgaagcatgttgcacataaactgtctggagaatgtggcattatttgcaaacatgtcagagaatgcagcagattttacaaaggtttatgaaaacaatatgcttcattatttgttcacataaaaagtaacaaaattagcttcctgttaaacagaaagcccatagagtagaagagaaa

SEQ ID NO: 49061 - DNA, 1948 bp, Homo sapiens
gtgagaatattcatatttgtttcagatacaagtccattatttatgtcaaataattaaatacctctttagatatccattccaggggaggctcttgagcctttcacctctctcatgtccaaacttactagttatttcaatactgaaataattccagttgttcatgaattatttgatgagatttagagtgatctatattagttaattcatttatcagatttgttgaatacctgttatgtgcactggatggcaattggtgccatgttgtatatacattggacaaaggcaaaattctgtcttgggatgcttaagtatagtgaagaagaatgacaagtgcaaaaatatctaattccaaagctgagagaggagagaaagattatttaagttggtatggtcagataagtaaaacagtattttaactaagctttgagaaatagatagaattctacttggaacattgaggaggactccatggaaaagtaataaaatgaatgaagaccagagccaggctggaaaaaaatctttttaatggaatagcagtgagcaatgcagaaaagctagagatcatcttactgctgtgcactctaaatattccccatggctgctaccttgtccaattccctcacagtcctgcctgctacagaaagcgtagcagttttctctttatcgatgatgagcaatagaaagaaatgcttcactctgcctaggcaacaggcacatttaatatgggatttctgttgacagtgccttaagccatggagctagctaatcagcaccttactcattgtatgacaggaaagagaagagatctgggaatgagcagatcattcagcattcctgcaaacatggagaaacagagccagacagctagctctcccctcccagtttctatgagttccaatgtgaccaaaagccttatcttggcctttgcacctggaggtcaccgctgccgctgggaggatgagtggaggaacttgggatgtacatgatagggtcagccagccagcaaatgagtgtttgcagagtgactagggaggagcaaaggagagctttcactgctgtaatagtccagaagttgctgctgaatcaagcgaaaagaataagcaaagtgtttcagaagtcagcctgcttcacatcttgttgttcatttattccctctattctgaccactgagcccaccaagctctccttcttgatataacttttatcatatttaatattagggcaagactagtttgggatcttatgtgtctaatttatataaatgtagcaaatagtctttttgatggtaagataaactagtgaattatctctaacataatcaataaattttcttattgctgggtgtttctcaaccatggtttcgcattaaaatcatctagcgagcttaaccgccccctccccaaaacacacacacatacacacacacacacacacacacacacacacacacacacacacacacaattcccaagctgctcctaggtcatttataccagaactcaggttaggactcaggcaatggcgttctttaaagctctgcaggtgattctaatgtgccgctggagttgacagccactgttccaaatgtcttgaagatgaataataaaatccagattggtagtgrgtaaaaatatatgtgtgtctaatgtgtaagtctcaaattattaacatttctcaacaatgtatttccattttaaaaatcatattttaaggaatgaccttcaaaattttgttatagaatattattttagtgatgtttctctgttagtaatgtgaagcatgttgcacataaactgtctggagaatgtggcattatttgcaaacatgtcagagaatgcagcagattttacaaaggtttatgaaaacaatatgcttcattatttgttcacataaaaagtaacaaaattagcttcctgttaaacagaaagcccatagagtagaagagaaa

SEQ ID NO: 49062 - DNA, 1948 bp, Homo sapiens
gtgagaatattcatatttgtttcagatacaagtccattatttatgtcaaataattaaatacctctttagatatccattccaggggaggctcttgagcctttcacctctctcatgtccaaacttactagttatttcaatactgaaataattccagttgttcatgaattatttgatgagatttagagtgatctatattagttaattcatttatcagatttgttgaatacctgttatgtgcactggatggcaattggtgccatgttgtatatacattggacaaaggcaaaattctgtcttgggatgcttaagtatagtgaagaagaatgacaagtgcaaaaatatctaattccaaagctgagagaggagagaaagattatttaagttggtatggtcagataagtaaaacagtattttaactaagctttgagaaatagatagaattctacttggaacattgaggaggactccatggaaaagtaataaaatgaatgaagaccagagccaggctggaaaaaaatctttttaatggaatagcagtgagcaatgcagaaaagctagagatcatcttactgctgtgcactctaaatattccccatggctgctaccttgtccaattccctcacagtcctgcctgctacagaaagcgtagcagttttctctttatcgatgatgagcaatagaaagaaatgcttcactctgcctaggcaacaggcacatttaatatgggatttctgttgacagtgccttaagccatggagctagctaatcagcaccttactcattgtatgacaggaaagagaagagatctgggaatgagcagatcattcagcattcctgcaaacatggagaaacagagccagacagctagctctcccctcccagtttctatgagttccaatgtgaccaaaagccttatcttggcctttgcacctggaggtcaccgctgccgctgggaggatgagtggaggaacttgggatgtacatgatagggtcagccagccagcaaatgagtgtttgcagagtgactagggaggagcaaaggagagctttcactgctgtaatagtccagaagttgctgctgaatcaagcgaaaagaataagcaaagtgtttcagaagtcagcctgcttcacatcttgttgttcatttattccctctattctgaccactgagcccaccaagctctccttcttgatataacttttatcatatttaatattagggcaagactagtttgggatcttatgtgtctaatttatataaatgtagcaaatagtctttttgatggtaagataaactagtgaattatctctaacataatcaataaattttcttattgctgggtgtttctcaaccatggtttcgcattaaaatcatctagcgagcttaaccgccccctccccaaaacacacacacatacacacacacacacacacacacacacacacacacacacacacacacaattcccaagctgctcctaggtcatttataccagaactcaggttaggactcaggcaatggcgttctttaaagctctgcaggtgattctaatgtgccgctggagttgacagccactgttccaaatgtcttgaagatgaataataaaatccagattggtagtgagtaaaaatatatgtgtgtctaatgtgtaagtctcaaattattaacatttctcaacaatgtatttccattttaaaaatcatattttaaggaatgaccttcaaaattttgttatagaatattattttagtgatgtttctctgttagtaatgtgaagcatgttgcacataaactgtctggagaatgtggcrttatttgcaaacatgtcagagaatgcagcagattttacaaaggtttatgaaaacaatatgcttcattatttgttcacataaaaagtaacaaaattagcttcctgttaaacagaaagcccatagagtagaagagaaa

SEQ ID NO: 49063 - DNA, 559 bp, Homo sapiens
ttgcattaaaatagcctagaaattttatttctgcattccagttctgtcttctataacttttttttaacccgtgaaaatgggataaaatgttgggttttttttttttttttttaggatcatgtgtgtgaatttgaggttcagagactgcagtcactgcagagacctgaaagccattactgtctgtcctctgtgattrtatgtgtcccctgtgattcccacctgcaggattaggaatgggagggagagcagggggtagaaaagggaaggtggcagaatccatcgcaaaccagtgaactccaaaacctaatcaggcttctttctaggcagattctatgagagacgaagacagaccacaaaaaacctagccctaatttttttttaacccatgatttctaatgtttatctatttgttcattttgtaattcgagtttaatcagaccaactatcaggcaggcatttagtttgcactttcaaaaattgaaacttacacatttattaaatgatatccagaatcatttcctttttcttttagaacattaaacattaatccttttgagta

SEQ ID NO: 49064 - DNA, 924 bp, Homo sapiens
atgataagtcattgaggcttcctgccaacagccaagtaagtgcgccatcttgaaagtggatacagtcccagtcaagctttcagatgatggcaaccctagccaacatcttgactacaacctcaagagagactctggtcagaacaccccagctaagccactcccaaattactgaccctctgaaagtgtgcaataataaatggtttttatggggtacacagaaatagataactaatatgcctggattcctgaatgactacaaggaaaactactgctaacaaggaacacatacattgaatgagtggtaaataaacatctatagtgttaaaccactgaatatttgaggtttgttacattgcataatgactactctattccagtattatcaattcaaattttattctcatctactattctgtataagagaccctcatgacactgaggttgggacaaaataatatttgaattttatgcatttgtttgctcttgtagacggtagttgccttcaaacttcatttgctaatggaaacatyttttcaataaatcctttcccgatctcccaatacaaaacagagaatatctgagcatgttcatactgaacaaagcaaggttacagtagtgacgatctcacaccctctgtctcagcctctaacccactccttgaagtcaccttgggacataataacagcatttccaacagggaagacatggcctgaggaacacagattcaccaatataaaattctgggatactttgtaatggaaacagcacttggaagagttaattatcatattagtttgctagggctgccataacaaaatgccacagaacaacagaaatggcttcaacaacaggaatacattttctcacagttctggaggctggaactccaagatcaaggtgccggcagggttggtttcctctgag

SEQ ID NO: 49065 - DNA, 553 bp, Homo sapiens
tcaacagtttgggaataaagctcgcttgaaggaagaaattccaagtgtctttcaaagctaatgactattagcacgattttcttttttgcaatcacatggatacaatggcaaagcaatggcctggcataggggctcatacctgtaatctcagcactttargaggctgaggcaggaggatcccttgaggccagggattcgagaccagcctgagcaacataatgagatcctgtctctactttaaaaataaaaaataaacaaaattaaaagataaaaataaattcaaaaattatgaggcaaggctagcaaggttgataatttacccacactctgtcccattaaggatgattttggctacaagtatcagatattcatctcaagtagatttaaattagagagtttattatctcacataacaaaaagggtgaagggacgatggtccatttagtagtctgcctcctcaaggacccaggcttcttctagtttccctgatagccctcagttaactcctctcatggttccaagctgtctgccacagttccagtcattacttgca

SEQ ID NO: 49066 - DNA, 553 bp, Homo sapiens
tcaacagtttgggaataaagctcgcttgaaggaagaaattccaagtgtctttcaaagctaatgactattagcacgattttcttttttgcaatcacatggatacaatggcaaagcaatggcctggcataggggctcatacctgtaatctcagcactttaggaggctgaggcaggaggatcccttgaggccagggattcgagaccagcctgagcaacataatgagatcctgtctctactttaaaaataaaaaataaacaaaattaaaagataaaaataaattcaaaaattatgaggcaaggctagcaaggttgataatttacccacactctgtcccattaaggatgattttggctacaagtatcagatattcatctcaagtagatttaaattagagagtttattatctcacataacaaaaagggtgaagggacgatggtccatttagtagtctgcctcctcaaggacccaggyttcttctagtttccctgatagccctcagttaactcctctcatggttccaagctgtctgccacagttccagtcattacttgca

SEQ ID NO: 49067 - DNA, 578 bp, Homo sapiens
ccatgtggcttctccaagcctcastttcctcctctgtggaatgtgaaaaatagaagctccctcatagggttttcactggcattaaaggggcttccatatagaaagcacttaaagtagtgttcagcacgtggtaagcattcaacaaatgttaggtgttattattacttattaaacaggtacataataaacaagctgttcacaaagcattatttcacctctaagccttacttctgatgtagaaaatacactaacaatatctacattgcaagattagagaaaacatatttacagggtacaaagtaggtccttgataaaggacagttttgttcattctgtgtctcctgctaccagaattttagtgccaagagagcgggaccatctgttttattcattgcagtggcctcagtgcctagcatagtgtctgcacatagaggggctcaataatcatttttttgaataaccagccattcttattagtgtttttgttgctatgctggatagaggccacatgctttttttttttttctaacacttagattgggttactatatgaattacaaattctaaagttgcttttg

SEQ ID NO: 49068 - DNA, 560 bp, Homo sapiens
atggacattgtaacaagggaatacattttagaaaggttcacttcacggaattttgagcaaagaaggcaatttacttttatcagtgattcttggtgaagagaatgaaaccatctccatgaagagcggagaacgattttgcagaattcacagtcacaagcattttcacacgggttttcaccctggtcaaaggttccttctcattatggctgtttataatatcacaaatgacattttattagcctataacacagcttagccttataagattacattacatgaaaacaccaagtgttccttacagatttgccacgtgtgatggcacatactttatcagggaaactgatttttaaatttgacccttaaaacttgtcaacacgtctttttcttcaagctctagtgttccttaagaaaackaagtgcagggccgggcgcggtggctcacgcctataatcccagtactttgggaggctgaggcaggtggatcacctgaggtcaggagttcgggaccagcctggccaacatggggaccccgtctctactaaaaatacaaaaaatacaaa

SEQ ID NO: 49069 - DNA, 549 bp, Homo sapiens
gaaaggttcaaagaggggtccttcaaactgggattctaggtcttctcccatagcttcaactcaaacagttctgcatttttttttagacatgaggtctcactctgtcacccaggctggagtgcagtggcaatgcatcatagctcactgcagccttgaactcctgagctcaagtcatcctcctgactcagcctcccgaggagctgagactacagaaatagccaccatgcctggctgatttttctatttttttgtagagacggggtttcgccatgttgcccaggctggtctcaaactcccgggyttaagggatcctcccaccttggccccacaaaatgctgggattacaggtgtgagccattgcacctggccaaaataacatttttattgagatataattcacacagcataaaattcacccttcttttttttttttttttttttttgaaatggagtctcactctgtcgcccagtctggagtgcaatggcacaatctccacccactcacccactgcaacctctgcctcccaggttcaagcaatttgcttgcct

SEQ ID NO: 49070 - DNA, 636 bp, Homo sapiens
gtgcacgggatgagacttctacatgtatcaaccctcacagcatcccartgacataggaattatctccagcataccagcgagggaaccaaggcacaatagctgctatgtggtagcgtcagaattggaaaaaaagcctgggggctgagtatgccaccgtcttatcctttactatttcttttatagaaacaaaaatcagaactgcaggtgtaaatcattcatacttcggttgtttttggttatttccccatttggagcaaaatgtatatagttctcattccttggtggagactatataattctaaataaatctttttgtggtcttcgtaaagtcttgcactgaaaaatccctccaggtatagtaatcggtggaaatcttggcagggtggaccctatttattctgctattgtagtgaaaattctgttgcccaagcaacatatctgaacagcctacttcacagatccattaagatgtctcaggcacatcagattaatatgtccaaggctggactgaaatatgttctgaagctttttttttttttttccatcggtggcaccactgtcctggtcactcaggatatgagcctgggatccttgatgtcttctctctctttcaatttccacacgtatgtccagttg

SEQ ID NO: 49071 - DNA, 1347 bp, Homo sapiens
tgcataccctttaagccccactgctatgatctagtttgggagatgtggaaaataggttatataaaaatttttctgagtaatcaaaagcacatccaacatttactagagacacaatattgtcttctacgggatggattagcatctcttccttcaaatgtcttgacttggaagatgcgatctctgttaagttgcaggtctctccagccccggaactgggccctgcagccaccaagatgctgatgcctaagaagaacgggattgccatctatgaactcctttttaaggagggagtcatggtggccaagaaggatgtccaccttcctaagtacccagacctggcagaagacaagaatgtgcccaacctttacatcatgaaggccatgcagtctctcaagtcttaaggctacgtgaaggaacggtttgtctggagacatttctactggtaccttaccaacgacggtatccagtatctctgattacctccatctgccccgtgagactgtgccttccaccctataccacaggcatccagagactggcaggctttggcctaaaggtctggagggtgagcaacccgcaaagctcacaaaaggggaagccaaaagacacccacagacagagtgctgtgtcccctggtccgatgagaaagccgaggccggggttgggtcagcaaccaaattccagtttagaagcagatttggttgtgggtgtggtcagtgacctcagtaaaactggagaggattattttgcattgaataaacttatagacagaaaaaaaaatgcaggtccttctgcttaagccggtgtttaacctgtggtttgattctgaatgtcttccctagttttggaaacaatttatattgaagttcagttgtgtcacaggcccttattttacttttttttaaaaaaacttgtttttggccaggcgcagtggctcacgcttgtaatccctgcactttgggaggcagaggcgagcrgatcacctgaggtcagaagtttgagaccagcctggccaacatgatgaaaccctgcctttactaaaaatacaaaaaattagtcgggtgtggcggcaggcgcctgtaatctcagctactcgggaggctgaggcagaagaatcacttgaacctgggaggcggaggttgcagtgagctgagatcacgccactgcactccaacctgggcaacaagagctaactctgtctcaaaaaaaaaaaaaagtttttaaagacagggtctcgctatgttgcccatgctggtcttgaattcctggggtcaagtgatgcttctgctttaacctcccaaggagctggaatcatgggtgcccaccaccatgctcggctactatttt

SEQ ID NO: 49072 - DNA, 1347 bp, Homo sapiens
tgcataccctttaagccccactgctatgatctagtttgggagatgtggaaaataggttatataaaaatttttctgagtaatcaaaagcacatccaacatttactagagacacaatattgtcttctacgggatggattagcatctcttccttcaaatgtcttgacttggaagatgcgatctctgttaagttgcaggtctctccagccccggaactgggccctgcagccaccaagatgctgatgcctaagaagaacgggattgccatctatgaactcctttttaaggagggagtcatggtggccaagaaggatgtccaccttcctaagtacccagacctggcagaagacaagaatgtgcccaacctttacatcatgaaggccatgcagtctctcaagtcttaaggctacgtgaaggaacggtttgtctggagacatttctactggtaccttaccaacgacggtatccagtatctctgattacctccatctgccccgtgagactgtgccttccaccctataccacaggcatccagagactggcaggctttggcctaaaggtctggagggtgagcaacccgcaaagctcacaaaaggggaagccaaaagacacccacagacagagtgctgtgtcccctggtccgatgagaaagccgaggccggggttgggtcagcaaccaaattccagtttagaagcagatttggttgtgggtgtggtcagtgacctcagtaaaactggagaggattattttgcattgaataaacttatagacagaaaaaaaaatgcaggtccttctgcttaagccggtgtttaacctgtggtttgattctgaatgtcttccctagttttggaaacaatttatattgaagttcagttgtgtcacaggcccttattttacttttttttaaaaaaacttgtttttggccaggcgcagtggctcacgcttgtaatccctgcactttgggaggcagaggcgagcagatcacctgaggtcagaagtttgagaccagcctggccaacatgatgaaaccctgyctttactaaaaatacaaaaaattagtcgggtgtggcggcaggcgcctgtaatctcagctactcgggaggctgaggcagaagaatcacttgaacctgggaggcggaggttgcagtgagctgagatcacgccactgcactccaacctgggcaacaagagctaactctgtctcaaaaaaaaaaaaaagtttttaaagacagggtctcgctatgttgcccatgctggtcttgaattcctggggtcaagtgatgcttctgctttaacctcccaaggagctggaatcatgggtgcccaccaccatgctcggctactatttt

SEQ ID NO: 49073 - DNA, 567 bp, Homo sapiens
gggtgacataatagtgtagatcttggctgggcacggtggttcacgcctgtaatcccaacactttgggaggccgaggcggrcggatcatctgaggtcgggagttcaataccagcctgaccaacatggagaaaccctatctctactaaaaatacaaaattagctgggagtggtggcacatgtctgtaatcccagccactcgggaggctgaggcaggagaatcgctcgaacctgggaagcagcggttgcggtgagctgatattgccccattgcactccagcctggacaacaagggagaaactgtctcaaataaataaataaataaataaaataatgtagatcttgaaagggggtcggtttatgctggtgtatgtactttccaaagttagtaaacttacacttaaggttatatattttggccaggcgcgatggttcacgcctgtaatcccagcactgggaggccgaggcaggcggatcacgaggtcaagagatggagactatcctggcgaacatggtgaaaccccgtctctactaaaaatacaaaaattagccaggcgttgtaatctgagc

SEQ ID NO: 49074 - DNA, 567 bp, Homo sapiens
gggtgacataatagtgtagatcttggctgggcacggtggttcacgcctgtaatcccaacactttgggaggccgaggcgggcggatcatctgaggtcgggagttcaataccagcctgaccaacatggagaaaccctatctctactaaaaatacaaaattagctgggagtggtggcacatgtctgtaatcccagccactcgggaggctgaggcaggagaatcgctcgaacctgggaagcagcggttgcggtgagctgatattgccccaytgcactccagcctggacaacaagggagaaactgtctcaaataaataaataaataaataaaataatgtagatcttgaaagggggtcggtttatgctggtgtatgtactttccaaagttagtaaacttacacttaaggttatatattttggccaggcgcgatggttcacgcctgtaatcccagcactgggaggccgaggcaggcggatcacgaggtcaagagatggagactatcctggcgaacatggtgaaaccccgtctctactaaaaatacaaaaattagccaggcgttgtaatctgagc

SEQ ID NO: 49075 - DNA, 567 bp, Homo sapiens
gggtgacataatagtgtagatcttggctgggcacggtggttcacgcctgtaatcccaacactttgggaggccgaggcgggcggatcatctgaggtcgggagttcaataccagcctgaccaacatggagaaaccctatctctactaaaaatacaaaattagctgggagtggtggcacatgtctgtaatcccagccactcgggaggctgaggcaggagaatcgctcgaacctgggaagcagcggttgcggtgagctgatattgccccattgcactccagcctggacaacaagggagaaactgtctcaaataaataaataaataaataaaataatgtagatcttgaaagggggtcggtttatgctggtgtatgtactttccaaagttagtaaacttacacttaaggttatatattttggccaggcgcgrtggttcacgcctgtaatcccagcactgggaggccgaggcaggcggatcacgaggtcaagagatggagactatcctggcgaacatggtgaaaccccgtctctactaaaaatacaaaaattagccaggcgttgtaatctgagc

SEQ ID NO: 49076 - DNA, 328 bp, Homo sapiens
aaatattaactgatttaactaattaactgatttaaccctcatggcaattttcttatgtaggtatttttgttgtctctgctttgtctccatttcaaggaagagaaacatagggctcagagaagttaagtgagttacccaaggtcacacagctggtaagtggcagagctgtgacttaaagtctagaaacctagttcaattttccatgcctttgccactcsataatgttgtttaacaatagtatattgtttaaatgattccaaggagaaacaaaagatgttttgtacatttggggagaatccatttgtgtgtccggccagttaattctact

SEQ ID NO: 49077 - DNA, 467 bp, Homo sapiens
gggtctcattcaaagccatcctgagccgcgtgtggacaagcttgctttaaatgcagttttatggtatgtgaattctatctcactaaagacattaagragcaacgttgcctaatgaaatccacaggaatgaaaagctacagggtgtgggacggccctcagggcccactgcccatcccagggctccctacatcgtccgacctttgaatatgtctgtgattttccaccttgacattacgataaaagcacagcaaaggccatgacaaacgacatctgagccgtgggggaggtgggcggggacagagtactggagggctcattcttcaaccgcatcaggtgtgtggctgccccagtggctctgatatctttttaaatcatcccttacccggtagaggtccacactatttataggtaaaagagtacgaagtctagatttgcttttcactccagaggaagaaggctgggaggga

SEQ ID NO: 49078 - DNA, 467 bp, Homo sapiens
gggtctcattcaaagccatcctgagccgcgtgtggacaagcttgctttaaatgcagttttatggtatgtgaattctatctcactaaagacattaaggagcaacgttgcctaatgaaatccacaggaatgaaaagctacagggtgtgggacggccctcagggcccactgcccatcccagggctccctacatcgtccgacctttgaatatgtctgtgattttccaccttgacattacgataaaagcacagcaaaggccatgacaaacgacatctgagccgtgggggaggtgggcggggacagagtactggagggctcattcttcaaccrcatcaggtgtgtggctgccccagtggctctgatatctttttaaatcatcccttacccggtagaggtccacactatttataggtaaaagagtacgaagtctagatttgcttttcactccagaggaagaaggctgggaggga

SEQ ID NO: 49079 - DNA, 525 bp, Homo sapiens
tcccagtgctttgggaggccgcagtgggcagatcacctgaggtcaggagttcgagaccagcctagccaacatggcaaaaccccatctctactaaaaatacaaaaattagccaggcatggtagcggacgcctataatcccagctactcgtaggctgaggaaggagaattgtttgaacttgagggtggaggttgcagtgagctgagatcgtgccacttcactctagcctgggtggaagagtgacactccgtctcaaaaaaaaaaaaaaaraaagaaagaaagaaaatgtttagccatccagaaaagttgagagaagagtacaacgaatgcgcaaatactcctgcccccatatttgctttattatgtatatagtagagttgggggtcttgttatgttgctcaggcttgtctcatattcctggcctcaagcaatcctcccacctcggcctcccaaagtgctggattaagaggtgtaagtcagcttactcagcccatatttgctgtaaagagcccattctgttgtgtgag

SEQ ID NO: 49080 - DNA, 569 bp, Homo sapiens
ggaggctcagtcgtgagaggagctgggctcctcctggagggacatcagacaacaccagtgcttcctccagcaggactcctcatccagtgctctctttgccacctgacctggcacccggtggatgctcagagatggcaggggagttgaatctttgaggcctggcccagcagtcaaaggcctcccacagatgtctgtttgtgctgcccccaggactggagtgacagcctggcccaactggctcaagccagggcagccctctgtggaatcccaaccccgagcctggcgtccggccygtggcgcaccctgcaagtgggctggaacatgcagctgctgcccgcgggcttggcgtcctttgttgaagtggtcagcctgtggtttgcagaggggcagcggtacagccacgcggcaggagagtgtgctcgcaacgccacctgcacccactacacgcaggtgagtgtgctgcaggtgaggccagcgtgccagctcccagatacagacttccactgggccatctcagaagaggctacagtttgtcctaaatgttgggattccttttcctccaattggtt

SEQ ID NO: 49081 - DNA, 569 bp, Homo sapiens
ggaggctcagtcgtgagaggagctgggctcctcctggagggacatcagacaacaccagtgcttcctccagcaggactcctcatccagtgctctctttgccacctgacctggcacccggtggatgctcagagatggcaggggagttgaatctttgaggcctggcccagcagtcaaaggcctcccacagatgtctgtttgtgctgcccccaggactggagtgacagcctggcccaactggctcaagccagggcagccctctgtggaatcccaaccccgagcctggcgtccggcctgtggcgcaccctgcaagtgggctggaacatgcagctgctgcccgcgggcttggcgtcctttgtygaagtggtcagcctgtggtttgcagaggggcagcggtacagccacgcggcaggagagtgtgctcgcaacgccacctgcacccactacacgcaggtgagtgtgctgcaggtgaggccagcgtgccagctcccagatacagacttccactgggccatctcagaagaggctacagtttgtcctaaatgttgggattccttttcctccaattggtt

SEQ ID NO: 49082 - DNA, 569 bp, Homo sapiens
ggaggctcagtcgtgagaggagctgggctcctcctggagggacatcagacaacaccagtgcttcctccagcaggactcctcatccagtgctctctttgccacctgacctggcacccggtggatgctcagagatggcaggggagttgaatctttgaggcctggcccagcagtcaaaggcctcccacagatgtctgtttgtgctgcccccaggactggagtgacagcctggcccaactggctcaagccagggcagccctctgtggaatcccaaccccgagcctggcgtccggcctgtggcgcaccctgcaagtgggctggaacatgcagctgctgcccgcgggcttggcgtcctttgttgaagtggtcagcctrtggtttgcagaggggcagcggtacagccacgcggcaggagagtgtgctcgcaacgccacctgcacccactacacgcaggtgagtgtgctgcaggtgaggccagcgtgccagctcccagatacagacttccactgggccatctcagaagaggctacagtttgtcctaaatgttgggattccttttcctccaattggtt

SEQ ID NO: 49083 - DNA, 569 bp, Homo sapiens
ggaggctcagtcgtgagaggagctgggctcctcctggagggacatcagacaacaccagtgcttcctccagcaggactcctcatccagtgctctctttgccacctgacctggcacccggtggatgctcagagatggcaggggagttgaatctttgaggcctggcccagcagtcaaaggcctcccacagatgtctgtttgtgctgcccccaggactggagtgacagcctggcccaactggctcaagccagggcagccctctgtggaatcccaaccccgagcctggcgtccggcctgtggcgcaccctgcaagtgggctggaacatgcagctgctgcccgcgggcttggcgtcctttgttgaagtggtcagcctgtggtttgcagaggggcagcggtacagccacgcggcaggagagtgtgctcgcaacgccacctgcasccactacacgcaggtgagtgtgctgcaggtgaggccagcgtgccagctcccagatacagacttccactgggccatctcagaagaggctacagtttgtcctaaatgttgggattccttttcctccaattggtt

SEQ ID NO: 49084 - DNA, 569 bp, Homo sapiens
ggaggctcagtcgtgagaggagctgggctcctcctggagggacatcagacaacaccagtgcttcctccagcaggactcctcatccagtgctctctttgccacctgacctggcacccggtggatgctcagagatggcaggggagttgaatctttgaggcctggcccagcagtcaaaggcctcccacagatgtctgtttgtgctgcccccaggactggagtgacagcctggcccaactggctcaagccagggcagccctctgtggaatcccaaccccgagcctggcgtccggcctgtggcgcaccctgcaagtgggctggaacatgcagctgctgcccgcgggcttggcgtcctttgttgaagtggtcagcctgtggtttgcagaggggcagcggtacagccacgcggcaggagagtgtgctcgcaacgccacctgcacccactacacrcaggtgagtgtgctgcaggtgaggccagcgtgccagctcccagatacagacttccactgggccatctcagaagaggctacagtttgtcctaaatgttgggattccttttcctccaattggtt

SEQ ID NO: 49085 - DNA, 595 bp, Homo sapiens
ggactgttgattttgagccatgaagccacttctgtggtaacttccttagtgccttctgaggtccgtaagtacttatgaacaccttttctttcttttcttttcctttctctctctctctctctttctttcttgatacacagtcttgctctgtcacccaggctggagtgcagtggttcagtcttggctcactgcaacctccacctagtgggttcaagtgatcctcctgccccagcctcccaagtagctgggattacaagtgtgcaccactatgyctggctaattcttatatttttagtaggatggggttttgccaggttggctaggctggtctcgaaatcctgacctcaagtgatctgcccgcctcggcctccgaaagtgccaagattacaggtgtgaaccaccatgcctggccaccatttctttcttgattttttgtttaatcaccagtaagacaaatatgacaaggaaaggaccctttttacaactgaatacgtaggttatgaacattctctttgtattccacagcgaagagaaagaggtgcaagtgatggcctggggtgctgtctgagggcctggcctatcacacaggctatag

SEQ ID NO: 49086 - DNA, 570 bp, Homo sapiens
catggtattttatttaatctccataacagctctaggagatagattttattaactgcatccttttaatgactatttatatagtcaataagactataatgacttatactcctactgagcagataaggaaactgaagctccgaggagttaataggacttgctcagtgttgcacaactaccaagtggtggccctgggaagtcttctgtgactctaatctaggctctaaagtctaattatccactggctgttaaagtgtggccctcacacaggcagcagcagcatcacatgggaagtggaagtgagaaatgcacattcttgggccctagctcagatctactgaatcagaaactctggcagtggatttcagtcctccaggtgactctaatgcacrctcaggtttgagaaaggatccctgcccctaatccatcaagccaggccaggagagtgcaatcgtagagtccatgtgtcctgcctcttgaatccctgagttgaaatcccagatctttcacttcttaactatacaactctgggaatggtatttatccttcctctgccataatcctcttatgtgt

SEQ ID NO: 49087 - DNA, 827 bp, Homo sapiens
acaacagggactattactcagcccttattatagatgctttgcatggattagcttatttaattctcaaaacaactctatggggtatctatcacctcaatttatagayagggtgtggtggttttaaaccatgtccataaattctttgatagtcctccctttaaaaggtggattctaatttgcttccttttgagtatgagcttggcttagtggttcagttctaaagaatagaataagtgactatgtttggtgtctaagatgagatattcaaaggcattgtgacttcctccttgctctctctctcggatcacccaatgtgggtcttggtttttccatcttcaaagtgaggtgtgtggatcagataacatctccagttatccaacctgacatgtcgtaaatcatctgtgcatcaaatagtcttcttagcatggactataacatcagattcgttagctgctctgtgctagaaagagttgaagctttgacagttttgcttcattttgttggatttggggggccaagatcagaatgacatgagaacactcaagcaactttatggagagacccatgtggctaggagcttaggcctcctgccaacagccatatgagggtgccatcttggaggtggattctccagcccagccaacccttcaggtcaatgcagtcctagcaagcattttgactgcaatctcacaagagatcctgagccagaaccacccccagttaagttgctgtcaaatccacaacccacacaaactgtgaaattagaaaaaccttttgtttaaaaccattaagttttggggataattcatcatgcagtaataaataac

SEQ ID NO: 49088 - DNA, 628 bp, Homo sapiens
aaactcatgagaaaaaaagctaagaattaaaacctatttctaccatctttgctgaggccttggccatcagtattggcccagtccttaaacaagtgagagtaagaagctctgacaatgcttcttactgtgctagctcctggggtacaaaagaaagtaattcaaatgtggctcctttwcccgaggccttaaggattctttccttcaaccataattgaaaaaagatggtccttttacatttatttccactatttgccatttttttgtatttggcgtacagtcattttcttatttttcctacttctgaacaaaatcattatccttaaaattcttctctccctggctcctttatcaaccttactgatataaattaagattcactttcaaaagaaaatgccaatatcaggtggtcaacaaccagaggcagtagaactcatgtagaatcaatggtatcaggctacccaagcaggtattgaatagtgcacccatgtgcagagagggaataaaaaaagaaaaaaaaagtgtgaaggatctgttgaaacacagttgtaagcaatgtgcagtaactgtgagtggctgaaaaatcacagtagtttaatagacctgctgggcatatctaagaagaggagtg

SEQ ID NO: 49089 - DNA, 594 bp, Homo sapiens
atgtacttaacatgtagcgcactcaataaatggtagaagtcgtcacagattttgtttattattagtagtaatagcttgcatggtgtctaggggactgaccagttaggcagggatgtgatatttgtaaaggtgtccagtaccatccatgttgtgaagaagacactcttttttaggtcaataatacaacattgctaagggatacatggaatatagatgcaaatagcatactaaaatataacaaagaatctggcttttagttttataattaaagaattgcttggctgcttgtgtatggggcagacagttcggccccatactgtttctataacaaccatgactatatccaggtagactagaagatgctggttcttcacagtatttctctagtgcaacctgaataactagaattaaattctgggtcacatgattgyaattatgtctgttggaattttatgtagagttgggatatttgtccaacatgacaaaacaggctgagtttttctgaaacggtgagcaaatctttctttctcctctttacaccctgaatggagtggcaaatcctgtcattcttactcctctctgggataatcccca

SEQ ID NO: 49090 - DNA, 613 bp, Homo sapiens
tgtcagatgtgccacctacatgtaataaggtcagaattctgcctccagtaacacatcaaaggtgacctttgattgtacttttggtttatgctcccaaaatattggattataaatttcatcaccgtcatattttatgtcaaaataaatctgcataatctgaatgtcaatacattttggaatctactaaataactgaaattgcaagaaatattacccactccaaaarctggagagatgggcatgtccagaattgcagttagcacttgcttaactggtgcagaaactgcaggagctgcagaagccacaagctgttgaaggcacttatatggtaaccactatagacgtctgaaagacaaatgtggactcggtaaatgtgaccattccagagggtcttatacttctaaggtttctggactttctctccagaaacctccagattctaaaatatacaatccaaataaatttcctgtgggtcagaattgaagatgaaatgaagatgattaattacagaaaactataccaggagcctacttcaaaagcttctaaagggaatgacttttccagaaccttatcctatgtgaaggaagacaaatctcccattccagattctctcc

SEQ ID NO: 49091 - DNA, 613 bp, Homo sapiens
tgtcagatgtgccacctacatgtaataaggtcagaattctgcctccagtaacacatcaaaggtgacctttgattgtacttttggtttatgctcccaaaatattggattataaatttcatcaccgtcatattttatgtcaaaataaatctgcataatctgaatgtcaatacattttggaatctactaaataactgaaattgcaagaaatattacccactccaaaaactggagagatgggcatgtccagaattgcagttagcacttgcttaactggtgcagaaactgcagragctgcagaagccacaagctgttgaaggcacttatatggtaaccactatagacgtctgaaagacaaatgtggactcggtaaatgtgaccattccagagggtcttatacttctaaggtttctggactttctctccagaaacctccagattctaaaatatacaatccaaataaatttcctgtgggtcagaattgaagatgaaatgaagatgattaattacagaaaactataccaggagcctacttcaaaagcttctaaagggaatgacttttccagaaccttatcctatgtgaaggaagacaaatctcccattccagattctctcc

SEQ ID NO: 49092 - DNA, 574 bp, Homo sapiens
tttggtctacaaaygtcacctttcactaagaacacttttgagatcatttggaagactgaacaggaggacgtgcatggaaacataggatgattgaaaatgaatcaaaagctgatggttgcaagatattctttatcagtgaaaaacagatttctgataagtaataccttcttccaaatacttttttactttaaacaaataggtaagctggatcacttaatggtacttgaagcaatcagaaatacaataagcttaataaagtgccctcttcagcttttaatcaaacaatttaaattaagtaatcttcgggtaacatttcttgaacactttctatcttctaggcactattaaagtactttagatgtattaattcatatgatattccccatattttcaaaaggtagatactagttatattcctttttataaaaaataaaaataaaacaaagaaaattttactggaagcagctcacttttgtcacttggatggcccttcagaaaagtcccaaactgagccaggaaggtaggtcttgaacccctgcactcagttaaattgagttccttcccataaaagtga

SEQ ID NO: 49093 - DNA, 643 bp, Homo sapiens
ataaataactatttgtcattccattgaaagaatatttattttgcagctgttaaaaaacatttttccctaaaaaaggaaaagctgcgctttacatagcaatcttataaaagaaatgctagaatcagaaaaccatcattttacgctgggtgcagtggctcacacctgtaaccccagcactttgggaggacgaggcaggtggatcacctgaggtcaggagttcaagaccagcttggccagcatgatgaactccrtctctactaaaaatataaaaattaacagagcacagtggcacatgcctgtaatcccagctactcaggaggctgaagcaagagaactgcttgaacctgggaggcggaggttgcagtgagccgagatcgcgccactgccctccagcttggacaatagagcaagattacatctcaaaaaaaaaaaaaaagagaaaaagaaaaccattattttgcaatagccaatgttataatctacacaggcacagactatcaatgctaaaaatcatttaaaagacatcttaagggtaattacagaaatttgaatatagaacacatatgtaataaaattcattttcttaggtatgattacaatattcttgttatacagaagaaaaaccttattcttgggagatgca

SEQ ID NO: 49094 - DNA, 643 bp, Homo sapiens
ataaataactatttgtcattccattgaaagaatatttattttgcagctgttaaaaaacatttttccctaaaaaaggaaaagctgcgctttacatagcaatcttataaaagaaatgctagaatcagaaaaccatcattttacgctgggtgcagtggctcacacctgtaaccccagcactttgggaggacgaggcaggtggatcacctgaggtcaggagttcaagaccagcttggccagcatgatgaactccgtctctactaaaaatataaaaattarcagagcacagtggcacatgcctgtaatcccagctactcaggaggctgaagcaagagaactgcttgaacctgggaggcggaggttgcagtgagccgagatcgcgccactgccctccagcttggacaatagagcaagattacatctcaaaaaaaaaaaaaaagagaaaaagaaaaccattattttgcaatagccaatgttataatctacacaggcacagactatcaatgctaaaaatcatttaaaagacatcttaagggtaattacagaaatttgaatatagaacacatatgtaataaaattcattttcttaggtatgattacaatattcttgttatacagaagaaaaaccttattcttgggagatgca

SEQ ID NO: 49095 - DNA, 643 bp, Homo sapiens
ataaataactatttgtcattccattgaaagaatatttattttgcagctgttaaaaaacatttttccctaaaaaaggaaaagctgcgctttacatagcaatcttataaaagaaatgctagaatcagaaaaccatcattttacgctgggtgcagtggctcacacctgtaaccccagcactttgggaggacgaggcaggtggatcacctgaggtcaggagttcaagaccagcttggccagcatgatgaactccgtctctactaaaaatataaaaattaacagagcacagtggcacatgcctgtaatcccagctactcaggaggctgaagcaagagaactgcttgaacctgggaggcggaggttgcagtgagccgagatcgcrccactgccctccagcttggacaatagagcaagattacatctcaaaaaaaaaaaaaaagagaaaaagaaaaccattattttgcaatagccaatgttataatctacacaggcacagactatcaatgctaaaaatcatttaaaagacatcttaagggtaattacagaaatttgaatatagaacacatatgtaataaaattcattttcttaggtatgattacaatattcttgttatacagaagaaaaaccttattcttgggagatgca

SEQ ID NO: 49096 - DNA, 643 bp, Homo sapiens
ataaataactatttgtcattccattgaaagaatatttattttgcagctgttaaaaaacatttttccctaaaaaaggaaaagctgcgctttacatagcaatcttataaaagaaatgctagaatcagaaaaccatcattttacgctgggtgcagtggctcacacctgtaaccccagcactttgggaggacgaggcaggtggatcacctgaggtcaggagttcaagaccagcttggccagcatgatgaactccgtctctactaaaaatataaaaattaacagagcacagtggcacatgcctgtaatcccagctactcaggaggctgaagcaagagaactgcttgaacctgggaggcggaggttgcagtgagccgagatcgcgccactgccctccagcttggacaatagagcaagattacatctcaaaaaaaaaaaaaragagaaaaagaaaaccattattttgcaatagccaatgttataatctacacaggcacagactatcaatgctaaaaatcatttaaaagacatcttaagggtaattacagaaatttgaatatagaacacatatgtaataaaattcattttcttaggtatgattacaatattcttgttatacagaagaaaaaccttattcttgggagatgca

SEQ ID NO: 49097 - DNA, 538 bp, Homo sapiens
tgtcatgtcacaggtgaggaaaccaaagttggaggatgaaggtaacttttctgatgtcgcrcagctggtaaatggcagagctgggacccaacccaggtctttttgactctaaagctaatgttccttattgtccactgaatctgcttttataactttgcttggtcgatgctaggacactttgtagctcactggccatgccatgaattgagtgccgtggttcaaaggccactggtgattcagtcaaggcaggctcgagggcacacagccatttccttaggaaatggggatggtggttgaaaatttctattaaagggtatataagcattctgagacttggctggccaggtgtagggggtttgttgggaatttaggtggtttgcatgtttaaaggaataagactgagattgccaattagatgggttttagctcatttgaatatttaatgtggaggctgtggtttcctgggacatttttcccactgtggagagttagccagcttttctctgttgcttttttcttttttctttttttaatcgag

SEQ ID NO: 49098 - DNA, 538 bp, Homo sapiens
tgtcatgtcacaggtgaggaaaccaaagttggaggatgaaggtaacttttctgatgtcgcgcagctggtwaatggcagagctgggacccaacccaggtctttttgactctaaagctaatgttccttattgtccactgaatctgcttttataactttgcttggtcgatgctaggacactttgtagctcactggccatgccatgaattgagtgccgtggttcaaaggccactggtgattcagtcaaggcaggctcgagggcacacagccatttccttaggaaatggggatggtggttgaaaatttctattaaagggtatataagcattctgagacttggctggccaggtgtagggggtttgttgggaatttaggtggtttgcatgtttaaaggaataagactgagattgccaattagatgggttttagctcatttgaatatttaatgtggaggctgtggtttcctgggacatttttcccactgtggagagttagccagcttttctctgttgcttttttcttttttctttttttaatcgag

SEQ ID NO: 49099 - DNA, 545 bp, Homo sapiens
ctacttataccacagggttttgggagcagagcccctttcattaaactttcaggattcttggatggatagggtgggaattacaccagtgaaactcagctttgtgtgtgccaggcattgggccctgggatatgcagtcatgtgttgtataatgacattttagtcaatgacaaaccacatgtaagtcastggtaccataagacgattatggaactgaaaaattcctattgcttagtgacatagccattgtaatgttagggtaatgcatttctgtgtttctggtgatgctggtgtaaacaaatctgtgctgccagttctataaaagcatagcatgtacaattacatacaatatataatacttgataatgaacaactatgttactggtttattttatgtttttgagacagagtcttgctctgtcgcacaggctggagtgcagtggcgcaatcttggctcactgcaacttctgcctcacaggttgaagcgattcttctgcctcagcctcctgagtagcagggaatacaggcacccaccaccacggccagct

SEQ ID NO: 49100 - DNA, 545 bp, Homo sapiens
ctacttataccacagggttttgggagcagagcccctttcattaaactttcaggattcttggatggatagggtgggaattacaccagtgaaactcagctttgtgtgtgccaggcattgggccctgggatatgcagtcatgtgttgtataatgacattttagtcaatgacaaaccacatgtaagtcagtggtaccataagacgattatggarctgaaaaattcctattgcttagtgacatagccattgtaatgttagggtaatgcatttctgtgtttctggtgatgctggtgtaaacaaatctgtgctgccagttctataaaagcatagcatgtacaattacatacaatatataatacttgataatgaacaactatgttactggtttattttatgtttttgagacagagtcttgctctgtcgcacaggctggagtgcagtggcgcaatcttggctcactgcaacttctgcctcacaggttgaagcgattcttctgcctcagcctcctgagtagcagggaatacaggcacccaccaccacggccagct

SEQ ID NO: 49101 - DNA, 2108 bp, Homo sapiens
taacagctcaatcagtcaccactgcctgatcagcttgggcttgagatttttaccttccaagtaaaggagaaagcagcctccaagaagccaaccccgaaagctcccttagctcttctttgacaggttacaggggcaatgaactcatgcaaatcctaactcctgaaatagtctccacaaatgggcgttgggcttgaaactttcatgccattggttggaatgacaactcagcagccagctctcccctcagcttctttcctcctctcccccgtcattgcctctcatccctaagcccacctcccaccctcaaagcaggaatttgtcctcacttcaaacatctggaattctcctgtgttaactctttctgggcacttggtgagatggtttgagaacatctactgtcagaaagtacttctggttacagttgatagcttttattaaattttttttacaaaacagcctgttaaaattttaacagtacagaaatatataaagtaagaagtgagcattcttccttgcacctgctccctgtacacttcattctcactcccaggggtagagggtggtaatggtcaggctctttccctccattcagagatagatacattacatataggtgcatagatacataatttcatagatttcaaaacacagataggatcgtgctctacaccttgtttggcaacattttttttttaacttcctacatcttggacgcccatccttgtcagtccacaaagttttgctccaatcagaacaaattgggcacttaagttccattcaacaaatagctgaaaagcacagggtgtccaaggcagctgaaacctgtgcagttttatccttgcactgtgcatgaattcttcatttacctcctatggttgttggaagaatttaaaatgtcaggtgcgatccacacaaaacaactttgctaagcaaaacacaaggtccacagccaaaatctcaacattcctgtgagcagatggaaaataccacccactgaagggttaagagaagcctcagtgatctccccagggctcagatcctgtctgtttatttgttggaagacaaagatttttcacatcagtttgttcttctccattcacttttcagggagtcaagcctccagtggggttgaatacagtagtccccccttatccacagggagcacactccaagacctccagtggatgcctgaaattatggatgtctgaaaccatgggtagtactgagccctaggtacactatgttttttcttatacagtaatggcaggtaacgtctatagcatggatacactagaaaaaattattcacgtcttgggccaagggcatccttgtcataaatgttagtttacatatttgattatttccttaagacagatttctatacaaggactgtgttgcaaagaataagcatttctcttttacatttttagtaaatatgatatatccttatataataaattcaaatagagatgtacgtgaattaaaccctgatcaccttccctccctgcattctcattttatataaaaaaatcatttttagtcatttcttgtgtacccttccaaatgttttctatgtttattacaatacgtataaagctggtttgggagttgctaaaaaaatggagagtaaacgtggtctatagttgcactgtctaatattgtagctactagtcataagtggccgttgaatacttgaaatgtgactggtctgaattaagatgtgttgtaaaatacacatcaggttttgaagacttagtataaaaaaagaatgttaatatctcatataattttgtatgattacatgtttaaaraatattttggggctgggcatggtggctcacacctttggtaatcccagcctttcgggaggccaaggtggatggatcacttgagctaaggaattcaagaccagcttgggcaacatagtgaaaccccgtctatacaaaaagatacaaaaactagccaggcatggtggcatgagcctatagtcccagctacttgggaggctgaggtaggaagatcacctgaacccaggaggtcaaggctgcagagagctgtgatcatgccattgcactccagcctgggtgacagaatgagaccttgcctca

SEQ ID NO: 49102 - DNA, 638 bp, Homo sapiens
tggagtgcagtggcacaatctcagctcactgcaacctccgcctcctgggttcaagagattctcctgcctcagcctcctgagtagctgggattataggcgtgtgccaccacgcccagcgaatttttgtattttagtagagacagggtttcactatgttggccaggctggtctcaaactcctggcctcaagtgatctgcccgccttggcctcccaaaatgttgggattacaggcgtgagccaccgtgcccaaccaaagatattcctttgggagcttccttcaacagcacttacccayccgcaagaatgagcttgaacacctgctttgcaccatgtgacctcctttctgaccccatgactacattttattggaccaggcataaacaactgatgtaaattggaccagtcagattctctcttcagggatttgggatttagaactaagaggcagctacctagtttctgcataaagttggaattgagattttctagacacaggaattgtggaccaattgtgttggagttattacaccagataggtgtaaaagtcccgcctgctgagaggattctgtggaagctgatcaggttgctggggcaagtggaggcagggtagaggtgaagggctgtgggatggagaacct

SEQ ID NO: 49103 - DNA, 414 bp, Homo sapiens
ctgagcaaagccaagaccctccagggctaagccccaactgggggcttggctgtgccctgtatcagttatatggatgtattcaattgtgaaaactcattaaattgaacacttaaggcccctgtgataatgaacctacctcctgccataaaagtcaaatgctatgggaaccaaaaagcagtwcttaatgaatgctgtttgatacatgatgaatagatgaatacatgaagactgagaaaatattgaagtgtggagtataattatcattaaaatgctctccatcattcttctaccactatattggtgtgagtccacacaaatctcttcaatttattgaccaatcacaattaagatgatatccttgtctctctgaaatcctgctctatttataactcaactctttcttgaatatttcca

SEQ ID NO: 49104 - DNA, 564 bp, Homo sapiens
tgcctgatgaagtctgcctcgacttcaccaccactgttagttcccatcattcgggaagccttacccatcaagagaaagcagtgagcgtgatgatgggggagaaggtggcacccagtgaccttccctgaacacgcctgggccccctaatggtagagcttgagggtagcagctgatctggggcatggtcccaggaagaaggggtgaccgggtagagactacagacctggcrggaggataagccaacatatagggtgctttgtggacacctccccatcacggtcaccaaagggcagaggcagccggcccaggctgttacagcctcacccatctgggtcgctggaagcacaggtcccagggcccctaacggtgggacagaaagtgctgggagccatcatatgagggctgcctatgagagggcggcctgcactcacccgggacacccaccagagcagcaggcaggaccagcgcagggtggagaagcaggcctggcgcctgtgtacctggaaagctcccgcaaaccctggatcccgcagaacaactgagcactcagcaaggcaggtaatg

SEQ ID NO: 49105 - DNA, 541 bp, Homo sapiens
attcttttctggttatttccatatagaatatcagctcttaatttgctgatattattaccagcactgtttgtaagcggaaaatggattggcagcattccaaggatagatgctcaacatcaaggtatgaatacaaatacaattaggaggaacccatattttatatgaattaggtcaagaataaggctgtatgtgctgccttgagcttgttctgattaggtgctgaaggtgggcacctgagaaggctggaatgagagtagtttgatctacacatgtcataggaacacctaccaaagattcaaattcatggctgctgattccaagccagaagttcctccacattgccrtgctaactggtttcttgaagtactgatattacattgtattccttttatgtgtgtatacatttggagaatacagtaggggtacaaggaatagacatggactccccaggctattcatgtagtaataaaataatattatctaagttgtatggaaactcaccaggccagagataccatacactacgtactttatctcagta

SEQ ID NO: 49106 - DNA, 582 bp, Homo sapiens
ggaaacaggccagcgaggtcctccatcattctgaaaagcaggcctttttttaaggatacagagcttgactatagaaacacgaaccccaacccacttccaagaggaaggcatccatgttagaagcctwttataaactagtatcataggagataaagatggtgacacactaaagaaaagtggaaaactggagcaagaaagaaaacacaagaattccccaaaccaaacttttgacacttctttgaaaagagccagtcttctgaataataaaatagcttgggtactatacttggtttttaaaaaatgcacccataattaaagcaagaaagctgtaagtctattaaactttttttctttgatactgaaaaactcaattcatgacctatattttataagacatatacttgaaagggattttatataccctcttcccattgaacttagcatactgaatctcttccatttggttaagaagggaggtgattctatacataaattattcagggctttaaaaaaatcttactgtatatatatattaaggtgaagtgattcaaaggtatttgtatagataaatggaagcagcag

SEQ ID NO: 49107 - DNA, 582 bp, Homo sapiens
ggaaacaggccagcgaggtcctccatcattctgaaaagcaggcctttttttaaggatacagagcttgactatagaaacacgaaccccaacccacttccaagaggaaggcatccatgttagaagccttttataaactagtatcataggagataaagatggtgacacactaaagaaaagtggaaaactgsagcaagaaagaaaacacaagaattccccaaaccaaacttttgacacttctttgaaaagagccagtcttctgaataataaaatagcttgggtactatacttggtttttaaaaaatgcacccataattaaagcaagaaagctgtaagtctattaaactttttttctttgatactgaaaaactcaattcatgacctatattttataagacatatacttgaaagggattttatataccctcttcccattgaacttagcatactgaatctcttccatttggttaagaagggaggtgattctatacataaattattcagggctttaaaaaaatcttactgtatatatatattaaggtgaagtgattcaaaggtatttgtatagataaatggaagcagcag

SEQ ID NO: 49108 - DNA, 582 bp, Homo sapiens
ggaaacaggccagcgaggtcctccatcattctgaaaagcaggcctttttttaaggatacagagcttgactatagaaacacgaaccccaacccacttccaagaggaaggcatccatgttagaagccttttataaactagtatcataggagataaagatggtgacacactaaagaaaagtggaaaactggakcaagaaagaaaacacaagaattccccaaaccaaacttttgacacttctttgaaaagagccagtcttctgaataataaaatagcttgggtactatacttggtttttaaaaaatgcacccataattaaagcaagaaagctgtaagtctattaaactttttttctttgatactgaaaaactcaattcatgacctatattttataagacatatacttgaaagggattttatataccctcttcccattgaacttagcatactgaatctcttccatttggttaagaagggaggtgattctatacataaattattcagggctttaaaaaaatcttactgtatatatatattaaggtgaagtgattcaaaggtatttgtatagataaatggaagcagcag

SEQ ID NO: 49109 - DNA, 596 bp, Homo sapiens
taccaaccaaaggagaagcatttcaatattttagaaactggtagaggcctgcttatattttccttacagtgtacacgtggcagtgtgtctctgaagaagattcactgggtcacagggtatacatatttttaattttaatagattctcccaaattttcttccaagatagctatgctaatccacaccaccccagcaatatcaccccaacctcaacaattctacatattaagaaatcatatcttaaaaataattttgccaatcgtatggaagaaaaaatgatatcaaattgttgcttttatttgcatttccctatcaccaagggtgagaatctttttatatgtttcatgaccatacttgatttctggtttgtcaattgactcttcacagactttaccaattttcccggagtttacttttgtttataatctgaagtagtgcattaatttttttccaattktataagtaattgtccaaaatcaattactgaatgatattctcttttcttgctgatataaaatgctatgtttctaatctctggactctctctttgattccatagatccatttgtcaatatttacaaacaatatggtcttaac

SEQ ID NO: 49110 - DNA, 524 bp, Homo sapiens
taagaaattaaataggccaggcgtggtggctcaagccggtaatcccagcagtttgggaggtcaaggtgggcagatcacctgaggtcaggaattgaataccagcctggccaacatggtgaaaccccatctctactaataatataaaaattagctgggcatggtggtgcatgcctgtaatcccagcaccttgggaggccaaggttggcgcatcacttgagatcaggagctcaagaccagcctgggcaacatggtgaaaccctgtctctacaaaaatacaaagcttagctgggcatggtggcacgtgcctgtaatcccagctactcaggaggctgaggcaggagaatcgcttgaacctggaaggcagaggttrcagtgagctgagatctcgccattgcactccagtcatagcgacaagagtgaaactccgtctcaaaaaaaaaaaaaggaagaaagagaaagaaagaaagaaattaaataatacaggacattgaagctggatggagaaacgtagatgatcttggcgg

SEQ ID NO: 49111 - DNA, 1624 bp, Homo sapiens
taaggcaatctttatagagttagaaattaacagtgataatccatgtcaaaatctcagtatggtgcctagcacttataaagtgctcagaaacattgggtaggcttctagagaggcaaacattcataataattgacctagttgaaagatttgtatggttgatcccaagcctcctgtataaagtgctggctctgggcaaaggaaactggtatgacatgggtcctgcacacacaggttttccctacccagtgcactcatgttctttttaagtaaaatcctgtgaacaacatccaactagagaggtagagtgtttacatcccaatgcccgggactggccctgactataagagcttgatgcagcaggaataaggagggctatttccctagtgcattcacctttcatgaatcactgcatcctttctgcaagtcacagcccccagtgcaatttgggaggtaatggccctgaccccacactactcccacagacaggatggactatatttctgctctcccttctcagtatctcacaacaagtcatatcagatagtccccaggtgatgggtgacagacacgtcactcagagaagctacaaagaactttgagggataatcagagccactgtgctaagaaaatgcctaatagaataaacattactctatacaagttatgtatctgtcatattggattatccttggggtttacatgagtattcttttcactttctttctttcttccagctttatttatccagtattctttttcatcctcttctacctggtctattttcaggcattaaaacattttaatacacatttattcattcagaaaatattcatggtatgcaaggcactgaagcattttggtggaacattaagaagaaaccttatgacaacatacaaaaacataacagacgagtaattatttgagccctcaaatagctgagaaaccagagcaggaagatattgaagggctttcaccaacccttccagaagattccctgcacctaagagagtactaagagagtcagagaagggctaagtgtccttcaaaaaagccactgagtattttgtttggtattgctcattatgtatttctatacatatattcagaaaagtaaataaaacactgcagaattagcaaacagttataagcaaatgtccacataaacatgatacaggtcaagaaatagaatcttgtccccatcactgtgtcctgttctgttcataaccctagaagtcactgtgctaaattttatgttaataattttcttgtttttctatatagatcaatatctatgtacatatttttagacaatagtttagctttgcctatcttatatagctcccagaaactgtggataaattggctagctacctatttatttatttcagtgctttataataaaggaaacactaacaaagcaaaaaaaaatctatkccttgtattctattaaattccattaaattaaatcctattaaatcaaatcgtattccttgtattctttggtgtcttacttttcttactcaatggtatgtgtataagatttatccaagttgctacatgtagttaagtttgttcacttttagtgctatatgaatatactgtaatttacctacctatcccattg

SEQ ID NO: 49112 - DNA, 575 bp, Homo sapiens
aagcaaaattaataaacgtaaaagaaaaattaaaatgcmcaaacaactggaaatattaacactaccctctcaaaaatggataggactcataaaaatcaatgcagacatgatatttttgaacagctataaatcttaattgacattgatagaacactacatctaacagttgaagaatatatattattttcgagtgtgcattaaacattcaccaaaatagacaaaatgctttgtcataaaacataagatcaaagaatcaaaataatacagagtatattctctgagcacaacaacattgatttagaaatcagtagaaaagacatatactctgagtatctgtaataatccatggctcaatgaagaaatctaaagaaaaattagaagatctttttagtgttctgctaaaatggtgtttagagtaaaatttttagatttaagtgcctgtagtagaaaggaaaatgcctgggtagaaaagcagtgatctaaatatccaccataagaaggtagaaatgtgtgaatttttttaagcaggtagaaaaataataataaacaataagatctcatcatactgtacccca

SEQ ID NO: 49113 - DNA, 575 bp, Homo sapiens
aagcaaaattaataaacgtaaaagaaaaattaaaatgcccaaacaactggaaatattaacactaccctctcaaaaatggataggactcataaaaatcaatgcagacatgatatttttgaacagctataaatcttaattgacattgatagaacactacatctaacagttgaagaatatatattattttcgagtgtgcattaaacattcaccaaaatagacaaaatgctttgtcataaaacataagatcaaagaatcaaaataatacagagtatattctctgagcacaacaacattgatttagaaatcagtagaaaagacatatactctgagtatctgtaataatccatggctcaatgaagaaatctaaagaaaaattagaagatctttttagtgttctgctaaaatggtgtttagagtaaaatttttagatttaagtgcctgtagtagaaaggaaaatgcctgggtagaaaagcagtgatctaaatawccaccataagaaggtagaaatgtgtgaatttttttaagcaggtagaaaaataataataaacaataagatctcatcatactgtacccca

SEQ ID NO: 49114 - DNA, 639 bp, Homo sapiens
cgacatctaagttaggataatgttgcttgaaaaaccttagaaatttactaagataaaatagcagacaaaaagtaaccaattatatcacagagcatcataaaatagctacttggcttttgcagcatgctaatttcttggacagtggatttaattcagagtgtggtctgaggactgaagttccagaaaatcacctttataagcagactccaaattaatcaggccctcaattttgtaggatatgtgtgcacaaagcagaatattaaaacatagagatggtagatgttttttcctcctgaatgtatttcactgtctgatgtggcacatgcctttcctggaatcatgatttctaagaacctgaattcagagccttaagatgacttactgcatgaactcagagcacaggaaactgggctaaagggtatgttaggccatggaaaatcctggtgatgtctgtcatcacaggatgtgcctgtgtagtgattagagggctgtgtagtaaagtttgcattaccctaatctggtgtctctacctatagactttgttagataaacactgatgattcttccactgcctttgcttcatgttkctgatctccacgcagaccaagcaccttcctcctgttcactcatttttttctt

SEQ ID NO: 49115 - DNA, 542 bp, Homo sapiens
ttatgcctactaacctggcataattattaggagtgcccacttctactttaaaaaatggcacagtttggacaactggttatacatcactctatgcagataaaaaagatttttcaacattgtttgacaaagaaacattaaggcattcagaaacattagsatgcaaagaggtggtttgcacaatctgcttttacactcaccaattctggaagagttaataaacatgttaactttcacagctataaagtaataaagattgatcaacattgaacatttacgaaatttcttcagacataaatgtggagcttggccttgcaacctatatttgggaatttccatttccacctctacccccagtctagggatccatgagaaaggcacagtgattcagcatttctaaggctttcattaaaatgtgcttcagtgcaatgaaatcaggagagggaaaaaaaggtacataacacagatattaaaaacttctttacataaaagcagaaatgaaattctatactttcttactgaaacatttctaaagcagcagaact

SEQ ID NO: 49116 - DNA, 622 bp, Homo sapiens
accagcactcagacctagtcatgtggccacacattgctgcaagagaggctgggaatggtagccttctgctgggcagtcgcatgtcaagataaaatgagggattttctcactaaaaggaagagggacaaatgaatactagagaacaattagcagtctctgcttttagccatgtctccttttacttttcctacattccagctgcacaaagtatgttacccgacatgtgctttgtttccgagctttcgtgctcacccgcctttgcctgggacatattttttctctcctccatttgttgaaatactcctcatccttcaaggcacaggtaacagaccattttctccatgatgtctttccaaattatcagtcatccctctctctctctctctgcccctcttctggttccgttgacattggataaatcgatggtatatgcctacagtacaccttataaaatgttgttgacttgtaaatatgatgaattttgttcttcttctgtgactatgtcttattcatggttatgttttattcttcrtgatagcttggacgtttcttggagcgtgactcaaatttttgatactttgagtttgaatcccagctctgccacttagaagctgagtgactt

SEQ ID NO: 49117 - DNA, 2037 bp, Homo sapiens
tgtctacatcattcacgatctatcccatgttattaaaaattgctgtgttttggagcatcttctatgtggttctttgttgatgtacaccatttcaaaatgccaaaataaccctttgttatcctactcccctttcacagataaatcacattaaaagaaattatgcaatttgccaaaactgctggacttacgtttggaatagaaatgtctaattccagatctctgactctctccactattccactgtgtctagacagtgatactgtgtagttcacagtaattttattacaactactagaagaaagggctcagccaggtcaaaactacgaaaagctttgtatatagcagaacagatggtgaggtttgcccgttctcccttggagaagggacccatctgtctatctggcttgacagccttcaggagccccacctgacatggacattcagtagggatttccctagtctgcctggaaaataaaatctatttggattgctcctcaggtgcctatgrggaacgtgggaaaattcctaggactttttttttttttttttttttttgacccagtctcgctctgttacccaggctggattactgtggcacgatcacagtgcggtataacctctgctcctggactcaagcaatcctcctgagtagctgggacaacaggcacacgccaccatccagttaatatttttgtattttttgtagggatggggtttcaccaggctgatctctaactcctgggctcaagctatctgcctgcctcagcactcccaaagtgctaggatttcaggaacgagtcaccgtgcccggtgggacatgcttcttaatgaacaaagtcatatggagggtcttgtcttgaggagggacatggctctgtcttaggctttagttgggtctctgttatagctagctcagaagagactgaccctctagccatatcacaataccccaaacctttgaatgatgtgtcagcagggatacagtctctcttatctactactacagcagcctgaggatctactttcaaggttctatctcaccctctccagccataaggccccctctcaagctgtttcctcttgtgttaactgtcattcagctagtgccctaccctgggatacattcctttcctctgatctcttctcttccctgtcttatcttcataccttcattctctaaagtgggtgcatctcaatgtcctgatggttctggttttctcccacgtctcctcattaaacttcccagaatgagcatggcatatccaaatgttcaacacctcctccatgtgaatggctcctcatctctcttctgagaacctgttctgcattcctctttaactgcatgtttctgaagcactgcaaaaataggttttcttgtttgctgctcggcagccaacacacattcagaatgctgctcagtgttcaataaatgtttgttaagcaaataaatgagtgagtctaaaaaaatgatttgagtctccccctgtctgtcttcattaccttttctgataaaatgcccattcccagcggggcacagtggctcacggctgtaatcccagcactttgggaagctgaggcaggccaattacctgaggtcaggagttcaagactggcctggccaatatggtgaaacgtcatctttaccaaaaatacaaaaattacccgggcatggtggcaggcacctgtaatcccagctactcgggaggctgaggcaggagaattgcttgaacccgggaggaggaggttgcagtgagccaagatgtgccattgcactccagcctgggcaacagggcaaaactgcgtctcaaagaaaaaaaaaaaaatcccaaaagcctcaatacctctacccggtgaatttacagaacaaataaatgaatgagtccaaatcaaaactaaattttgcctgcccttatccagtactcttcctgccactgcactgacatcacagcacagaggagggaaacagcccttagaatcacattgatttagtttgcatctttgttcagtctcttaacaggatgcagccttggaaaagtt

SEQ ID NO: 49118 - DNA, 2037 bp, Homo sapiens
tgtctacatcattcacgatctatcccatgttattaaaaattgctgtgttttggagcatcttctatgtggttctttgttgatgtacaccatttcaaaatgccaaaataaccctttgttatcctactcccctttcacagataaatcacattaaaagaaattatgcaatttgccaaaactgctggacttacgtttggaatagaaatgtctaattccagatctctgactctctccactattccactgtgtctagacagtgatactgtgtagttcacagtaattttattacaactactagaagaaagggctcagccaggtcaaaactacgaaaagctttgtatatagcagaacagatggtgaggtttgcccgttctcccttggagaagggacccatctgtctatctggcttgacagccttcaggagccccacctgacatggacattcagtagggatttccctagtctgcctggaaaataaaatctatttggattgctcctcaggtgcctatgaggaacgtgggaaaattcctaggactttttttttttttttttttttttgacccagtctcgctctgttacccaggctggattactgtggcacgatcacagtgcggtataacctctgctcctggactcaagcaatcctcctgagtagctgggacaacaggcacacgccaccatccagttaatatttttgtattttttgtagggatggggtttcaccaggctgatctctaactcctgggctcaagctatctgcctgcctcagcactcccaaagtgctaggatttcaggaacgagtcaccgtgcccggtgggacatgcttcttaatgaacaaagtcatatggagggtcttgtcttgaggagggacatggctctgtcttaggctttagttgggtctctgttatagctagctcagaagagactgaccctctagccatatcacaataccccaaacctttgaatgatgtgtcagcagggatacagtctctcttatctactactacagcagcctgaggatctactttcaaggttctatctcaccctctccagccataaggccccctctcaagctgtttcctcttgtgttaactgtcattcagctagtgccctaccctgggatacattcctttcctctgatctcttctcttccctgtcttatcttcataccttcattctctaaagtgggtgcatctcaatgtcctgatggttctggttttctcccacgtctcctcattaaacttcccagaatgagcatggcatatccaaatgttcaacacctcctccatgtgaatggctcctcatctctcttctgagaacctgttctgcattcctctttaactgcatgtttctgaagcactgcaaaaataggttttcttgtttgctgctcggcagccaacacacattcagaatgctgctcagtgttcaataaatgtttgttaagcaaataaatgagtgagtctaaaaaaatgatttgagtctccccctgtctgtcttcattaccttttctgataaaatgcccattcccagcggggcacagtggctcacggctgtaatcccagcactttgggaagctgaggcaggccaattacctgaggtcaggagttcaagactggcctggccaatatggtgaaacgtcatctttaccaaaaatacaaaaattayccgggcatggtggcaggcacctgtaatcccagctactcgggaggctgaggcaggagaattgcttgaacccgggaggaggaggttgcagtgagccaagatgtgccattgcactccagcctgggcaacagggcaaaactgcgtctcaaagaaaaaaaaaaaaatcccaaaagcctcaatacctctacccggtgaatttacagaacaaataaatgaatgagtccaaatcaaaactaaattttgcctgcccttatccagtactcttcctgccactgcactgacatcacagcacagaggagggaaacagcccttagaatcacattgatttagtttgcatctttgttcagtctcttaacaggatgcagccttggaaaagtt

SEQ ID NO: 49119 - DNA, 570 bp, Homo sapiens
gcccgagcccaggaatcttaatgagcatgttaagcgactattgaggaaggtcacaaagggagtcgcagataatggagactcagtcttggggttttttctggctctgggggttcctgcacacaggacggcttagttaatcctagaatgccctctggggaggcgctgggaaggccayagggggcagaggggccagggcagcccctggccaagccgttgtaaagagcccgcttcttcccctggggtcgttgggagtcatctccatgcaggcctgagtcgctgggctcacaattaatgttgaggccaggcatggtggctcacacctgtaatcccagtgttttgggaggccaaggtaggaggatcgcttgagcccaggagtttgaggctgcactgagctgtgatggcaccattgtactccagcctggatgacagatcgacaccctgtatcaaaaatagtaataataatgttgggtgttcagactgtagtctctgagggccaggccccatccacaaatggttcagtaagggagtccacctgtggccccacaccggcccatagccctgtacagggga

SEQ ID NO: 49120 - DNA, 1324 bp, Homo sapiens
ggcatgagcgcagccttgatatggctgagtccatttatgggtctactggccacagccggggaggctggggagaggtagcctgggaacattcctgccatcccagagcacatctgaaggtcttgtgataaaatagtagacccgggttagagtcccaggcttgccatgccctgagttttttttgttttgttctgtttttgaaatggagtctagctttgtcacccaggctggagggcagtggtgctatcttggctcaatgcaacctccacctcccagattcaagtgattctcctgcctcagtctccccaagtagctaggactacaggcrcacaccaccacacccagctgattttttttgtatttttagtaaagatggggtttcaccatgttggccaggctggtcttgaactcccaacctccagtgatccacctgcctcagcctcccaaagtactgagatttcaggcatgagccaccatgcctggctgccctgagtacttttgaacttctctggcccttattattctcatctgtgaaatgaaggtaagaacacagaattcctcatgaaaggaaatcagcgcatgccggcacctggagtggaggaggctgttaggacagtggctggccagggaggaccagttcatctgtgcctggcatctgtttatggcttgcgtcctcacagtgatccagtgagaaagggcacaggaagtgattggtggtttccacttaaagtatttacagatgacccttggggctggccaccaagccgaggatcacagggcaaggacagggccaggcctggggcccagatgggttctgcagttgtagctcccagcccagcacatggctgccctcaccaagcctgtcctctgtctctcgctcgctattcagcccctcctaccacctgccccatcacgtcctctgcccccacccaggctctcagcaggctcgtttaccctccaaagacatcatcatattctgtaatatgattggaatctgaatatatattttaaaggacaagattgaaattaaaatttaaataaagaattacttttctgtaagttgccccgaaagcagtaatttagcagcaaattgatagagaaaggtaagcactggtcctttaaaccatcatgcagtttccggcatgcgagccagaagtgtctcaatttaacacatcattggttagtattattagaaatttcatcaggcaccggagcgcattatggcagggctctgaaggggaggctgagggtgcaggcctggggccagggggccagagagggcagcctcgttaatgagggcaggtggggcttgggagaccctcccctg

SEQ ID NO: 49121 - DNA, 575 bp, Homo sapiens
gagtataaacagatattttcttaatggtgtcttttgaagattagttaggaagtccagtttattttttttaatggtttgtgcttttttgttctatctrgggaatctttgcctaaggtctcagggtctcaaaagattttattctgttttattccagatctagttcaaaaatttgagttaatatttgtatgtggtataggatatgggccaatatttgtgtttttattgtatatggatatctaattgttctgggactgttgaaaaaactgttatttctccataacaatggactgtatatgtgtggatctgttgtagagagcagggcttggcttagtgctaaggttagcactcactggtgcactgttgtcaccaataatgttgtctgttgtgacagacagtgcctttgctgtgccgaagattcccagatgatgttgttagtcttttcctcttagaagagtgggcagttgctcaggtgaaggcaacaccagcagcctctggaaaatgtgggatgtttgttctttaaactttatcagaggaacacagccctgatattcatgtgggcccttttctattttccc

SEQ ID NO: 49122 - DNA, 1619 bp, Homo sapiens
gactataaaaagcaaggaaggtgtgtgtgaagtagctccacctttctccagtaaacatgtcttactctaggtgtcttacagcagagttcacatcccttcatgagcctctggtcaaagattctagtaagaaaactcttggagacctgaagctggataatcaggacctctattttacccctagataatgggagttaaggcactgcgtytttctgtcctagtatccagtttatctagtttctggacaaggtcaaacagctcagttgtagatactcaaaagacaaccttagcagtaagccacaagatgtgtgcaacaaagaaggtgcatagtgcgttgaacggtgtcctcccaaaaagatatgctcaaatcctaattcccagaacctgtgaatgtatgcttatttggaaaggaggcctttgcagatataattaaggatcttgggatgagattatcctagattcagggtgggccctaaatccactgattgatatacttaagacaaaagagagggaactttgagacacatggaagcacagatgaaggtttcatgaagcacgaggcagaggttagagtgctgtgtccacaagggccaaggattgctggaaaccagaggcgaggagagaggcatggaacagattctccctcagatcccccaggaggaaccaaccctgcagacaccttgatttcagacttctgacctacttaactgtgagagaatacatttctgttgttttcagccacaaatttgtggttctttgttaaggtagccctaggaaactgatacagggtgggaactcctattttagtcgtgtgaagagtgaatggtctggaaaaacacaatgatgtattcatgtggctagggagactaagaccacctgtagtccctgaaactttgggggtaatctccttcaagttccctttagaaaaatatggctcctcttccagaaaccacatatcctgatagtctgaaatatctgtagttatttttaggccattgttccatttccatggaagtgtttgcaaaattagccggacatggtggcacgcagtagtcccagctactggggaggctgaggcgggaggatcacttgtgcccaggagttcatggttgcagtgagctctgatcacgccactgtactccagcctgagtgacagagtgagaccgtgtcccaggaaaaaaaaaaagaaaaaaagaaagagtttgcaaatattttgtttcccaggaagtcataatacccttatgattcagtcagcctgattctgcagtcctgaaatctcggcttgcagcagatgtgtgctgagaaggctgtgcttacagagagcagcctcccagatccctgtatgccctgattcctggcttgtctcatctggaataaaaagaagtaacaaccaacactgcactttgatgcttttattcatttgctgcttttattcatctgttctccacctcaagtgccctcaccccacttggggagtcctggcttatccttcaagacttgcccaaatgccttctgccctgtgaagtcctccttgaaactgaagaagcaattattcttccttctacgttcccacagaactctgcacctctattaaaggacttattaaattctattacagctta

SEQ ID NO: 49123 - DNA, 588 bp, Homo sapiens
cacccacagcccatgcggaggtggtggaaaggctggactcagcagcaacaccaaatcctggaccaggcaaaaaccacccaagactgaggggctcgtgccagagcggtggccacaggtaagaacccgggcccaggctgtgtggcaggaatccgccatgtcccagggcttagcatagcaaaggaagaccagccgggtcaccctggtggccatctgtccctgtcccacctgcagagtcagaacagcctctccccagtggggatcatctctctctgccaaagcaacagcggtccctgccccaaccagactaccccactcagtggagttacggatgctgctccagcatcctaacactgcccagctggtgcctgcctgtgctcacccacaccccscaggccggccttccctgcagcctgggcttggccaccttggcctgattgagcactgaggcctcctgggcacccagccccatcactgcacctgctgcttccagccccaccccaccggctcaggggttcttcccagcggcgctgatcatgaagtcaacatgcacgcaagtcgtctcaggaaacttcttaatgaaagtgtcgg

SEQ ID NO: 49124 - DNA, 633 bp, Homo sapiens
gaagacttggaaaatcctcaaaattctatcctctcctcaggaagaaagaatataatgttgcaaatctgagatgcataacgtatgtgttaggtttcttgaaatggagagttggaggatgcttgaaatggagagttggagaaaggggattggctaagagtctaaaacaattattcagttatttcaatattttatataaagccaaattaaattaaaaaatataaagagaaaaaaattttaagtatgaactttaaaccaatacagttgaccctggaacaatatggggattagaagtgccaattcctacacagcagaaaatctgcatacaacctttgactcataaaacacaactactaataggccaggcgcagcggctcatgcctgtaatcccagcactgtgagaggccaaggcgggtggatcgggaggtcagcctgaccaagatggtgaaaccccgtctctactaaaaatacaaaaattagcyggtcatggtggcaggcacctgtaaacccagctactcgggatgctgaggcaggagaattgcttgaacccaggaggcagaagttgcagtgagccgatattgtgccactgcactctagtatgggtgacagagcaagactccatctcaaaaacaaaac

SEQ ID NO: 49125 - DNA, 1129 bp, Homo sapiens
taaagttttgaccctggtcttagaggctactgcctgggaaatggctgagtttgaaactcatcaagcatatcacccctgtataactatgcatatacattacctaatagagtaggcaactagtagcaaagttacctgataatgcaaataatactctagatcatttaattaatttggggatgagttatgcattttttcctaacacatacaaatgggaggtgatttggtttaggctattgaaataagtttgattccatacaaaaacaaacatacaaactgttctatttgtatwccatgcatacaaactattgggcgctgtgctaagttctgcacatacaagcatggataaggctacctatgctgtaaagttgctcactgtctggcactggccacaggtatgctcgatgagggaaagagtctagtgtaaatggtccaagtgtggatgtacaggaataattatgtctactactaaagtggtgtggacctctagaaaggagcctggcttaagtcttattgattgctttagtctcttaattatgccctgtaagtgaacctcaataaataattatgaagatattcatttccactttaatttcacactgattaaaatagattttttaaatgaaaaacctactggtaatttccaagtgaatttaacttttttcacccttcacatcttaccttatggactcttttacctttaatcatcattaatatttttaatatgactgccttcatttttacttcaagtgccatgttgagtatatttctaaagtaaaacaaaagagttttagatgttcttttaattctgatatagtaataaatcaaacataaatgttattggtttttatttcagacctattttacctaattttatattcctttttattgacattcagttgatttcatgcatttatttttcactcaattagaattaggagtttatgaagatcaaataaatcaaataacatcattagtatctctgattataattgtattttattgtgaaaaactcatagaatgttcacatatattatctcctctatcattctagtgtgatcatagaagaagcattgaaactagccttggaggatctagttttatttcaagctcctccaattgagaaattacc

SEQ ID NO: 49126 - DNA, 664 bp, Homo sapiens
atgcctttattcctactttacccattttgttaattatgactttcggccccctatgattggagcagtaggaggaggagaggaaatagaagcaggaaatttccagtgattggtgccattgtgaagatctagcaccctctgagcttggcagatgtttccattcattctcagaaatctcgmcatcactctgacaaatgcaactgaggttccgtaagtgttgaacttatctctattctaacttttcccttgtgattcctttcacagcctctaggcatcaccattatgctcagcttctttctgctgtgaagttggatatgttcaaaggcacccaatgttggcttctgtttgtttgttttcacgcagaagtgccaaaggaaattctcatgcttccactaccctgaaaaccctgaaaaatttgtgaatgctggaaaatttgagggaataacaattgcttatcttttccaccatcagagcaattaaccaatcacctagtctaccttcagatatgtgtgtatatatatatatatatatatatatatatatatatatatatatatatatatatatatatatatagtatgtcagagagcagtccattgtgtctcacaaactaggttagagccatgtaagatgttctgagttcccaagtaaagcttcttttcttagt

SEQ ID NO: 49127 - DNA, 664 bp, Homo sapiens
atgcctttattcctactttacccattttgttaattatgactttcggccccctatgattggagcagtaggaggaggagaggaaatagaagcaggaaatttccagtgattggtgccattgtgaagatctagcaccctctgagcttggcagatgtttccattcattctcagaaatctcgacatcactctgacaaatgcaactgaggttccrtaagtgttgaacttatctctattctaacttttcccttgtgattcctttcacagcctctaggcatcaccattatgctcagcttctttctgctgtgaagttggatatgttcaaaggcacccaatgttggcttctgtttgtttgttttcacgcagaagtgccaaaggaaattctcatgcttccactaccctgaaaaccctgaaaaatttgtgaatgctggaaaatttgagggaataacaattgcttatcttttccaccatcagagcaattaaccaatcacctagtctaccttcagatatgtgtgtatatatatatatatatatatatatatatatatatatatatatatatatatatatatatatatagtatgtcagagagcagtccattgtgtctcacaaactaggttagagccatgtaagatgttctgagttcccaagtaaagcttcttttcttagt

SEQ ID NO: 49128 - DNA, 664 bp, Homo sapiens
atgcctttattcctactttacccattttgttaattatgactttcggccccctatgattggagcagtaggaggaggagaggaaatagaagcaggaaatttccagtgattggtgccattgtgaagatctagcaccctctgagcttggcagatgtttccattcattctcagaaatctcgacatcactctgacaaatgcaactgaggttccgtaagtgttgaacttatctctattctaacttttcccttgtgattcctttcacagcctctaggcatcaccattatgctcagcttctttctgctgtgaagttggatatgttcaaaggcacccaatgttggcttctgtttgtttgttttcacgcagaagtgccaaaggaaattctcatgcttccactaccctgaaaaccctgaaaaatttgtgaatgctggaaaatttgagggaataacaattgcttatcttttccaccatcagagcaattaaccaatcacctagtctaccttcagatatrtgtgtatatatatatatatatatatatatatatatatatatatatatatatatatatatatatatatagtatgtcagagagcagtccattgtgtctcacaaactaggttagagccatgtaagatgttctgagttcccaagtaaagcttcttttcttagt

SEQ ID NO: 49129 - DNA, 664 bp, Homo sapiens
atgcctttattcctactttacccattttgttaattatgactttcggccccctatgattggagcagtaggaggaggagaggaaatagaagcaggaaatttccagtgattggtgccattgtgaagatctagcaccctctgagcttggcagatgtttccattcattctcagaaatctcgacatcactctgacaaatgcaactgaggttccgtaagtgttgaacttatctctattctaacttttcccttgtgattcctttcacagcctctaggcatcaccattatgctcagcttctttctgctgtgaagttggatatgttcaaaggcacccaatgttggcttctgtttgtttgttttcacgcagaagtgccaaaggaaattctcatgcttccactaccctgaaaaccctgaaaaatttgtgaatgctggaaaatttgagggaataacaattgcttatcttttccaccatcagagcaattaaccaatcacctagtctaccttcagatatgtgtgtrtatatatatatatatatatatatatatatatatatatatatatatatatatatatatatatagtatgtcagagagcagtccattgtgtctcacaaactaggttagagccatgtaagatgttctgagttcccaagtaaagcttcttttcttagt

SEQ ID NO: 49130 - DNA, 601 bp, Homo sapiens
tcctgacagtcctttcaccctcagcatagaggagggtaaagcagcaaacactgcttcactgaaggtcatgtgaaggatatggtggaaaggcagagtgtgagggctcctgtgccatctgcacctttcgagagtgatcgaaggccactattccgggtggcaatgaagtaaagtgaaaatgacccaggctttggaattagactgargttcaaatcccaactggttatcaacgagcagtctaaccttcagcaaagttataactaagctcttggggcgctccatcaactcactgtaagtggggttcatacctaagctgcaggcttgaaaatgttcatgcagtgtctagcacatggttgaataaatgctaagtttccatttctcctttcctttcctgagacaaaagttaacattggccaactacagcccaggggccaaattggaccactgagtgtttttatacataaaatatcactggaacacagccatgaccactcatttacgtattgtctaaggctgctctgtactacgatggcagagttacatagtcgcaacagggactgtgtggccctcaaagcctgagatatttactatctggcccttgaca

SEQ ID NO: 49131 - DNA, 591 bp, Homo sapiens
caacttcaaaaggcaatcaagtctttcctgcttttatttgctttaaaaagattacatactgtaaaattcagcacattgtatgaactttgacaagtggatagtcgtgtaaccaccaccacaatcgagatgcaaaataatactaccaatccagcaaactccctcatgctgtccctttgtcatcaacctctttcctctgtgttcctatttttatatttattcttacacattttacaagtagaatatttattttcaaaataaacttttctgcagagacccagcatctaaataagacccatgcagagcttctttggacaaagcaaagcattgaggctcaaatctatctgccctgctcccttctggccttaactagggcctcggggatttttctgggaaactgatgctctgcagaataatcaacatcactaattaaattcttccatcgatccaaagtttggtgagcccataattacagtgtgycaggctagtagctggggagataggaaggaactagatagacagacagggtccctgcctttagcaagcttagagtacaatacagagacattcacccaacatgcttgtaaataaaat

SEQ ID NO: 49132 - DNA, 662 bp, Homo sapiens
gacagttccgctccagcccccattctcctcaggcaagttctgagcgagttgatgaaaattgcttagggatgacacacaggcattgagcaccctgtggagacacgggggtggggtggaaatattcccccarctgtgtatatcacagaaacagggtctgtgtacatggcccattacttacagatgacagttcctgaatctaaggagggaagactttagggaagaaatggtaataagatgaaaagatcacaagatggaggcattgaggtcatcctcagagaggatccaggaaatcattaattcattttttttatgtgacaaggataacaatattaatgtttcggtatttatacccttccctcaaggctgctctgagaaagagggattctttgctctcaggaggctaccgagcctggacttttgttgtgccgatctaagtaatcagtttaactttggaatgaatatggagcaaacataaattgatattcattaagaaaagattggagcagttcctataatgctcaaatgggccagcagggtggttggaattttgagagagcaaagaagcagcctgcggagagaaaaagaaggaagattgagagagactgttgtgattgctgggactctggggaagtcaggtggatgatgtttgcatcttctcaagg

SEQ ID NO: 49133 - DNA, 546 bp, Homo sapiens
atgagcagtaaataagactgtgtcaccaaaaaaaaaaaaaaaaaaaaaaaaaaaactactgtaggtcaggtgcagtggctcacacctataatcccaacactttggcagaccaaggcagtaggatcacttgaggccaggagtttaagaccagcctggacaacacagcaaaacctagtctttacaaaagaataaaaaagttagctgggtggggtggcatgtgcctgtagtcccagctacttgagaagcttaagtgggagaatcatttgggccaaggagattaagactgcagtgagcagtgattgcaccactagactccagcctgggtgacagccaaactctgcctcgaaaaaaataattactgagattttggtgttatttgttaccagagcataacctaatctctactgactgatgcaatcttcgtttgctctagaygtatcatacaattgagctatttttagaaacaaaaaaaattagaaaaacattagaaatgaaaaaatggggaaaaacactgtaattgggctaacttgaatactatgtcctcca

SEQ ID NO: 49134 - DNA, 2024 bp, Homo sapiens
accactagactggtgacatctctaatattacaaaatggaaaaaaacttatagtaatggcaccaagatgtattacatacacactaaagatgtgatctscgattcatctttgaagaagagctactctgtgttacaccatatagaatgatagcatatctgctgggtttttttgtttttttttttttccccaatcaaggaagttgttgttttcagcataaggaaacagggagagctccacaaggatttaaagatgataatgctatcactatctccaagaagaaatgcaagaaatctgcaatcaacttttgtagcctagcactgttgcttaatatagtgagatcttggcccaaggactgcacttagcatttacactctgttatcagacttgcatactgaaataatgtattgatggaacagaaagtagtgatctagaactttagtggggtgttctaaaacattgtcgtgttatatgttggcatttgcaagaagtctgacaactgtatatttttatttttttcctttattacatctatatgtttagtatccagctaaaggtaaaagattgcctgggttatgacttcatcagccaagtaggaagttttttcattggccttaaactgaatgtttggttacagccatagttccacttaggttttctctgttaaaaatgttagtttctattaaaattcatgattatggatggctgatatatatatacacacacacatatatatatacacatataggcacacacataccctactccccccaatccccatttagagtaagatttgctaccagatatgtttccttttccttctaaactgttaacatttactaattttttccttctgaactgttaacatttactaattaatctacccatagtcttcccctggttccagacaagtgtaacatatcttgatttctagtctgcccagtgttgatagatgtaaactcctaagacctcacctgcattttaaatggtagatggctatttaattgaaacgaagcatattattaaaataaggattttatataatctccaaatacacaagccctgcaacctttgttttataacacgctttcaggttttaactattgactattataagtctctttccggtagcttgtgttcacccctctaaccagtttctttttctttggacaaaggagaagtttctttctccatgtaatttaccacaattaacagggaagtcatgactaaatcttaatgtacactacctatatgattttcctactggattcctgacaggcttgaattttcccttttcttcttcttcttcctttttttttttttttttgagacagggtttcactgtgttgcccagattggagtgcagtggcgcaaacacggcttactgcaacctcgacctccctggctcaagtgatcctcccacctcaaccctccaagtagctggggctacatgcacacaccaccatgcgtggctaatttttgtattcttctagagacagggttttgctttgttgcccaggctggtctgaaactcctgatctcaagtgatccatgtgccttggccaccaaaagtgctgggattacaggcgtgagccaccgtgcccggctaattttccctcttcaaaggagagaagtctctctccatcagtctactgagtgttttctcagtctttttactcaattaccagagacagcagaccctctatctgcccaataactactcttactcacctgtcagcttattccaaactgcctttgatcctaaacgagtatattcttgtttttttttttttccttctctctatttttattttgtttgagacactctcgcccaggctggagggcagtggtgcgacgtcggctcactgcagcctctgcctcccaggttcaagtgagtctcctgcctcagcctcccaaatagctgggattacaggcatatgccaccatgcctggctaatttttgtatttttagtacagacagggtttcacattgttggccaggctggtctcgagctcctgacctcagat

SEQ ID NO: 49135 - DNA, 2024 bp, Homo sapiens
accactagactggtgacatctctaatattacaaaatggaaaaaaacttatagtaatggcaccaagatgtattacatacacactaaagatgtgatctccgattcatctttgaagaagagctactctgtgttacaccatatagaatgatagcatatctgctgggtttttttgtttttttttttttccccaatcaaggaagttgttgttttcagcataaggaaacagggagagctccacaaggatttaaagatgataatgctatcactatctccaagaagaaatgcaagaaatctgcaatcaacttttgtagcctagcactgttkcttaatatagtgagatcttggcccaaggactgcacttagcatttacactctgttatcagacttgcatactgaaataatgtattgatggaacagaaagtagtgatctagaactttagtggggtgttctaaaacattgtcgtgttatatgttggcatttgcaagaagtctgacaactgtatatttttatttttttcctttattacatctatatgtttagtatccagctaaaggtaaaagattgcctgggttatgacttcatcagccaagtaggaagttttttcattggccttaaactgaatgtttggttacagccatagttccacttaggttttctctgttaaaaatgttagtttctattaaaattcatgattatggatggctgatatatatatacacacacacatatatatatacacatataggcacacacataccctactccccccaatccccatttagagtaagatttgctaccagatatgtttccttttccttctaaactgttaacatttactaattttttccttctgaactgttaacatttactaattaatctacccatagtcttcccctggttccagacaagtgtaacatatcttgatttctagtctgcccagtgttgatagatgtaaactcctaagacctcacctgcattttaaatggtagatggctatttaattgaaacgaagcatattattaaaataaggattttatataatctccaaatacacaagccctgcaacctttgttttataacacgctttcaggttttaactattgactattataagtctctttccggtagcttgtgttcacccctctaaccagtttctttttctttggacaaaggagaagtttctttctccatgtaatttaccacaattaacagggaagtcatgactaaatcttaatgtacactacctatatgattttcctactggattcctgacaggcttgaattttcccttttcttcttcttcttcctttttttttttttttttgagacagggtttcactgtgttgcccagattggagtgcagtggcgcaaacacggcttactgcaacctcgacctccctggctcaagtgatcctcccacctcaaccctccaagtagctggggctacatgcacacaccaccatgcgtggctaatttttgtattcttctagagacagggttttgctttgttgcccaggctggtctgaaactcctgatctcaagtgatccatgtgccttggccaccaaaagtgctgggattacaggcgtgagccaccgtgcccggctaattttccctcttcaaaggagagaagtctctctccatcagtctactgagtgttttctcagtctttttactcaattaccagagacagcagaccctctatctgcccaataactactcttactcacctgtcagcttattccaaactgcctttgatcctaaacgagtatattcttgtttttttttttttccttctctctatttttattttgtttgagacactctcgcccaggctggagggcagtggtgcgacgtcggctcactgcagcctctgcctcccaggttcaagtgagtctcctgcctcagcctcccaaatagctgggattacaggcatatgccaccatgcctggctaatttttgtatttttagtacagacagggtttcacattgttggccaggctggtctcgagctcctgacctcagat

SEQ ID NO: 49136 - DNA, 821 bp, Homo sapiens
caatgagttgatatccaaaatgttaaatatcaaaaaaaaatttcttaaagaaatgtctacaattcaatagcaaaaaaagaatacaaaagaacaacaatagcaaaaagcaaataacctgattaaaaataggcaaaggacttgaatagaatagatagttctccaaagaagacatacaaatggccaataaataggcatgtaaaaaggtgctcatcatcactaatcatcagtgaaatgccaatcaaaactacaaagagttctcactgataagtgggagctaaacaatgaaacacatggacacagggaggggaacaacacacacggggcctgtcgtggtgggtgggggttgctagggaacggagagcattaagacaaatagctaatgaatgcagaacttaatacctaggtgacgggttgataggtgcagccaaccaccatagcacacatttacctacgtaacaaacctgcacattctgcacatgtatccaggaacttaaagtaaaagaaaaaaatcacagagctatctcctcatagygttttggatatttaatatttaggatggctattacaaaaaaaaaagataaaaaagtacacacacacacagacagacaccgacacacacacacacacacacacacagacacacacacatacacacatttttaaagcattccacaaagattaaaaacaagattgaaatcagagggaccaaatgaaatttttacctttgtgggtactgaaggtaataacatggaatatcctgttgccaaaatgtcttttgaacttgaggtcagagatagcagtccaatagtgctaaattcaca

SEQ ID NO: 49137 - DNA, 1150 bp, Homo sapiens
tgttaaaacggaaactgaaactgaaaccaagatgcctcattccaggtccatgaccctttctgtacagtgcagaggggggatgcaggcagcagccaggtatgtgatggcctcactttacaaaaaacaagaatgatttgttcaaggtcacatatcatgtgagctacattgatccagacaccaggaaattayagaaggattcatctgtgctcagtcttttgcaattttagtagttggcagaatgttctcggggaaaaggagagagaaggcaaatgatctggggacactgacaaagcagcttgccctaacagtcctgagccacaatgcccagagcatggcgctgagaccagggaccagaaatgccaccctcagccctctggccaggccttgttcctgactgtccagccaaagctggctcagctgcctggaaatcttatggctctgagaaatggccatgagtcaacctggtctctcccctgcctttgcctctggagcttgtttcagatggtggcactgcccagcactatctggcaagctgcagggctccatgcctgctccagcctccatcactacaagaaagctacattttctctgttagctggggcaattggctgagcctggggagaaggagacagggaaatgagcctgctacagtggacactccacttgccagggcccaaggcattaaaacatccaaccatgtcaaataattcaaggagaaaatgtttacagacacagaaaaacagatttttttatccttcttcgaaccactccatctcctgtatctaatgcaccatttccatagcattaacagagaaaaggcagtgggaaatattggttattggattcttttgttagaaaaggctcgcttgaagctggcaggttttattatctatctgtgagatgatcctagcctttagatgggtttctttgcctgccgactgaccagatggagagaaactctggaaaacacagtagttcttggatgatatgaaaaatctgaagcaacctacttcaaagatgagctatgggtacaggagaaagacggaagtcaatttcatgaagagcaccatggatgggtgcagcagcttctacaagaacaaaaaggagattgacactccccagcacatgtgggcctgaccacccatgccac

SEQ ID NO: 49138 - DNA, 514 bp, Homo sapiens
tcaaatgatacacattaaatatgtgtagtattttgtatatcgattatacctcaataaagctgtttaaagaaaaagaaacaagcagtgagtaaagaggaatccaggtgaaaacaggtgattgtttattggaagaatgaaggaggtcttaataaactggattaaattcacacattctccttggatcccacttcttggtcccttcctcctttcctattactcttggcatttcagcttagggtatatgtgtatcacctactgttgaacttcaaatttaaacttaggaaaatggaaatagttacagtttgaatcctcctgagggttcaaacatctcccctaaaaaytcttctccaactcaactttatcacaatgatcatagctatgctcctacatagatacattctaagccctttggtcttcttttcaataatcttatcattattaattccttctcacttcttggcattttaatttgcttttaccctaataaatgtttctgaagcagttgttttcctcc

SEQ ID NO: 49139 - DNA, 551 bp, Homo sapiens
tctcactttgctccccaggctggtggcgaactcctgcctcaagtgttcctcccgcctcaactcccaaaaccgtgggattatagccacgagctaccatgccagaccaaaattctaagtaagttttaaaagccaatttacaaaaccaaataccatagaatttttgcgtgacatgaccttatcctgtgatcaaatttatcttttgttttccctcctccagcgaggaatgcatatatcctcacacatgtagatgtgtgacgtggaatgtgaacatcctactttgaattttmtagtgattatctttaatttttttttaaaaccataccactacctgtatttttctaattatcaaaaacaaaaataaaacagtaaaaaataaaggctgggcttttactttctcctaacagtccctgccccacccccacctacttctcagtttctactagtgaatctgacccagatttattattgttggcattgttactgaataactgggatttttctctttccattacatatcttctctttcagtatttacaatatttgacttttca

SEQ ID NO: 49140 - DNA, 1186 bp, Homo sapiens
gaattcccacatgtatttgaggctacattcagatttcctatttgattcctttagtctgtccacataatcctccatttctatcctgctgttttaattcttgtggctctaaagtatgctttaatttttggttcatcctcattatcttctatttaatagttttcatggctatatacaataatttgaatactgtggagtcgtttggcatactactatttgtgatattcaaaacaaactttaggccaggcaccatagctcatgcctgtaatcctagcacttttggaggccgaggtgagtggatcacctgaggtcaggacttcaagaccagcctgggcaacatggtgaaaccccatctctactaaaaatacaaaaaattagccaggtggtggcacgcacctgtagtctcagctactcaggaggctgagacaggagaatctcttgaacttgggaggtggaggctgcagtgagctgagattgcaccactgcactccagcctgagcgagataaagtgagactccatctcaaaaataaacaaataaataataaactttaagaaccgtttttagttttgtagttatttaaattcatttgaccttccgtttattacatcaatgcttactgggtacctattatgtgcttattaccacttttctacatacttgggagcatcagtgaacagaataaatttctgctctcttgtagctttgtagccacgtgcattagtgctgtgtttcaagaaaaaagtctatttgattattcttcacatcatctgaggttgaattaaagcagaatgccaacttttccatcttaatattttatgaagaaaaaagtgttcaaaatcttgctcaacaayatctataataaatcacctttgatttagaattgtaaagagtatgaagaaaagaaataagtgctggggaaaagtgagacacccaagagatatcttgttcttcgacttatcttggttgaaattaagtgtctacttagtatcataaatttacagtacagtgaccacagaagcatttcagccattgacaaggctaagaaatgattgttcctgcgctatatcaagcatttaaaaatcgactcctgaactgttaataataaaattgtagtagtaattttttgctaaaatttaagatttattgtcaaatcccggaagctatgatgaatttgatattcggcgtca

SEQ ID NO: 49141 - DNA, 444 bp, Homo sapiens
tggagtctacaggcgtgtgttaaggggcctgcaacactctggtaaaatccagcttttcctgggctgtccattatgcttgcagatttgaggacrggaataatactgagataaatacagctgtgtcgtgcgatacagtacaacattagcatgcacaaagaaatcggggggcctgtggccttcccttgtggggctgtccgtgtaatgttatttggagtactttggcagaaaacttgggactgtcttaattgtaaaaacatatagctacattttactgtttttctcacttctcttgacagttgaaacttgtaactgctcccttcttgaaacttgcctggctcttgtgatgccacagcctcctactgcttgtctggcctttctggccatttctcagcaggttggttttcctcacctgccggttgaatgttttcagtcttgaagggactg

SEQ ID NO: 49142 - DNA, 560 bp, Homo sapiens
tggatgaaatattatggagctggtgtcttttagtgaagaacagaagagatcatgaaaaaagaaataaacaaaatatgttaaaattcaccaaaaagaaaaataataaaatgatctactatcttctcctcttttatattgtgataaacagagattcaagtttttaaaaagaaaaattgggccaggtgcagtggctcacacctttaatcccagcactttgggaggccgaggcaggcagatcacttgaggtcaggagttcaagaccagcctggacaacatggtgaaaccccatctctactgacartacaaaattagctgggtgtggtggtaggggcctataatcccagctccttgggaggctgaggcaggagaattgcttgaacccaggagacaggttgcagtgagccgagattgcaccgctgagctccagcctagttgacagagtgagactctgtttcaaaagaaaaaaaaaaagaaaaaaggaaaaagaaaagttggatcacttagctatatataaggagacaataaaatacttatggatggtttaaaatggataccaataa

SEQ ID NO: 49143 - DNA, 600 bp, Homo sapiens
tatgctaaatccttctggactagtgctacatggcccacatgtttcaaagagtgatagcatgaacatgataaacttgcaggtgaggcatattctgcggataggaggctgtgaaaaacatttttaaaagaattctgaattctttataattatgtttatgatggaacacatttatgtttagcttatagtttgtttttttatgatcaaagagactggagctaattgcatcttactctcttttcattatagtgtatwtaagatttggctcaaaacatcaatgtaaccctctagctcataactattactggttttccagactccagactaatacctccctgtttcatgctgtctcctttacagtgtgtcacccaaaagattacaaaatgttttgaaaaacccctaggacattgctgcctggttatatgtagtagagtactgatggtacctatctgtctactccttacagcaactggtggtagggctgcaactacaagaattagataaaattgattaatgatactgtgatctgctaccaagtttgctattggaaaatagttcactgattgtaaggaacacaaagaattaaatgaagacaggagaaat

SEQ ID NO: 49144 - DNA, 544 bp, Homo sapiens
cagaaatatatttgtcttaagaacttttattttattttatatttttaacaaccctgtggatatattagtgatttttaaaggcaaacatcaaattcattacatcataatgttgtgttttaaaaatctgctgtggtatgttattaaaacaacattgccagtaataaaaatcaatgggcctaaagtaaaatggaaaaataaatatgaatccacttgggcscttcagataatgcacttggcttttctttcaatgaatatagataagtgatttcaggtggagggacctagaataatcatgataaaattactttacagatagtgtgcttgggctaaaaggttccattattttaactgattctttctatttctggtttcattgatgcatgttttagtcatattttttgcattactgcatagctgggttaaatagtccttatgcattattactgacttttacattatcttccctaggtagcttaagcaatttggattatatttgtttaaatttttaaactctatagaggtgagaaaatagtggagttcaaat

SEQ ID NO: 49145 - DNA, 543 bp, Homo sapiens
aactttgaaatttgacatgtgggtgtgtgtgtgaatgtatatrtttgtatgtgtgtgtgtgtatgtgtgtgtatgcacgtaaaattgtcttcaaactgaaggattaattacaagaaggtctaaatgtggatgttattgtcctagcctcagatacttaatcttcctcagcactaattgtatgcatcctttgcctgacctaaaagatagcctgttgacctttcaatctgtaggtttgtcacttacctctattttgtgttgtgtgtaggaatactgcatggttctccactgcttctacttattaacagtgttggctggttacatttgaaaggtatcctgagctcaggctggtgcatgtttttgcccctgtggatgcctgtccattcctatttagatattgctttatgtctccaatagttctttccccaaatgcagccattacaggaacataaaaatattgatgtcagattaaggtctattttaggaaaaaaaaattaaaacacaccttaggtagataactacattatatacagattaccattaaaa

SEQ ID NO: 49146 - DNA, 543 bp, Homo sapiens
aactttgaaatttgacatgtgggtgtgtgtgtgaatgtatatgtttgtatgtgtgtgtgtgtatgtgtgtgtatgcacgtaaaattgtcttcaaactgaaggattaattacaagaaggtctaaatgtggatgttattgtcctagcctcagatacttaatcttcctcagcactaattgtatgcatcctttgcctgacctaaaagatagcctgttgacctttcaatctgtaggtttgtcacttacctctattttgtgttgtgtgtaggaatactgcatggttctccactgcttctacttattaacagtgttggctggttacatttgaaaggtatcctgagctcaggctggtgcatgtttttgcccctgtggatgcctgtccattcctatttagatattgctttatgtctccaatagttctttccccaaatgcagccattayaggaacataaaaatattgatgtcagattaaggtctattttaggaaaaaaaaattaaaacacaccttaggtagataactacattatatacagattaccattaaaa

SEQ ID NO: 49147 - DNA, 584 bp, Homo sapiens
ttacttttttggtcatttttcttcaccattccttttcaattataagacctttggattagatatgcatctctcttataaacacattctttatagttctcctaagcttaaaaccatcattccaaggtcctaaaatctgactcacaaaatgaaatgtgaattcccatcatttcctagagtttgaatgcacgtgagttgaaatactagaatctgcactttcagacaccagacacagatctccaaacccaaaaacatgaaaaaaatgggggacgttactcaaatgatctggagtaggaaaagactgaagtaatcacaaattaattaatctcttctatgtaaatatactcttaaatacatattgcctctgatgcagcagagagcaggaactttctctgggcaagcacagaatacttcaccgatattcctattagtaatatcccaggcatgctgttgtaaagtgcccaaaaaaaaaaaaatacaaaacttacatgatggttacctgaaaatcttgtctttcaagtgcacatgkaaactaaaataacctaccaagagatttctcagtttgactgagggggggaaaaacagca

SEQ ID NO: 49148 - DNA, 584 bp, Homo sapiens
ttacttttttggtcatttttcttcaccattccttttcaattataagacctttggattagatatgcatctctcttataaacacattctttatagttctcctaagcttaaaaccatcattccaaggtcctaaaatctgactcacaaaatgaaatgtgaattcccatcatttcctagagtttgaatgcacgtgagttgaaatactagaatctgcactttcagacaccagacacagatctccaaacccaaaaacatgaaaaaaatgggggacgttactcaaatgatctggagtaggaaaagactgaagtaatcacaaattaattaatctcttctatgtaaatatactcttaaatacatattgcctctgatgcagcagagagcaggaactttctctgggcaagcacagaatacttcaccgatattcctattagtaatatcccaggcatgctgttgtaaagtgcccaaaaaaaaaaaaatacaaaacttacatgatggttacctgaaaatcttgtctttcaagtgcacatgtaaactaaaataacctaccaagagatttctcagtttgactgaggkggggaaaaacagca

SEQ ID NO: 49149 - DNA, 571 bp, Homo sapiens
ccagtttccgctcagtggtcgcgtctccgccccccacccaccagtcccgctgcattctcggccgggctctaggcgccatggctccccgcgggaggaagcgtaaggctgaggccgcggtggtcgccgtagccgagaagcgagagaagctggcgaacggcggggagggaatggaggaggcgaccgttgttatcgagcattggtgaggggcctggagagtaacgggagagagggaacagtggcgccggggggggccaggggccccggtttctaacctctccgtctctccctagcactagctgacgcgtctatgggcgcaacgccgcggccctgagccaggcgctgcgcctggaggccccagagcttccagtaaaggtgaacccgacgaagccccggaggggcagcttcgaggtgacgctgctgcgcccggacggcagcagtragtggggacctggatgtgggggagagggacgtgggtgaaagggacgtgggttccgaagacaggaagcgctattcttagaaaccacggcagtctcatgacttcagagacgtgctcgtgggttccgaagtattg

SEQ ID NO: 49150 - DNA, 2257 bp, Homo sapiens
ttggttgcctttattcttggagatcttgatcacttacaatgagattgagtcctgttagtagaggctaggttatataacagaaacaaactaccctcaaaatcttagtgttttaccacaccaaaagtttcattctgctctacacagtcactgagagagaatgtcaggaaacagagggttgtacccgttttttccagaatatatggccaccacatctgccaaggcagtggaagagagaaagcagataatttataatcatttttaagtgcctgggctttccagtggcacaggttcctttgtatcttactgtttaggcagcacttgtcacacagcctcagcctaactgtaacagaggctggaaaacacatagcaagtttggaagtaattactacctacatctctgggtcggtgtaaatattgtrgtcatataatgatacaaagaaatctctagcaatgatcttatttttcccctgtagtttatttgcttatattttccagatgtcgtaaaagattttccttattctcaaaatttaggtcataattagaagaattatcatgtaagtagtactcatttctcccctaaaacagagagttttctgttgtgtcaaactcagatttttcctttagttcaacaaagttttattttgttatacattagaacattttctccatttcatatgttaagggtttattttagcagctttattgagatattgttgatatacaaagagctgcaaatatttcatgtgcaaaatataataattctggacagtatgttgaatttttacagcacaaacaatcttttccatattgtcatttattttcattttcctcgatctttctgtgtttttcttttgaaatttccatgattattttatttgtcttcatcctcaatagatttgattttttgatatctctattctgtttctatctgcttataagttatttaattagcggtataaaagtattagtataagtcatttaaaactctcaatccaattttactttaatatcattctgttgtttaaccatgtctcatttgagaagttttcatgatattatacttttattcaaatcttgaacatgaaaaactcaaagtgaaattatctttttatctcttagttttccagattttttatttgtattctgcatgttgttttctttcctctcctttccctttttctcccttctttcccttccttccctccccttcctacctttcctctcttctccctttctttttttgtagattgtgagcaaatttgccatgacatttcttttcatctcgatcatgcattaatgcaagcttctctgttcagactttctattttctctaattcaatacacgtgaattcatccttctccacatggctacgactgcagactatttgctattttatccattttttttctgaggcctaagttgtgaggctgcatggagtaggcttgtgaggagcccagagaagattatgtatagtttttgttggaaaactgggccctatacttccttctgacattttattaaggatgtcagagcttgcattaccaagtgggatgtgttctttatttttaaacatggatgcttattggctatagataattctcccaatccaatgataacccctagacgctttgcttccttaagtagagtcagccttgtagatgacagctcttgtttcaccagctcccactggcagcatttcctatatcccacattaagaaaatgaaaaagaagatggtattctctcaggtccttaagtaaaccttagactgctttacttcattaagagatattagtcaccattttcaagttctgtttctcttcttagctgccacttttggaaatgtgcaactgtggttgtcctccttatttgcttgctgctgcgcaggttttaaaatgttgctgttgtcattttcactaagtcctggggaggggattctgtgatctggattcatctcaccatctttactcagaaatcttcaaagatgtgtttctgaaaatgtgaacccagaacaacgtgcagcagaatctcctgggatgcttaaacgtaatttttcctggctttcatctgagataggtatactgaaacagaatctctgtgaatgaggtctagttatatacattttaaatagattccccagtacatgcttgtcatactaaaatttgaaaatccctggctataaagtcccattaaagctctactcctgtttccaatccatgaaagagtctaaaggtaatatttcttttgtattaattttg

SEQ ID NO: 49151 - DNA, 631 bp, Homo sapiens
agcaaatatttccattcttctttattgtgggccaaacatcgtgactcgcttctaaagaatagacatggtagaggtgttcttctacctagtttgttccccaaaccccccagtccactcaccctgggtaaagccagccaccacgtctgaggatactcaagcagctctgtggagaggcccatgggtagaagaactgaggcctcctgccaacagccagagagttaaaactccagtaataataatgatacaataatgatttgcattaataatgactataaaatatatctggcagtacgctagatgatttacatgaaatatcttattcaatcatatctaatagtacaaagataaatactattattaatccttgtttatagatgagaaaactgcagctcaggatgctaaatatttttggaaggctacataggcagttgtgaaactctagtagtatgaaccccaaatttacactcttaacctttatgctataccatctacctttagacaattgcagatatacatatatgtatatatgtatgtgtgtgtgtgtgtgtgtgggtgcatgcrcgcatatttggaggaagaaatataagagatttctaagcaaatataacattgttgatagaatacaatcata

SEQ ID NO: 49152 - DNA, 584 bp, Homo sapiens
tcaggtatcaaggtttatgacaacttcacaaagttacctgtggggcttaagctgctgggcatattgtccatattcaggggaaaatacatttcgtggctctacaagaggctaatattccaagtcaattaggatgatgtatcaggttttctggttctcagtgtctccacttgccagcctgtcttctctttcttacttaataamactgggcatgtggtttctgaccagctcttttgtgtgctaggccagggtcactcaccaacatggagcagtgaaccccaccgttaacaaaaaactctgttttaatggtgatgtgcaaaaatatgctcaaacacctgcttgtttacaatacagataatatttgtaggaaagatataaatcatgcttatattgaaatttatttgcagagagtcattcagaggaagacagtcattctgttttgcttagtcaacaccaagatttctttaatttctccttgtcaaatttgtacccgtcatgtttttgtcttgctagtattacctatgcccatctgcattctctagcaagtagaaagacttcattctctgccctgaacttagcccttaaaa

SEQ ID NO: 49153 - DNA, 584 bp, Homo sapiens
tcaggtatcaaggtttatgacaacttcacaaagttacctgtggggcttaagctgctgggcatattgtccatattcaggggaaaatacatttcgtggctctacaagaggctaatattccaagtcaattaggatgatgtatcaggttttctggttctcagtgtctccacttgccagcctgtcttctctttcttacttaataaaactgggcatgtggtttctgaccagctcttttgtgtgctaggccagggtcactcaccaacatggagcagtgaaccccaccgttaacaaaaaactctgttttaatggtgatgtgcaaaaatatgctcaaacacctgcttgtttacaatacagataatatttgtaggaaagatataaatcatgcttatattgamatttatttgcagagagtcattcagaggaagacagtcattctgttttgcttagtcaacaccaagatttctttaatttctccttgtcaaatttgtacccgtcatgtttttgtcttgctagtattacctatgcccatctgcattctctagcaagtagaaagacttcattctctgccctgaacttagcccttaaaa

SEQ ID NO: 49154 - DNA, 1260 bp, Homo sapiens
ttttaatataatttagtcattttatattttgttatttcttctcactcagtaattagggttatgaaagtattttatcagcctccaacaaggactgtttttgcatctcatttcttcatttgagttcacttcctgccaaattatttcctttagcaaattttcatcaatgaacaggagttatgacattatgttgttttattttgaatcaaaatttggctgaatatggagttctagattgattataatttcatctagtgtatttaaatatgggtgtatacacacacgcacgtgtacatatatatactatatagtatatatatagtatatatactatatactatatatatgtatgaatgtatgcaatttccctgcaaggtttcttcttgttactggggaatcctccgctgkcctaggtgcagagcatacacagatacttgtgtatcgttcctagcctcataaggtgttctcttcatccttattgcttcatagtttcactttgtgataactgggtgctgatttattttttggaggggtttcttgtgtttggttctttggtactttcaatttcttacccattatattgtctgttactccctccatttcctactactaccactgtcatgaaatgtgttagacttgtcaaattcttctgcatctcttaagttctgttccacatttttcatctcttcattattttgagctgcattctgggtgcttatctcagtaccattttccactcaatagtatccatgcctgtgtccagattaacactgagctgattgcttcaaaaacattcagccattttcctattgctgctataacaattactgcacattcagttacttaaaacaacacacatttatcattttaaagttctgggggccagaagtagaaaaagagtttaatgggataaagtcaaggtgtccatagggttgatttcttccagagattctaggagaggatccatctccttcccttttccagcctctagagtctggctggagattcccctagactctggctccttaagagaccacaaaatgatacccctttccccctgaactttatttctataagtctgtaaaggaaatattcaaaatttcgaaagtcacttatcagttggaaacatttttaatagtttatttattttctatttaaaatcatattgtttatttatttatttattttctatttaaaatcatattaagatataatcagataaatccacactactttcatacttttggctagagaggtaagttt

SEQ ID NO: 49155 - DNA, 565 bp, Homo sapiens
tggttataaaaccttttgtttggcaatgtaagtggttttggtgtttcttgtttaaatcccagctccttaattggcctggtctctgcagcacctagtacatcccagcatagacacaatcaacagttatcagtgactgagaattcctggctatcacatttccattcaaaggaaagcccaagratatagtactgctgaatcaaagcccttaatcaaacaacgttccacatgtttagcacaagacatttagcatctttccaaattcagaatgctgtgggcctgtgcagagaagttaagacacagccgctgctcatagaaggagcatgggctgtatttttaaggaattaaaaaatccacaaaatagggagaaaaagttatgtagtactgttaagtatatgttatagacaaaggagaataactatggattatgagtaatgaactacttaggagagttactatgttcataggttgattgattcctagacaggaatatttagccagctctttatggcttgagagttccaaatttcactccttttgatctgaattgttgtgtctttctcaggaa

SEQ ID NO: 49156 - DNA, 552 bp, Homo sapiens
atgattaaaggggctgagatccagtgagatgggagtcacagagtgaacaaatccaattctcagtggtttccccctctagacattttccctattcttaagcttctcagagaaaacagctaaaatgctaagcagaaaaccactggaaagcaaaatgaagttagaattagtaagattartaagctcaccggatacaaggtttgtcactgtattcctatgttatgggctgaattacgtcaccaaaatttatatgttgaagtcctaacacctgatacctcagaatatgactatttggacatatggtctttaaggggttaagttaaaatgaggttattactgtggatactaatccaatatgactggtgtccttataagaagagatttggacacagagaaggaagacaatgagaagacacaaagagaaagcagccatccaaaccaagcatagaagcctcagaagataccaaccttaccaacaccttgttctcaaatttctagcctccagaattatgataaaataaatttttgttttttacaaacaaccccatcaaaaag

SEQ ID NO: 49157 - DNA, 552 bp, Homo sapiens
atgattaaaggggctgagatccagtgagatgggagtcacagagtgaacaaatccaattctcagtggtttccccctctagacattttccctattcttaagcttctcagagaaaacagctaaaatgctaagcagaaaaccactggaaagcaaaatgaagttagaattagtaagattagtaagctcaccggatacaaggtttgtcactgtattcctrtgttatgggctgaattacgtcaccaaaatttatatgttgaagtcctaacacctgatacctcagaatatgactatttggacatatggtctttaaggggttaagttaaaatgaggttattactgtggatactaatccaatatgactggtgtccttataagaagagatttggacacagagaaggaagacaatgagaagacacaaagagaaagcagccatccaaaccaagcatagaagcctcagaagataccaaccttaccaacaccttgttctcaaatttctagcctccagaattatgataaaataaatttttgttttttacaaacaaccccatcaaaaag

SEQ ID NO: 49158 - DNA, 552 bp, Homo sapiens
atgattaaaggggctgagatccagtgagatgggagtcacagagtgaacaaatccaattctcagtggtttccccctctagacattttccctattcttaagcttctcagagaaaacagctaaaatgctaagcagaaaaccactggaaagcaaaatgaagttagaattagtaagattagtaagctcaccggatacaaggtttgtcactgtattcctatgttatgggctgaattacgtcaccaaaatttatatgttgaagtcctaacacctgatacctcagaatatgactatttggacatatggtctttaaggggktaagttaaaatgaggttattactgtggatactaatccaatatgactggtgtccttataagaagagatttggacacagagaaggaagacaatgagaagacacaaagagaaagcagccatccaaaccaagcatagaagcctcagaagataccaaccttaccaacaccttgttctcaaatttctagcctccagaattatgataaaataaatttttgttttttacaaacaaccccatcaaaaag

SEQ ID NO: 49159 - DNA, 599 bp, Homo sapiens
tgctcgrcattatatctctagagtataatatgctgtttagaatatactaggcgccaaataagtattcattgactgactaaatgcatgcatgcatgagtgaatgggcacattaatgaacagcagagactacagcagaatcagggcatgggattgtataacagtactggctcatcaggaggcatcaacagctcagtcctcttatctgggcatggctcagattttccctaaacagacccatcccttgggctaacccctcaagtcaggaggggtcttcattcttctacagggtttgggagtgtagaggtggcattcggttggttcatctctgcatcctcagtgcagagtgttgcatttagtggaccctgagagtttttccctgaatgaatgagtccctgaagtgctgcccagggagaagcaattccccacattctcatcttctctaccattttactgttacacagttgtgctgggatgtccagtatccattgaggttggtataggacctctccttgggagaggaacttgaacactgtatcttgatgttttaggccattcatgatcagaagtttagcctctccatcccactcctgccatgtttt

SEQ ID NO: 49160 - DNA, 599 bp, Homo sapiens
tgctcgacattatatctctagagtataatatgctgtttagaatatactaggcgccaaataagtattcattgactgactaaatgcatgcatgcatgagtgaatgggcacattaatgaacagcagagactacagcagaatcagggcatgggattgtataacagtactggctcatcaggaggcatcaacagctcagtcctcttatctgggcatggctcagattttccctaaacagacccatcccttgggctaacccctcaagtcaggaggggtcttcattcttctacagggtttgggagtrtagaggtggcattcggttggttcatctctgcatcctcagtgcagagtgttgcatttagtggaccctgagagtttttccctgaatgaatgagtccctgaagtgctgcccagggagaagcaattccccacattctcatcttctctaccattttactgttacacagttgtgctgggatgtccagtatccattgaggttggtataggacctctccttgggagaggaacttgaacactgtatcttgatgttttaggccattcatgatcagaagtttagcctctccatcccactcctgccatgtttt

SEQ ID NO: 49161 - DNA, 644 bp, Homo sapiens
cctgggcttacattggcracataactttctccaagtcacactcaatacaattgccagagctgtgatatgaaaccacctctatgtcacccctaagctctgtagtctgagggaggaggaattactttgagttctacttgatatgaatttgaataggtcttccccacagagcaagttctcagcatgtatttattgaaaattgaatgatccactttgcagccaggtaacagtgctgagccatttctggtgggatgacagaagggatacatgcccacctgcttccaagagcaactttatgccccagagcacatgccagagctgctcttgacacgtttcaagaggttttgcaggtccaggacactgctgtgctataaatcagcaactggtttaccctttccaacaatgattgctgaatttgaagctcaaatgtatataattatcatccttaatacatgggctttgcactcctacaaggttttccatcttcaaagtgtcttatgaacattaactaattaatctaggctgcacattgtgccaaggcccagagggcttaaactgctcagatctgggatggtccctgttgatggtaattacacggaacacattgggtactctttcacttaatatatattggtgcagtgtgtcat

SEQ ID NO: 49162 - DNA, 644 bp, Homo sapiens
cctgggcttacattggcgacataactttctccaagtcacactcaatacaattgccagagctgtgatrtgaaaccacctctatgtcacccctaagctctgtagtctgagggaggaggaattactttgagttctacttgatatgaatttgaataggtcttccccacagagcaagttctcagcatgtatttattgaaaattgaatgatccactttgcagccaggtaacagtgctgagccatttctggtgggatgacagaagggatacatgcccacctgcttccaagagcaactttatgccccagagcacatgccagagctgctcttgacacgtttcaagaggttttgcaggtccaggacactgctgtgctataaatcagcaactggtttaccctttccaacaatgattgctgaatttgaagctcaaatgtatataattatcatccttaatacatgggctttgcactcctacaaggttttccatcttcaaagtgtcttatgaacattaactaattaatctaggctgcacattgtgccaaggcccagagggcttaaactgctcagatctgggatggtccctgttgatggtaattacacggaacacattgggtactctttcacttaatatatattggtgcagtgtgtcat

SEQ ID NO: 49163 - DNA, 644 bp, Homo sapiens
cctgggcttacattggcgacataactttctccaagtcacactcaatacaattgccagagctgtgatatgaaaccacctctatgtcacccctaagctctgtagtctgagggaggaggaattactttgagttctacttgatatgaatktgaataggtcttccccacagagcaagttctcagcatgtatttattgaaaattgaatgatccactttgcagccaggtaacagtgctgagccatttctggtgggatgacagaagggatacatgcccacctgcttccaagagcaactttatgccccagagcacatgccagagctgctcttgacacgtttcaagaggttttgcaggtccaggacactgctgtgctataaatcagcaactggtttaccctttccaacaatgattgctgaatttgaagctcaaatgtatataattatcatccttaatacatgggctttgcactcctacaaggttttccatcttcaaagtgtcttatgaacattaactaattaatctaggctgcacattgtgccaaggcccagagggcttaaactgctcagatctgggatggtccctgttgatggtaattacacggaacacattgggtactctttcacttaatatatattggtgcagtgtgtcat

SEQ ID NO: 49164 - DNA, 644 bp, Homo sapiens
cctgggcttacattggcgacataactttctccaagtcacactcaatacaattgccagagctgtgatatgaaaccacctctatgtcacccctaagctctgtagtctgagggaggaggaattactttgagttctacttgatatgaatttgaataggtcttccccacagagcaagttctcagcatgtatttattgaaaattgaatgatccactttgcagccaggtaacagtgctgagccatttctsgtgggatgacagaagggatacatgcccacctgcttccaagagcaactttatgccccagagcacatgccagagctgctcttgacacgtttcaagaggttttgcaggtccaggacactgctgtgctataaatcagcaactggtttaccctttccaacaatgattgctgaatttgaagctcaaatgtatataattatcatccttaatacatgggctttgcactcctacaaggttttccatcttcaaagtgtcttatgaacattaactaattaatctaggctgcacattgtgccaaggcccagagggcttaaactgctcagatctgggatggtccctgttgatggtaattacacggaacacattgggtactctttcacttaatatatattggtgcagtgtgtcat

SEQ ID NO: 49165 - DNA, 644 bp, Homo sapiens
cctgggcttacattggcgacataactttctccaagtcacactcaatacaattgccagagctgtgatatgaaaccacctctatgtcacccctaagctctgtagtctgagggaggaggaattactttgagttctacttgatatgaatttgaataggtcttccccacagagcaagttctcagcatgtatttattgaaaattgaatgatccactttgcagccaggtaacagtgctgagccatttctggtgggatgacagaagggatacatgcccacctgcttccaagagcaactttatgccccagagcacatgccagagctgctcttgacacstttcaagaggttttgcaggtccaggacactgctgtgctataaatcagcaactggtttaccctttccaacaatgattgctgaatttgaagctcaaatgtatataattatcatccttaatacatgggctttgcactcctacaaggttttccatcttcaaagtgtcttatgaacattaactaattaatctaggctgcacattgtgccaaggcccagagggcttaaactgctcagatctgggatggtccctgttgatggtaattacacggaacacattgggtactctttcacttaatatatattggtgcagtgtgtcat

SEQ ID NO: 49166 - DNA, 635 bp, Homo sapiens
tcccacatgctgccaaataccagctgcccctaagctcatgtatccaacactwcgtgctcctttccttcagaggctgaaattttagtggggagggcccaggtctgcttgtcacatttggttcggcacatgctgcagaaggacaaccacaaaaaccagcccaggtcagagagcaaagcagtgtcctgaggccacagagacctgggttcaagatcaggccttgaaaattacaaagtaccaaacggcagatgtcatctatgtacctaatgcatgcgaggcacttacacatatagtctctttaaagtttaggagatccatttccaaggcaggtactatgattccttttctcatggacaatgagcctaatgctcagagagtctgagtaggctcctacggctggcaaggcaaggcagtggctgggtgctcaccttccttaggcctgaccccacctactcaagcagctggcggaggaaaccacaccagggttgctcagttcactaggctccatcaaggtgcgctgtacgtgtgcttccccagtgtcaggggacagccaatccttggggcaggagcctgctctttctctaggggagaatctgcatcccaggcaggagaggggcaaaagaaaagagaagccggga

SEQ ID NO: 49167 - DNA, 589 bp, Homo sapiens
taggcatttcctgtttctgaattatctgtgtacattacttctcacttgcccccatctgccaagcttttgattacttttacttcttatttttactagacaacaaaaagttaagtgtgtggtaaaaatgaaatctgtgtattagtaaatgcaatttggcaagaaggaggatacaaatatttctaaaatgaaatttttggactaatacattttatttattcttgctttttttgctgttttgaactataattaaacaaaaaggtccagtttatttatttgcaaacttcaagcaacattgcaatagttcatttcatagaaatcctagtgagtatgtacttaccaaggtgaactaagataggaatacctgaaccaaagctcaggatttctctgctgttagttccaaggccttcctgatagacctccaagctgaccattcctcttttttcctgtggcttgccagttgagagaagagsaataatggacagtgttacactcccatttcatgtttctgtttagggttattgtggtgtagatgaatttcctttctcttcttctacttcctttgctctcacaactttgagaaatgaaaagt

SEQ ID NO: 49168 - DNA, 1152 bp, Homo sapiens
atggttgatcagctcatgtttcagctacccatcattacagtgtggattctttctttgcaaagcctcaagcatctcaatactgttggctgtgacctcagtagagtgcgaatatgttaaactgccaagaggagtgtaaaggggagaggaaagatacaccaagcccttctctaagaaatctttgttgttaacacgccctgagcacctcacttagtggacttccstctgcggacctgcgacttctatagcgccataatgagggtgggcaaagcacctgtcactcacctgcagaacctctctttatcaacctagtttcatgcaaatggcttgttcagtatgaactgactaaatcccagatacttccctgatttttagatcctgacgtatttgacacatttatatctcttgttatgtttcctttcctgctgaaattaagatgcattgggtacacagaggctatgacatctgccaaaggattgcagggatacagtcatagactcgaacagtccccaccatgcagggaggcagcagccacatcatcctgagcagccggccccatggagcaagcagctgcctcctgggagccagggaaacaggaaaatccctggtgttcagagttcttctctgagtgctccaagcacacacccaccaacacaaataatgtatctgtgtacacatgaacagatgtgtagatggatgcacttacacacattcccacatatacatatttacacacatatataccttctcatgcaaatatcacttcccacacagtcaccagaaataatgtcctaaaacacaaattcaactacgctatgtgatgatatttaacaattattgttatttttgatgagtaatggttatatgggaaaagtctttatttttgaagatgcatactgaagtatttagtagtaaaatttcatgatgtctacaatttacatttaagtagctaagcaaaaaaatgaagtaaatatgacaaaatattaaaaattacatgttttcaatagtgaagatatgaaagcaacctaaatgtccatcagtgaatgaatggttaaagaaaatatggcatatgtacacaatggaatattattcaactataaaaaagtatgaaattctgtcattgcaacaacatggatggaactgaaggacattatg

SEQ ID NO: 49169 - DNA, 609 bp, Homo sapiens
gatgatgatgctgtagacaaaagatctcctgcagatgtccatgccggaggtyattggatcattggccacagtgggaggccacaatactgtgagtgacagtgtgggtggcctacctaaagggcaggttcttcccaaagccagttgtcctagatcaggacattaaaacatggtgggcaggcttgagataagaggtggggacttcctcttcctggacatagctctcctaaactggactctaagtatatagagattctcaagatacccctgggcaatgagatggaaaaattgtctttgatgagggccacaagctgggggctgccaagagaggccccagggacagagctgttcccattgcagccacagctggctgcccatactcactagcttatctgtggggagccccctttgcagttcccccagcaagcctgcagaaatgtcagaagcacacaccagcctggtctcagctgtgctctagggaaagatctatgtcttcccttggccagagcagtaatcagagaaccaagttcagagctagtgagtgaggacagcagtaaacagtcccccaagaggatgacaaacctccagagaagtgttggaaccgggagttct

SEQ ID NO: 49170 - DNA, 590 bp, Homo sapiens
agaaggtgctcatgtataggaatttattattcttttcttcttcacaactttgagtagctgttgctcactcctgtcttcctatgggtatacatatcccagaactgcttatatctaggaagcagtccatgtagcctgcatacattaggttggtaggcctgtgaaggaaaatagagatagatgagtctccaggttttaaagagttaaaaagaagggaagaatgaggttagagttagagtgggtagagcaataacaagttgaaacagacccgctgatactcctccataatactggggactaagtttgcaaactcttargaataatgtcattccaaaatagtacaatgaatttgattcgcctacatctcaaagagcatgaaatttcagtttttaagattgtggatagcaaggctaataataatgatcgcatttatctaaatgtatcttaaaatttaaggtcatggctcggtgcagtgtctcacatctgtaaccccagcactttgggaagccaagggggaaaggattgcttgagctcaggagtgtgagaccagcctgagctatatagcgagacctggcctctactaaaaataaaaa

SEQ ID NO: 49171 - DNA, 620 bp, Homo sapiens
tgaccttagaagtaggttcttccycagtcaggcctctagataagaatgtagcccaggggccaggcacagtggctcatgcctgtaatcccagcactttgggaggctgaggcaggttgatcacttgaggttaggagttcgagaccagcctggccaatatggtgagaccccatctttactaaaaatacaaaaattagccaggcgtggtggcacgcacctataatcccagctactcgggaggctgaggcaggagaattgcttgaatccgagagcagaggttgcagtgagccgagattgcgccactgcacttcagactgggtgacagagcaagactccgtctcaaaaaaaaaaaaaagttccaagaacttgagcatggccacagatgcctgcatggaggtcaggctcaccaaactctgtttccttccaatttaacgtttgagggttttactgcattgatgagtcaaagactgcaaggtgtatactctaatttccgtttttccttttttccttagtaatagatcctgtatctgttttcatccgcagtgtaacaatttatcacaaacttagcactttaatacaatacctattagttaatgcacagttctgtaggccagaagtctggc

SEQ ID NO: 49172 - DNA, 620 bp, Homo sapiens
tgaccttagaagtaggttcttcctcagtcaggcctctagataagaatgtagcccaggggccaggcacagtggctcatgcctgtaatcccagcactttgggaggctgaggcaggttgatcacttgaggttaggagttcgagaccagcctggccaatatggtgagaccccatctttactaaaaatacaaaaattagccaggcgtggtggcacgcacctataatcccagctactcgggaggctgaggcaggagaattgcttgaatccgagagcagaggttgcagtgagccgagattgcgccrctgcacttcagactgggtgacagagcaagactccgtctcaaaaaaaaaaaaaagttccaagaacttgagcatggccacagatgcctgcatggaggtcaggctcaccaaactctgtttccttccaatttaacgtttgagggttttactgcattgatgagtcaaagactgcaaggtgtatactctaatttccgtttttccttttttccttagtaatagatcctgtatctgttttcatccgcagtgtaacaatttatcacaaacttagcactttaatacaatacctattagttaatgcacagttctgtaggccagaagtctggc

SEQ ID NO: 49173 - DNA, 915 bp, Homo sapiens
tgggttaacctagcctccactgacctttctggagtgactcagtattctcagaagggagtttttttgttcttccagctttgaatttttgctttcattttagcagcacaaagaatgtgaaagagattaggttgctattaataccacgggtctatctctagatggacaactgatggggggaattgttgggggtgactgcacgtggagctctcttagcccttctgcaaatccagagggtgatggagggacactgagaactcaccagtcttacccctgcacccatttttaccaatggggaaccgaggcccagaggggcaggcatgtgaccaaggccacayctatgagtgaggggcagagtcagaaaagtccccagagcacccatgccccgagcccggctgcatgtggcagctttctgacttttcattttgacggttttgctcatagtaaagggtaagccattgtgtctgtgctgtgaaagcaggcgtccttcggcagtgactcgtcattgttcttgctctcatgctctcatggtcactctcgcaggagagaggatgctccccacaggagatctgctgaaagtgctgggaggtgcctctgggggtcccctgggcctggccaactgcagagctgggttccgcgactccacaagtgagccggatgggaagcctgccttgggaaagccccatcctgcttcctaaccttggcctgctcacggggctttgttgcttggcagattccgttctaatccttcctctgcctctcccttgctggataaatctcccctggcctcagttccctcatttgaaaatggaggtaatagcacccaccttttagcgttgttgtaacgattaaatcaggaaatacatgcaaggtgctggtacatagagtccactcagtgccctcgccattctccaaaca

SEQ ID NO: 49174 - DNA, 915 bp, Homo sapiens
tgggttaacctagcctccactgacctttctggagtgactcagtattctcagaagggagtttttttgttcttccagctttgaatttttgctttcattttagcagcacaaagaatgtgaaagagattaggttgctattaataccacgggtctatctctagatggacaactgatggggggaattgttgggggtgactgcacgtggagctctcttagcccttctgcaaatccagagggtgatggagggacactgagaactcaccagtcttacccctgcacccatttttaccaatggggaaccgaggcccagaggggcaggcatgtgaccaaggccacatctatgagtgaggggcagagtcagaaaagtccccagagcacccatgccccgagcccggctgcatgtggcagctttctgacttttcattttgacggttttgctcatagtaaagggtaagccattgtgtctgtgctgtgaaagcaggcgtccttcggcagtgactcgtcattgttcttgctctcatgctctcatggtcactctcgcaggagagaggatgctccccacaggagatctgctgaaagtgctgggaggtgcctctgggggtcccctgggcctggccaactgcagagctgggttccgcgactccacaagtgagccrgatgggaagcctgccttgggaaagccccatcctgcttcctaaccttggcctgctcacggggctttgttgcttggcagattccgttctaatccttcctctgcctctcccttgctggataaatctcccctggcctcagttccctcatttgaaaatggaggtaatagcacccaccttttagcgttgttgtaacgattaaatcaggaaatacatgcaaggtgctggtacatagagtccactcagtgccctcgccattctccaaaca

SEQ ID NO: 49175 - DNA, 787 bp, Homo sapiens
tggggtaaatattttgaaagtgagaagttgcaggaccccagaaaagggttacctgtgggaaytgggatggtgggacatgattttagcaaatatttcacattacaaatgtttgagctgagccgtgaacacaaatgctgagtggaatttcttggaacagattagctgggtgtctagtggggaagataagacaggatggggagaagccacattggacagacttcacctggctcttgggaatgagaactacggggccagggcatgctgtctgtgtcttccatgccaaattcttactgtatgaataaactgagcatcaggttcacccaaaggtgagctctgtgattaatttctatcatctttacttggatttcagcagcagtggcatcagtggtgctgggtaaagtatttggtaacaggggttgagggtagcaaaagactagccacaaaccctgattctactaaaggaagttggctacatctcataggaaaccttttaaaattatgtgtgacgtatgtacaggtccaggctgtcttaacaggggcatggtttctaaaacatgggaggtgactattccacttttcttttgtcttaatctacacaaagtatattgtgctctgcctgttaagaaggatttagacaaattgggacatgttttgaacctgggaagcaggaagcaaggagaacaaaaatttgtgtttaaagaactagagaactttagcccggagaagaggaagtgcagggagaaataaaaatctcttctcagatgtttggaaagcattcatgtggttt

SEQ ID NO: 49176 - DNA, 2446 bp, Homo sapiens
tggaacactagagctagttattgggggaaaaaaaaccccgtggaattgctctgctggaagcatttggaaagtaattagctaattctctttctcaatgtgtttaaagataagactaaaagtgggtgctagaatactccttttcttgaagctccgcttctagaactctgaatggcaatgagggggattaaaagtctattctcttctcccccccttatttggctggcatgtctaattccagaattggaaactcatagacatggcaaagaaatgtatcatagatcatgactcactatgaaaaggacaagtgtgcaagttgccttaccagtgaaaaatcctgtgcctgccctctttcttcctgagacaagacttcagttctttctctctgattcatatcctgaggaaatcaacatgataaaaaatggctgcgctcaattaaaaaatgtctccaacccacactttaaaaacataagctcttttcaatccagatatggattatcttcctgagaaagtcttttccttcagaagaattttgtgccatttaagataggcaaaacaggcagaatgccattcctgcaatgaaagttacgcatttagccaacagatttgcaaagtgcatctgccatggcaatggatttaaagatgggaattagtaggagaaagaactatggtttatttgagcccaccagcatcaggtattctaggtactcttcaacagcagcagttaacattaattgaatgcttgctaggtatcaggtaccattctaagttttccttgcattatttcatttaatccaaacaagttcatgacataaatcctattatggatcctaactcacagatgaggaaaatgaggctcatcagaggttaaccaattttttcaatatgaggtagcaagtagcagagagggctttcaaatcagaactgtctgacatcagaacttaaacttctaactattcctcatacagtcttttaggaaaaggtagatacaagatctccattgtggatatgagaaaatggaaactcagagaagaagagtagcttgattaagagcacaaagattactgatgtttttggcctaggatttgagctcaggtcaggaggactccaatgttcacgttccagtcatatcgatagaaaacctaggagatgagtagatgtcctgacattcattccacgtagattatttttaattcaaataagcaaatgcccactatgtataaaactctgtacaagtcttactgcatgtaagactttgaagatagtatgaaaaaattaaatatattgtacctgcctccaatgaactttaaattctagttgacagagaaaacacacagatgaataaactaagatcagttgcaaagtattgtgacaccataggtaaaataatatcctacgcattaaatagattcagaagaaatgctgggagaagcagtgattagagaagaaaattgatcaagaaaagcttccttggagaggtataaaatgatatgtatgatgaatagagttgatcccattgcctgactccctgtctatttttgtgggtagaaaaaaaaagatactttggagaasctatatggagagaaaatatgatcttagcacctatgggaaacgtcctatgaaagatacggctcacaattacagagccatggaaaggttgaaggacagggaaggatttctctgtgattacagttaaaactactagtgattactctttctcttggctagtagttttccatagggtcccatcaaatataaactataatagttacagatcaaatctacactcattctttatgaaaaaaaggcaaacagccagaagagagggagaggaaaagttcatttcagcattttcaagggattttccatgagatctagccagtaatagaagagaaaaaaattttttctgaataaggaatgggctcgaatgctgattgcttatttcacctcccacctccccggcaaacccccaatttaataaataattggctattaaaaagaacctttggatggtaagcatgtattcctcagttataagatttatccaagctacgttcaactttttttcagtctaaagcatggacttcagccttcaagaggactatttactgagacttctgtaagaacattatcttcttataaactagaagcaagaagtattcaaggtgttaatgagtattactaaataaaacagttctaaagtcaaatcactgggaaagcaaatgttttactttattgtattatttttattttacagccttaactatgctgatgtacattttgaatgtccagtggggacatattcaggatttcttaaacttgtttgaccttagaatacctccttattttgtagaatttgtattgatatctcatagacttcatattccaagaaaagagtcatgctctctttccttacataagttttagaaaggtagctcttagaacagtt

SEQ ID NO: 49177 - DNA, 1944 bp, Homo sapiens
gaaggactgagatcaggtagtgttggactcaaatgccaaatagaagagaagcacattaaygccaggatgatgagtgtcctcacataaggccatcctttcttatagtttccaaggtaagtcatgtttgcaggggtctttggagagaagaatgaggaataagaataagaatggagaagagaaagacaagtaaggtaggaaaaatgtctgtagctaaaatacacattacatatcattaataaattttaaaaattattaaaacatgttcatttcaaagaaaagtaacacttgttaatagggtgctgggagtctaacacgaattattatttgcccataggaagtaggcttaaagatgagaatatggcatctcagaatatgagataacatattctcaaagtggtgattaaatcatatattactgctcagtcttaaaaaaaaaaatgaaatcatgtcttttgcagcaacatggatggaaccgaatgccattgtcctaagggaaataacctcgaactagaaagtcaaataccacatattctcatttataagtgggagctaagcaatgggcacacacagacatacagagtggaaaaatagacattggagactccaaaaggtgggagagtgggagaagagtgacggttgaaaaattccctgttaagtacaatgttcactatttgggtgatgggttcaccaaaagcccagactttaccactgtgcaatagatgcatgtaagaaatttgcacttataccccctaaatctgtaaaaacactttaaaagagttgtggttaaaatatgttgatacttatgaggaatctcataatgactcagtgaatagacaaaggcaggaaaaagttaaaaatgcagaagggaagaagacacacggcactggccatcagtccacatgctctggggacatgagttccatggggctcccaccactattagctactggtttttgaatacttctcaaatgcccggtgcattgcacgatttacatatattctcatttaattctcaatggcataatgaggtgggtaatattttccccattttaatcaattttctaaataaggatgtgagacatagagaagtggcatgtctaagctcacatactcaggaaaggtagaggcagggtctaagccaggacccaagcttgccttgtgttgcttacctctgatcagtttcaatccaaaattcaaagtgggaaatctagttgtaaggaaacaagggttgcttcagaatattttctccatctacagtagtgactcttattattcattgggtctcagactcctataacaattttataaaagtggtagaccctctccttagagagaggcatatatgttcataattgtgtgcatgtgtacttttcagggatttcaaaactcttcaaaaccaaggctaagaaactgcgaactaaaagttgccactaaaaagggacctagatcacagatagaacctgaccgggatgagtgcacagaaatgtctccttggccaacccaacccagttggtgcaaatcctctagtgtaagcaactctttacaagcatagaattgacccttaataggactagtcatgatggacagagatccccaatgataaaggtattcacaaagaacacaggttacaacccaattcttgagggacccttgagtgagccagatgcagtgtgcaagggagaaggaagaacgttgctagaatgaatgtcaactttacagttgggctgtgcctcttggtcatgaccttgaggctcggagaattggctcagacagttctgaacagagtagccattttacagacagcccacagcccagcaggtcaccgctctctaactctgccatcatgacaccgccatctgcagccactgagctgagatttctcaagaccaaatttatcacgcccgagattccattcttacataagaatcacctgttgctgatgca

SEQ ID NO: 49178 - DNA, 1944 bp, Homo sapiens
gaaggactgagatcaggtagtgttggactcaaatgccaaatagaagagaagcacattaacgccaggatgatgagtgtcctcacataaggccatcctttcttatagtttccaaggtaagtcatgtttgcaggggtctttggagagaagaatgaggaataagaataagaatggagaagagaaagacaagtaaggtaggaaaaatgtctgtagctaaaatacacattacatatcattaataaattttaaaaattattaaaacatgttcatttcaaagaaaagtaacacttgttaatagggtgctgggagtctaacacgaattattatttgcccataggaagtaggcttaaagatgagaatatggcatctcagaatatgagataacatattctcaaagtggtgattaaatcatatattactgctcagtcttaaaaaaaaaaatgaaatcatgtcttttgcagcaacatggatggaaccgaatgccattgtcctaagggaaataacctcgaactagaaagtcaaataccacatattctcatttataagtgggagctaagcaatgggcacacacagacatacagagtggaaaaatagacattggagactccaaaaggtgggagagtgggagaagagtgacggttgaaaaattccctgttaagtacaatgttcactatttgggtgatgggttcaccaaaagcccagactttaccactgtgcaatagatgcatgtaagaaatttgcacttataccccctaaatctgtaaaaacaytttaaaagagttgtggttaaaatatgttgatacttatgaggaatctcataatgactcagtgaatagacaaaggcaggaaaaagttaaaaatgcagaagggaagaagacacacggcactggccatcagtccacatgctctggggacatgagttccatggggctcccaccactattagctactggtttttgaatacttctcaaatgcccggtgcattgcacgatttacatatattctcatttaattctcaatggcataatgaggtgggtaatattttccccattttaatcaattttctaaataaggatgtgagacatagagaagtggcatgtctaagctcacatactcaggaaaggtagaggcagggtctaagccaggacccaagcttgccttgtgttgcttacctctgatcagtttcaatccaaaattcaaagtgggaaatctagttgtaaggaaacaagggttgcttcagaatattttctccatctacagtagtgactcttattattcattgggtctcagactcctataacaattttataaaagtggtagaccctctccttagagagaggcatatatgttcataattgtgtgcatgtgtacttttcagggatttcaaaactcttcaaaaccaaggctaagaaactgcgaactaaaagttgccactaaaaagggacctagatcacagatagaacctgaccgggatgagtgcacagaaatgtctccttggccaacccaacccagttggtgcaaatcctctagtgtaagcaactctttacaagcatagaattgacccttaataggactagtcatgatggacagagatccccaatgataaaggtattcacaaagaacacaggttacaacccaattcttgagggacccttgagtgagccagatgcagtgtgcaagggagaaggaagaacgttgctagaatgaatgtcaactttacagttgggctgtgcctcttggtcatgaccttgaggctcggagaattggctcagacagttctgaacagagtagccattttacagacagcccacagcccagcaggtcaccgctctctaactctgccatcatgacaccgccatctgcagccactgagctgagatttctcaagaccaaatttatcacgcccgagattccattcttacataagaatcacctgttgctgatgca

SEQ ID NO: 49179 - DNA, 589 bp, Homo sapiens
tgtaaaatttagctgtggggttgttatattgtacacaggatagaaagtataagaataactccccaggaagaagttgaatctctgaatagaccaataacaggatctgatattgtggcaataatcaatagcataccaaccaaaaagagtccaggaccagatggattcacagctgaattctaccagaggtacaaggaggaactggtaccattccttctgaaactattccaatcaatagaaaaagagggaatcctccctaactcattttatgaggccagcatcatcytgataccaaagccgggcagagacacaaccaaaaaagagaattttagaccaatatccttgatgaacattgatgcaaaaatcctcaataaaatactggcaaaccgaatccagcagcacatcaaaaagcttatccaccacgatcaagtgggcttcatccctgggatgcaaggctggttcaatatacgcaaatcaataaatgtaatccagcatataaacagaaccaaagacaaaaaccacatgattatctcaacagatgcagaaaaggcctttgacaaaattcaacaacgcttcatgctaaaaactctca

SEQ ID NO: 49180 - DNA, 589 bp, Homo sapiens
tgtaaaatttagctgtggggttgttatattgtacacaggatagaaagtataagaataactccccaggaagaagttgaatctctgaatagaccaataacaggatctgatattgtggcaataatcaatagcataccaaccaaaaagagtccaggaccagatggattcacagctgaattctaccagaggtacaaggaggaactggtaccattccttctgaaactattccaatcaatagaaaaagagggaatcctccctaactcattttatgaggccagcatcatcttgataccaaagccgggcagagacacaaccaaaaaagagaattttagaccaatatccttgatgaacattgatgcaaaaatcctcaataaaatactggcaaaccgaatccagcagcacatcaaaaagcttatccaccaygatcaagtgggcttcatccctgggatgcaaggctggttcaatatacgcaaatcaataaatgtaatccagcatataaacagaaccaaagacaaaaaccacatgattatctcaacagatgcagaaaaggcctttgacaaaattcaacaacgcttcatgctaaaaactctca

SEQ ID NO: 49181 - DNA, 589 bp, Homo sapiens
tgtaaaatttagctgtggggttgttatattgtacacaggatagaaagtataagaataactccccaggaagaagttgaatctctgaatagaccaataacaggatctgatattgtggcaataatcaatagcataccaaccaaaaagagtccaggaccagatggattcacagctgaattctaccagaggtacaaggaggaactggtaccattccttctgaaactattccaatcaatagaaaaagagggaatcctccctaactcattttatgaggccagcatcatcttgataccaaagccgggcagagacacaaccaaaaaagagaattttagaccaatatccttgatgaacattgatgcaaaaatcctcaataaaatactggcaaaccgaatccagcagcacatcaaaaagcttatccaccacgatcaagtgggcttcatccctgggatgcaaggctggttcaatatacrcaaatcaataaatgtaatccagcatataaacagaaccaaagacaaaaaccacatgattatctcaacagatgcagaaaaggcctttgacaaaattcaacaacgcttcatgctaaaaactctca

SEQ ID NO: 49182 - DNA, 589 bp, Homo sapiens
tgtaaaatttagctgtggggttgttatattgtacacaggatagaaagtataagaataactccccaggaagaagttgaatctctgaatagaccaataacaggatctgatattgtggcaataatcaatagcataccaaccaaaaagagtccaggaccagatggattcacagctgaattctaccagaggtacaaggaggaactggtaccattccttctgaaactattccaatcaatagaaaaagagggaatcctccctaactcattttatgaggccagcatcatcttgataccaaagccgggcagagacacaaccaaaaaagagaattttagaccaatatccttgatgaacattgatgcaaaaatcctcaataaaatactggcaaaccgaatccagcagcacatcaaaaagcttatccaccacgatcaagtgggcttcatccctgggatgcaaggctggttcaatatacgcaaatcaataaatgtaatccagcatataaacagaaccaaagacaaaaaccacatgattatctcaayagatgcagaaaaggcctttgacaaaattcaacaacgcttcatgctaaaaactctca

SEQ ID NO: 49183 - DNA, 575 bp, Homo sapiens
aatgagtgggactccttccctggaatcattcggcatctttcagcaaatttgcctgagaggctggggctcttcaagacctccttaattctctaacggaaacagtacccaaaccatttcatttactttcccctttagattgttatgcactagttgaatctcagaggtaaaggaagccagcatatgtcatttagtttggaaaaaagaaaacacagatacacattttgaaagtgttatatgtattcacataattaacatgttttccctcaaggtcgaattagcaaagatgaaagcaaattcacgagagcatgaaaatgccacatcaagtcagccaagtcctcgatctccatctgtgctcaatccgtacaggggcaccaatcaacaggatgggcgaggtgtgtggaggtaaaagagcttggtgaccaaggtcacagctctgagtcccagcaacacagatgrgtaagttccagcaagtcactcatctctctgaccctagctttcctcatttggaccatgaggcgtgcgatgatacttgctgcctcctactccaagggattgttttgaaagacaaattagat

SEQ ID NO: 49184 - DNA, 521 bp, Homo sapiens
tacctcaaaaccaaccaaccaacccaccaaccaaacaaccctgaggcttctctgagaggaaattctgctcaagactatagcatcagctcctgccaagagtttccggcttataggcctgtcctgaagacttcaggcttgccagatcttacaatcacataagccaattccttgaaatctccacctgtatctatatctccatttctatatatctcctgctggttctgcttctctggagaatcctgaccaacatatccctccaattaggacacaagctgtaggagaataaaattctggtttgctcaattcgctgttgcatctccgggacctagaacagttcccgacacacagctgatgctcargaaacatttgctgcatgaacagatatttatttacccaaggacctagcactcctccctgcctccacatggtcaagtctcattcatgcactcttcctgaatctctgtcacattcgggacttttcttctctcagcgtggctccctcctgcattggctcatcatca

SEQ ID NO: 49185 - DNA, 546 bp, Homo sapiens
ccaacacaagaacaagtaacaatggtctgaaaaatgaaacaggaaggcagtttctccaaagacaggctagtacttttgcaagtctttccatttgtttcttaaatcattctccatttcatgaccctcattgtccaagtgctaacaccatgcaaattataccaaggccagcttactctcggaatgattagagtttaatttttgaaatacttcattttataggttccttttgtgaggctaatttagatagaattagaataataaataagcacaatagacagcaattgaagaataataaaaaaaggtccktgtgttcaaagaattgcaatagatccaagaacatcgcttctcaaaatgaattaaactgcatcatagggcagaaactttgaggaggctttagataaagaattaggaggtattttcttgactgttagatctctgggatgaaatgaagctaaactgcttataaatcactattaagagaatgcttgggagcttaaaatagagtcaaacattaccacaatagagatgaaataaaggaaaccacca

SEQ ID NO: 49186 - DNA, 1198 bp, Homo sapiens
ccttgttgctgctgcttttaaagtgtcctaaaaccaaaaatgaaacttgccgtgtgacctgatcagcaagaaggagggtgaggctgtgacccctctcttagtgtgaggatgacatttctcctaatgccctaggctttttgttccttttcattcttttgttctccaggccattctgctggcttattttgggcttacagtcaattacaatccttaaatctttttcacatgaacttttggcaagctgggactaactccatgggtgattagagctgagggcttcttttttgttttttttgcaacttacgtacttaacctgtatcaccatgttcttgatgttggcatttttttggttttgttttgtgggtatttttttatttttgtattttcatcctattagccaatttatttttgtagaatagtagaatttggaactagaagtgattttaagagtactgcagtttgtttccttcgatactgacacaacagccctcgggaaactgacctggagcgatgggtgctaaaaggagatgagattttcttcctcatatgctaggagcctggacagataaaggtgtaaacaaaaatgttagcagagggttaggcactggctacgaattcagacttggaaacttcgttgtctgtgcaacttcatactgtttcattcttgtcctgtatagtatttctttgatttccttcatctgtaaaagcaggaagaaaatatttgccactcagttctgttttttaggkatcaaatgctaggatacaacctgaggtttctttccccgccccctcacaaagtatagatcatttgttttccttccagccctgggctcagtacacagatggtttctcttcaccttttgggttgcggttttctccaggttggtgctgatgatatgataaagctcagcacagaaggccttcaggtccagtaccctggccttgacctccccataggctgtcttatctcacttttgcaccaacgcctggtaatccattacatgggtctccttggaggccttggccacagcatccccgtgttctgagaagtatttggaaatggttgtctggacggcttgcactttggtcttaactgcattcaccctctccagcaccttctcctggattgctaccccaaatcatttgcatcctcagtcttggggatcaggtgctggatccatgtgatcaccagaatgca

SEQ ID NO: 49187 - DNA, 1198 bp, Homo sapiens
ccttgttgctgctgcttttaaagtgtcctaaaaccaaaaatgaaacttgccgtgtgacctgatcagcaagaaggagggtgaggctgtgacccctctcttagtgtgaggatgacatttctcctaatgccctaggctttttgttccttttcattcttttgttctccaggccattctgctggcttattttgggcttacagtcaattacaatccttaaatctttttcacatgaacttttggcaagctgggactaactccatgggtgattagagctgagggcttcttttttgttttttttgcaacttacgtacttaacctgtatcaccatgttcttgatgttggcatttttttggttttgttttgtgggtatttttttatttttgtattttcatcctattagccaatttatttttgtagaatagtagaatttggaactagaagtgattttaagagtactgcagtttgtttccttcgatactgacacaacagccctcgggaaactgacctggagcgatgggtgctaaaaggagatgagattttcttcctcatatgctaggagcctggacagataaaggtgtaaacaaaaatgttagcagagggttaggcactggctacgaattcagacttggaaacttcgttgtctgtgcaacttcatactgtttcattcttgtcctgtatagtatttctttgatttccttcatctgtaaaagcaggaagaaaatatttgccactcagttctgttttttaggtatcaaatgctaggatacaacctgaggtttctttccccgccccctcacaaagtatagawcatttgttttccttccagccctgggctcagtacacagatggtttctcttcaccttttgggttgcggttttctccaggttggtgctgatgatatgataaagctcagcacagaaggccttcaggtccagtaccctggccttgacctccccataggctgtcttatctcacttttgcaccaacgcctggtaatccattacatgggtctccttggaggccttggccacagcatccccgtgttctgagaagtatttggaaatggttgtctggacggcttgcactttggtcttaactgcattcaccctctccagcaccttctcctggattgctaccccaaatcatttgcatcctcagtcttggggatcaggtgctggatccatgtgatcaccagaatgca

SEQ ID NO: 49188 - DNA, 536 bp, Homo sapiens
ccaaattccaataatggacttcatccaaggagcacttactgaacatagtaccaagtccatacttgaggattccaagaaaataatgactaataagctgtgatgctagtcctttagaggttcacaactaatmctcatccccatccaagagttagtaccctccatgtttgacacatattataaagctctcacctgattattgcaaagacctcctaattaccatcccagtttccactgcgccatgccccccacagtctattttcaaaataatagcagaaaagtcagtgattttcattctcttgcttaaaaccctttcatagatgcaccagacctgttgaaacctcatgttttttgtatttgtcttttcttccgattgaagtgatcttccctgaaatagtcacatagctccttccctccttttattcagtttttggctcaactctcactttatcagagaaatctctgaccactctaaataaaatagcatatcccaccacactctctgtctttatatccttatcagttttaatcactatcat

SEQ ID NO: 49189 - DNA, 1108 bp, Homo sapiens
  misc_feature (1)...(1108): n = A,T,C or G
gannnnnnnnnnnnnnnnnnnnnnnnnnnnnnnnnnnnnnnnnnnnnnnnnnnnnnnnnnnnnnnnnnnnnnnnnnnnnnnnnnnnnnnnnnnnnnnnnnnngaatttcaagctgggtgtctgccctttgcaaaccaaagaatcctctaaaataatatggaccatcttattcatgtctctacctccagtagctgactcagattttggcatttaatatgggcttcagwaacattggcattgttagttcaaagcctgaaattgtatttgttgtaatgtggaatcaggaattgaggtgggagcaagcacatgtcataatgtgacagatggacaaggcttataccttagagctgtatagtgaagtattaactccacacattctgagcatctctttgggtctgagtttattctggtggtatttggcctaccatgctgcagaagtgttggctatttcttatctaaccaagaatgattagctctcctagggtatagccctgaaagacaaaatgagagagaccatagcatgcatactcattagatgacttggttgtccagttgtctttgtgtttgcgtggtgcacagggtatttggtgtgggagacagaacagctgagatggacactgtttaccagctgtgtggtcctgggaaagcagcttcacttctctgggccctcttttccctatttgccaagtggagagagtaacacctgtctcacatacctcacaggactattgaggggatgagacaacacatacggcaacactttgttgttgtcaaatcctttctcagagaatcatgtcaggccctcttctaaacacagaggccacttcagggctgatgggccggctttgataaacacatgacataaggcagggtcactgcttcaagaactggcctcatgcacctttgtcaaggagctggggtgagccttcccaattctgatgtctgctttctgtcttttctgtcctcttgactcaattgtcaaacaaagcttcttgacacttcccattctgccactgctcagagagcctctctgctcagtatttggtcatgaaaatggagcctgtgtcccctgcctacctgccccatttgggtggaacacaccctctgg

SEQ ID NO: 49190 - DNA, 538 bp, Homo sapiens
tgaggtctgccttggagtcaaatgtgataatttttagaaggggttgtttccttttgccaaggagggagactggcacttttacttgcctcgtattacaaaatttgtagcaataaggcaatttaattagcacagcagtttaargttttaatagttactgtatttaagcaatttccctagcacccctgctgttttatgaggctataatttggctcccaaatggagaaacaataaggccaaataaagcaaaaagatgacagtgttattctggaggttaaactcttgtacagcccagggcaagatactagtgaggcagaggctggcttcctacaaggacactctaattgttcactatgtttcattgggtcactttgccaagacttacactgcgtggctgttgcatccaaatttcagagagggtaagggattttctaggacttgaattcagatggggtttttaaatcaatttaaccaaataaagaactcatgtcagcaatgatgcaaacatggaaatcatatggtatttatttaggaaaacatg

SEQ ID NO: 49191 - DNA, 2917 bp, Homo sapiens
aaagaatcttttgaggttgaaggatgaaggaaggaacagatataggatggaaaaagggaggcaggagggagctatgggcaaagggtgcactgtgagcttaatgaaaagtctgggttttttttccttgtccatatatcgcaagatgaaaccaccttatctctaatcgcatttagagtacacacacacacacacacacacacacagacacacacatggatttatcatgaggaatttgctcacatgaggctgagaagtcccataatctgccatctacaagctacaggatagtcagtgtagtcagtggtgtaatcccattctgagtctgaaggcctgagaactaggagggtctatcacatagatcccagtccatgggtacgagaagaccaataacccagcttaaacaggcagacaagaagtgaaaggggtgaatttgtttccttcctcctttttgtcctattcaagccttcaataaattggataaatgcacagccacactggggagggcaatattgagtctccgaattcatatgctaatctttgccagagacactctcacaaacacacccagaaaataatgcttaatctgggcaccctgtggcatagtctagttgacatgtaaaattaatcatcacagttatacaggagcttaagaaacactattttaaagagtgattctttactggctgaaaatttggaaaagttgacccataaaatcaagattgaggaatgggctagggattttgtctagttcacccaaataaaattttgctgagtgtctaatgtatcaggcactgggagtgtaaagatgaaaagagacacagtttcttctcttgaacagcttgttgtcgagtagaagattttaaaaagcccattctaaaatgtttcctgatgaagacatactaaatttccttaaagttttatgatcacttaaataatagctttctttgtgaagtaccttctaagtgctaggtataatgttggtctttttccagttcttatgacaaccattcaaggtagacattttattttttctgcttttcaaaaaggaaattgaagctcagaaaggacaggcatattacccaactattagtaagtggctaattgaaaattcaaagagtagctaaatgaatgagtaacatgttctaggcacttcacttgatgctggatgcatagtatcttacagagtcttcacaaccactggagaaaagagatactactgttatcttcattttatggctgagaaaacagagaccccctggaaaattaaacaaattgcccagggccacacagtcagtgtagagtgaggattcaggctcagccttcttggttccaaagctgatatttaaccgccatgctacccttcctcttgccttgtgccttacagttcacagcttcactctggctttgatttccatgtttgatgggttcttttgtactttcctctccctttaccaaaaaacaaactgaacaacaaaaccatcttgagcatcttcttgaaaggagtgaattcggctgaaggaaaatttccattagaattctgaggctcagcattaggccagggaggtaaaaatgccatgctaattaagtaattactgaaactcatgattaaaacatgcctttctaagagaatccccagaataaatggtattcttcattttgccttggagcttggttggcttggcttctaagaaattcaccttttttctggagatgtaatggggaagcaaagacttcttattccttatctttttgaatccttagaacaactctttggagatacatgaggaaaattttaatttgggattttagtggttagttaatcagttagtctcttgcatttgaatcctggatcatttgagaaacatatatatatgtaatagtcagggattacaatttcaggattattgcttggattggatctcatgtcttgaatgtatacccaaatgctcttcctcatactcccttgaaacccttgctgaagctggatgttgggatctgcatttgggaagggtcacatctagggccagttgagtagagaaacatggctgcctcataccaggtgcatgcggggagccagggagaggaaggtcctcaaggcaagagagctgtagaattttacccctccagaataaagagaggtggatgactgaatgtttgcctcttactttttcacctgctggatgaatcattcttgctcctgtgaggagaaaccaatgaaactgtagagaacaacagattctgccaattacacccaagtggtgttttattggctgacaaaatcatagggagagagagcatatggctttcactacagtctctgatcttgcttttttaaaatttattgccctctcttgatttgacatgtggagaattacaatttgaggttcagagaagttaatgatttgaaagtcacacttcagtgactaacccaggcctagactccagcctgtcaaagggagtttagagctcaagaagtcagacccttcagattataaatgggccaagtgcttgacagagatagcatatgacttgtctaagaccaaattgccaaaactagaaactcaggtcttctgactccttctgatgctcyttttaatatcttacagtattctcctttgtaaccctgagacatttgtgctgctggcttatgggactgatcttctggatttcagtcctgcttctgagcctctcttttctcaattataaaaggaggatcatagaagtagtgtctgcctctttgccttcttgtggaaaccaaatgaggctgggtctgtgcaaatgctctgtgactgtaacatactctataaatgttggaatattgtttttgaggttgtcactcttattgctgtcctctcagatgggccccatttttctccttttatttttagttgacatgtaataatatttatgggctaag

SEQ ID NO: 49192 - DNA, 638 bp, Homo sapiens
ctgtcaaagactgctattttgtatagtatgacacttaatacttttatagctgtgttttatttgtttgtttgtttgtttgagattgagtctcactctgtttcccaggctggagtgcagtggcgtgattttggctcactgcaatctctctgccacattcaagcaattctcttgcctcagcctcctgagtagctgggactacaggtgcatgccactatgccctgctaattttttatatttttagtagagacagggtttcaccatgttggccaggctgatttgaactcttgacctcaggtgatccacccgccttggcctcccaaagtgctgggattacaggcgtgagctactgtgctgggcctcttttagctttctgatatgtacgtgtattagactttttaaaaataaaaacttttagatattcatacctatttaatattctaaatgaactttaacattttctataataaaatcctattgggatatagaattgaattaaatttaactaaactagaaaagtaatttgtgaagaatcaacatttttacaatattgtcttccctccagcaattgtatattctttttaattatctgacttcagyagagttttacatcattcttttcttcattatatgttctctat

SEQ ID NO: 49193 - DNA, 570 bp, Homo sapiens
cagtattttatatcccatatcttctagctatgaccctatttctttgtttcttgacatagacaaacattttttaaactaagagctttattgtgatacagtttttgtatgataagcctcacccttcaagtgtacagttcagtggtttttagtatattcagagttatgcagccattaccactccctaatttcagaacattttcatctccccaaaaagaaccccgtacccactagcagtcactccctgtasctctctcccccaccattgatcctggcaacctctgatctaacttctatctctgtagatttgcctatcctgggcatttcatataaatagaatcatacaacagtggcattttgtgactgatttttctttacagtgattataaatcaaatgcctgaagacgctaagcttaggatagtgtttgctgtacaactttgataactgaacttttgtaaagctgaaaatgtgactgtgtctgtatatgtggcatattatccttagatgatccttacttcgattattaagaattttttcccctagtaatcttcaactgtctcaatattcagcag

SEQ ID NO: 49194 - DNA, 1489 bp, Homo sapiens
gacaagtttcatgtsttcactgaagtattaagaaaaaaaattaaatggagacttgagccctcaaatatcaaatcatgtatatagatctctgaaaaatatagaaatgtctgaaaggcaaacttcagataattctttttttttttttttttgagacggagtttcgctcttgttgcccaggctggagtgcaatggcgcgatctcggctcaccgcaacctctaccacccaggttcaagcaattctcctgcctcagcctcccgagtagctgggattacaggcatgcaacaccacacctggctaattttgtactttttaaagtagagacggggtttctccatgttgaggctggtctcgaactcctgacctcaggtgatccgcctgcctcagcctcccaaagtgctgggattacaggcgtgagccactgcgcccagcccagataattctttagggtagaacatttcaacgaaaattttgaattgcagcagggtttggatgttactggcataccacttcagatgctataatgcatgttatagaaaagatctacaggacagagtgcagcaaacaaaaaaggtctagaaaatggaatatgcagttaactagtgtaaagatagtaatgtgagactcaaaggtaaatagaatattgcatgtataccatagaacctctttgctgttacagctgtgacacttcttagctggagagatggagagcaggtagaattatttcaatgaatagctgagactaagaaaacaatgagagagggaacgatgttatcaaaatcagaactcaaagatctgataaagccccatctacaaggtgaaaaagaactatatgcccaggagattctgtacaagtttcaagtcttgttctttgattatctcttttgagttagtacatatcaggctgctgagaccaatatgtcagaaaacatggtcttcaggcttttcaatctttatctattaggcagaggtcagagtatacagctgaaaaaaagttaagctgagcagaagaatgagaggttgctgccgctgtgtgcacaacagaggacaatggggcaacgggccatttctgacccctctttctcacctggtgctcacttgttaccttccagcaattcctcagctcatcctctagatggcaggcttataaattttgccctattaacaattctttggatctggtccaatttcttttttttttttttttttttttttttttttgagacggagtctcgctctgttgcccaggccggactgcggactgcagtggcgcaatctcggctcactgcaagctccgcttcccgggttcacgccattctcctgcctcagcctcccgagtagctgggactacaggcgcccgccaccgcgcccagctaattttttgtatttttagtagagacggggtttcaccttgttaccaaaacacactccactgatataagttgtcaatacgccaccattagttaattgcgaatgtcctaactaacttca

SEQ ID NO: 49195 - DNA, 1489 bp, Homo sapiens
gacaagtttcatgtgttcactgaagtattaagaaaaaaaattaaatggagacttgagccctcaaatatcaaatcatgtatatagatctctgaaaaatatagaaatgtctgaaaggcaaacttcagataattctttttttttttttttttgagacggagtttcgctcttgttgcccaggctggagtgcaatggcgcgatctcggctcaccgcaacctctaccacccaggttcaagcaattctcctgcctcagcctcccgagtagctgggattacaggcatgcaacaccacacctggctaattttgtactttttaaagtagagacggggtttctccatgttgaggctggtctcgaactcctgacctcaggtgatccgcctgcctcagcctcccaaagtgctgggattacaggcgtgagccactgcgcccagcccagataattctttagggtagaacatttcaacgaaaattttgaattgcagcagggtttggatgttactggcataccacttcagatgctataatgcatgttatagaaaagatctacaggacagagtgcagcaaacaaaaaaggtctagaaaatggaatatgcagttaactagtgtaaagatagtaatgtgagactcaaaggtaaatagaatattgcatgtataccatagaacctctttgctgttacagctgtgacacttcttagctggagagatggagagcaggtagaattatttcaatgaatagctgagactaagaaaacaatgagagagggaacgatgttatcaaaatcagaactcaaagatctgataaagccccatctacaaggtgaaaaagaactatatgcccaggagattctgtacaagtttcaagtcttgttctttgattatctcttttgagttagtacatatcaggctgctgagaccaatatgtcagaaaacatggtcttcaggcttttcaatctttatctattaggcagaggtcagagtatacagctgaaaaaaagttaagctgagcagaagaatgagaggttgctgccgctgtgtgcacaacagaggacaatggggcaacgggccatttctgacccctctttctcacctggtgctcacttgttaccttccagcaattcctcagctcatcctctagatggcaggcttataaattttgccctattaacaattctttggatctggtccaatttcttttttttttttttttttttttttttttttgagacggagtctcgctctgtygcccaggccggactgcggactgcagtggcgcaatctcggctcactgcaagctccgcttcccgggttcacgccattctcctgcctcagcctcccgagtagctgggactacaggcgcccgccaccgcgcccagctaattttttgtatttttagtagagacggggtttcaccttgttaccaaaacacactccactgatataagttgtcaatacgccaccattagttaattgcgaatgtcctaactaacttca

SEQ ID NO: 49196 - DNA, 1489 bp, Homo sapiens
gacaagtttcatgtgttcactgaagtattaagaaaaaaaattaaatggagacttgagccctcaaatatcaaatcatgtatatagatctctgaaaaatatagaaatgtctgaaaggcaaacttcagataattctttttttttttttttttgagacggagtttcgctcttgttgcccaggctggagtgcaatggcgcgatctcggctcaccgcaacctctaccacccaggttcaagcaattctcctgcctcagcctcccgagtagctgggattacaggcatgcaacaccacacctggctaattttgtactttttaaagtagagacggggtttctccatgttgaggctggtctcgaactcctgacctcaggtgatccgcctgcctcagcctcccaaagtgctgggattacaggcgtgagccactgcgcccagcccagataattctttagggtagaacatttcaacgaaaattttgaattgcagcagggtttggatgttactggcataccacttcagatgctataatgcatgttatagaaaagatctacaggacagagtgcagcaaacaaaaaaggtctagaaaatggaatatgcagttaactagtgtaaagatagtaatgtgagactcaaaggtaaatagaatattgcatgtataccatagaacctctttgctgttacagctgtgacacttcttagctggagagatggagagcaggtagaattatttcaatgaatagctgagactaagaaaacaatgagagagggaacgatgttatcaaaatcagaactcaaagatctgataaagccccatctacaaggtgaaaaagaactatatgcccaggagattctgtacaagtttcaagtcttgttctttgattatctcttttgagttagtacatatcaggctgctgagaccaatatgtcagaaaacatggtcttcaggcttttcaatctttatctattaggcagaggtcagagtatacagctgaaaaaaagttaagctgagcagaagaatgagaggttgctgccgctgtgtgcacaacagaggacaatggggcaacgggccatttctgacccctctttctcacctggtgctcacttgttaccttccagcaattcctcagctcatcctctagatggcaggcttataaattttgccctattaacaattctttggatctggtccaatttcttttttttttttttttttttttttttttttgagacggagtctcgctctgttgcccaggccggactgcggactgcagtggcgcaatctcggctcactgcaagctccgcttcccgggttcacgccattctcctgcctcagcctcccgagtagctgggactacaggcgcccgccaccgcrcccagctaattttttgtatttttagtagagacggggtttcaccttgttaccaaaacacactccactgatataagttgtcaatacgccaccattagttaattgcgaatgtcctaactaacttca

SEQ ID NO: 49197 - DNA, 637 bp, Homo sapiens
ggcgctcccgtttacctggtgacaatcttcattttttttctgcttcttagtcacatccatataagtgtacccttcttggacttcaacagrgaatcagttttacagttttccagaatattatctggagacaaagaagatgcagatgctgagcttcttgatattgccatttgtaaaagagaatgcagagaaactaaagaggcaaggctagagggcaaacttgcccttgtttacaatgaagaaatacgcaccatgggtatttctaaaccttactgctcccttcatcacttaatccattataaaacattttagttttattaagttctatacggtttatatgtttataaacaatataaaattttgtctgttttaataaaaatatatattgtattaaaatcctatattttatatgcttttataaaacaacatagtttttaacataaaatacgaacttaataattttagaaaatacaaaatagacagtaataatttatccatcaacataccacaaagaagtaacaattaatgctacattgttttatatttttccaggtttataccataaacatacccatataatttttgacacaactggaatcctgctatatgcaaataatgctttaaaaattgtattatttat

SEQ ID NO: 49198 - DNA, 637 bp, Homo sapiens
ggcgctcccgtttacctggtgacaatcttcattttttttctgcttcttagtcacatccatataagtgtacccttcttggacttcaacagagaatcagttttacagttttccagaatattatctggagacaaagaagatgcagatgctgagcttcttgatattgccatttgtaaaagagaatgcagagaaactaaagaggcaaggctagagggcaaacttgcccttgtttacaatgaagaaatacgcaccatgggtatttctaaaccttactgctcccttcatcacttaatccattataaaacattttagttttattaagttctatacggtttatatgtttataaacaatataaaattttgtctgttttaataaaaatatatattgtattaaaatcctatattttatatgcttttataaaacaacatagtttttaacataaaatacgaacttaataattttagaaaatacaaaatagacagtaataatttatccatcaacataccacaaagaagtaacaattaatgctacattgttttatatttttccaggtttataccataaacatacccatataatttttgacacaactggaatcctgctatatgcarataatgctttaaaaattgtattatttat

SEQ ID NO: 49199 - DNA, 548 bp, Homo sapiens
aatcaaatggcagaactgacaaatcaaattcaaacccaaagcagtctgactccagagactttgttcttaattgatcttaatgttttgtcatatgctgaaggatcaggggattttttwaaagtttgatagtatttgattggttttatcctttccccagtgcctgagaagcatgttcagcattaagaaaaaagaggattggccaggcgcagtggctcacacctgtaatcccaacgctttgggaggccgaggagagcagatcgcttgagcccaggagtttgaggccaacctggtcaacatagcaaaacctcatttctacaaaatacagacaaaaaaaattatccaggggtggtggtacatgcctaatgccctataatcccagctacctggggtggggggcgggggctgaggcaggaggatcacctaagtgtgggtggggaggttgaggctgcagtgagctgtgatcatgccactgcacttcagcctgggtgacagaacaagacccaatctcaaaaaaaaagaaaagaaaaaagaggaaagagaatcaggat

SEQ ID NO: 49200 - DNA, 1157 bp, Homo sapiens
tgtggagtaataagtaacacaaagaagggggtttgcagtatcttaggaagaagaacagacgttcttggtaaagttcctttaatatgaaaatagcatttttaaatacttggagtagtgagtgaagaagctttctctatgagagcacggttagttcccaaataaatccyagcctcctctcttctgttaatttcttcggaaggatttgaggtagcttttgaagtatttggtcaaagttgcaaactcctcgggaggaggccaggcatggtacctcacgcctgtaatcccagcattttgggaggctgaggcgggaggatcacctgaggtcaggaggtcaagaccagcctggtcaacatggcgaaaccctgtctctattaaaaatataaaaatgagctgagtatggtgatgcacgcctgtaatcctagctacttgggaggcttgaggcaggagaatcacttgaacccagaaggcagaggttgccgtgagatgagattgtgccactgcactccagcctgtgtgacaaaacaagactcctcctggaaaaaaaaaaaaaaaaaaggaaacctgagattctgcttaacaattgtaaagtcagaaggtatgaagagtatttgaagttagacctgtggacaggctgattggatcttcagcagtatgagaaagtttagttaagccaaggtactatgtaaaactccaagctgtacagagctctgcctggccagctggtcagcacttgggtaatgaggaattgataaatggcaaattgcttcattgaatgattggattaatagtagcatgaatggataaattaacgggaatgggtatataaatgggtatgagatcaggaatattaatggagtcacaagtagatgatgcgtaaatgggactatatgtgtggattgatggatggatggaccctgaaatgcatttttgatggaattagggaacaagaataaatataataggaagtgtggtatgcatgtaagcatgtttgtgtgtgtatgtgtatataggttgatgcaagagtggaagggtagtaaggacaaaaactttggacagctatattgacaatgcaaaataaaaacatgaatgtatgaatgtatgaatttgacggatatgtgcttgaaagaatgaagtcagtttaggaaaggataattaac

SEQ ID NO: 49201 - DNA, 551 bp, Homo sapiens
cccacagtacatgggtgaagaaaggagccaacttattttagtgctttatagatgagttattaaggggttttgaaatgaataaaattaatgctatccctaacagaaacagtagccactgtgactcatgcaaataaacaaattcaaaattatctcctggccttgacagccctactttcagcaaaagtacgtagtagaaatcaaaagttcgaagtaaatttaaagtatttgaaaggattattcaaaatcaacatttctaaaccttgaaacctaaaacaactccacaaagctctaatygatattaactatggtgaaggatggaggtaaagaaagaaaactcaatccctgaaaatcagaccaagaaaatagccttcttgaaatatgagatagtacaattagttaaatagtagccctcaaaaagataaattcaaggccgggcatggtggtgcctgtaatcccaatgctttgagaggccgaggcaggcagatggcatgggcccaggagttttgagaccagcctgggcaaacaagatgacaccctgtgtttacaaaaaa

SEQ ID NO: 49202 - DNA, 557 bp, Homo sapiens
ggcaaaagcataacgtatagctatagtgtggcatgtcctgtttctcccaaggattaccaagcagacatcactgcactgtgtgcaatttcttcaggggtcatctgcagagcagccccccaagcaagaaggaaagattatcttccctcagtaatttcccacctagaaccacagagagaattcatctcatacagctgggccatgaagctgtcaagtggatgtaacctcctcccttcaggacacgtggtcctgccttatcagagaagaaaatggaaatgatgagttccaggaagctacttccttggcatacacctaacgctaacccactgtatgacagctggggctgtcataacaaataccacatgctgggtgacttaaataacaaaaatttatttattttttttcacaktctggaggctggaagtgcaagatcaagatgtcaacaggttgggtttactctgaggtctctctccgtggcttgtagatttgtggacggttgtcttttccccatgtcttcacatggtcttccttcttgtgtgtctacatcctaatcttttctt

SEQ ID NO: 49203 - DNA, 1462 bp, Homo sapiens
aggcttctaaattgtattaacctttaccattctaatkctttaaacttgaattattgtatttataattccatcttcatcaaagtaaacttttggttagcaaaaaccgtagaaatccccttattcaatcagattgggaccagtaataaacagattaatcacaaatttaagttagatggaggaatcataagaagtattcgatgtaagtccttaaaacttaactttaatttaaaagacttgtgcaaataaatttgccagaattttgatgacaaggtcaaagccttgcacggattcagagtgaagtttcttgtggaaactatgccaatgatatgttgtcatggatttcttgtttactttctgtgaagacaactggggtaaagcaatctgaaatcctagattacacaatttttcccatttgtttctagttgtcttgccaacagttaaggtgacagcaactgtttgagtttctcatttttccaacacatttagtttatttctcaaagaaacaacaatactaatcttgttatactcattttctcagtttacataatatttatttatttatttatttatttatttatttattttgagacagagtctcgcactgtcacccaggctggagtgcagtggtgtgatctctgctcactgcaagctccgcctcccgggttcatgccattctcctgcctcagcctcctcagtagctgggagtacaggcacccgccaccacgcacagctaatttttttgtattttcagtagagacgagatttcaccgagttagccaggatggtctcgatttcctgacctagtgatccgcccgtctcagcctctcaacataatatttaattaaatcgcataactacaagaacaagaacaaatggtgtaaacatatttaggaatgaacacagcttcctcttagaaactatacaatttctgtgatggaaggagaaatgtacaggcattaaaagcagctcaaaggctttcagtttgcagtggacatcagtcagtaagttgtacaggggtaccagaaagtgctgattgcaaatcagttaagtggaggtcagttaaggcagcatccactgtatcttaattcataaagtgaatgatctaaaactgggttcacttttgctataaaggaccagatgataaatattttaggctttgcaaaccatacggtctctatagcaaccattcaactgtaccattgtatcaggaaagcaccatagatccatggatgtgctccaataaaactttattaaaacaggcagctggtctgagagtcatgtatatatcttgctgttttcatacaattttctaagttagtagttccctgcctttttaacaatcaaggattacttttaatcctctcctctgattttatgtttcaaaagccttaacaaaaacccacaaaatatatttattttgtaattttgggggggttcttattatactaataagtaatcaatg

SEQ ID NO: 49204 - DNA, 1462 bp, Homo sapiens
aggcttctaaattgtattaacctttaccattctaattctttaaacttgaattattgtatttataattccatcttcatcaaagtaaacttttggttagcaaaaaccgtagaaatccccttattcaatcagattgggaccagtaataaacagattaatcacaaatttaagttagatggaggaatcataagaagtattcgaygtaagtccttaaaacttaactttaatttaaaagacttgtgcaaataaatttgccagaattttgatgacaaggtcaaagccttgcacggattcagagtgaagtttcttgtggaaactatgccaatgatatgttgtcatggatttcttgtttactttctgtgaagacaactggggtaaagcaatctgaaatcctagattacacaatttttcccatttgtttctagttgtcttgccaacagttaaggtgacagcaactgtttgagtttctcatttttccaacacatttagtttatttctcaaagaaacaacaatactaatcttgttatactcattttctcagtttacataatatttatttatttatttatttatttatttatttattttgagacagagtctcgcactgtcacccaggctggagtgcagtggtgtgatctctgctcactgcaagctccgcctcccgggttcatgccattctcctgcctcagcctcctcagtagctgggagtacaggcacccgccaccacgcacagctaatttttttgtattttcagtagagacgagatttcaccgagttagccaggatggtctcgatttcctgacctagtgatccgcccgtctcagcctctcaacataatatttaattaaatcgcataactacaagaacaagaacaaatggtgtaaacatatttaggaatgaacacagcttcctcttagaaactatacaatttctgtgatggaaggagaaatgtacaggcattaaaagcagctcaaaggctttcagtttgcagtggacatcagtcagtaagttgtacaggggtaccagaaagtgctgattgcaaatcagttaagtggaggtcagttaaggcagcatccactgtatcttaattcataaagtgaatgatctaaaactgggttcacttttgctataaaggaccagatgataaatattttaggctttgcaaaccatacggtctctatagcaaccattcaactgtaccattgtatcaggaaagcaccatagatccatggatgtgctccaataaaactttattaaaacaggcagctggtctgagagtcatgtatatatcttgctgttttcatacaattttctaagttagtagttccctgcctttttaacaatcaaggattacttttaatcctctcctctgattttatgtttcaaaagccttaacaaaaacccacaaaatatatttattttgtaattttgggggggttcttattatactaataagtaatcaatg

SEQ ID NO: 49205 - DNA, 1462 bp, Homo sapiens
aggcttctaaattgtattaacctttaccattctaattctttaaacttgaattattgtatttataattccatcttcatcaaagtaaacttttggttagcaaaaaccgtagaaatccccttattcaatcagattgggaccagtaataaacagattaatcacaaatttaagttagatggaggaatcataagaagtattcgatgtaagtccttaaaacttaactttaatttaaaagacttgtgcaaataaatttgccagaattttgatgacaaggtcaaagccttgcacggattcagagtgaagtttcttgtggaaactatgccaatgatatgttgtcatggatttyttgtttactttctgtgaagacaactggggtaaagcaatctgaaatcctagattacacaatttttcccatttgtttctagttgtcttgccaacagttaaggtgacagcaactgtttgagtttctcatttttccaacacatttagtttatttctcaaagaaacaacaatactaatcttgttatactcattttctcagtttacataatatttatttatttatttatttatttatttatttattttgagacagagtctcgcactgtcacccaggctggagtgcagtggtgtgatctctgctcactgcaagctccgcctcccgggttcatgccattctcctgcctcagcctcctcagtagctgggagtacaggcacccgccaccacgcacagctaatttttttgtattttcagtagagacgagatttcaccgagttagccaggatggtctcgatttcctgacctagtgatccgcccgtctcagcctctcaacataatatttaattaaatcgcataactacaagaacaagaacaaatggtgtaaacatatttaggaatgaacacagcttcctcttagaaactatacaatttctgtgatggaaggagaaatgtacaggcattaaaagcagctcaaaggctttcagtttgcagtggacatcagtcagtaagttgtacaggggtaccagaaagtgctgattgcaaatcagttaagtggaggtcagttaaggcagcatccactgtatcttaattcataaagtgaatgatctaaaactgggttcacttttgctataaaggaccagatgataaatattttaggctttgcaaaccatacggtctctatagcaaccattcaactgtaccattgtatcaggaaagcaccatagatccatggatgtgctccaataaaactttattaaaacaggcagctggtctgagagtcatgtatatatcttgctgttttcatacaattttctaagttagtagttccctgcctttttaacaatcaaggattacttttaatcctctcctctgattttatgtttcaaaagccttaacaaaaacccacaaaatatatttattttgtaattttgggggggttcttattatactaataagtaatcaatg

SEQ ID NO: 49206 - DNA, 1462 bp, Homo sapiens
aggcttctaaattgtattaacctttaccattctaattctttaaacttgaattattgtatttataattccatcttcatcaaagtaaacttttggttagcaaaaaccgtagaaatccccttattcaatcagattgggaccagtaataaacagattaatcacaaatttaagttagatggaggaatcataagaagtattcgatgtaagtccttaaaacttaactttaatttaaaagacttgtgcaaataaatttgccagaattttgatgacaaggtcaaagccttgcacggattcagagtgaagtttcttgtggaaactatgccaatgatatgttgtcatggatttcttgtttactttctgtgaagacaactggggtaaagcaatctgaaatcctagattacacaatttttcccatttgtttctagttgtcttgccaacagttaaggtgacagcaactgtttgagtttctcatttttccaacacatttagtttatttctcaaagaaacaacaatactaatcttgttatactcattttctcagtttacataatatttatttatttatttatttatttatttatttattttgagacagagtctcgcactgtcacccaggctggagtgcagtggtgtgatctctgctcactgcaagctccgcctcccgggttcatgccattctcctgcctcagcctcctcagtagctgggagtacaggcacccgccaccacgcacagctaatttttttgtattttcagtagagacgagatttcaccgagttagccaggatggtctcgatttcctgacctagtgatccgcccgtctcagcctctcaacataatatttaattaaatcgcataactacaagaacaagaacaaatggtgtaaacatatttaggaatgaacacagcttcctcttagaaactatacaatttctgtgatggaaggagaaatgtacaggcattaaaagcagctcaaaggctttcagtttgcagtggacatcagtcagtaagttgtacaggggtaccagaaagtgctgattgcaaatcagttaagtggaggtcagttaaggcagcatccactgtatcttaattcataaagtgaatgatctaaaactgggttcacttttgctataaaggaccagatgataaatattttaggctttgcaaaccatacggtctctatagcaaccattcaactgtaccaytgtatcaggaaagcaccatagatccatggatgtgctccaataaaactttattaaaacaggcagctggtctgagagtcatgtatatatcttgctgttttcatacaattttctaagttagtagttccctgcctttttaacaatcaaggattacttttaatcctctcctctgattttatgtttcaaaagccttaacaaaaacccacaaaatatatttattttgtaattttgggggggttcttattatactaataagtaatcaatg

SEQ ID NO: 49207 - DNA, 1462 bp, Homo sapiens
aggcttctaaattgtattaacctttaccattctaattctttaaacttgaattattgtatttataattccatcttcatcaaagtaaacttttggttagcaaaaaccgtagaaatccccttattcaatcagattgggaccagtaataaacagattaatcacaaatttaagttagatggaggaatcataagaagtattcgatgtaagtccttaaaacttaactttaatttaaaagacttgtgcaaataaatttgccagaattttgatgacaaggtcaaagccttgcacggattcagagtgaagtttcttgtggaaactatgccaatgatatgttgtcatggatttcttgtttactttctgtgaagacaactggggtaaagcaatctgaaatcctagattacacaatttttcccatttgtttctagttgtcttgccaacagttaaggtgacagcaactgtttgagtttctcatttttccaacacatttagtttatttctcaaagaaacaacaatactaatcttgttatactcattttctcagtttacataatatttatttatttatttatttatttatttatttattttgagacagagtctcgcactgtcacccaggctggagtgcagtggtgtgatctctgctcactgcaagctccgcctcccgggttcatgccattctcctgcctcagcctcctcagtagctgggagtacaggcacccgccaccacgcacagctaatttttttgtattttcagtagagacgagatttcaccgagttagccaggatggtctcgatttcctgacctagtgatccgcccgtctcagcctctcaacataatatttaattaaatcgcataactacaagaacaagaacaaatggtgtaaacatatttaggaatgaacacagcttcctcttagaaactatacaatttctgtgatggaaggagaaatgtacaggcattaaaagcagctcaaaggctttcagtttgcagtggacatcagtcagtaagttgtacaggggtaccagaaagtgctgattgcaaatcagttaagtggaggtcagttaaggcagcatccactgtatcttaattcataaagtgaatgatctaaaactgggttcacttttgctataaaggaccagatgataaatattttaggctttgcaaaccatacggtctctatagcaaccattcaactgtaccattgtatcaggaaagcaccatagatccatggatgtgctccaataaaactttattaaaacaggcagctggtctgagagtcatgtatatatcttgctgttttcatacaattttctaagttagyagttccctgcctttttaacaatcaaggattacttttaatcctctcctctgattttatgtttcaaaagccttaacaaaaacccacaaaatatatttattttgtaattttgggggggttcttattatactaataagtaatcaatg

SEQ ID NO: 49208 - DNA, 1462 bp, Homo sapiens
aggcttctaaattgtattaacctttaccattctaattctttaaacttgaattattgtatttataattccatcttcatcaaagtaaacttttggttagcaaaaaccgtagaaatccccttattcaatcagattgggaccagtaataaacagattaatcacaaatttaagttagatggaggaatcataagaagtattcgatgtaagtccttaaaacttaactttaatttaaaagacttgtgcaaataaatttgccagaattttgatgacaaggtcaaagccttgcacggattcagagtgaagtttcttgtggaaactatgccaatgatatgttgtcatggatttcttgtttactttctgtgaagacaactggggtaaagcaatctgaaatcctagattacacaatttttcccatttgtttctagttgtcttgccaacagttaaggtgacagcaactgtttgagtttctcatttttccaacacatttagtttatttctcaaagaaacaacaatactaatcttgttatactcattttctcagtttacataatatttatttatttatttatttatttatttatttattttgagacagagtctcgcactgtcacccaggctggagtgcagtggtgtgatctctgctcactgcaagctccgcctcccgggttcatgccattctcctgcctcagcctcctcagtagctgggagtacaggcacccgccaccacgcacagctaatttttttgtattttcagtagagacgagatttcaccgagttagccaggatggtctcgatttcctgacctagtgatccgcccgtctcagcctctcaacataatatttaattaaatcgcataactacaagaacaagaacaaatggtgtaaacatatttaggaatgaacacagcttcctcttagaaactatacaatttctgtgatggaaggagaaatgtacaggcattaaaagcagctcaaaggctttcagtttgcagtggacatcagtcagtaagttgtacaggggtaccagaaagtgctgattgcaaatcagttaagtggaggtcagttaaggcagcatccactgtatcttaattcataaagtgaatgatctaaaactgggttcacttttgctataaaggaccagatgataaatattttaggctttgcaaaccatacggtctctatagcaaccattcaactgtaccattgtatcaggaaagcaccatagatccatggatgtgctccaataaaactttattaaaacaggcagctggtctgagagtcatgtatatatcttgctgttttcatacaattttctaagttagtagttccctgcctttttaacaatcaaggattacttttaatcctctcctctgattttatgtttcaaaagccttaacaaaaacccacaaaatatatttattttgtaattttkggggggttcttattatactaataagtaatcaatg

SEQ ID NO: 49209 - DNA, 547 bp, Homo sapiens
tgtgtgtgtgtgtgtgtgtgtgtgtgtgwgagagagagagagagagagagagagagagagagagagagacagagagacagagagagagagagagcccggaaagtcgaggctacagtgaaagctatgttcacaccactgcactccagcctgggtgacagagcaaaatcctgtctcaaaaaaaaaaaaatggcaattaaaatttaaaaatagtatcatttttttcttttctaataacaattgccctataagcctttctggtatagaaaagccaagtagacttggctatatgagacatattttttcctttttatttataaataatgaaagaaccacaacacatacaacagctcagatgcagagcagcatttcttcaagtccttcattacctccgtccagaaacactttctttacttaacttcctcttctgtgacttcactattctttctctcctcctggcctctgaattttgtgcacactgccagtaagtactggactctcttctatttattttctacacacggacatatttggtggtcacgcctcatct

SEQ ID NO: 49210 - DNA, 501 bp, Homo sapiens
  misc_feature (1)...(501): n = A,T,C or G
atgcaatcaattataaggaaaaaaaccctgcagttactatgttttcaatggattgcgttaccaaattagccatcagcataatttggaaaagcaaaattgtgaggcatgaagtagtcttctgatattcatgtaaaagacacaaaataagtgcccagaaggcaaggtcagaggccacaacgaccacaggcaaaggagttcctttcagagagtagaaccagggacagccagacgggtcaaccaagaacccactcacctcccagagcagacagatgaatgactcccacccagcacagtgagaacttctctagatcagtctctgtagtgtgcttctcatgctttcctttaccaaagtgtggcttagagtgcatttatcctattcctgctcwgctactgcnaattnnnnnnnnnnnnnnnnnnnnnnnnnnnnnnnnnnnnnnnnnnnnnnnnnnnnnnnnnnnnnnnnnnnnnnnnnnnnnnnnnnnnnnnnnnnnnnnnnnnnta

SEQ ID NO: 49211 - DNA, 1290 bp, Homo sapiens
gtgttagcctggaggtcttgatctcctgaccttgtgatctgccagcctcgtcctcccaaagtgctgggattacagaggtgagccactgcacccggtctatataatatatttttaaaataaagtcatgcttgctcactatggaaaacttaaaaatgcaaaaaagtacacagaaaagaatgaatcataatttcatcataatgtattaatgctttcatttcttttacaaatatcattaaggttataccatacgtacagattttatcttgatttctttttacttcccacataaatactcatgttactaaaaaccctacaaaacagaagattctgcatcatttacttaatcagacttctctagtcttagatttggttaaaataacaatcataaaatccaactctcagagcacgtttgtaaaattagagaccctttggctatttggccaccatgtgtcytacatgggcaaagtggaaagaaaggaatctagaacttcaaggcttatcaatgtgaaccaaagcacttgttgggaagcagtggccaggagctcaggctaaaatgcttcctctttcctaccttatgtggtggtgttggccgaagtttatccatgattgacatgaatgaagtgtacttttggagaaaccttctatttcctaggtactggggagggcaatgattcagcagaggtcccatccttagttctatcagaaaagcagaagaggaattccttttctgatggaacagtccctaagacccacaaaagggaggctccaatggagtttatttgctagtagaagaaatgtggggagtcctgaggcataagatgaaccccaaaggaccacttgcaggtgtgagaagcgattacttttccaagggttcattaaatcacaccacttcgcttggagagggtctgcatggcaaatctcacttccctttttccaggctaataagcagaggctggagcggcaaaggccctggccgaggccacccaggctgcagtggaagcatggggtttacagcagaggctcctgtccccccatgggctcaggcacaggaattcctttctcggtttcagctggtgagggtttgaggtttctctttttgttggactcactggatattgaaacaaccaaggcaatggtttgtttttcatgtccccagatggagctggccagtgcctggggcagaaaacaataaacagcatcgggtatggtgtgtactgtaaggaggttggtgggttggattggggcttttgtggaactaaatccaccccatctgctattcttgcagttatt

SEQ ID NO: 49212 - DNA, 1290 bp, Homo sapiens
gtgttagcctggaggtcttgatctcctgaccttgtgatctgccagcctcgtcctcccaaagtgctgggattacagaggtgagccactgcacccggtctatataatatatttttaaaataaagtcatgcttgctcactatggaaaacttaaaaatgcaaaaaagtacacagaaaagaatgaatcataatttcatcataatgtattaatgctttcatttcttttacaaatatcattaaggttataccatacgtacagattttatcttgatttctttttacttcccacataaatactcatgttactaaaaaccctacaaaacagaagattctgcatcatttacttaatcagacttctctagtcttagatttggttaaaataacaatcataaaatccaactctcagagcacgtttgtaaaattagagaccctttggctatttggccaccatgtgtccwacatgggcaaagtggaaagaaaggaatctagaacttcaaggcttatcaatgtgaaccaaagcacttgttgggaagcagtggccaggagctcaggctaaaatgcttcctctttcctaccttatgtggtggtgttggccgaagtttatccatgattgacatgaatgaagtgtacttttggagaaaccttctatttcctaggtactggggagggcaatgattcagcagaggtcccatccttagttctatcagaaaagcagaagaggaattccttttctgatggaacagtccctaagacccacaaaagggaggctccaatggagtttatttgctagtagaagaaatgtggggagtcctgaggcataagatgaaccccaaaggaccacttgcaggtgtgagaagcgattacttttccaagggttcattaaatcacaccacttcgcttggagagggtctgcatggcaaatctcacttccctttttccaggctaataagcagaggctggagcggcaaaggccctggccgaggccacccaggctgcagtggaagcatggggtttacagcagaggctcctgtccccccatgggctcaggcacaggaattcctttctcggtttcagctggtgagggtttgaggtttctctttttgttggactcactggatattgaaacaaccaaggcaatggtttgtttttcatgtccccagatggagctggccagtgcctggggcagaaaacaataaacagcatcgggtatggtgtgtactgtaaggaggttggtgggttggattggggcttttgtggaactaaatccaccccatctgctattcttgcagttatt

SEQ ID NO: 49213 - DNA, 633 bp, Homo sapiens
tgtgctgacggcaagaatttcaacccactggatcttagtttgctgggctccgtgggggtaggacctgctgagccagactccttggctccctggcttcactcccctttccaggagagtgaatggttctgtcttgctggcattccaggtgccactgggatacaaaaaaaaactcctgcagctagttttgtgtctgcccaaacagccacccagttttgtgcttgaaactcagggccctggtggggtaggcaccagagggaatctcctggtctgcaggttgtgaagaccatgggaaaagtgcagtatctgggctggagtgcacagttcctcaggctcagtccctcatggcttcccttgggtagaggagaaaattccccaacctcttgcccttcctgggtgaggcgacgccctgccctgtttcggcttgccctctgtgggctgcacccactgtccaaccaatcccaatgagatgaactgggtacctcagttggaaatgcagaaatcacccraccttctgcgtcaatctcactgggagctgcacaccagagctgttcctattcagccatcttgccagcaatccctattaaatcgtgtttcctaagttttttgctttggtaagtttcttgtacaatctgc

SEQ ID NO: 49214 - DNA, 633 bp, Homo sapiens
tgtgctgacggcaagaatttcaacccactggatcttagtttgctgggctccgtgggggtaggacctgctgagccagactccttggctccctggcttcactcccctttccaggagagtgaatggttctgtcttgctggcattccaggtgccactgggatacaaaaaaaaactcctgcagctagttttgtgtctgcccaaacagccacccagttttgtgcttgaaactcagggccctggtggggtaggcaccagagggaatctcctggtctgcaggttgtgaagaccatgggaaaagtgcagtatctgggctggagtgcacagttcctcaggctcagtccctcatggcttcccttgggtagaggagaaaattccccaacctcttgcccttcctgggtgaggcgacgccctgccctgtttcggcttgccctctgtgggctgcacccactgtccaaccaatcccaatgagatgaactgggtacctcagttggaaatgcagaaatcacccaaccttctgcgtcamtctcactgggagctgcacaccagagctgttcctattcagccatcttgccagcaatccctattaaatcgtgtttcctaagttttttgctttggtaagtttcttgtacaatctgc

SEQ ID NO: 49215 - DNA, 575 bp, Homo sapiens
gtccagggtactttgctaaccaggtctgtcagactccagaatccatcagaaactgttctggaagggcctccaggtctgagcagaggtcatttggagagagaaaagagaaggccttactcccagcccctccagaaaatggaggaaatgcattctccaggatgctcagaagagggtctgagccctgttcctctccccaggagggaataaacatccaagcttttctggtggctgcctgtcatttatcagagatggaatttccttggcactttgggaaaaatagatgccaagatgcagaaagaaatagatttttttctttcccccagaagtagaacttggctcatacatgtgtggggcacattgatacaaatggaatgagaaagctctgggagccctggggactgmgggtgttgcttgcatctgagtgtgaaatgggttggggggctggggatcccccagcccattttccaaggcatatgtgtttgattattccacccgtgagtctgaagggggcttggtgactcctccctatgaacaggcaggattccaagagcttccggagagatgtgagcctgcaa

SEQ ID NO: 49216 - DNA, 647 bp, Homo sapiens
aaaatagctggcttgaattctctttggacagttaggctctttgtgtaattcaatctctctctgattataggtagctaggyagccattaacagcttccagctcactgcctttcctcctcaccagcatctttaatgcagtggagcttggcctaattacccaggggttggtggcttctttcaaaccaaggagaactcttccacggctgcctctaagctgatgcctggtgacatttacctcatttttgtgaagctccagaacaaagagatgataggacttcagagacacttgcagctggttccgggctgttcttcatctgcccccagcaaagggagttgatgaacagttgctctgcttgcttcttgctagtaaaaagcccaagctgctgaggtcatgtaccatcccagctagcctggcaatgcagagctgacattgtcagaatgtggggcatgggcttttgcaatccttggactcccactgtggggccgagaggatttctggaaaattcaggtagctggaatgggggtctatggagcccaacttgttaaaattgagcagatcttcttcaggatagtagagatgggaaacaaggatgtgatgtcaaacaagattggggtcaaatcccagctctgctccctaccagctgtgtg

SEQ ID NO: 49217 - DNA, 647 bp, Homo sapiens
aaaatagctggcttgaattctctttggacagttaggctctttgtgtaattcaatctctctctgattataggtagctaggtagccattaacagcttccagctcactgcctttcctcctcaccagcatctttaatgcagtgsagcttggcctaattacccaggggttggtggcttctttcaaaccaaggagaactcttccacggctgcctctaagctgatgcctggtgacatttacctcatttttgtgaagctccagaacaaagagatgataggacttcagagacacttgcagctggttccgggctgttcttcatctgcccccagcaaagggagttgatgaacagttgctctgcttgcttcttgctagtaaaaagcccaagctgctgaggtcatgtaccatcccagctagcctggcaatgcagagctgacattgtcagaatgtggggcatgggcttttgcaatccttggactcccactgtggggccgagaggatttctggaaaattcaggtagctggaatgggggtctatggagcccaacttgttaaaattgagcagatcttcttcaggatagtagagatgggaaacaaggatgtgatgtcaaacaagattggggtcaaatcccagctctgctccctaccagctgtgtg

SEQ ID NO: 49218 - DNA, 576 bp, Homo sapiens
gtaactagcagtaagggctttggttcctgcttgaagagaaggagccagcccagtgataactaaggtgtcacccccaaccctggaaccacatttgtcccccagccgttcctgtaggaactgtggtctctgctgactcaccttaccctctggcatttgctcctcccttgttctgtacatgcattgctctgatcaccgatgtgttcttggctcattctgcttgtgcttttggcctctgttaagcgtccacatcagtgccatccaacagaaatttctggaatgagagaaatgctctataatctgtgctgtccaaacagcagacactaagccacgtgrctttttaatctttttattgtccaaggggaaaaaaaaagggatggccaaagagaggttcttgtttataaacgggcctttataacttttagggaagagaaacctaaaatattgaaactgtaatcactcacttttattctctttcatcatcacttgattctgttaaaagaagcttttaaaagacccacatgatttaaactatcttttaaaaccatgtagataaacaagaattccaagatgtcagca

SEQ ID NO: 49219 - DNA, 551 bp, Homo sapiens
tacccaatgggtagatttgtattttgccccatcagatatcttaaaacctgcaggttttaaaatttagtcaagaagttaagaccagcaacccagaaggtgcccttgaatgtttatatccagccttcgtgggcagtgtctatttgcaaatctcagggttttaactctatttcttccatctccttcaaagaacccctgatcctgaattctcccaaggaataaaatcctgatcayggcactcatgaataactaagagtgggctgttattacctgagcttgaataaaggtttttttttttattcctccaagctgttcctagcctcccagaggtacataatccatactggagtctgggtacagaggggttgaagtaaatgatctttgatgagctaaaacattggaattcatggaacttggaataatctctgacaactacaagcttgtcctgagacatttagtagaaaggtaaatgatagggtggggtttcatctttgtcttaacttgaatatttaatgcctagaaatggccttttaaccctcttgaacaggtgccac

SEQ ID NO: 49220 - DNA, 532 bp, Homo sapiens
ggtgtggggcagaggtggggccaggggcggggcgcgcgttccctcaggggccgtcggagcagctcctgtccmgctgggcgttgggccccgccctcctctcagactagggatgccccgcaaagcctgcccccgccagccccgaaacggccttccccaggccccgggcagcaaaacggactccacacagacgcgcgctgctggaaactcgccccgccagggcctcaggaagatccccggaccccccgcacccggcccggcccggcccggcctggcctcccctccccctcctcgccggcctagctcaccctcctgactgcgagacaaaggccgcggcaccggcagccgacactgcgccggcgcgagcctaactccatttcccagagagccgcgcgcgcatttccggccgccctcccccacctcgctctcgcccttggcgttcgtgagctctcagtgctgctggagctggagtgactgggcctggtgaaacagggcgcgcggggtgcctgggcatcaacgcgggataagtgccgct

SEQ ID NO: 49221 - DNA, 580 bp, Homo sapiens
agtgtgagagctgaaagggactgccatctcacagaagcaaggggcttcagaagaaggagacagggaaaccccagcgccctggcatacaggagaccagtgggtaaaacccggccctcactcttttcctgccagtgcctcccattgcccaaacccagtggacaccaggactcaagggagctgctgatataccatgtaggtcagcctcctgcgacagagcagagtggagaaggctgaggaggcacaagacagctgcccatagggtaaggtgagtcagaccctggaaaatgaggctgtgactagcaggggccaaatgggttttatcttattttatttttttaatattctgctaacttgacctcattttttctttttggatcagagaagatggcagattgtctaccttgattctaactagtcaataaataaagatcagctaattggaaaaaaaaaaaagcaattagttaattcttgaattagtatttcctttagatatttggcataggttgttatgttttcaggaaaggtggtaaaggtrggctagatgtctgcagtcatctgtgggcctccctgcaggctgcat

SEQ ID NO: 49222 - DNA, 633 bp, Homo sapiens
aagacgatccccacaccttgcctgtgagagcaaaggttgggggttgatacaagcgcacgtagtgatcaaaatgaatgagccaactcaatgctctcacatggatggatttgaaaaacaatactgggtgaaaaaattgagttgcagaatatcacccatagtttgctcttttataggtaaatgaaacacacaagaaatcatctatgatttatgaacacatagagacagcacaacgtaaagacagactggaagactatgacccaaattcaagatcaagggctgcctggagggaaggaggaaggtccacagtgagtggctaccaagagggattttggctgcagctaaaatgttttacttcttttatgtgagagaatcatgcaaatatgagaaattatcaacctctgttaattctggtggatggttttatattctctgcatttttaattattgaaaagggcatgagtcccaaagcaaatacaattaaaattcaccatgctmaaaaaaaaaaaaaaaaattcatctttgtcactattttggacccaccttccctgagggcacagattgggtttaccttgtcttttgctacaaatccagagatcagcacaggctgctggatgaatggatctttttaatgca

SEQ ID NO: 49223 - DNA, 549 bp, Homo sapiens
tgcagagaataaaatcctgctatgggctgtatttattaagcgcagttttgacaagcaataattatgtaagcacaacattccctttcakaattagttgggttttttttaagctttcaccattcacaatttgcccccaaaatgttaaccataatacaataccacagatgcaaaacattcagggggtcttcgtgcacattttcagccttctgcaaacacactctgccctcaggaatcagtgaatctttgagacaagctctcccctataccattgcccacctgcaccccaggccacaaacaaaatggaagatacaaaacgaggtgatgcaggatggtaagaaagagagctttgggtagtgaccaaagagaaagtagatctgagagactgcaggtgatgaaagaattaaaaatccgagacaaagaaagagctaggagggtcaaaacttcaggagccctgctttcctgtctccagtccttgatctggctgaaactgtgcagaagtgaaagcaagggcctgtgacaggtgactctctcacagttctttctgcaaga

SEQ ID NO: 49224 - DNA, 600 bp, Homo sapiens
actcatgactctgtgtccaagttgactctcccaactattgctagagaacacccagaaaagagcccaggcttcggagagacaaggaatgcctgggttttagttcagcaacaaagttgggcctgaaacatgaagaccaatgtagagctaaactcctttttattcttttctttttttaatttctataacgattcagttgaaacaaagactatcacagactgtaagtcatagactctatatggatgggaagatgtccttactgtggaaaggaccaagttgcagatctagttcttttatgtgtgatctcggatgagtttcttacctttctttaactgtttctcccactgtaggaaacagatttaacttaattcaatatttgttgcactttcatctaagaataaaagacccagtctcctaggtaagtcctttaaacaactcaaagacgtcatgagagcaagagctagactggatacatttttgatattgggctttgcttaaaaggtaggaccaggaacctctcttctgctgaatcaacacagtgtcattacctccgtagacacgggccaagtgctgccratgaggaaaaggtgggatcccaggaaa

SEQ ID NO: 49225 - DNA, 590 bp, Homo sapiens
tagagtacgagcaagttgtactttggggttagcagactcctgacactgagatttgatccactgctcacttctttctagatgttgattatagtcttttctccaattgctaagcccctccccaactttargcttatgttctttgtccttgcttctttatgtccgggtcccatgaatgagtaaggtatttctttcctggtggaagtggaagtgatctgctttgagccttagaaggaaccagcagctgactgaagagagttagggatggttgtatgggcagatttcttgctgcttggggtagccaaaaggagggtgagggagagattgagagaataaatgagaaatatttcttaaagtgtaaggcaatataaaaggtagttgtaggtcaagatctgggcagtggagttaagttctaagtgtgcaaagtccaactaagtgatggaagtgatgtggacataaaggtctttgacattaagaactcttgggttaatctttaaatgatttcaattacactcctgaaaccatccaataaaatataattaaaaagaaaaatttgggccagagagacatggtatgaaaggacactatttgaa

SEQ ID NO: 49226 - DNA, 788 bp, Homo sapiens
gctggtaagcttgtaaaaattctgcctccacagtcaaaactactgacaaatacaagactcttaacaaattaataggtcaatgtggttttgaagtaggaggtgggacctgactctggaggcaggttttagacaccaggccaaattgagggctagctaaaayggggaccagggacaggatggaagcagtgtaccatgtcagtttaccattgtgatggcaacaccttggagttaccacctctttctgtggcaatgacctgatgacccaaaagttattccccgttccctagaaatttctgcgtaaactgccccttaatctacatgtaattaaaagtaggtataaatatgacccccaaactgccctgagctgtgcctctcagcacagtgcctggggtagcccttctctgcaggaggaatcatggagctgtaatactgccacttcaataaagctgttttcttctaccctacctccagctcacccttgaatactttcctgggtgaagccaagaacccttgaaggctaagccccactttggagcttgcctgccttgcatcagtttcatcttcaatgtattcatttaatatatacattcaatatatttcccaagctattaaaatttttggttagtattggggtatagtaatgttgtgatgtatatgataaaactagtatttgatcatagcatgatgaaacagacaattctctccaattcttacaaaagctggtaaaacaatctgccaaaatagctgcttggcattttggcaaaataactgattgacttacagccatt

SEQ ID NO: 49227 - DNA, 788 bp, Homo sapiens
gctggtaagcttgtaaaaattctgcctccacagtcaaaactactgacaaatacaagactcttaacaaattaataggtcaatgtggttttgaagtaggaggtgggacctgactctggaggcaggttttagacaccaggccaaattgagggctagctaaaatggggaccagggacaggatggaagcagtgtaccatgtcagtttaccattgtgatggcaacaccttggagttaccacctctttctgtggcaatgacctgatgacccaaaagttattccccgttccctagaaatttctgcgtaaactgccccttaatctacatgtaattaaaagtaggtataaatatgaccccmaaactgccctgagctgtgcctctcagcacagtgcctggggtagcccttctctgcaggaggaatcatggagctgtaatactgccacttcaataaagctgttttcttctaccctacctccagctcacccttgaatactttcctgggtgaagccaagaacccttgaaggctaagccccactttggagcttgcctgccttgcatcagtttcatcttcaatgtattcatttaatatatacattcaatatatttcccaagctattaaaatttttggttagtattggggtatagtaatgttgtgatgtatatgataaaactagtatttgatcatagcatgatgaaacagacaattctctccaattcttacaaaagctggtaaaacaatctgccaaaatagctgcttggcattttggcaaaataactgattgacttacagccatt

SEQ ID NO: 49228 - DNA, 788 bp, Homo sapiens
gctggtaagcttgtaaaaattctgcctccacagtcaaaactactgacaaatacaagactcttaacaaattaataggtcaatgtggttttgaagtaggaggtgggacctgactctggaggcaggttttagacaccaggccaaattgagggctagctaaaatggggaccagggacaggatggaagcagtgtaccatgtcagtttaccattgtgatggcaacaccttggagttaccacctctttctgtggcaatgacctgatgacccaaaagttattccccgttccctagaaatttctgcgtaaactgccccttaatctacatgtaattaaaagtaggtataaatatgacccccaaactgccctgagctgtgcctctcagcacagtgcctggggtagcccttctctgcaggaggaatcatggagctgtaatactgccacttcaataaagctgttttcttctaccctacctccagctcayccttgaatactttcctgggtgaagccaagaacccttgaaggctaagccccactttggagcttgcctgccttgcatcagtttcatcttcaatgtattcatttaatatatacattcaatatatttcccaagctattaaaatttttggttagtattggggtatagtaatgttgtgatgtatatgataaaactagtatttgatcatagcatgatgaaacagacaattctctccaattcttacaaaagctggtaaaacaatctgccaaaatagctgcttggcattttggcaaaataactgattgacttacagccatt

SEQ ID NO: 49229 - DNA, 788 bp, Homo sapiens
gctggtaagcttgtaaaaattctgcctccacagtcaaaactactgacaaatacaagactcttaacaaattaataggtcaatgtggttttgaagtaggaggtgggacctgactctggaggcaggttttagacaccaggccaaattgagggctagctaaaatggggaccagggacaggatggaagcagtgtaccatgtcagtttaccattgtgatggcaacaccttggagttaccacctctttctgtggcaatgacctgatgacccaaaagttattccccgttccctagaaatttctgcgtaaactgccccttaatctacatgtaattaaaagtaggtataaatatgacccccaaactgccctgagctgtgcctctcagcacagtgcctggggtagcccttctctgcaggaggaatcatggagctgtaatactgccacttcaataaagctgttttcttctaccctacctccagctcacccttgaatactttcctgggtgaagccaagaacccttgaaggctaagccccactttggagcttgcctgccttgcatcagtttcatcttcaatgtattcatttaatatatacattcaatatatttcccaagctattaaaatttttggttagtattggggtatagtaatgttgtgatrtatatgataaaactagtatttgatcatagcatgatgaaacagacaattctctccaattcttacaaaagctggtaaaacaatctgccaaaatagctgcttggcattttggcaaaataactgattgacttacagccatt

SEQ ID NO: 49230 - DNA, 788 bp, Homo sapiens
gctggtaagcttgtaaaaattctgcctccacagtcaaaactactgacaaatacaagactcttaacaaattaataggtcaatgtggttttgaagtaggaggtgggacctgactctggaggcaggttttagacaccaggccaaattgagggctagctaaaatggggaccagggacaggatggaagcagtgtaccatgtcagtttaccattgtgatggcaacaccttggagttaccacctctttctgtggcaatgacctgatgacccaaaagttattccccgttccctagaaatttctgcgtaaactgccccttaatctacatgtaattaaaagtaggtataaatatgacccccaaactgccctgagctgtgcctctcagcacagtgcctggggtagcccttctctgcaggaggaatcatggagctgtaatactgccacttcaataaagctgttttcttctaccctacctccagctcacccttgaatactttcctgggtgaagccaagaacccttgaaggctaagccccactttggagcttgcctgccttgcatcagtttcatcttcaatgtattcatttaatatatacattcaatatatttcccaagctattaaaatttttggttagtattggggtatagtaatgttgtgatgtatatgataaaactagtattygatcatagcatgatgaaacagacaattctctccaattcttacaaaagctggtaaaacaatctgccaaaatagctgcttggcattttggcaaaataactgattgacttacagccatt

SEQ ID NO: 49231 - DNA, 1494 bp, Homo sapiens
caaccatattccctgatcattattagagaatgagagtagcaactagagagaaaaagagaaagagacagcatgagaatgaactgggattatgwgttgagactctaaataccccaatcactcactcctggacttcccagttttttgtcacctcagctaattccaatacaattcccattttgccagagctagtttggaatacttttctatcacttgcaactgaaaatttccagtgaatatataaacccaggtaactatccagctcacttctcgttaacctactcgattatgtgttcagtttcttccccatcctcaccccactgattgagaaatacctattgcacacattcattacagccatagttccacagcagcactgtttgtggcctatccctagactaaacaactgtaacaaaccttggtcaactagttcctttcctaggaatttggaatgggattttccaactggtctctagaatggcgaaggtcctgtgagtagctatgttctgtcattgtgaactgggaagcagagaaagttagaccacaacctgagagaagaatgatggtagaaacagagttgaaaaaatagaggaaaaaatcctgacaacatttaagtccttgtttccaatcaggtcccaaggcccagccacactccagcccattcacgagagtcaaatctataaccttactttagtctccgtttttattgcttttacttatgtaagggtaagaatttggtagaagttagtactggtttagcagggcaggtacagaacttgcagtgaggactcttaggttcttgttctggactgcttctaactcaggcatgcctccagtcacttggccacactatatttctcacctaggaaataaatatgaaaactaccctacccagctcacatgggtggcaaggactgagtgattgtatattcagagaaaaacaaggacaggggaatttcaatgaattccccatggaactgaaggcttttagcccagccatcacttccctggtaagagccatagttcactagaacatacaatctaaaagaagagtgaatttataagagaatcacttgtacaatgccatgtgaaaatccaaactgatctttaaaaatttcctacctcgtttattctaaaaggcttttctgtggtgttttgcactaagaattgatgttcccagattcctttaaagtatagggcgttcaccagaatcatcctggttgtggaatccacagagtcatcaggcaggagattctggattttacctgtaagaacaaaaggcaggttgcaaatgacttgtagaaatatgtatattttaactaaagacaaccaggcttctattttttctggaactataaaagttttctttaaaagtcctggtttttgattttctggaaatggacaagtactattcctgtccagaatagctgctgtgaataaatagagaaaccctgaagaaataatatgctggactgtcagtaagcattattccacata

SEQ ID NO: 49232 - DNA, 1494 bp, Homo sapiens
caaccatattccctgatcattattagagaatgagagtagcaactagagagaaaaagagaaagagacagcatgagaatgaactgggattatgtgttgagactctaaataccccaatcactcactcctggacttcccagttttttgtcacctcagctaattccaatacaattcccattttgccagagctagtttggaatacttttctatcacttgcaactgaaaatttccagtgaatatataaacccaggtaactatccagctcacttctcgttaacctactcgattatgtgttcagtttcttccccatcctcaccccactgattgagaaatrcctattgcacacattcattacagccatagttccacagcagcactgtttgtggcctatccctagactaaacaactgtaacaaaccttggtcaactagttcctttcctaggaatttggaatgggattttccaactggtctctagaatggcgaaggtcctgtgagtagctatgttctgtcattgtgaactgggaagcagagaaagttagaccacaacctgagagaagaatgatggtagaaacagagttgaaaaaatagaggaaaaaatcctgacaacatttaagtccttgtttccaatcaggtcccaaggcccagccacactccagcccattcacgagagtcaaatctataaccttactttagtctccgtttttattgcttttacttatgtaagggtaagaatttggtagaagttagtactggtttagcagggcaggtacagaacttgcagtgaggactcttaggttcttgttctggactgcttctaactcaggcatgcctccagtcacttggccacactatatttctcacctaggaaataaatatgaaaactaccctacccagctcacatgggtggcaaggactgagtgattgtatattcagagaaaaacaaggacaggggaatttcaatgaattccccatggaactgaaggcttttagcccagccatcacttccctggtaagagccatagttcactagaacatacaatctaaaagaagagtgaatttataagagaatcacttgtacaatgccatgtgaaaatccaaactgatctttaaaaatttcctacctcgtttattctaaaaggcttttctgtggtgttttgcactaagaattgatgttcccagattcctttaaagtatagggcgttcaccagaatcatcctggttgtggaatccacagagtcatcaggcaggagattctggattttacctgtaagaacaaaaggcaggttgcaaatgacttgtagaaatatgtatattttaactaaagacaaccaggcttctattttttctggaactataaaagttttctttaaaagtcctggtttttgattttctggaaatggacaagtactattcctgtccagaatagctgctgtgaataaatagagaaaccctgaagaaataatatgctggactgtcagtaagcattattccacata

SEQ ID NO: 49233 - DNA, 562 bp, Homo sapiens
gaatcaaaattccttttaccatcacaaatactgtttcctcttgactttatgtatttatctagttaattgacggarggggagtggtggggcttttcttaactgattgcaggaaactctgaaattaaacaaagaggtttatccgaactctgaagttgttccatttctgtttgtttttagagacagggtctcactctatcacccaagctagagtgcagtggtacaaccatagctcactgcagcctcaaactcttggcctcaagcaatcctcctgcctcagcctcccaaacagctaggactcgaggcacatgccaccctacttgtctaattctttatttctattttgtagagacagagtctatgttgctaggctggtcttgaactcctggcctgagcctcccaaagcactagaattataagtgccagccttgaagtattcttttaagggtatgctctgtgtctttttatgcgaaacacttggttatttggagtactctgggaagaggcacaggtatgaatgcctgaggaagcctcacttcctctccaacaaacaagtggcctgtct

SEQ ID NO: 49234 - DNA, 622 bp, Homo sapiens
ccaccccagagcagaactgtcactggtaaataaatcatcgaagctctacactggacgtgccaatttcagcaggagatsatgagtgcatttatctgcttggcgacacgctggatgtcttcaggctgtgaggggctatgaaaatactcctcagcatgcactccgcccgaggctggttccgcggcatgggtggcgggagtgggaagagcatctccttccagaactgtgttcatcttaaacttcccacagtccccctgattcaggggcctgatgctttctatgccttttaaaataataataaccatcatcgtcatcataagtagcgtgtattgagtgcttactatgtgccaggcattgtgattttaaaaaatatacattatctccctaactggctaaaatgttgagtctctgctgcataggaaaatgactcctttgaggttgtctattctttacaatgattcccaaacactgagtgatatctaagagaggtggtccagctccaggtcagagcttaacttccaagaacttccctaagttcccactatcaccagcagcagtaaccaccaccactccaagcctcctctctctgattagactcccaaaaggagacaacagaggatagtga

SEQ ID NO: 49235 - DNA, 622 bp, Homo sapiens
ccaccccagagcagaactgtcactggtaaataaatcatcgaagctctacactggacgtgccaatttcagcaggagatgatgagtgcatttatctgcttggcgacacgctggatgtcttcaggctgtgaggggctatgaaaatactcctcagcatgcactccgcccgaggctggttccgcggcatgggtggcgggagtgggaagagcatctccttccagaactgtgttcatcttaaacttcccacagtccccctgattcaggggmctgatgctttctatgccttttaaaataataataaccatcatcgtcatcataagtagcgtgtattgagtgcttactatgtgccaggcattgtgattttaaaaaatatacattatctccctaactggctaaaatgttgagtctctgctgcataggaaaatgactcctttgaggttgtctattctttacaatgattcccaaacactgagtgatatctaagagaggtggtccagctccaggtcagagcttaacttccaagaacttccctaagttcccactatcaccagcagcagtaaccaccaccactccaagcctcctctctctgattagactcccaaaaggagacaacagaggatagtga

SEQ ID NO: 49236 - DNA, 575 bp, Homo sapiens
ataacctattgccctttaataatattttatttagggaatactaatattcaggaacattatagcagaaattattttaataccttcgaccattaaaaataagattttartgatatttccactctcacgttttcaaatggtaatctgtaatttatgtagacactctgccctcaaagagggagcctaaccctggctcctgacatgcggactgtgcattgtgatgcccttccacatgtacagcatgaaaggaggaaagagcagctgtatggtagagaaacctgacaaacactccaggtgatcacgccaacactgacgttggcgttacagtgctataatgtgccggaagtgacactctaccctgtggccctcctctcccaaacccttaaagttagtctaatcatgagcgaaaacagcagacaaatcccagtcaaggagaattctgcaaaatacctgattgttattcctcaaacttgtcaagatcatcaaaaacagagtcaaagacactgtcacagccaagaggagcctaaggagacacagtgactaaaggtgatgagacatcctgggtgggatcctgggac

SEQ ID NO: 49237 - DNA, 575 bp, Homo sapiens
ataacctattgccctttaataatattttatttagggaatactaatattcaggaacattatagcagaaattattttaataccttcgaccattaaaaataagattttaatgatatttccactctcacgttttcaaatggtaatctgtaatttatgtagacactctgccctcaaagagggagcctaaccctggctcctgacatgcggactgtgcattgtgaygcccttccacatgtacagcatgaaaggaggaaagagcagctgtatggtagagaaacctgacaaacactccaggtgatcacgccaacactgacgttggcgttacagtgctataatgtgccggaagtgacactctaccctgtggccctcctctcccaaacccttaaagttagtctaatcatgagcgaaaacagcagacaaatcccagtcaaggagaattctgcaaaatacctgattgttattcctcaaacttgtcaagatcatcaaaaacagagtcaaagacactgtcacagccaagaggagcctaaggagacacagtgactaaaggtgatgagacatcctgggtgggatcctgggac

SEQ ID NO: 49238 - DNA, 603 bp, Homo sapiens
tgatctgggctcatgatttttctttataaaagcctctctggattcgggcatagccaagcaccaagcctcactctcccwgtgcacccaccttaaacctcacccatgaatttcacacaattaaagagacttagatatactgcaggtaatcatgtgtcttcactggatggtaaggctcttgaaagcagagtttatagcaatccaatttctgtcaactcagaagtacttgttccagcaaggccctagggcctcctgataacatgtagaaatgacaatgaccagtcacaagaaggtaagctctgttcaccaaaaaaagttccccactctcctagaaacaacaatgcaatagactcagaaattccaagtacttaatacatagcttaactgaaatcaagtttccagacacgatgaactctagaaaataacatacactgaagctgtagaagatgagttttatttatccaatttatgagttcacaaatcataaatctcagtgactccgagtagtttgggcaggaatgcattccaaaactaccatctgggtcatgctagatggagaataaatctaatgcttaccacagattcacattctctctataataagct

SEQ ID NO: 49239 - DNA, 651 bp, Homo sapiens
tatcccaactttgtcaataattagcttagtaatattggcaactgatttaacctactgcaaccataatttgcttagctgtaacttggggatttagctgctagaatgatggtgatagcattttagggtttagtacatagtaaggtgtaaataaaaattagtttttggtattagttttccttttattattatatttttatagctaccactactcagtcatcttaaagtgtgcttgggaaagtcctagtgtgtcacaaagctttgggggcttcctctgcctttgagtctgaaagctacagttcctgattaccctstaaaataacttcggctagaaaaactctgatgttggccgggcacggtggctcacgcctgtaatcccacactttgggaggccgaggtgggcagatcacctgaggttaggagttcaagaccagcctgaccaacatggagaaaccccgtccctactaaaaagatatatatatatatataaaattagctgggcagtggtggcaaatgcctgtaatcccagctactagggagactgaggcaggagaatcacttgaactcgggaggcagaggttgcagtgagccgagatagagccactgcactccagcctgagggacaagagtgaaactccatctcgaaaaaaaaaa

SEQ ID NO: 49240 - DNA, 606 bp, Homo sapiens
aatgaagtgagtagttgtaaaggtaaagatgagaaatctacatgagctggcttgaaatgacaccacagaaaggatcctggtggacttgaatagtgtataatattggactgagcacaacaatgagaactgctagtaagagctttcttcccagtaataatatactgcagatattgtaggtttgtttccagaccactacaataaagcaaatatcgtgatgaagtgagtcacatgatttttttttwttttatttcccagtgcaaataaaagttctgtttacactcttctgcatatggatatccagttttctcagcaccatttattgaagaggatactctttcctaatgttcttggcacttttgtcaaaaatcagttggctataaacatatgaatttatttctgggttctctattctgttctattggtctgtctatgtgtctgttttcataccagtaccatgttgctttggttactatagccctgtaatgtattctgaactcaggtattgtgatgcttccagatgtgttatttttgctcagcattgctttggctattcaggctcttttttggttccatacaaattttaggattgtttttcctatgactgtg

SEQ ID NO: 49241 - DNA, 1465 bp, Homo sapiens
cagggcctggcagggaataggagggaagggagagcatcaggataaatagctaacgtatgtggggcttaayacctaggtgatgggttgataggtatagcaaactatcatggcacacgtttacctatgtaacaaacctgcatgtccttcacatgtatcccagaagtttaaataaaataaaataaaaaggtaaattggtagaagaaatgcctcaggtcattttgcagattcctcttggtttatcagactgtaatgctatagctaatgttggacagagtaatgagaagcttctgaagcatcattctttgtcctgtggtgggccagggtatggcacagattgatttgattttaaaatcttttgaaaacctggaaattgcaaatgttacaagcagcatcgtgactattacttttgaatataattaaattggatctctctaattcgactttattatacacttcttagagttagccttttgagtgctatatttacatttgtacatatcaatatttgaaataaataatttaaaaaatgggacaataacacaaattaatagatgacgactacctcatgctttataaaatggacataaacctggtaacagattaaatatttgtaagagtaaattctaattttcatttattcaataaaggcagagatgcctccagagccccggtttgacatgtctgcaacacagctcctggtctgtcttgtgggatactagaagatttctggggactgccagctctgtctacctgtgccagtactcttagcattgcaaagatgctgatcacctgcgtctaggaatcactgatctggctgccttggcctcccaaagtgctgggattacaggcgtgagccacccacctgaccacaaggaagatatttctaaccacattttacaagggtggaaatttaggctcagagaagttaatggaaattatttatatttgaggctctgggttgtttacaacaaatcaattaaagcttattttagttttctaagttcaaaattctgtaaagtttattagacaagttgataaatttttagcctaagttctttgatagaaactggaagggccatataaatagtctagaactaatgcaatttctttttgggagaagggttagaggaaaaagattttttattttttattaatttaattttatttttttgagactgagtttcgatcttgtcgcccaggctggagtgcagtggcgcaatcttggctcactgcaatctctgcctcctgggttcaagtgattctcctgcctcagccccctgagtagctgggattacaggcgcctgcaaccacgcccagctaattattgtacttttagtagagacggggtttcaccatgttggccaggctggtcttcaactcttgacctcaggtgattcacccaccttggcctcccaaagggctgggactacaggcgtgagccacaatgaccagccatgattttttt

SEQ ID NO: 49242 - DNA, 1249 bp, Homo sapiens
aaaaagaaaagcacatttggttggcagcagaggcccagggaaagagtgcccatttcccacagcatcccacaaaacagaaagagtatagacaagcttcttactgaaattttggagaagggaatcctgagaaatttccagttagctaccaatagtaaattgaaattcattgcaccctgcccgtagctacttaatttgatatgagtgtaaagaagccattccactttcctcaatcacatgcaatcctgctaggtcaatcggccaagcagcgtggggagggcagtgacacccaggcatctatccctgcaccagtgtttatgaagggcctgtggtgtgctgacccttagccggaagctgggcagcagtggtgggcaaggcaggtccagtttccactctcatggaggaaacagagtaaaccaagaatacatgcttatgaaaattcataaatgcttatgaaaatccagatatagaacaaagttggagaatatgataagggagggaggtcagctgctgcagtggtcccctttgggggaggggcatttaagtgagacctaaatgatgaggcagagggagccatgtgaagatctaggggaagagcgagtcagtggggaccaacaggcaagcccatggctggcagggctggggatcatggagggcagagtgggggtggtgaggctcaagggtcagcagcagggagacaccaacatgtctttccatcttttagacttcagtcattccactattttttttaaaagttatacacaatctcattttaaaaaagtaattcttactaccagtctcttttccactgggacaggtctccccgctgctaaaaaatggcatgttgttggaactttggtcagggtggcctttggttgaggtggatatggccatttgcattttacagacaagttaattgaggcccagaaaggttgagagactcgcccagggttgcaccatgagtggtagagctgatttgaacctccatcttgtgcttttccgtcttgccattgctccagaaaactgaattccaggctttttaagaaagcatagagttccctgggtctactaagaaccatctggcagtccagccaagaaaaggggcctctgtaaagcagtgaactcagcgtgagcttyggtaagtctcaactctgtcctgttcttgggcagggcatttgtgtttcagtcttccctacctggggcaagtgagtgacccagggcttggagcccaccccgacctctgtagctgtga

SEQ ID NO: 49243 - DNA, 600 bp, Homo sapiens
gcaagattccatccacaaagatgatgttcagctgccctctttcctccaactctcctggtttggactccacgcacagttctagtcctggaagttgtctcactcactccgggcatcttctactcaacactggtgagaccaacactagtgagaccctgccctcatccactgggctgggtctgactttgtccgttgcttctccaatacccatatgggccctgctgcctccaatgttgtcttactgggtgtttactggaatatawaaccatcacaaagttcagcactatcttctttaccctcttacaatcatccagttagagcagactgctggattgccacagtcgttttcatcaccatagtgtatttcctgggctctccaggcacagtggcaacggtcaatccaggccactggcatttgatgggcgggaaacaacctgaggaatgacactgcacattgcaaagtcagcttcttgggagtttggcagaagtttaaatattctgctttcctggttgggtggagacaggaaagacagtggagagaagaacagattagaaaagcatcatagtgttggtcccagtcccagaatcctcttacatgtctgg

SEQ ID NO: 49244 - DNA, 585 bp, Homo sapiens
tattcattcttttgataaatatgtattcagtcagtcattattgtgggcattgcggggatagtagtcaggagcttacattttagaaggggaagataaatcagaaaacaagtaactcaatacggaatttaatttcagatcataataggtgctatgaagaygacacaatatcatgggaatgacggtgactattttaagtagaaaagtcagagaagactctcaaggaggagacaccagctgggtagcctcaagcaagagcatctcaggcagagtatgtgcaaaggtcttgagatctgctgttgtgtgcccctttatccaatgtcacaaaggctggcgatattctcaaggtcccctatctcgcatcacacaagcatacatcactccattgtatccaaaggcacacaccacatccgggaagccaaggttgtctctggcctacacagcacctcttctctctcctcgactcttgcctctttttttttttttcctgttgccctatacaacttatcttcctacccagctacactgccagcagcactttctccttcctcaggcaagtatggtaaagtgctgtgggctgtaagtggg

SEQ ID NO: 49245 - DNA, 242 bp, Homo sapiens
taatctcttctccctctgtagcttttaaattacttatgtattcatttatttgtagaaatgggatctcactatgttgcctaggttggtcttgcactcctgctcaagcaaaactcccggctcggcctcccaaacacatgacayatccacctatatgctgcttacaagaaaatcattttacctctaaagacatatatagactaaaagtaaaggaacagaagaagatatttcactcaaccagaaac

SEQ ID NO: 49246 - DNA, 585 bp, Homo sapiens
agggctcagccaggtgccataagcgtgtggggcagaaatgcccatgtctacctggaaaggtggcctggagagatggaggatattctgggctggaatatccttagcctggccgtgaggggtaaacgagcctggcctgatcagggatggccgagcagcgggagggtggggtgtggcaggggatatggaagaacgaagccaggtgaatcaggtggggtgggatcagccgagtcttgatggaggagtctggtctctgctgatgaatacctgcaaatcaagcagccagtaagcattcttcaaagtgcagttgacatgggaggaaatctttggaaaatgccacttggaagatgtaatgttaggatgggactcacctttgccttctcatatctgamttaccagttgctcaggtaggaaaccttcagggggttatgaaatattacagtagacccttaaaaaatgagtcctagattgaggtaggggactgtggttctgttgtttataagccatgtgctattgacaagtcatgtgaccttcctgttgcatattttgttccccaaatgacgtcagcatttatagcccatgtcccca

SEQ ID NO: 49247 - DNA, 567 bp, Homo sapiens
ctcccagtccctgccctttctctgccygttgacatcctagatgtatcacaacccggctcagaagtcatctctttgaagcctcctttttggtctaactaaaaaccctggggcatttttagtgacccccaaaaggggcattcagagacacactcttgtcaccatctggctttcttccaaattctttgtgaacacaccatctttccatgtgtcctgctttctgcatccagcgccatggcacctggcacagcagggatgatcctctaatgagtgttcacaacacacatgctctgtcttccttgccacagcacctgcagaaggcagaattctgagatggctctcatagcctttgccctccgatgttaatgttttgattatgtgacatggcaagaggaattctgtagatgaaattaagattactaatcagcagaccttaaggtaggagatgggtgggtctaacctaatcatgggagccctttaaaagcagagagttttctttggctagtggtagaaaaggcagtcagacaggtttaaggcacgaggcagacttggcttgagggaggttttccc

SEQ ID NO: 49248 - DNA, 567 bp, Homo sapiens
ctcccagtccctgccctttctctgcctgttgacatcctagatgtatcacaacccggctcagaagtcatctctttgaagcctccttwttggtctaactaaaaaccctggggcatttttagtgacccccaaaaggggcattcagagacacactcttgtcaccatctggctttcttccaaattctttgtgaacacaccatctttccatgtgtcctgctttctgcatccagcgccatggcacctggcacagcagggatgatcctctaatgagtgttcacaacacacatgctctgtcttccttgccacagcacctgcagaaggcagaattctgagatggctctcatagcctttgccctccgatgttaatgttttgattatgtgacatggcaagaggaattctgtagatgaaattaagattactaatcagcagaccttaaggtaggagatgggtgggtctaacctaatcatgggagccctttaaaagcagagagttttctttggctagtggtagaaaaggcagtcagacaggtttaaggcacgaggcagacttggcttgagggaggttttccc

SEQ ID NO: 49249 - DNA, 567 bp, Homo sapiens
ctcccagtccctgccctttctctgcctgttgacatcctagatgtatcacaacccggctcagaagtcatctctttgaagcctcctttttggtstaactaaaaaccctggggcatttttagtgacccccaaaaggggcattcagagacacactcttgtcaccatctggctttcttccaaattctttgtgaacacaccatctttccatgtgtcctgctttctgcatccagcgccatggcacctggcacagcagggatgatcctctaatgagtgttcacaacacacatgctctgtcttccttgccacagcacctgcagaaggcagaattctgagatggctctcatagcctttgccctccgatgttaatgttttgattatgtgacatggcaagaggaattctgtagatgaaattaagattactaatcagcagaccttaaggtaggagatgggtgggtctaacctaatcatgggagccctttaaaagcagagagttttctttggctagtggtagaaaaggcagtcagacaggtttaaggcacgaggcagacttggcttgagggaggttttccc

SEQ ID NO: 49250 - DNA, 665 bp, Homo sapiens
tgcccacctcggtctcccaaagtgctgggattacagacgtgagccaccgtgcccggcttgaaaacttccttaaatgtttaacctccaacaatgaaattaacactttttaaattgttatctgtcttctgcattctttcacacacaacacacacacacacacatacacacacatattctaggtattggaactatgtcttgaagataaatgaaatacagcaatactrtattttaatcctccaaatttaagaattcctaaattacttattttgtcactactattaggaaaatattttaggtgtaaagagcacagtatacaggagccaaagagcagaacaaagagataccctttgaaaccacagtaaaaatatttctggaatattgaatgattgtaaaacattacctgagcatttttctgttaattttttaaataataaatgataataaaaagctatgagtttcagtccttgaacatttatttcaagccagacagtgcaagagaaattctcaaagtccatattcatataataaattctcaaagtcataaatagctacaatgtttaattgtctcaatcgaaacatagtcttacacaattgagctgattccccacaattggtatggtggaatacatttaatgaattgtatgattgaatttatcactcacatt

SEQ ID NO: 49251 - DNA, 1914 bp, Homo sapiens
gggtgcaccagttatcagagggactagccagttcccgaaacccccaattatgattggtatcaccataaagaagatgaaaacgaacgcgtgggcagtaacaataacattgtacatctgatcatctcctagtagagtttctggttggtctagtcctgcttgaattaggaagcttaaggcggtgcctattatctccgctcttgcgccgaatagcaggtatagtgttccggtgactttgtggttagttgaaaacaatcaacgattgatgaacataggtsgggggagcgggtaaaatggctgagcaagcattagactgtaaatctaaagacagaggttaaggcctctttttaccagccctgaggagatttttcatgttgaattgcaaattcgaaggtgcagcttcaatcctgctggttatttttataaaaaattaatcttctatatgctctttcttaggaagcaattataaaacaaaggaataaacaagcaaataaaaaaggaagaccctgggttgagggaacgtgggatacatgcacagacaagtgtagggaaatgccaggaaatcataggatagctatacagaagtcctagaacataatcgagttcagacagagcaggagaaaagaaggttccatttggttgcctttaagggaaaaaacaaaccactatcactttcagagagatttaacaattcttttgaggttttgggaagggcaatgaaaataagcaaatgactactgtaaaaaatcatccctggcctggcgtggtggctcgcccctgtaatcccggcactttgggaggcgaggcaggcagattgcctgaggtcaggagttcgagactagcctgaccaacatagtgaaaccctgtctctactaaaaatacaaaagttagccgagcgtgatggtgtgcacctgtaatcccagctactcgggaggctgaggcaggagaatcgcttgaacccaggaggtggagattgcagtgagccaaaatcaagtcactgcactccagtctgggtgacaaagcgagactctgtctcaaaaaacaccaaaccaaaacaaaaaaatcatccttctaatagtatttgtttaaactgtgtatgtagattgcttttatacaacattaaaatttaaaatattctctcaagagtgaaaagatataagtgtaaaagtatcatagaccgttgtatgtaatggtgtgtccattagcaggagactggttaaattatggtactgccaaatgatagaatactatgtattctttaaagggaatgagatagactctagatgtctactgagtcaaaatatgtcctagatatatgtttaagggaaaaaaaaatacaggtttcaaaaattatacccataatgtgatccttttttttttttttttttttttttgagacagagtttcgctcttgttgcccaggctggagtgcaatggcacgatcttggctcaccgcaacctctgcctcctaggttcaagcaattctcctgcctcagcctcctgagtagctgggattacaggcatgcaccaccatgcctggctaattttgtatttttagtagagaaggggtttctccatgttgaggctggtcttgaactcctgacctcaggtgatccgcccgccttggcctcccaaagtgctaggattacaggcgtgagtccccgtgcctggccgatcctatttttttaagtaaaaaaaagtcttataaatgtatattacattatacatagaaaaatgaaaggttgggggaattgtggaattttgttttctaatttaataatttttatattgaattgtttaggtgagaatggacttcgtgtactcagaaaaaaatcaacacagatgaatttctaatatgattactttggacttataaatcaatttttccatagcttctgttaacaatattcattcatc

SEQ ID NO: 49252 - DNA, 1914 bp, Homo sapiens
gggtgcaccagttatcagagggactagccagttcccgaaacccccaattatgattggtatcaccataaagaagatgaaaacgaacgcgtgggcagtaacaataacattgtacatctgatcatctcctagtagagtttctggttggtctagtcctgcttgaattaggaagcttaaggcggtgcctattatctccgctcttgcgccgaatagcaggtatagtgttccggtgactttgtggttagttgaaaacaatcaacgattgatgaacataggtcgggggagcgggtaaaatggctgagcaagcattagactgtaaatctaaagacagaggttaaggcctctttttaccagccctgaggagatttttcatgttgaattgcaaattcraaggtgcagcttcaatcctgctggttatttttataaaaaattaatcttctatatgctctttcttaggaagcaattataaaacaaaggaataaacaagcaaataaaaaaggaagaccctgggttgagggaacgtgggatacatgcacagacaagtgtagggaaatgccaggaaatcataggatagctatacagaagtcctagaacataatcgagttcagacagagcaggagaaaagaaggttccatttggttgcctttaagggaaaaaacaaaccactatcactttcagagagatttaacaattcttttgaggttttgggaagggcaatgaaaataagcaaatgactactgtaaaaaatcatccctggcctggcgtggtggctcgcccctgtaatcccggcactttgggaggcgaggcaggcagattgcctgaggtcaggagttcgagactagcctgaccaacatagtgaaaccctgtctctactaaaaatacaaaagttagccgagcgtgatggtgtgcacctgtaatcccagctactcgggaggctgaggcaggagaatcgcttgaacccaggaggtggagattgcagtgagccaaaatcaagtcactgcactccagtctgggtgacaaagcgagactctgtctcaaaaaacaccaaaccaaaacaaaaaaatcatccttctaatagtatttgtttaaactgtgtatgtagattgcttttatacaacattaaaatttaaaatattctctcaagagtgaaaagatataagtgtaaaagtatcatagaccgttgtatgtaatggtgtgtccattagcaggagactggttaaattatggtactgccaaatgatagaatactatgtattctttaaagggaatgagatagactctagatgtctactgagtcaaaatatgtcctagatatatgtttaagggaaaaaaaaatacaggtttcaaaaattatacccataatgtgatccttttttttttttttttttttttttgagacagagtttcgctcttgttgcccaggctggagtgcaatggcacgatcttggctcaccgcaacctctgcctcctaggttcaagcaattctcctgcctcagcctcctgagtagctgggattacaggcatgcaccaccatgcctggctaattttgtatttttagtagagaaggggtttctccatgttgaggctggtcttgaactcctgacctcaggtgatccgcccgccttggcctcccaaagtgctaggattacaggcgtgagtccccgtgcctggccgatcctatttttttaagtaaaaaaaagtcttataaatgtatattacattatacatagaaaaatgaaaggttgggggaattgtggaattttgttttctaatttaataatttttatattgaattgtttaggtgagaatggacttcgtgtactcagaaaaaaatcaacacagatgaatttctaatatgattactttggacttataaatcaatttttccatagcttctgttaacaatattcattcatc

SEQ ID NO: 49253 - DNA, 1914 bp, Homo sapiens
gggtgcaccagttatcagagggactagccagttcccgaaacccccaattatgattggtatcaccataaagaagatgaaaacgaacgcgtgggcagtaacaataacattgtacatctgatcatctcctagtagagtttctggttggtctagtcctgcttgaattaggaagcttaaggcggtgcctattatctccgctcttgcgccgaatagcaggtatagtgttccggtgactttgtggttagttgaaaacaatcaacgattgatgaacataggtcgggggagcgggtaaaatggctgagcaagcattagactgtaaatctaaagacagaggttaaggcctctttttaccagccctgaggagatttttcatgttgaattgcaaattcgaaggtgcagcttcaatcctgctggttatttttataaaaaattaaycttctatatgctctttcttaggaagcaattataaaacaaaggaataaacaagcaaataaaaaaggaagaccctgggttgagggaacgtgggatacatgcacagacaagtgtagggaaatgccaggaaatcataggatagctatacagaagtcctagaacataatcgagttcagacagagcaggagaaaagaaggttccatttggttgcctttaagggaaaaaacaaaccactatcactttcagagagatttaacaattcttttgaggttttgggaagggcaatgaaaataagcaaatgactactgtaaaaaatcatccctggcctggcgtggtggctcgcccctgtaatcccggcactttgggaggcgaggcaggcagattgcctgaggtcaggagttcgagactagcctgaccaacatagtgaaaccctgtctctactaaaaatacaaaagttagccgagcgtgatggtgtgcacctgtaatcccagctactcgggaggctgaggcaggagaatcgcttgaacccaggaggtggagattgcagtgagccaaaatcaagtcactgcactccagtctgggtgacaaagcgagactctgtctcaaaaaacaccaaaccaaaacaaaaaaatcatccttctaatagtatttgtttaaactgtgtatgtagattgcttttatacaacattaaaatttaaaatattctctcaagagtgaaaagatataagtgtaaaagtatcatagaccgttgtatgtaatggtgtgtccattagcaggagactggttaaattatggtactgccaaatgatagaatactatgtattctttaaagggaatgagatagactctagatgtctactgagtcaaaatatgtcctagatatatgtttaagggaaaaaaaaatacaggtttcaaaaattatacccataatgtgatccttttttttttttttttttttttttgagacagagtttcgctcttgttgcccaggctggagtgcaatggcacgatcttggctcaccgcaacctctgcctcctaggttcaagcaattctcctgcctcagcctcctgagtagctgggattacaggcatgcaccaccatgcctggctaattttgtatttttagtagagaaggggtttctccatgttgaggctggtcttgaactcctgacctcaggtgatccgcccgccttggcctcccaaagtgctaggattacaggcgtgagtccccgtgcctggccgatcctatttttttaagtaaaaaaaagtcttataaatgtatattacattatacatagaaaaatgaaaggttgggggaattgtggaattttgttttctaatttaataatttttatattgaattgtttaggtgagaatggacttcgtgtactcagaaaaaaatcaacacagatgaatttctaatatgattactttggacttataaatcaatttttccatagcttctgttaacaatattcattcatc

SEQ ID NO: 49254 - DNA, 545 bp, Homo sapiens
acagaagacaatttttagaaaaagtcgttttaagccaaacaatttcttgcccttggtataaagcagcagcatgcagaaaacactaattacrgtttcaatctcaatggaatctaggctggtccttagcatcagtctgagtgataaatcccttattccagaatacacttaggaagaactactaaggatatatttttacctatttcaaagaagaaaatgagaaaaggcattgattttaaaaaaagaatacatgttacagtttgtacttactttttagcaagatcatattctttagcttcataatacagctttgcaaaatagaatcctctcgttgacttctaaaaaaaattaaaagttgttttacatttcatacagaaatattttccaacattttttcaaaagtagtaaaaatctgccctaagtttatgttcaaatatgccattttcattcacttaaaaattttttttaaagcctgacaaatgcataattccatgttttataatttcctatcacaaaacaaaaaatagagctgggtgcagcggctcatg

SEQ ID NO: 49255 - DNA, 545 bp, Homo sapiens
acagaagacaatttttagaaaaagtcgttttaagccaaacaatttcttgcccttggtataaagcagcagcatgcagaaaacactaattacagtttcaatctcaatggaatctaggctggtccttagcatcagtctgagtgataaatcccttattccagaatacacttaggaagaactactaaggayatatttttacctatttcaaagaagaaaatgagaaaaggcattgattttaaaaaaagaatacatgttacagtttgtacttactttttagcaagatcatattctttagcttcataatacagctttgcaaaatagaatcctctcgttgacttctaaaaaaaattaaaagttgttttacatttcatacagaaatattttccaacattttttcaaaagtagtaaaaatctgccctaagtttatgttcaaatatgccattttcattcacttaaaaattttttttaaagcctgacaaatgcataattccatgttttataatttcctatcacaaaacaaaaaatagagctgggtgcagcggctcatg

SEQ ID NO: 49256 - DNA, 545 bp, Homo sapiens
acagaagacaatttttagaaaaagtcgttttaagccaaacaatttcttgcccttggtataaagcagcagcatgcagaaaacactaattacagtttcaatctcaatggaatctaggctggtccttagcatcagtctgagtgataaatcccttattccagaatacacttaggaagaactactaaggatatatttttacctatttcaaagaagaaaatgagaaaaggcattgattttaaaaaaagaatacatgttacagtttgtacttactttttagcaagatcatattctttagcttcataatacagctttgcaaaatagaatcctctcgttgacttctaaaaaaaattaaaagttgttttacrtttcatacagaaatattttccaacattttttcaaaagtagtaaaaatctgccctaagtttatgttcaaatatgccattttcattcacttaaaaattttttttaaagcctgacaaatgcataattccatgttttataatttcctatcacaaaacaaaaaatagagctgggtgcagcggctcatg

SEQ ID NO: 49257 - DNA, 545 bp, Homo sapiens
acagaagacaatttttagaaaaagtcgttttaagccaaacaatttcttgcccttggtataaagcagcagcatgcagaaaacactaattacagtttcaatctcaatggaatctaggctggtccttagcatcagtctgagtgataaatcccttattccagaatacacttaggaagaactactaaggatatatttttacctatttcaaagaagaaaatgagaaaaggcattgattttaaaaaaagaatacatgttacagtttgtacttactttttagcaagatcatattctttagcttcataatacagctttgcaaaatagaatcctctcgttgacttctaaaaaaaattaaaagttgttttacatttcatacagaaatattttccaacattttttcaaaagtagtaaaaatctgccctaagtttatgttcaaatatgccattttcattcacttaaaarttttttttaaagcctgacaaatgcataattccatgttttataatttcctatcacaaaacaaaaaatagagctgggtgcagcggctcatg

SEQ ID NO: 49258 - DNA, 657 bp, Homo sapiens
ttgagaggctgaggcaggtggatcacctgaggtcaggagctcgggaccagcctggccaacatggtgaaaccccgtttctactaaaaatacaaaaattagctgggcatggtcaggaggctgaggcaggagaatcgcttgaacctgggaggtgaaggttgcagtgagctgagatggcgccactgcactccaccctgggtgacagagcragactccgtctcaaaaataataaaataataataataaactattatgaaggcaacaaatcagaaaataaaatgaagtaaaactccatctctagttaagattatcagactaggcttttaaaatactctaactacaagagataatctaagaaacaagaatacagaatgaaagaagatgaaaaataccatacaaacactaggcaaagctggtgtatctaaaaaagactttacaataagactcttgtttttaaaagtaataaaaacttttagggtggtaaaaattacagtttataatactacaatggtagctgtatgtcattacaaatttgatagaagatgcaaaaagaataaatcctaatgtaaactagggactctgggtaataacatatcaatgtaggttcactgactgtaacaaatgtaccacttcggtgggggatgttgatcacaggaaaag

SEQ ID NO: 49259 - DNA, 851 bp, Homo sapiens
ggtatcctggaggggaaaactatggtcacttcagtcaatgagacactaactttagtggtgttgtctaggcaaataaaaatacagattgccttgatttagcttaagcaggaaaaggaatcttgtgggtttatggyttcataaattgttctgaatgcttaacatcccatgaagaggcagcaaacaatgaagatacttcattcaagaatacaaaaccagcatacccaggcaaaagcctcgtcattcagatttagcatcttgttatccatgtttgcattgctgaaaggtcttctttgactagtctcaaagctttttcacttagacattacagaccattttacttctgcattttaaacacctaagagtctgacctgactttatagctaaacggaaacttcgtatacgagattatttattttaatgctttatggccttttgatgaacacagataaattacgcacactttgagaacaaactattctttcacgtgttgaaaacttaactgtttggctccaccaaatactttcatttttcattggaaaacattaggaaaattaaagttagatgtattgtttactgtaaggttgacataaagcaggatcatacaaaattgaaagttttacgtagattgcccagccagtgggatatcatgacttaccccacaaaaaattatacctgtaacagtcctctctctccatattcttttagaatttctcaagtaagaaaaggatggtgttacagctttgcttatcttatgtttcagcatcagttattgatataactacttttgttttacagaataggaatggtataatacatcttaacaggactcctatctggaatattcttaccat

SEQ ID NO: 49260 - DNA, 851 bp, Homo sapiens
ggtatcctggaggggaaaactatggtcacttcagtcaatgagacactaactttagtggtgttgtctaggcaaataaaaatacagattgccttgatttagcttaagcaggaaaaggaatcttgtgggtttatggtttcataaattgttctgaatgcttaacatcccatgaagaggcagcaaacaatgaagatacttcattcaagaatacaaaaccagcatacccaggcaaaagcctcgtcattcagatttagcatcttgttatccatgtttgcattgctgaaaggtcttctttgactagtctcaaagctttttcacttagacattacagaccattttacttctgcattttaaacacctaagagtctgacctgactttatagctaaacggaaacttcgtatacgagattatttattttaatgctttatggccttttgatgaacacagataaattacrcacactttgagaacaaactattctttcacgtgttgaaaacttaactgtttggctccaccaaatactttcatttttcattggaaaacattaggaaaattaaagttagatgtattgtttactgtaaggttgacataaagcaggatcatacaaaattgaaagttttacgtagattgcccagccagtgggatatcatgacttaccccacaaaaaattatacctgtaacagtcctctctctccatattcttttagaatttctcaagtaagaaaaggatggtgttacagctttgcttatcttatgtttcagcatcagttattgatataactacttttgttttacagaataggaatggtataatacatcttaacaggactcctatctggaatattcttaccat

SEQ ID NO: 49261 - DNA, 1277 bp, Homo sapiens
tttaaagttgatgctattcacttgttccccaatctttgctccgagtttacactgatgaagcatgagaatgctatatccccacaaacctgtgcatattgttgatagtaagcattgtttgctattttctgactattcatttttcttcttttgagaattgccatgcctagaagagtgcctgtcttgtaatatataagataataacttgatagctagcatttctgaggcttcttgtgcctttaacgtatatttactgttttgatacttacaaagaccctatgaagtacgtactattattatctgcttatggctggtgggaaaactgagctgtacagaatttaaacaaactgtcccaggtcacacaactaggaagggtggagccaggatgcaaatgatacggaattttaaaaaatgggtagttgagtgaatgaataaatggatgacctgtttacatcctttctcatttttaattgaattttgtttctttttctttcttatttgtaggatctttgtatatattatgaacatcaacttctttccttttctacatgttgcagatattccctctggtctgttatttgtctttaacttatttatttgccaccttttgatattcatttcttattcacattagaaaaccctcaaagtacttaaaactatgactccagatattgttgttagaacatgtttgaggaaaatagtgatgataatttaggtgtacagaraaattctgacgtgggtaatacagagtctccctaagttaatctaaacatgaaaaataaccacaggggaattagtcgctttgttcacactgcggtactttaacattataattcccctttaggcatatttataattgaaaaaaaaggtgttgggggcttttatattattagattgacatttggggaaatgaatttttactttatctgcaacaaatgaatcccaattagttaagtggctctgggctaaaggaagtatagtgactttctcattttctttctactttttgaaatgcccttccttcccattcctatgaacttctctcatcctgctgagccaagtcacatttcgctttgcttgaagcctctaacccttctctgatgtcctgaacgattcttcagggagactctatggcaaacgtctttctttcctgtgacagccccacatttgattaggtgttcactttccctcctgtgtcctcaggaatgtgatcatatctctagcttcggagtttaagtttgaattagtctaagcctaagccagtgttctcaaactctagc

SEQ ID NO: 49262 - DNA, 669 bp, Homo sapiens
tttgttttttgagatggagtctttctccgtcacccaggctggagtgcagtggcgcaatcttggctcactgcaacttctgcctcctgggttcaagtgattctcctgcttcagcctccccagtactgggaatacaggcacccacaaccacacctggctamtttttatatttttagtagagacagggtttcatcatgttggccaggctggtcttgaactcctgacctaaagtaatccgcccactttggcctcccaaagtgctgggattacaggtgtgagccaccatgcccaacctgctgtcctcacttaacaaatgaggtgatgagatcaagaaagggtccatgtctccccctactcacatggaaatgtggtggatgagtttcctgaggcttaggacaatagacatttattgtctcacagttctggagactagaagaccaagatcaaggtgtcggcagggcatgctacctctgaaggcacttgggaagaatcaccccttgcctttcctagatcctggcggccctgggcactcctaagctggtggcagcatcactccagcttctgccactctttgtgtgtctctgtctgtctctgtctcttcctcttcttataaagacacaagtcacattggatttggggccacccaaattcagcatgacttcatcttaatta

SEQ ID NO: 49263 - DNA, 547 bp, Homo sapiens
tgtgtttaaatcaacttttaaagttatttgcagagagccagagaatggggtagaagagttacttatagttaggacaaaaatgcatggctttcacctggaaatcttcatttgtctaaagtaatagagatgtggattatctacacacatatgactggttttgtttttgtttgagacggggtttcactctgtcacccaggctggagtgcagtggtgtgatctcagctcactgcaacctctgcctcccgggctcaagctgggactacaggcgtatgccaccacgcccagctacttttgtactttttgtagagacggggtttcaccatgttgcacaggctgatctcraactcctgggctcaggcgatctacctgcctgggcctcgtaaagtgctgggattacaggtgtgagccacagtgcctggcccatatgactgttttaagaagggcaataaaataggttaagatatcaatttttttgaaccagagtttttggattaaaatgttgactaacatttactacctgtgtttctggttcctcatctgaaaatta

SEQ ID NO: 49264 - DNA, 500 bp, Homo sapiens
ttttatggctgcatagtattccatggtgtacatgtgccatattttcttaatccagtctatcattgatggacatttgggttggttccaagtctttgctattgtgaatagtgccgccataatcatacatgtgtatgtgtctttatagtagaatkatttatagtcctttgggcatatacccagtaatgggatcgctgggtcaaatggtatttctagttctagatccttgaggaatcaccacacggttttcgacaatggttgaactagtttacactcccaccaacagtgtaaaagcattcctatttctccacatcctctccagcacctgttgtttcctttttaatgatcacatgagctcccttcttccagtgaagttgacaggatttcacaaggccagaggcccactggcactctcaactaccagagataatagaaggtcccaaggggcaattagcacattttgcccccagtcacctttggtggtagctatgtaatcccagtat

SEQ ID NO: 49265 - DNA, 548 bp, Homo sapiens
caactggggaatctgattatctccatcataatcccacaacttccctcctttctcttttgcttttaattactgcattgtggtgagttaagaaaagcctatactattttttcttctccactaccagaaagagagagagataactggcattctctctctaaggatttttaaaatacttttaataaaattttaaatagtgtaatgtgtgcccacaagcacattggttctaaagatacttcaaaaatacttcagaatcaaatctgtaagaaaaaaaaattcaattatttatgttcattatattacaagtgatttaaaaactggttatctgtgcatcaaaaaatgcaagcctatagcagctctgattcagtgaattccagttgcggggaggggaggagccctcagatatttttatatcatatttgaaaaaaatggctgattattatttttttaatttatggaatgtatggactttaccasagtttcaaaagtccactttagtacctataagatattttgaaatcagttggccaattcttgccatcaaaaaattg

SEQ ID NO: 49266 - DNA, 588 bp, Homo sapiens
tattactataaaattgaaattatatatagaagttaaaaatgtatgaaatccaaactaactagcacataattcagtctcagaggcaacatcatggaacagttaggttaactgaaatcagaattgctgagttgttagagttctgtccctcaataacttcacaactttgggtaagtcattaacttttttaaaagaaattactttaggctggacacagtgactcatgcctgtaatctcagcactttgggagggtgaggtgggcagatcacttgaggtcaggagttcgagaacagcctggccaacatgrtgaaaccccatctctactaaaaatacaaaatttgctgggcgtggtggcaggtgcatgtaatcccagctgctccagaggctgaggcaggagaatcacttgaacctgggaggtggaggttgcagtgagctgaaatcacaccactgcactttagcctgggcaacagagtgagactctgtctaagaaaaaaatgtattttattgatgcataatagatatttattatttcagttacatgtgataatatagattcatactttataaagatctaatcagtgtggttgggat

SEQ ID NO: 49267 - DNA, 548 bp, Homo sapiens
cataatatgtgacctatgtgctggcatgatgactcacagtgtctgcaccacaggggacacttttttttttttttttttcagacagagtttcgctcttgtcacccagactggagtgcagtggcacgatctcggctcactgcaacctccgcctcccgggttcaaacgattctcctgcctcagcctcatgagtagctggaattacaggcacccaccaccatgtctggctaatttttgtacttttagtagagacagggtttcgccatgttggccaggctggtctcgaacacctgacctcaggtgatctgcctgcctcagtctcccaaagtgctgggattacaggcatgagccactgtgcccggcctgaggaccctttctatacatacagtgatgcaccctatcacctctccattcccccataaaacctttccctctgggagaycctagtttggagaacactcctggtgcaccccttacttgtgacaagtaataaaactcctattgatcaaaacttgcattcttgtggagagtcctttcttactcaccaggca

SEQ ID NO: 49268 - DNA, 517 bp, Homo sapiens
ctgacycgcccacctccctcccggacggggcggctggctgacccccccacctccctcctggctgccgggcgtagacgctcctaacttcccagacggggtggctgccgggcggaggggctcctcacttctctgacggggcggctgccgggtggaggggctcctcacttctcagacggggcggttgccaggcggagggtctcctcacttctcagacggtgcggccgggcagagacgctcctcacctcccagacggggtcgcggccgggtagaggcgctcctcacatcccagacggggtggcggggcagaggcgctccccacatctcagacgatgagcggccgggcagagacgctcctcacttcctcacttcctagatgggatggcggtcgggaagaggcgctcctcacttcctagatgggatagcggccgggcagagacgctcctcattttccagactgggcagccaggcagaggggctcctcacatcccagacgatgggcggctaggcagagacgctc

SEQ ID NO: 49269 - DNA, 517 bp, Homo sapiens
ctgactcgcccacctccctcccggacggggcggctggctgacccccccacctccctcctggctgccgggcgtagacgctcctaacttcccagacggggtggctgccgggcggaggggctcctcacttctctgacggggcggctgccgggtggaggggctcctcacttctcagacggggcggttgccaggcggagggtctcctcacttctcagacggtgcggccgggcagagacgctcctcacctcccagacggggtygcggccgggtagaggcgctcctcacatcccagacggggtggcggggcagaggcgctccccacatctcagacgatgagcggccgggcagagacgctcctcacttcctcacttcctagatgggatggcggtcgggaagaggcgctcctcacttcctagatgggatagcggccgggcagagacgctcctcattttccagactgggcagccaggcagaggggctcctcacatcccagacgatgggcggctaggcagagacgctc

SEQ ID NO: 49270 - DNA, 517 bp, Homo sapiens
ctgactcgcccacctccctcccggacggggcggctggctgacccccccacctccctcctggctgccgggcgtagacgctcctaacttcccagacggggtggctgccgggcggaggggctcctcacttctctgacggggcggctgccgggtggaggggctcctcacttctcagacggggcggttgccaggcggagggtctcctcacttctcagacggtgcggccgggcagagacgctcctcacctcccagacggggtcgcggccgggtagaggygctcctcacatcccagacggggtggcggggcagaggcgctccccacatctcagacgatgagcggccgggcagagacgctcctcacttcctcacttcctagatgggatggcggtcgggaagaggcgctcctcacttcctagatgggatagcggccgggcagagacgctcctcattttccagactgggcagccaggcagaggggctcctcacatcccagacgatgggcggctaggcagagacgctc

SEQ ID NO: 49271 - DNA, 302 bp, Homo sapiens
ctcatgagaaatagcacacattagaggctttgagagaagacctagttctgtcatgaacacttggcctcatgtctgtcctcccatcatggagcagccttatcaacagaccacattgcagaaattatgttttatgaaaaccagtaagtctgctgccactacagcaaggaaargaatgcagtttcctgtcttatttaagaaaaagagaaggctctcttttctcctttgccattgctgttcttttccttatgcacaaagatttttaatgaatgcagatttttatctcattctactgcctgactatc

SEQ ID NO: 49272 - DNA, 555 bp, Homo sapiens
acagtagaacagaatatattagaggctgggaagattaaggggaatgagaaatgggaaaggtggggcaatgggtacaaaattacagctagataggagaaatgagttgtagccttctttagcgctgtagggtgaccatagccaacaaaaaaattatgtatactttcaaatagctaaaagagaggattttgaatgttatcaacacaaaacagtaagtttttgaggtgatgaatatgctgcttaccttgatttcatcattgcacrttacatacatgtatcaaaatagtccactgtgcccatatgtatgtaaaataattgtgtcaaaaataacattttttaaattaaaaagatagtaaagaatatattaccagaagtaaaaacaaacaaactccaagaaaagactatagttacaattatatccctatgtgtcaatctgaaaagatggctggcatatgtaagagaaaacactaattgtagaacagtatatgcagtatgatcttattggtgcaaagtaagagaatgtgtgtgtgtgtgtctgcacgtgtgtgttcctgagcc

SEQ ID NO: 49273 - DNA, 1888 bp, Homo sapiens
aataaagctgctgtaaacatttgtgtacaggtttttgtgtggacataagttttcaaatcatttaggtaaataacaaggagtgtgactgctgatcatgtttaccacaaaactatgtttagttttgtatcacttactatttttactagatatatagcttagtgattacatacagtctggaatcagtctgtttaattyctagctccagcacttctcatgtgtccttggacaaattacttaatcaccctaagacttatttataaagcataatactaataatatctattttataggattgttctgaggggcagataaaactgaggggcagatggtgaatgtttaggaacataagtattgaatgactgttagttgttgactattgatatccttattattattattcttaacactatgagcagaaagtgtgagtcagttagccagtatggtggacttacgttgtggtaacaggacaactgtttcttcagaaatgttcttcttttgcaaaaaagcttgaatttatgacagtggcctcctaagagccaacttttatgaaactactgaggtcaccaagcaggcagaaaataaaaacattccttaatatgggaatcttcacctcaaagtagattataaaaatgcaaattaactactttcctaatattgagtgacaagttttaaatgtaaaacattttactggatttatttttaaaatatttattttatttcaccctggaaaaagttattccaatgtgtgttttttgttgttgtttttgttttatttagtattagggaaatgaggttgtcttcttctatgtggcaatatactcaagcataggaggaaatgccataaggtatataggataatacacattataaaatgaagaaaaaaatgttaagaaatggaacaaatattaaatacaccaattaaaaaaaaaaaattaaatacaatgccaaggatttttgaagaaaattaacaatgcaatactttttcctaaatatttgaaaagtacttaaatataaatttaaatattcagatttaccgtatagtcccacattgttgctcctccaaatgcagacaacacaaagacaatcactaaagctatctgaatttcagttacatccactctaaagaggaaggacaaagaatagataaggtgtttgtaaataaaattcctgaatatggaggttcatcacatattaaatagcaaagatgtaaaaatctctgtaggcttagtttatttttacctttacttccattattgaattatcagttgactacactgttaagttaaaaaagttacagaacaacatgtgctcacacataggtaacggtatatgcagagggaaaaaaatatataccatatatcaaattgctaatagttatcactgatgttataaagacttttattttctaatttatgaactcctgtaaagtctgaagttttttcacaataattacccactacttgtgtacataaggaaaaattataataaaaacaaccatatgatttaaggcaaatttaaatactcccaggtcaatttcacttaaaaagcagggaaaattccaatagtcttctttattgaggtactaatagtcactgtagtttttttagtttccatagacatttttcccctagtaaatatgcttaaatttctcaaaaaaccactaaccaatcagcatcagtccctctagtctgcattcccctgaagctgtcactctctctcctatgctccacgaataggctcactgaaaattagtcaacatttgtaattttctcctctcttcacgtttgttgcttaacacactctagtctggcttttggccccattattctactaaaattgtttaaggtaaattgaccttcaattttcaattccaattaaaggatacaaa

SEQ ID NO: 49274 - DNA, 1888 bp, Homo sapiens
aataaagctgctgtaaacatttgtgtacaggtttttgtgtggacataagttttcaaatcatttaggtaaataacaaggagtgtgactgctgatcatgtttaccacaaaactatgtttagttttgtatcacttactatttttactagatatatagcttagtgattacatacagtctggaatcagtctgtttaattcctagctccagcacttctcatgtgtccttggacaaattacttaatcaccctaagacttatttataaagcataatactaataatatctattttataggattgttctgaggggcagataaaactgaggggcagatggtgaatgtttaggaacataagtattgaatgactgttagttgttgactattgatatccttattattattattcttaacactatgagcagaaagtgtgagtcagttagccagtatggtggacttasgttgtggtaacaggacaactgtttcttcagaaatgttcttcttttgcaaaaaagcttgaatttatgacagtggcctcctaagagccaacttttatgaaactactgaggtcaccaagcaggcagaaaataaaaacattccttaatatgggaatcttcacctcaaagtagattataaaaatgcaaattaactactttcctaatattgagtgacaagttttaaatgtaaaacattttactggatttatttttaaaatatttattttatttcaccctggaaaaagttattccaatgtgtgttttttgttgttgtttttgttttatttagtattagggaaatgaggttgtcttcttctatgtggcaatatactcaagcataggaggaaatgccataaggtatataggataatacacattataaaatgaagaaaaaaatgttaagaaatggaacaaatattaaatacaccaattaaaaaaaaaaaattaaatacaatgccaaggatttttgaagaaaattaacaatgcaatactttttcctaaatatttgaaaagtacttaaatataaatttaaatattcagatttaccgtatagtcccacattgttgctcctccaaatgcagacaacacaaagacaatcactaaagctatctgaatttcagttacatccactctaaagaggaaggacaaagaatagataaggtgtttgtaaataaaattcctgaatatggaggttcatcacatattaaatagcaaagatgtaaaaatctctgtaggcttagtttatttttacctttacttccattattgaattatcagttgactacactgttaagttaaaaaagttacagaacaacatgtgctcacacataggtaacggtatatgcagagggaaaaaaatatataccatatatcaaattgctaatagttatcactgatgttataaagacttttattttctaatttatgaactcctgtaaagtctgaagttttttcacaataattacccactacttgtgtacataaggaaaaattataataaaaacaaccatatgatttaaggcaaatttaaatactcccaggtcaatttcacttaaaaagcagggaaaattccaatagtcttctttattgaggtactaatagtcactgtagtttttttagtttccatagacatttttcccctagtaaatatgcttaaatttctcaaaaaaccactaaccaatcagcatcagtccctctagtctgcattcccctgaagctgtcactctctctcctatgctccacgaataggctcactgaaaattagtcaacatttgtaattttctcctctcttcacgtttgttgcttaacacactctagtctggcttttggccccattattctactaaaattgtttaaggtaaattgaccttcaattttcaattccaattaaaggatacaaa

SEQ ID NO: 49275 - DNA, 1888 bp, Homo sapiens
aataaagctgctgtaaacatttgtgtacaggtttttgtgtggacataagttttcaaatcatttaggtaaataacaaggagtgtgactgctgatcatgtttaccacaaaactatgtttagttttgtatcacttactatttttactagatatatagcttagtgattacatacagtctggaatcagtctgtttaattcctagctccagcacttctcatgtgtccttggacaaattacttaatcaccctaagacttatttataaagcataatactaataatatctattttataggattgttctgaggggcagataaaactgaggggcagatggtgaatgtttaggaacataagtattgaatgactgttagttgttgactattgatatccttattattattattcttaacactatgagcagaaagtgtgagtcagttagccagtatggtggacttacgttgtggtaacaggacaactgtttcttcagaaatgttcttcttttgcaaaaaagcttgaatttatgacagtggcctcctaagagccaacttttatgaaactactgaggtcaccaagcaggcagaaaataaaaacattccttaatatgggaatcttcacctcaaagtagattataaaaatgcaaattaactactttcctaatattgagtgacaagttttaaatgtaaaacattttactggatttatttttaaaatatttattttatttcaccctggaaaaagttattccaatgtgtgttttttgttgttgtttttgttttatttagtattagggaaatgaggttgtcttcttctatgtggcaatatactcaagcataggaggaaatgccataaggtatataggataatacacattataaaatgaagaaaaaaatgttaagaaatggaacaaatattaaatacaccaattaaaaaaaaaaaattaaatacaatgccaaggatttttgaagaaaattaacaatgcaatactttttcctaaatatttgaaaagtacttaaatataaatttaaatattcagatttaccgtatagtcccacattgttgctcctccaaatgcagacaacacaaagacaatcactaaagctatctgaatttcagttacatccactctaaagaggaaggacaaagaatagataaggtgtttgtaaataaaattcctgaatatggaggttcatcacatattaaatagcaaagatgtaaaaatctctgtaggcttagtttatttttacctttacttccattattgaattatcagttgactacactgttaagttaaaaaagttacagaacaacatgtgctcacacataggtaacggtatatgcagagggaaaaaaatatataccatatatcaaattgctaatagttatcactgatgttataaagacttttattttctaatttatgaactcctgtaaagtctgaagttttttcacaataattacccactacttgtgtacataaggaaaaattataataaaaacaaccatatgatttaaggcaaatttaaatactcccaggtcaatttcacttaaaaagcagggaaaattccaatagtcttctttattgaggtactaatagtcactgtagtttttttagtttccatagacatttttcccctagtaaatatgcttaaatttctcaaaaaaccactaaccaatcagcatcagtccctctagtctgcattcccctgaagctgtcactctctctcctatgctccacgrataggctcactgaaaattagtcaacatttgtaattttctcctctcttcacgtttgttgcttaacacactctagtctggcttttggccccattattctactaaaattgtttaaggtaaattgaccttcaattttcaattccaattaaaggatacaaa

SEQ ID NO: 49276 - DNA, 424 bp, Homo sapiens
gaggtgacctggacctaaacaaggctaattctggacaaggagatgtgcaagattggtataaaccagcccttggaggggagtgggaagggtagcgtggagggaatcaagttgaggcaactgagtaacagttggaagagaaggaaacaattcaggttaggtgagaagctgcctctggtgaaatgaattaagctctgtgctgtgagaagcagaataaacaagggagtttaayaagagcctaagcaggaagggagaagaaaaaagggatgggaagcctttgggttggatccctctctctctcctctccagtgtgcaaagcatactttgctggcctcagtatcccctgcatcacatcataaacactttcccttggatgttttatgctgcttgatattccctaatgaacacacacaaacgaagcaggtca

SEQ ID NO: 49277 - DNA, 603 bp, Homo sapiens
ggatggtactgaaaccttgtgaaggcttgtttctgaactggcattgcagctctgtcttcatcgggccagcagctttggggtcatgtggtgtgcagtattaacagtggatccctggtcatgggccagcccactcccgcccctgcagggttattgctataagatgggctgttgagtcagaagtgatgttatgtggcatcstgtgccagtgaatcaaacacttcatagacccttgagcagagaatccatgggcaggaaaggcaaatctctatgtggaactggtctctattcctgatctttcaggagagggtccagtgtagtcatctgccacatgccaagccaaaccaatctcagttttatcctcttcagctggtgacatgggagtcccccatgtggccattcgaatgagctgaggctgctggtgcctcagtggggatgatgtggggtctgggctacctgccgtgtagcttgctggtgtcctcaaggcgtgctcatgtttgacccgggatgtccccaccatgttagattgattgattgggtctggcagacccagctcatgacaggcagttccagctgcctgatcactcggtgtctcatgtctgggtg

SEQ ID NO: 49278 - DNA, 603 bp, Homo sapiens
ggatggtactgaaaccttgtgaaggcttgtttctgaactggcattgcagctctgtcttcatcgggccagcagctttggggtcatgtggtgtgcagtattaacagtggatccctggtcatgggccagcccactcccgcccctgcagggttattgctataagatgggctgttgagtcagaagtgatgttatgtggcatcgtgtgccagtgaatcaaacacttcatagacccttgagcagagaatccatgggcaggaaaggcaaatctctatstggaactggtctctattcctgatctttcaggagagggtccagtgtagtcatctgccacatgccaagccaaaccaatctcagttttatcctcttcagctggtgacatgggagtcccccatgtggccattcgaatgagctgaggctgctggtgcctcagtggggatgatgtggggtctgggctacctgccgtgtagcttgctggtgtcctcaaggcgtgctcatgtttgacccgggatgtccccaccatgttagattgattgattgggtctggcagacccagctcatgacaggcagttccagctgcctgatcactcggtgtctcatgtctgggtg

SEQ ID NO: 49279 - DNA, 603 bp, Homo sapiens
ggatggtactgaaaccttgtgaaggcttgtttctgaactggcattgcagctctgtcttcatcgggccagcagctttggggtcatgtggtgtgcagtattaacagtggatccctggtcatgggccagcccactcccgcccctgcagggttattgctataagatgggctgttgagtcagaagtgatgttatgtggcatcgtgtgccagtgaatcaaacacttcatagacccttgagcagagaatccatgggcaggaaaggcaaatctctatgtggaactggtctctattcctgatctttcaggagagggtccartgtagtcatctgccacatgccaagccaaaccaatctcagttttatcctcttcagctggtgacatgggagtcccccatgtggccattcgaatgagctgaggctgctggtgcctcagtggggatgatgtggggtctgggctacctgccgtgtagcttgctggtgtcctcaaggcgtgctcatgtttgacccgggatgtccccaccatgttagattgattgattgggtctggcagacccagctcatgacaggcagttccagctgcctgatcactcggtgtctcatgtctgggtg

SEQ ID NO: 49280 - DNA, 556 bp, Homo sapiens
gtgagtatcataccctcattttgccgagaaatttgaggcttatagaaaagaagacttgtccaaggtcactcccacccaggcaggaggagagctgggattcccattcagtctctgcttctaaccactgtgccaatctgatctaaggcaaagaagggagacatggccctcctacacatctgagagccacttgagaggatgcctctgtgtgagaggcactcatgtgtccctgctggtaagggaccttgatcctctgagcctgcagtgtggaagagacttggggggtccctggaatctaggtctcagacatagggttcttgctagcagcaggagtgcatgttttagggtagttgaggagtggggcaggtgtaccccacgtyccctgctctggttgcctctattctagcttcaggctgtttctgatgtgcacttctcctgtgtgtaatgtcctcttcacaagcgtgactctcccaggtgcacctttgtgctttgttgtgtgctggtgcccacgtaagcctgtgtgtgcacctgctgggagcttgcacaaactgcccttctg

SEQ ID NO: 49281 - DNA, 556 bp, Homo sapiens
gtgagtatcataccctcattttgccgagaaatttgaggcttatagaaaagaagacttgtccaaggtcactcccacccaggcaggaggagagctgggattcccattcagtctctgcttctaaccactgtgccaatctgatctaaggcaaagaagggagacatggccctcctacacatctgagagccacttgagaggatgcctctgtgtgagaggcactcatgtgtccctgctggtaagggaccttgatcctctgagcctgcagtgtggaagagacttggggggtccctggaatctaggtctcagacatagggttcttgctagcagcaggagtgcatgttttagggtagttgaggagtggggcaggtgtaccccacgttccctgctctggttgcctctattctagcttcaggctgtttctgatgtgcacttctcctgtgtgtaatgtcctcttcacaagcgtgactctcccaggtgcacctttgtgctttgttrtgtgctggtgcccacgtaagcctgtgtgtgcacctgctgggagcttgcacaaactgcccttctg

SEQ ID NO: 49282 - DNA, 578 bp, Homo sapiens
tatatatatatatrtacacatatattttaagtatatatgtataatgatgaacagaatgataaccaaatattaataatgttactttttaaaagggatttggaaagagcttaactttcctctttgttctttgaggcatgatatgaaattttttctaatggtgatgtactattttaacagaaacaataaaatcattctaaaggaggaggaggcagaggaactccttttggaatgtagagtgcagctttgaaaagccatgaatcaatccttgacttcaacatgtgggattaggctagtgggtggtggttaggggaggtgaaaatgaataggcggcaactctcaagttgagtaaataaatcatatctgctaatcttatgtgggtactccccgtgtcaggcactggctaaatgctttgcgtgcatcacctccttccatccctaaataacctacaaagtaacactattcaggacagccacttacagttttgaaggttgagcactccaggagacattattcgcattgtcaatcacgtgtttctggcactcctggagtcgtgtggtagacaagttgtacaactgtat

SEQ ID NO: 49283 - DNA, 1938 bp, Homo sapiens
tgaggccaggagttcaagaccagcctggccaacatggcaaaacgctgtttctactaaaaatacaaaaattagccgggtgtggtggcacatgcccataatcccagctactgtagtggctgaggcatgagaatcacttgaacccagaaagcagaggcaggctgcagtgagccgaggtcatgccactgcacttcagcctaggcaacagagtcagaccctgtctacaaaaaaaaaaaaaaaggaaaaaagaaattcctgggaatctgagtgctttgaatgtgtagtcagagcacttggatctggcccacaaccttggagtctgtcagagttcactagccctgcactacgccagttcttggccttcattcgccttcttcactggggtcacgggtcctgcctttctctttcctttgtgctcacagtccttgagcacttgaatggtgccctttctctcttcctacctgggccctgtgctgccaagccattctcttgtgaatcctcagtcagtatcccaattccccagagtgtctaatccaaatgatcattttttttcaagcacctaactccattcctgccttccttcctactttacagggcaatgtgaactctgctaacttccaccttctttcttgacttgcagacttttccacatttcttccctgtctactctcatctcggaggaggtgagaaatggtggccctgtctaaggctgtgatctggatgcatcccttcctcctcctcccctcccccagcccagctccctctacccctgctcttttccacctctcagttagctcatctttctccttgattttctttttcttttttttgagacagagtctcactctgttgcccaggctggagtacagtggtgtgatcacagcttattgcagccttgacctcctgggctcaggtgatcttcccaccttccacctgagtagctgggaccacaggcgcataccaccacacccagctaagttttattttttgtagaggtggggtcttgccatgttgctcaggctggtctcaaacttctgggctcaagcaatcctcctatcccagcctcctaaattgctgggattacaagtgtgagcaacggccccctgtctgtccttgatttctactgaagctttcccttcagcacatgaacacagttcacccatctcgcagcagaaccttctcttgacctcaaatcccttgtaactggctgtttctttgactctgcacccacgcttcttagatgaatcacccccattcactgtttctccctcttcacctccccttcactcctttgcccactgcaatcctgattcctgactttatcacttcacagttttatcctctaagatcccatggggccatgaacactgttaggaccctaatctccttgaccctgctacactgttaaggactcaaagcttttgtgccagtggcttcctgccttattttgtttttctactttccttgccattcctcaccagcttatttgtggattcacctacttccttccaccacttaaatgttggctggtgggctaagcagtaatccaagcactttgggaggccaaggcaggaggatcrcttgaggctgggagttaaagactagcctgggcaatatagcaagaccccatcactacaaaaaattaaaaaaacaaaaaactagctgggcatagtggcacactctgtagtaccagctacttgggagactgcgatggggggattgcttgagcccaggagtttgaggcttcagtgagttatgattgcaccaccacattccggtctggacaatagagcgtgacccgatctctttttatttatttatttatttttgagacagagtcttgctttgttgcctaggctggagtacagtggcacagtctcggtttactgcaacctccgcctctcaggttcaagcgattctcctgcctcagcctcccgagta

SEQ ID NO: 49284 - DNA, 1938 bp, Homo sapiens
tgaggccaggagttcaagaccagcctggccaacatggcaaaacgctgtttctactaaaaatacaaaaattagccgggtgtggtggcacatgcccataatcccagctactgtagtggctgaggcatgagaatcacttgaacccagaaagcagaggcaggctgcagtgagccgaggtcatgccactgcacttcagcctaggcaacagagtcagaccctgtctacaaaaaaaaaaaaaaaggaaaaaagaaattcctgggaatctgagtgctttgaatgtgtagtcagagcacttggatctggcccacaaccttggagtctgtcagagttcactagccctgcactacgccagttcttggccttcattcgccttcttcactggggtcacgggtcctgcctttctctttcctttgtgctcacagtccttgagcacttgaatggtgccctttctctcttcctacctgggccctgtgctgccaagccattctcttgtgaatcctcagtcagtatcccaattccccagagtgtctaatccaaatgatcattttttttcaagcacctaactccattcctgccttccttcctactttacagggcaatgtgaactctgctaacttccaccttctttcttgacttgcagacttttccacatttcttccctgtctactctcatctcggaggaggtgagaaatggtggccctgtctaaggctgtgatctggatgcatcccttcctcctcctcccctcccccagcccagctccctctacccctgctcttttccacctctcagttagctcatctttctccttgattttctttttcttttttttgagacagagtctcactctgttgcccaggctggagtacagtggtgtgatcacagcttattgcagccttgacctcctgggctcaggtgatcttcccaccttccacctgagtagctgggaccacaggcgcataccaccacacccagctaagttttattttttgtagaggtggggtcttgccatgttgctcaggctggtctcaaacttctgggctcaagcaatcctcctatcccagcctcctaaattgctgggattacaagtgtgagcaacggccccctgtctgtccttgatttctactgaagctttcccttcagcacatgaacacagttcacccatctcgcagcagaaccttctcttgacctcaaatcccttgtaactggctgtttctttgactctgcacccacgcttcttagatgaatcacccccattcactgtttctccctcttcacctccccttcactcctttgcccactgcaatcctgattcctgactttatcacttcacagttttatcctctaagatcccatggggccatgaacactgttaggaccctaatctccttgaccctgctacactgttaaggactcaaagcttttgtgccagtggcttcctgccttattttgtttttctactttccttgccattcctcaccagcttatttgtggattcacctacttccttccaccacttaaatgttggctggtgggctaagcagtaatccaagcactttgggaggccaaggcaggaggatcacttgaggctgggagttaaagactagcctgggcaatatagcaagaccccatcactacaaaaaattaaaaaaacaaaaaactagctgggcatagtggcacactctgtagtaccagctacttgggagactgcratggggggattgcttgagcccaggagtttgaggcttcagtgagttatgattgcaccaccacattccggtctggacaatagagcgtgacccgatctctttttatttatttatttatttttgagacagagtcttgctttgttgcctaggctggagtacagtggcacagtctcggtttactgcaacctccgcctctcaggttcaagcgattctcctgcctcagcctcccgagta

SEQ ID NO: 49285 - DNA, 554 bp, Homo sapiens
gaatatcctagtgcttttatatcagtctcacatcctcaacacgctggtttccataaaaaygcaaccaagtcagatggctgtgatctggtgggattctagttccatttgcagcctccaaagcagtcttttacctaagaacactcaggcctccaaggttaagataacagtatactccaatgcaaaattctctacctccctacttcaggtcccagggactctcaactgccagtcactctttgaacaataagaacagacacttaaatgatgataactaatggcagcagcactaatgtaagaacgctggaactattagtactctcatcttccagatgagagaactcaataacatgatttacataaactgcctgaagatacagtagaataataataatgaaatccaggcattgtggacctgaatgctgctacctagctactcctctttgtggcttctccattgtcttttcctgccagttcagttctaacaggaataaacagacgctattcaaaagcttttcaagtctgaatgaagatgtacctagggttggtgttgatga

SEQ ID NO: 49286 - DNA, 552 bp, Homo sapiens
attaaaaaattctgagtaccttttattccacaaaatccattgtatgccatgtatacaaagggcatttaagatggacagtgccgcgatggtagttttactgttaacagactagaaactcgtttatggcacagggcttcaccatgacttgacatcatctctgatttttttctcaaagcaacaagtgatacttgtgataagtgcttagagaatggtatctagtttagattactttctggtctacagtaattcattattgcccaatattaaaaagaacatacagggagcacgaggtggatgggacacctgaggtcaggatttcgagaccagcctggccaacatggtgaaaccccgtctctactgaaaatacaaaaattagccaggtgtggtggcgggcacctgtaatcccagctacttgggaggctgaggcaggaggatcacctgagyctgggaggcagaggctgcagtgagctgagattgcaccactgcactccaggctgggcgatacagtgagattccatctcaaaaagaaaaaagaacaaagaaaaagaacat

SEQ ID NO: 49287 - DNA, 579 bp, Homo sapiens
atggaatgcgctacctgtggccttttaacattcaagagtatgcccacccagccccaaagccaccggcatgtgaagctgccggaaagtggacaggccagaccagggagatgtgtacctgaggggcrcccttgggcctgggctttcccaggaaggagatgaaggtagaagcacctggctcgggcaaggctagaaagatgctacgttgggccttcagtcacctgatcagcagagagactctcagctgtggtactgccctgtaagaacctgctcccgcaaaactctggagtccctgggacacaccctatccaagaagacccaggggtggaacagcggctgctgttgctcctggcctcatcagcctccaaactcaaccacaaccagctgcctctgcagttggacaagacttggcccccggacaagactcgcccagcacttgcggctgggcccggggagcagtgagtggaaatcccccacgagggtctagctctaccacattcaggaggcctcaggaggccagcctgccatgagagcacatgtcctctggccaggagtagtggctgagctctgtgatcgctgtga

SEQ ID NO: 49288 - DNA, 579 bp, Homo sapiens
atggaatgcgctacctgtggccttttaacattcaagagtatgcccacccagccccaaagccaccggcatgtgaagctgccggaaagtggacaggccagaccagggagatgtgtacctgaggggcacccttgggcctgggctttcccaggaaggagatgaaggtagaagcacctggctcgggcaaggctagaaagatgctacgttgggccttcagtcacctgatcagcagagagactctcagctgtggtactgccctgtaagaacctgcycccgcaaaactctggagtccctgggacacaccctatccaagaagacccaggggtggaacagcggctgctgttgctcctggcctcatcagcctccaaactcaaccacaaccagctgcctctgcagttggacaagacttggcccccggacaagactcgcccagcacttgcggctgggcccggggagcagtgagtggaaatcccccacgagggtctagctctaccacattcaggaggcctcaggaggccagcctgccatgagagcacatgtcctctggccaggagtagtggctgagctctgtgatcgctgtga

SEQ ID NO: 49289 - DNA, 566 bp, Homo sapiens
ttcctaactcagaacattgtggatcaaaagttgagccttcagaggagccctaggcayggcactcttgcattttggggtagtaatcagtatttatgtggataaagtgatttgcccatctcagaaataggaggcttggctgtgttcaacaaatctggtgggtgtcataccctggcctgggcactggggtggcacaaagatggatcaggcccagtcacagtctttagagaaccatatgggaatgggagtttgccctgggatagagaggaatgaataattagaagctcaatgtcatcttcccggaggtatcttgtttatcatgagcgctttttcctctctaaactgtggcatctgactaagatgaaaccacctgtcactcatgcagggcttaatcttgcctgaactttgacttacacagaaaacattagactttctcatcatctcctatttacaatgtcacaatgtttgcttttgcctcttctttggtagtttgattgtcttaactcttaacattaagcttcagtgactttctggtttgttttacacattcagaaagctatttaaacatt

SEQ ID NO: 49290 - DNA, 566 bp, Homo sapiens
ttcctaactcagaacattgtggatcaaaagttgagccttcagaggagccctaggcatggcactcttgcattttggggtagtaatcagtatttatgtggataaagtgatttgcccatctcagaaataggaggcttggctgtgttcaacaaatctggtgggtgtcataccctggcctgggcactggggtggcacaaagatggatcaggcccagtcacagtctttagagaaccatatgggaatgggagtttgccctgggatagagaggaatgaataattagaagctcaatgtcatcttcccggaggtatcttgtttatcatgagcgctttttcctctctaaactgtggcatctgactaagatgaaaccacctgtcactcatgcagggcttaatcttgcctgaactttgacttacacagaaaacattagactttctcatcatctcctatttacaatgtcacaatgtttgcttttgcctcttctttggtagtttgattgtcttaactcttaacattaagcttyagtgactttctggtttgttttacacattcagaaagctatttaaacatt

SEQ ID NO: 49291 - DNA, 505 bp, Homo sapiens
tccaataatttctgggtttatagataacctgagaagggaacagtgtttgtgacatcctctgatgcttctgagatcgacacgaaaatttcctctcttttacaagggatattgcattctgctcagtactgctgagggaaatctgttccctaggtcctggaatgcagccatgtgcyctgatatccagagtttcgtagtgtggtgtcccaggttatgagattataacaggaagtcataatttatagaatttctgcattataggcagtggaggacactgcaagaacagagttggaatgcacgtcatccacattgattcagttactatgtatggtggtggactgtcaggtacagaaattctcagaacctccataattatgaatcttgtgtagctgaggccattgtcaaaggaaataatataaaggattcgtggattcctgtaccctttctcggctgttcacctcaaggcattcctgcattggccgaggaacaagatagggagaacggggat

SEQ ID NO: 49292 - DNA, 505 bp, Homo sapiens
tccaataatttctgggtttatagataacctgagaagggaacagtgtttgtgacatcctctgatgcttctgagatcgacacgaaaatttcctctcttttacaagggatattgcattctgctcagtactgctgagggaaatctgttccctaggtcctggaatgcagccatgtgctctgatatccagagtttcgtartgtggtgtcccaggttatgagattataacaggaagtcataatttatagaatttctgcattataggcagtggaggacactgcaagaacagagttggaatgcacgtcatccacattgattcagttactatgtatggtggtggactgtcaggtacagaaattctcagaacctccataattatgaatcttgtgtagctgaggccattgtcaaaggaaataatataaaggattcgtggattcctgtaccctttctcggctgttcacctcaaggcattcctgcattggccgaggaacaagatagggagaacggggat

SEQ ID NO: 49293 - DNA, 1028 bp, Homo sapiens
acacactggtaagtatttgtgtattcaaacatatctaaacacatagaaggtacctagaaggtacaaggaaaatataatattataatcttatggaaccattgtcatatatctggtcagttgttgaccaaaacatttttatgcatgcatgcctgtgttacagyacttgtattagtgtgatagaattatagattatttccttgataatgataatgctctaatgttatttcacatgaaaaaataaatattatttttcaataagcaggtaaataatttttttaatctatcgttgtaactttgaattatacaatggtgttaacaacccggagaaaaaggagcataattaatatatccttaaaatagaacaatgcatttcaagatgaatactaaatctagaatattattaacatcatatattcatagatagacaagaatttttctttttctttcattttctagctctttttatcactctactttgacccctctagattgtcaaaaattttctgatattaagtaaattcttatactaatgcagaaaatggtaagttcatataaaatagatctaatattaaagccttactagtataaggcatacaaaagatattacttccaggtctatgagtaattataactattttatggtatattaatttgatgctggcagttaaaagcgataaattaatattttggttcatattgtacttgcaattagtgtgaccatatgatttatttacttatttattttttttttgagacggagtctcgctctgtcacccaagctggagtgcagtggcacgatctcggctcactgcaacctccgcatcccgggttcacaccattctcctgcctcatccttctgagtagctgggactacaggcgcccgccaccacgaccggctaattttttgtatttttagtagaaacggagtttcaccgtgttagccaggatggtctcgatcgcctgacctcgtgatccacccgtctcggcctcccaaagtggtgggattacaagcgtgagccacttcgccc

SEQ ID NO: 49294 - DNA, 627 bp, Homo sapiens
cttgcttagagattcgtgtggacttaaaaataaaccaatcattgtgtactccatgaaacagtaaagtcatgtccaggacactaaatgacagttggagtctgcaatgctgtatacattaagtctagttattaaacatccctctaagataggcattaataatctcattttacaaacaaagataatgagccrcaaggcagtaatgttttcaaggtcaaaactaagtgattgagccaaattccaggcctgtgagacttttaagcctatgctttttatatgcaccacattgctctccttagtctgcagagggaaggacatgaaggagggaagaacgacccacagtttttcagctaggcagactgcatggcaagtgctggtgcccgtattctgagactaagaatgtagacagaggggcaagtttggagaacatgatatttggagatgtctgaagatcagtgtttgatgaccctggacagagatgcctgtaggtcattatatccagctactgcaggcagttgggaatgagagtccagagtccgcagtataggcctgggctggaaatgaggatgtgaacaccatccataacctatctagtggctgaaactctgagtattactgaatcctaccaaa

SEQ ID NO: 49295 - DNA, 1403 bp, Homo sapiens
atgaaaacagtggctctcaggcaaataaataaaacattaggtagwcaacacacagcacatcacaagcacagtccactaatttgcctattgctgaaggacattagccacctttgagataatctccataaacatactgccccatctccctctctcaaacatgaattgtatcaagctaaatttttaatgtttttcaatgtcttatatatatttcatttcaacaacattttttaatagtaagatatccatcttaatcaaatgaaagctgtttttctgtaattgtcctaaaagccaattcattttctggaaaaacatcttcttgaatcacaagtggccgggctaaacagtgttctcagaatattaatgtgaaacttaagctattaacatgtcatggttaacctttctaaaagctaattaaattaaaataataatatgtggaatgcttttacagaaaggtaaggctcttttacaaagcacctgttccaagtctcagagctaacaccttatgaagccatggtgggaaaaaggttttgcaggcagacaaagaaagcctggctttgcacctgctgtgattaacttttagttgttggtattagagttaattattgcagcatgctggagggcagtgacaatttacttgcctgatcatacctaataagatgtatttgcggatgccagcatctcctggacttaatcaacaaactatcaagacaatcaatgctgttaggccccatgtccttgtgatagttttttccaaataaaaaagataaaaatccaaggatgcagtgctaaggatataggcaggctgcttagaaagcctccgttagctagcgtcaggcttatctccctccctgagtggctagatctattatgcaggagggttagtgcaccctaaggcccgattcaattgggagcaaagttcaaggcaaccacaccaggtacaaggaaattaagctctgagaactccagcacttcttggtaactgagctctggaaggcttcaaatgggccctttctactttatcttctatgggaaaaggttgttatacccaaggcgctataccctcttcctgctacacaaggagggagtttctgttcctttatttgataatctatgcttgaatccatggaatacatttttaaaggaaagaaactagctatgatataagacaggttggcaaattccataaaacaacatgctttagtttcaactctgttcctttttaggccccaacaaattagcaaaactcctatgagaggactggggtcatgtgtgggcacacaaaataaggagggtgctaccacctagagggatctcatacaggtaatggagaggtgcaggtgacagcaatcagcagcctgggggcactgaaaatagaactaagactgtctttgactcataagtca

SEQ ID NO: 49296 - DNA, 650 bp, Homo sapiens
  misc_feature (1)...(650): n = A,T,C or G
caagaaaatggaagcccaaatattcattgacaaaataaaaagtaaatttttggaatagtcacacaatgaaatatcttacaacagtaaaaatgaaccatatccatgtgaaactagtttcattatgcaaaactaaatcatatgttgtttagggaaatatacatttgttgtaatgtttataaagaaaagcaagaggacagcaattacaaaattcaagactgtggttatctctggtatgaggaaagggacatggttgragggggcactcaaggaacttcaacggtactagaaatatcattttacatatagatatatttttcatactagaaatatcattttatatattgacacatttttcatccttttagtcacatgtatatacgtatatgcattacattttttgtgtataatatttcataactcttaagataaatgaataagtattaggctctggaaatgggagagaaagaaaagaatgttccaaataagagatcagcttatgttaatttaaggccaggagataaggacataaactctctggctgaagcattgagttcactgagtgagaggagaaaaggnctttcggaggggagagctacccancaggggtcagactgtatagggatttctaaaccacaagagagttttgattg

SEQ ID NO: 49297 - DNA, 650 bp, Homo sapiens
  misc_feature (1)...(650): n = A,T,C or G
caagaaaatggaagcccaaatattcattgacaaaataaaaagtaaatttttggaatagtcacacaatgaaatatcttacaacagtaaaaatgaaccatatccatgtgaaactagtttcattatgcaaaactaaatcatatgttgtttagggaaatatacatttgttgtaatgtttataaagaaaagcaagaggacagcaattacaaaattcaagactgtggttatctctggtatgaggaaagggacatggttggagggggcactcaaggaacttcaacggtactagaaatatcattttacatatagatatatttttcatactagaaatatcattttatatattgacacatttttcatccttttagtcacatgtatatacgtatatgcattacattttttgtgtataatatttcataactcttaagataaatgaataagtattaggctctggaaatgggagagaaagaaaagaatgttccaaataagagatcagcttatgttaatttaaggccaggagataaggacataaactctctggctgaagcattgagttcactgagtgagaggagaaaaggnmtttcggaggggagagctacccancaggggtcagactgtatagggatttctaaaccacaagagagttttgattg

SEQ ID NO: 49298 - DNA, 650 bp, Homo sapiens
  misc_feature (1)...(650): n = A,T,C or G
caagaaaatggaagcccaaatattcattgacaaaataaaaagtaaatttttggaatagtcacacaatgaaatatcttacaacagtaaaaatgaaccatatccatgtgaaactagtttcattatgcaaaactaaatcatatgttgtttagggaaatatacatttgttgtaatgtttataaagaaaagcaagaggacagcaattacaaaattcaagactgtggttatctctggtatgaggaaagggacatggttggagggggcactcaaggaacttcaacggtactagaaatatcattttacatatagatatatttttcatactagaaatatcattttatatattgacacatttttcatccttttagtcacatgtatatacgtatatgcattacattttttgtgtataatatttcataactcttaagataaatgaataagtattaggctctggaaatgggagagaaagaaaagaatgttccaaataagagatcagcttatgttaatttaaggccaggagataaggacataaactctctggctgaagcattgagttcactgagtgagaggagaaaaggncttwcggaggggagagctacccancaggggtcagactgtatagggatttctaaaccacaagagagttttgattg

SEQ ID NO: 49299 - DNA, 650 bp, Homo sapiens
  misc_feature (1)...(650): n = A,T,C or G
caagaaaatggaagcccaaatattcattgacaaaataaaaagtaaatttttggaatagtcacacaatgaaatatcttacaacagtaaaaatgaaccatatccatgtgaaactagtttcattatgcaaaactaaatcatatgttgtttagggaaatatacatttgttgtaatgtttataaagaaaagcaagaggacagcaattacaaaattcaagactgtggttatctctggtatgaggaaagggacatggttggagggggcactcaaggaacttcaacggtactagaaatatcattttacatatagatatatttttcatactagaaatatcattttatatattgacacatttttcatccttttagtcacatgtatatacgtatatgcattacattttttgtgtataatatttcataactcttaagataaatgaataagtattaggctctggaaatgggagagaaagaaaagaatgttccaaataagagatcagcttatgttaatttaaggccaggagataaggacataaactctctggctgaagcattgagttcactgagtgagaggagaaaaggnctttcggmggggagagctacccancaggggtcagactgtatagggatttctaaaccacaagagagttttgattg

SEQ ID NO: 49300 - DNA, 650 bp, Homo sapiens
  misc_feature (1)...(650): n = A,T,C or G
caagaaaatggaagcccaaatattcattgacaaaataaaaagtaaatttttggaatagtcacacaatgaaatatcttacaacagtaaaaatgaaccatatccatgtgaaactagtttcattatgcaaaactaaatcatatgttgtttagggaaatatacatttgttgtaatgtttataaagaaaagcaagaggacagcaattacaaaattcaagactgtggttatctctggtatgaggaaagggacatggttggagggggcactcaaggaacttcaacggtactagaaatatcattttacatatagatatatttttcatactagaaatatcattttatatattgacacatttttcatccttttagtcacatgtatatacgtatatgcattacattttttgtgtataatatttcataactcttaagataaatgaataagtattaggctctggaaatgggagagaaagaaaagaatgttccaaataagagatcagcttatgttaatttaaggccaggagataaggacataaactctctggctgaagcattgagttcactgagtgagaggagaaaaggnctttcggakgggagagctacccancaggggtcagactgtatagggatttctaaaccacaagagagttttgattg

SEQ ID NO: 49301 - DNA, 695 bp, Homo sapiens
gaaggtgaaggggaagcaaataccttcctcacatggtggcaagagagaaagagtaagcggggaactgccaaacacttttaaaccatcagatcttgttagaactccctcactatcacaagaacagcatgggggaaatgacccccatgatccaatcaccttctaccaggtccctccctcaacatgtgaggattacaattcaaaatgagatctgggtgggacacagarccaacccacatgagggagtaagctgtggggctctctgaaaaaagagagtttccacagaggggacaacaggagcaaaagccccactgcctgagcttacctggagtatggaaaccacagggaagccagcagggctagctataggacatggggtgaaaacggagcctcaggggtgtggggtgagggccaatcgtgcggcacactgtgggcattagagggccttggtctgtgccaggtttccctgctaactcctcctgagctcctccttcaccctaagtttccttgtttgtgcagagggaataatcgtctcgaacctgcctttgtcacagagtggctgggaagtttgggggtcccagacccagcctcagccttcactcctagtctttgaaatgactttggaaagaaattcgggaaaactgaaaataatttcttttctgcttttctcttccaatggctgttctctggtccatgtt

SEQ ID NO: 49302 - DNA, 501 bp, Homo sapiens
atatttttcctaacacgtaaaaacatgtatcaagaccaggaatggtggcttacacccgtaatcccaacactttgggaggccaaggtgggcggatcacttgaggtcaggagtttgagaccagcctggtcaaagtggtaaaaccccgtctctacaaaaaatacaaaaattagccaggtgtggtggcatccacctgtagtcccagctccttgggggttgctgaggcaggaggatcacttgagcccaggaggtcgaggctgcagtgagccatgtttgcaccacttcactccagtctgggcaagaaatgagamcctgtctcaaaaaataaaaataaaataaaaaaataaagacgtatcaatgacccaaactacaggaactaaaactagaacaggtatgtagcaggataaagcttcagaggtgatcttcatgttaataaatacaaatgttttcccttctacaaaattcagagtcgacttgcttggtcagcaaaaaaaaaaaaaaaaa

SEQ ID NO: 49303 - DNA, 592 bp, Homo sapiens
tgaaatattattatggccataaagactaatgaacttctccttcccagcccctgacccaactgaggggtggtggatgtttatgtaagcaaagcaccagcagctcaaatgggaggcagcaaacaattataaatattgaccttggccacatggagagggaataaagccatagtcaaggtattaaaacagtacagtgtgggtggagtgctgacgctggaagagggtgatagctctgctggggagtcattctggggaccctgtgctgggtgcttgaatagttaggccaggggtttttagctccatgggaacaccttgcttttttcagcttcatttattttatcttttaaacccagccctctgccaaagaggacgtgcaatggctagcaattaagacatgtcaaagtgmacttaaaatgaaccagaggctgggcacagtggctcatacctgtaatcctagcactttgggaggccaagaggggaggatcatttgagcccagaagttcaagaccagcctgggtaacatagtgagaccccatctctacaaaaataaaaataaaaaattagacaggcatggtggcacgtgcctgtaatccca

SEQ ID NO: 49304 - DNA, 1977 bp, Homo sapiens
ttagccaggcatggtatggtggcatgtcccagctacttgggaggctgaggtgggaggattggttgagcccaggagactgaggctgtagtgcagctgtgatctcaccacagcactacagcctgggtgacagagcgagaccttgcctttaaaaaaaaaaaaaaaaaagacaacaaactgcttccagagaattagtgaaagcaaatattaaaattctctgggagatgaaaggactgatggaagccaagtatctaagatgctactaccattttctacaaagaaatgtctgggtaaaacagcagctgctccaccttttctgaatggatggcttcattagctgaaagaaaggaaacattagctgacagaaaagaactaaattgttcagaaaaagtagtgttagctaccaagatattgtactattaaaaaaaaagatattatactataactaactttctcctggatgtttagacaagaactttgtgaataaagttagaaaaatactaacatttaagtacaaggtactattcataatatttagaaatgttttaatatagtttaagtttcctatttttgtatattttattaatatttaaaatattttatactaaacaaaagagatttttgccatctcctattgaaataaggcaatttacagggaagggagtttcaatacaaaccatcaccttctatatcaatttagtattcttcaaggtgtttgaaattcattattatctcaggggatattgttgatcattgttaacttagtcttattataaagtataagaaataagatctgaaaaacttaatagaatttcattttaataagtatatttaaagtttatcgcttccaaaaaacagcactttaattacattcaagttgtattcattttaaataccaacaaacccatcatttacatatagagctagatattacaaaacagatggaaatttaaacaagttttttttttaagtccttccaaatttagaacattgtgaactattaagtacatgcctaaaaaatgtacacattatcagggaaacacaagttgctctaataggaaaagagccataatacacatacagtggaatataattcaaataggttcaatttacaggtatgtcttaaagtacaagaaaaccccaaagctaataactagaactataggcaaaatcatagctgactttctaaactaatgcaccactatataatgctttcccagagaaagtagaaggttctcaagattttatgttgacccatgatttttcacgtgttctcaaatataaaaccagagttttctttttgtctttaatttacactcatgtttgcctgtttgcttttataagaataactaaaatgtatcatgagaagtgccatcaaacctgtctatttagagctcagtaaccaagacatttctttcatttttccctgttgctctattttcccttcaaaaagtctctaaggaaattttataaacagtggtggtaaaaagataattctgagatggcaaagaaatatgagacttggcacaagcacggatttacaaaaaaaaaattatcccccatttattaaaccatatatgcgaaaaaggaaaatcatatctgaaaacataagccagtgaaaacatactgaaaaaaaatggaaggcggcacttagaattgtggcgcttgcaggctttagtttggaagacgcacagcaagcaagctaccagttgagaatttttaaaaacttgtatgaacttgtttaaattttgaacttgtttcaatcaagttgtagccaaaacaaaaaggtcataattactgtgctcatataagagatgtgacgagggaaggagggagggagaaatgcaggaaaggagyggggagaggaggaagggaggaagagagggaggaaagagtaaggtacacatcaggttaaaaggggcagaattaggaataaaactaagcacttaatctaatctgatcaggaagaaactttgccct

SEQ ID NO: 49305 - DNA, 898 bp, Homo sapiens
tagagcttccactgtgcctaataatagaattatttaaatggtgatatattttcagggacacacaacattctcatttcaaccttgtcacttatattggatggggaaataaacatccttcacacattttttccctttctacagtatggcacattgctgttctgacaacttgtaatgtcacctgaatgttaccttgaatcatgatttagtgggccagagcaaagcaacatctcatttatatctgctatttccttgcattgcaatgtaatggttgcaaagacaaaaattaaaattgaatgtggaaacagatggaggagttgtatgtctgtaaaaatgtgtcccttataaaaggtcaaggttgctcaaatttctacttgggggaaaaaatcaattttgggacatagcaaaagccatatgacaatttattttgctcaactaaaattaattatttctgaattattaacctttaatattttattctacttatgctttttatcattaattgaaaattatgtaggatatcaaaaatactatgatatgtttcaatacttaggtgtacttcctgaataattttggaaatattttattattatattgcttcattaaagctagcatcctgggaactaaatgcatgacttatcattataaataaacaattaaatccggaaaaactgcttcactagagaaagttaggctcataaaatatcttgcagttaaattcccctgttttttttttctcttctactttcaattcaaacctctgtaaacatttaccattggcatttgttaattgaaatttaatctacttgatagcttattttggggcgatcacctacattttttattctctrttgacttcaaatttttgttgccaaaaaataaataattaagaatcatgtca

SEQ ID NO: 49306 - DNA, 595 bp, Homo sapiens
ctcctgcctcagcttcacgagtagttaggactacagatgtgcaacaccactcccagataaatgggttttttttctttctttttttttttttttttgagacggagtctcactctgtaacccaggcaggagtgcagtggtgcgatctcggctcactgcaacctccgcccctccaggtttaagcaattctctgcctcagcctccgaagtagctgggattataggcgcgtgccaccacgcccagctaattttttgtatttttagtagagatggggtttcaccatcttggctaggctggtcttgaactcccgacctcgtgatccaccctcctcggccwcccaaagtgctgggattacaggcgtgagccactgcctccggctggggttttgttatattgtccaggttgacctttaactctcggccccaagtgatcctcctgccccggcctcccaaagtgttgtgataacaggtatgaataaccatacccagcccacagcctaatttcttattacccaaatcattcagcattccttaagatatgggattaaatgaggtggaggtttttttttttttttttttttgtttgagacagtcttttt

SEQ ID NO: 49307 - DNA, 563 bp, Homo sapiens
tttcctggggactgcctatttttaatactctgtgatatggtactttgatgctggtaagaatgtttaataggcaaagaataatctagttaaaagattcaagacaatttgacatcatttgataccagtaaaataaacccaataaaaagcaattctaaaatgagcccttttgtttcattaaacattcttgtgatatttgtcacatatagaaacaaaactcaagtcttctgtgattgccatcatatttttcttcctgcaaatgtaatcacagataggccactatgccttttaatsggggggaaaggcattttgaacttactttcatggggctgacttcaaaatgttaaagttactgatcatgcatatttaatagtatattaccatgagcacagttgcagatacatatacctcctatggcactagtgatgtgtttactgaaccgaggtatccatttatatctgtaacaaattgaaggttaggactcatgaactttagggttttgtaaattgcatatgtgttttcaaatggtattatttttggagattatacttttagggttatctgag

SEQ ID NO: 49308 - DNA, 746 bp, Homo sapiens
tggggaacaaagagagacaagaaaatctgaaagtgattgtagttaatctaatgtatgtactttaggattttggtcagagagattcacagcccattgggtcccttcacatttccttgatacactaatagaatctgatttcctagtgtcagaatgagaaattctgcataacmtcagaaacacatatatttagagaagctggaaagtgaccaagtgtaagctgactgcccatctggcagctggaaagatgaactaatatgactcttgagccccaagtttggtatgaaatagcaggaagagctggactagagaacattattgtagagagtgctctcactggatgtcatgggaggaaatcattggctctgctgattctttctgaacaacccaagaggctttgtctggtgtatcagatgcttttaattgatttcagtagttttatctcattttctgggtgatctaactgcagagtgtgagtgagcagaacaggatgccattgctgagaaaagcattattcatgtcattggaggagatttttagacaaaggaacacctagaagcatgctcttgataccgttatcctgatgggttggtgagggaagtcaccaagtctctgagtcagaggacttctctcctttagcctgagaaaactcgacttccagggttgccagtctgctaacgatatgggagaagagtccgtaattcccacaccagtgagtgccctccttgaatctgagtggagaatttcat

SEQ ID NO: 49309 - DNA, 746 bp, Homo sapiens
tggggaacaaagagagacaagaaaatctgaaagtgattgtagttaatctaatgtatgtactttaggattttggtcagagagattcacagcccattgggtcccttcacatttccttgatacactaatagaatctgatttcctagtgtcagaatgagaaattctgcataacctcagaaacacatatatttagagaagctggaaagtgaccaagtgtaagctgactgcccatctggcagctggaaagatgaactaatatgactcttgagccccaagtttggtatgaaatagcaggaagagctggactagagaacattattgtagagagtgctctcactggatgtcatgggaggaaatcattggctctgctgattctttctgaacaacccaagaggctttgtctggtgtatcagatgcttttaattgatttcagtagttttatctcattttctgggtgatctaactgcagagtgtgagtgagcagaacaggatgccattgctgagaaaagcattattcatgtcattggaggagatttttagacaaaggaacacctagaagyatgctcttgataccgttatcctgatgggttggtgagggaagtcaccaagtctctgagtcagaggacttctctcctttagcctgagaaaactcgacttccagggttgccagtctgctaacgatatgggagaagagtccgtaattcccacaccagtgagtgccctccttgaatctgagtggagaatttcat

SEQ ID NO: 49310 - DNA, 558 bp, Homo sapiens
gcccctgcctcccaattgccctgttcctctccaaacgaggcccccatactcttctctctgtattgacctttccattctagaagcagagactccaagatctttttccaatctccggtggggaaactgaggctcataaagggcacaagagcataaatcaagcaaggagcaaagctgggacttgaacccaaggctgtgtgattccaaaccctgggaaccattatttgctaacctcccccctacgccccccccttttcttttggtagggacgaggtctcgctatcttgcccagactggtctcgaactctgggcatcwagcaatcctctcgtctacggcctcccaaagggctgagatcactggcgtgagccatcgtgacgggcttctctaaagctttcaaggaaagtcttggagctgtgggtaattagagagtttgaatttcataatcagccgatttaacccatggctgccatggttctgagaagggctgatagcaagaggcaggcatcccagctctgtggtaccggcggggccatggtaggccctcaggagagctcaggtct

SEQ ID NO: 49311 - DNA, 582 bp, Homo sapiens
atcctttatcaagaagtctgaagcgactwtaaaggtttttgaattcagatttaaaaaccaacttataaagcattgcaacaaggttacctctattttgccacaagcgtctcgggattgtgtttgacttgtgtctgtccaagaacttttcccccaaagatgtgtatagttattggttaaaatgactgttttctctctctatggaaataaaaaggaaaaaaaaaaaggaaactttttttgtttgctcttgcattgcaaaaattataaagtaatttattatttattgtcggaagacttgccacttttcatgtcatttgacattttttgtttgctgaagtgaaaaaaaaagataaaggttgtacggtggtctttgaattatatgtctaattctatgtgttttgtctttttcttaaatattatgtgaaatcaaagcgccatatgtagaattatatcttcaggactatttcactaataaacatttggcatagataaataaataaacacagtgatccagggtccctcttttatgtttacaaacaagctattcaaatgtctgaaagtaaggattgcatgtgaattggggta

SEQ ID NO: 49312 - DNA, 1485 bp, Homo sapiens
ttcattttgagtgctgacctttatagattagtaagggctttcagaagcactgtgttaaagtgctctttatctgtgttgcaaactgcaattgagattggtagaaaaatgcattgrtgttaattattatgtcagccataaacattggacagggtggaggaagagtaagcatttgtcttcagtgaattccatcatatgtaaggagaaatacgtaggttttggcattagaaagacataaaattctgtttggggaaatgatgggtgggaaaattcttacaaactctttgaagcaacctaaaaacaccagattatatataaaataaaacatcataaaaacatcatctaactaacaagatagtgaaaagatatttgagaagaaaaaagtccagagagatgaatgaataaggtgttttgcaccacttttgcacagtgggaattagctgatgcagcagaggtggtctagaaaccctgcatcgctttggacagtgtctcagacacaggaggagatcatttggagttcatgtcctaccaagggtgaggactagattgtcaaatcccagacaagtacacgtttgagattttacacagtatcaaggtatactaaggtatacttcccatattttaagaatatgggaagacataggtctcagtaacagcaggaagtacttgagatcctcaacacacaataccaggtcttttcttaatatactctccgggccagattaattaatatctgaggtctccaagttatgtatgtgatcacatcattcacacaaaaggaagccatctgaagcaaagcatatcactgttttgaatcctgatagtaaaaattacgtttgttatatgatccagaaatatacaaactccaagcttctttaccttattctagatagacgagttatacactgctaaattcttactatacataaggactgtatcacagaaatatcattagtttatttgctaggaggcatttcattgggatattttcaagatttatctggttcacttcccttctttatttcttgggggcaatgtcctggtaaaggaagagactagattccaagtcaattgctaaccattttcttcttattttcttatatttcttatagcttaggtgacataaataggaagatgtttgttactctagcataataaaataaattacattattatttgtttgcatttaaatattagttccttctggatattgttttatataagagatatggatctaaatgtgctatacaattatcccagtattatttattcattgcatactaatttgcagttaaaattcattaatatttttaccttatgaaaatacataacatatactatatatgtatagtattacattattcttttccttcaataaaaacttgcatttctgagttcattaaattcttaatttgctttagcaaattataaaatgtttttattttgatgatatattgtgggttctatggtttctaataattgtcttta

SEQ ID NO: 49313 - DNA, 1485 bp, Homo sapiens
ttcattttgagtgctgacctttatagattagtaagggctttcagaagcactgtgttaaagtgctctttatctgtgttgcaaactgcaattgagattggtagaaaaatgcattggtgttaattattatgtcagccataaacattggacagggtggaggaagagtaagcatttgtcttcagtgaattccatcatatgtaaggagaaatacgtrggttttggcattagaaagacataaaattctgtttggggaaatgatgggtgggaaaattcttacaaactctttgaagcaacctaaaaacaccagattatatataaaataaaacatcataaaaacatcatctaactaacaagatagtgaaaagatatttgagaagaaaaaagtccagagagatgaatgaataaggtgttttgcaccacttttgcacagtgggaattagctgatgcagcagaggtggtctagaaaccctgcatcgctttggacagtgtctcagacacaggaggagatcatttggagttcatgtcctaccaagggtgaggactagattgtcaaatcccagacaagtacacgtttgagattttacacagtatcaaggtatactaaggtatacttcccatattttaagaatatgggaagacataggtctcagtaacagcaggaagtacttgagatcctcaacacacaataccaggtcttttcttaatatactctccgggccagattaattaatatctgaggtctccaagttatgtatgtgatcacatcattcacacaaaaggaagccatctgaagcaaagcatatcactgttttgaatcctgatagtaaaaattacgtttgttatatgatccagaaatatacaaactccaagcttctttaccttattctagatagacgagttatacactgctaaattcttactatacataaggactgtatcacagaaatatcattagtttatttgctaggaggcatttcattgggatattttcaagatttatctggttcacttcccttctttatttcttgggggcaatgtcctggtaaaggaagagactagattccaagtcaattgctaaccattttcttcttattttcttatatttcttatagcttaggtgacataaataggaagatgtttgttactctagcataataaaataaattacattattatttgtttgcatttaaatattagttccttctggatattgttttatataagagatatggatctaaatgtgctatacaattatcccagtattatttattcattgcatactaatttgcagttaaaattcattaatatttttaccttatgaaaatacataacatatactatatatgtatagtattacattattcttttccttcaataaaaacttgcatttctgagttcattaaattcttaatttgctttagcaaattataaaatgtttttattttgatgatatattgtgggttctatggtttctaataattgtcttta

SEQ ID NO: 49314 - DNA, 1207 bp, Homo sapiens
tgtcaagttttaaagtctctcagtgtgcagtttttagcctcctcaatgacttaatgtaaagtaagtattggtaactttttatttttgttgttttcaaaattctgggaaatttttatttattttcatctatttgaataacacctgtcacacacacttcagttcatattctttggaagtcagattagacataagctgaactttttcatgctctatgccttccaccatttgtgtatgtttgtgtgtgatttctgtacctctcagggctgcattataaataattttatcagatccatatttttatctgctaaatctaatctactaaatgtctcttgaatggtttgttttatttaaatgtctacagctggcctcactaggagctcttagcaatgagtttagaactcctgggtcttccctgagggaacttcgggaataatgtatttcatttcagaaaagattattgttgtgctgttgttgtttttwaaccctaattctagaaatgacatttccccttttgttcttatgattatacatacaaggatttctgtagttcaccttgagattcttagctttatgtgtgaatcctaatcattggcatcaagtgctaccaaggttatagctccctgagatgtcaaaacttctaataacttggttgtttacgcctatatcctcagaatcttttcacatataacaaggcacaacaaccctcacctgccaaatcctgtatacatctcttagaaaaaatttgctaagctagctttgctcttgatctctagctcttagaaatttcttttgccaggctgggcacagtggctcatgcctgtaatcagcactttgggaggctgaggcaggcagatcatgaggtcaggggatcaggaccatcctggttaacacagtgaaaccccgtctctactaacaataaaaaaaattagctgggcatggtggcatgggcctgtagtctcagctacttgggaggctgaggcaggagaatcgcttgaacccaggaggcagaggttgcagtgagcagaggtcatgccactgcattctagcctgggtgacagagtgagactccatctcaaaaaaaaaaaaaaaaaaaagaaattatgtttgccattttgtgagcttgtatcaaatcaaatctatcgatatgctcatctatttcttcattcgttcatgtattggtttgcttgtttattgctatcccagcatt

SEQ ID NO: 49315 - DNA, 1207 bp, Homo sapiens
tgtcaagttttaaagtctctcagtgtgcagtttttagcctcctcaatgacttaatgtaaagtaagtattggtaactttttatttttgttgttttcaaaattctgggaaatttttatttattttcatctatttgaataacacctgtcacacacacttcagttcatattctttggaagtcagattagacataagctgaactttttcatgctctatgccttccaccatttgtgtatgtttgtgtgtgatttctgtacctctcagggctgcattataaataattttatcagatccatatttttatctgctaaatctaatctactaaatgtctcttgaatggtttgttttatttaaatgtctacagctggcctcactaggagctcttagcaatgagtttagaactcctgggtcttccctgagggaacttcgggaataatgtatttcatttcagaaaagattattgttgtgctgttgttgttttttaaccctaattcyagaaatgacatttccccttttgttcttatgattatacatacaaggatttctgtagttcaccttgagattcttagctttatgtgtgaatcctaatcattggcatcaagtgctaccaaggttatagctccctgagatgtcaaaacttctaataacttggttgtttacgcctatatcctcagaatcttttcacatataacaaggcacaacaaccctcacctgccaaatcctgtatacatctcttagaaaaaatttgctaagctagctttgctcttgatctctagctcttagaaatttcttttgccaggctgggcacagtggctcatgcctgtaatcagcactttgggaggctgaggcaggcagatcatgaggtcaggggatcaggaccatcctggttaacacagtgaaaccccgtctctactaacaataaaaaaaattagctgggcatggtggcatgggcctgtagtctcagctacttgggaggctgaggcaggagaatcgcttgaacccaggaggcagaggttgcagtgagcagaggtcatgccactgcattctagcctgggtgacagagtgagactccatctcaaaaaaaaaaaaaaaaaaaagaaattatgtttgccattttgtgagcttgtatcaaatcaaatctatcgatatgctcatctatttcttcattcgttcatgtattggtttgcttgtttattgctatcccagcatt

SEQ ID NO: 49316 - DNA, 1207 bp, Homo sapiens
tgtcaagttttaaagtctctcagtgtgcagtttttagcctcctcaatgacttaatgtaaagtaagtattggtaactttttatttttgttgttttcaaaattctgggaaatttttatttattttcatctatttgaataacacctgtcacacacacttcagttcatattctttggaagtcagattagacataagctgaactttttcatgctctatgccttccaccatttgtgtatgtttgtgtgtgatttctgtacctctcagggctgcattataaataattttatcagatccatatttttatctgctaaatctaatctactaaatgtctcttgaatggtttgttttatttaaatgtctacagctggcctcactaggagctcttagcaatgagtttagaactcctgggtcttccctgagggaacttcgggaataatgtatttcatttcagaaaagattattgttgtgctgttgttgttttttaaccctaattctagaaatgacatttccccttttgttcttatgattatacatacaaggatttctgtagttcaccttgagattcttagctttatgtgtgaatcctaatcattggcatcaagtgctaccaaggttatagctccctgagatgtcaaaacttctaataacttggttgtttaygcctatatcctcagaatcttttcacatataacaaggcacaacaaccctcacctgccaaatcctgtatacatctcttagaaaaaatttgctaagctagctttgctcttgatctctagctcttagaaatttcttttgccaggctgggcacagtggctcatgcctgtaatcagcactttgggaggctgaggcaggcagatcatgaggtcaggggatcaggaccatcctggttaacacagtgaaaccccgtctctactaacaataaaaaaaattagctgggcatggtggcatgggcctgtagtctcagctacttgggaggctgaggcaggagaatcgcttgaacccaggaggcagaggttgcagtgagcagaggtcatgccactgcattctagcctgggtgacagagtgagactccatctcaaaaaaaaaaaaaaaaaaaagaaattatgtttgccattttgtgagcttgtatcaaatcaaatctatcgatatgctcatctatttcttcattcgttcatgtattggtttgcttgtttattgctatcccagcatt

SEQ ID NO: 49317 - DNA, 1207 bp, Homo sapiens
tgtcaagttttaaagtctctcagtgtgcagtttttagcctcctcaatgacttaatgtaaagtaagtattggtaactttttatttttgttgttttcaaaattctgggaaatttttatttattttcatctatttgaataacacctgtcacacacacttcagttcatattctttggaagtcagattagacataagctgaactttttcatgctctatgccttccaccatttgtgtatgtttgtgtgtgatttctgtacctctcagggctgcattataaataattttatcagatccatatttttatctgctaaatctaatctactaaatgtctcttgaatggtttgttttatttaaatgtctacagctggcctcactaggagctcttagcaatgagtttagaactcctgggtcttccctgagggaacttcgggaataatgtatttcatttcagaaaagattattgttgtgctgttgttgttttttaaccctaattctagaaatgacatttccccttttgttcttatgattatacatacaaggatttctgtagttcaccttgagattcttagctttatgtgtgaatcctaatcattggcatcaagtgctaccaaggttatagctccctgagatgtcaaaacttctaataacttggttgtttacgcctatatcctcagaatcttttcacatataacaagrcacaacaaccctcacctgccaaatcctgtatacatctcttagaaaaaatttgctaagctagctttgctcttgatctctagctcttagaaatttcttttgccaggctgggcacagtggctcatgcctgtaatcagcactttgggaggctgaggcaggcagatcatgaggtcaggggatcaggaccatcctggttaacacagtgaaaccccgtctctactaacaataaaaaaaattagctgggcatggtggcatgggcctgtagtctcagctacttgggaggctgaggcaggagaatcgcttgaacccaggaggcagaggttgcagtgagcagaggtcatgccactgcattctagcctgggtgacagagtgagactccatctcaaaaaaaaaaaaaaaaaaaagaaattatgtttgccattttgtgagcttgtatcaaatcaaatctatcgatatgctcatctatttcttcattcgttcatgtattggtttgcttgtttattgctatcccagcatt

SEQ ID NO: 49318 - DNA, 561 bp, Homo sapiens
taccctttgcagtccctttataatcaatatagatatgcagttgaatttaggtctgtcattttgtctcaactaacttttatttctccttttcttcatttctgyctgttctgaagttagcagattttgtttgtagaattttatttaaattcatctgttggtttattttttcgagagtgcgagtttatgcttttaaaattttcaactaaattttttattttgaggtaaatacttattcatgtatagtttgataaataatacaaaagttctttgtactcttttcattttcccaaaattatagcatactacaaactacactacaatattaaaatcaagatattaatattgatacagtcagtcaaaataccaaacagttccattatcaaagattttcctggttagttttttaaagctaaacatcccttttaccatcctctcatattcctgacttctgtcaatcactgatttgttctctctttcttctctatttttatgattttatcatttcaggagtgttatacatggatcttgcagtatgtgaccttttggaggtttttttttttt

SEQ ID NO: 49319 - DNA, 561 bp, Homo sapiens
taccctttgcagtccctttataatcaatatagatatgcagttgaatttaggtctgtcattttgtctcaactaacttttatttctccttttcttcatttctgcctgttctgaagttagcagrttttgtttgtagaattttatttaaattcatctgttggtttattttttcgagagtgcgagtttatgcttttaaaattttcaactaaattttttattttgaggtaaatacttattcatgtatagtttgataaataatacaaaagttctttgtactcttttcattttcccaaaattatagcatactacaaactacactacaatattaaaatcaagatattaatattgatacagtcagtcaaaataccaaacagttccattatcaaagattttcctggttagttttttaaagctaaacatcccttttaccatcctctcatattcctgacttctgtcaatcactgatttgttctctctttcttctctatttttatgattttatcatttcaggagtgttatacatggatcttgcagtatgtgaccttttggaggtttttttttttt

SEQ ID NO: 49320 - DNA, 457 bp, Homo sapiens
cacacacccctatgtaataaaccaccacagcacacacacccctatgtaataaaccaccacagcacacacacccctatgtaataaaccaccacagcacacacacccctatgtaataaaccaccacagcacacacacccctatgtaataaaccaccacagcacacacacccctatgtaataaaccaccacagcacacacacccctatgtaataaaccaccacagcacacacacccctatgtaataaaccaccacagcacacacacccctatgtaataaaccaccacagcacacacacccctatgtaataaaccaccacagcacacacacccctatgtaataaaccaccacagcacacacacccctatgtaataaaccaccacagcacacacacacgcctatgtaataarccaccacagcacacacacccctatgtaataaaccaccacagcacacacac

SEQ ID NO: 49321 - DNA, 638 bp, Homo sapiens
tatttttcaggcaaagcgcaaatataattctgttcctacattgcctcaaaaccaagatatgtaaaagccagcatcaatccttgtttcataggtttgcactgtcttttaaagtatgcattgttctctcttttattgagaacagcatggaatcagctggccattatgtgctttctcaatgcgctatgggctttcataactgggtacacaggatcacataaatcctgacttctctaagagacagtgctgccaacaagtgcaacaaggctgacaagtgcaaagtctggcccacagcaatatcctaaaatctggattaatctgtttgtaatatcgtgctggcagctgatgtggcggtagattttctattttttctcattgatttgtttgattgggaagaagggaggsggaaccctgatgaactttcaactctataataaccaaatagagaaggtggtaggtagtggggagttaattttattatgtagatgctgatgtatagtaatgctttctgtcctcacagcttcaaagagatacaaaaaatttctaaggaatcaaccatagaaatagaagacagtttatttgtagttacatgaactgatcctggggaagaaaacggatatgaagaatatataatgcaacct

SEQ ID NO: 49322 - DNA, 600 bp, Homo sapiens
taaattgctggaggtcggaggggagtcacctgcaatgattccatcaaacattgacttctcgtggaactttcacaaagccactactgggaaaacacatgtgtatccatgtttgaaagtttatcatttatagctataaaaaagaaaaaaattaaagtcttttcaccaaatgcaatttagaaaagagaaacaaaaggaaaaatctcccataacttcacttacccggttatacaaacttttaktatattcatgtaactattgtgtatatatttggctttattagtttgtaacctttttaaaaattgtatgtaatttgtttaatggctgcatggtaatccatcatgttatagaaatgtgttagcagtggcagagaaccgagttaccccaagtaactggagacgaatccgtacgcgttcgcagcaacttcaatctttgccttgtcaaaagaaagaatttgactgaggggcaaaaagcagaaagagaccaaggcaagtttcagagcaggagtggaagtttattaaaaagctttaggccgggcatgatggctcacacctgtaatcccagcactttgggaggccgaggcgggtggatcacaaggtcagg

SEQ ID NO: 49323 - DNA, 537 bp, Homo sapiens
catttcaaaaacaaaaaacaaaacaaacaaaaaaaacaaaacttgaggcctggccttctgctcctctccaacctccccttctctgggcccaagccaccttggctgaggagggggygaggaggtgtgagcccctgccaggaaccccctgcccggaccaagtgctcggcccccaggcctgcgttcagtgaggcctcccgtggcgtcagcatgttcgtgtggaggaatgtggaaggtcactctgcggccgtgttctcctggtactccatccccttcctgacccctccctgcagccacacgaggcccagcaacctgccagtcactcagtggcctccaaccagagaaaacaacctgccaagttggcagccgttgctcatgagcgtccaccaggtgggacagggagtgttgaccctgggcagccccctggagccacctgccctgaaagcccagggcccgcaaccccacacactttgggggtggtggaacctggtaaaagctcacctcccaccatggaggaggagccctgggcccctcagggga

SEQ ID NO: 49324 - DNA, 537 bp, Homo sapiens
catttcaaaaacaaaaaacaaaacaaacaaaaaaaacaaaacttgaggcctggccttctgctcctctccaacctccccttctctgggcccaagccaccttggctgaggagggggcgaggaggtgtgagcccctgccaggaacccccygcccggaccaagtgctcggcccccaggcctgcgttcagtgaggcctcccgtggcgtcagcatgttcgtgtggaggaatgtggaaggtcactctgcggccgtgttctcctggtactccatccccttcctgacccctccctgcagccacacgaggcccagcaacctgccagtcactcagtggcctccaaccagagaaaacaacctgccaagttggcagccgttgctcatgagcgtccaccaggtgggacagggagtgttgaccctgggcagccccctggagccacctgccctgaaagcccagggcccgcaaccccacacactttgggggtggtggaacctggtaaaagctcacctcccaccatggaggaggagccctgggcccctcagggga

SEQ ID NO: 49325 - DNA, 537 bp, Homo sapiens
catttcaaaaacaaaaaacaaaacaaacaaaaaaaacaaaacttgaggcctggccttctgctcctctccaacctccccttctctgggcccaagccaccttggctgaggagggggcgaggaggtgtgagcccctgccaggaaccccctgcccggaccaagtgctcggcccccaggcctgcgttcagtgaggcctcccgtggcgtcagcatgttcgtgtggaggaatgtggaaggtcactctgcggccgtgttctcctggtactccatccccttcctgacccctccctgcagccacacgaggcccagcaacctgccagtcactcagtggcctccaaccagagaaaacaacctgccaagttggcagccgttgctcatgagcgtccaccaggtgggacagggagtgttgaccctgggcrgccccctggagccacctgccctgaaagcccagggcccgcaaccccacacactttgggggtggtggaacctggtaaaagctcacctcccaccatggaggaggagccctgggcccctcagggga

SEQ ID NO: 49326 - DNA, 581 bp, Homo sapiens
tgggaatctcctcttctcctgccctctctggaacctcacttgtcagttcttcctcccactttcctgtatctttaacctatcccccacttttagctccttcccatcatcatttaaattactcaaacttcttctgttttaaaaacctctccctaaactcagggagaggtcttctgcacacacattgagccatctgctcttcctggtgccttctctacagcagcctgagccatgtctctaatctatgaatctcatcatgttactcccccatttacatcacttctccttgcctcagggattaagtccaaactccttaacagcccctgctctgccctgccttgcaaggcagcctcactgcttgcccctctccattwcatctgctatggagtccaactgagcctcatctgccccttgaacgcacactctttctcctctgggagtctctgaagtgggtaatatcctctgcttataatatgcttccccttaaacctctactctcttcctagctagctttgactcctctgtcacttgtccgctttggcatcacctcctcatagaagacttctatgactcccgagattctc

SEQ ID NO: 49327 - DNA, 581 bp, Homo sapiens
tgggaatctcctcttctcctgccctctctggaacctcacttgtcagttcttcctcccactttcctgtatctttaacctatcccccacttttagctccttcccatcatcatttaaattactcaaacttcttctgttttaaaaacctctccctaaactcagggagaggtcttctgcacacacattgagccatctgctcttcctggtgccttctctacagcagcctgagccatgtctctaatctatgaatctcatcatgttactcccccatttacatcacttctccttgcctcagggattaagtccaaactccttaacagcccctgctctgccctgccttgcaaggcagcctcactgcttgcccctctccattacatctgctatggagtccaactgagcctcatytgccccttgaacgcacactctttctcctctgggagtctctgaagtgggtaatatcctctgcttataatatgcttccccttaaacctctactctcttcctagctagctttgactcctctgtcacttgtccgctttggcatcacctcctcatagaagacttctatgactcccgagattctc

SEQ ID NO: 49328 - DNA, 619 bp, Homo sapiens
tgaaatatgaaaattgtttaataatattttacttcactagaagcctttaggtttatctaatgtctatttggaatccgttgtgatgagtagaacttaattaaatagttaacaatttaataagttttaaatttgagtgtttttcttttcagtcctattttgtagtatatatttcagcagacttacgaatatttcagcaaagcaaaataacagtgggccctacctcatagaattattatgagaattgaatgagataagtcttatgaaaatattaacataaacaattttaatcayaatagtaatattaatagtgctcttattcctcttactgcgtttaggaacaaatatgccttactttaagattttaacctaaaaatcttgatatatactgtaactaccacaatgacatgtagtgtgcaagattttagaatttaataaagcatgttcaaaaatcggtgctaatgcaggaccacaaaagtattcctaaaattatgctacattgagtaatatgattttttgtttgtatcatatcaatcagaacaagtactttatgagtttgaacatatggggagaatttagcaaatgaactttttatcttaaaagttaatagattctccacatg

SEQ ID NO: 49329 - DNA, 619 bp, Homo sapiens
tgaaatatgaaaattgtttaataatattttacttcactagaagcctttaggtttatctaatgtctatttggaatccgttgtgatgagtagaacttaattaaatagttaacaatttaataagttttaaatttgagtgtttttcttttcagtcctattttgtagtatatatttcagcagacttacgaatatttcagcaaagcaaaataacagtgggccctacctcatagaattattatgagaattgaatgagataagtcttatgaaaatattaacataaacaattttaatcacaatagtaatattaatagtgctcttattcctcttactgcgtttaggaacaaatatgcyttactttaagattttaacctaaaaatcttgatatatactgtaactaccacaatgacatgtagtgtgcaagattttagaatttaataaagcatgttcaaaaatcggtgctaatgcaggaccacaaaagtattcctaaaattatgctacattgagtaatatgattttttgtttgtatcatatcaatcagaacaagtactttatgagtttgaacatatggggagaatttagcaaatgaactttttatcttaaaagttaatagattctccacatg

SEQ ID NO: 49330 - DNA, 619 bp, Homo sapiens
tgaaatatgaaaattgtttaataatattttacttcactagaagcctttaggtttatctaatgtctatttggaatccgttgtgatgagtagaacttaattaaatagttaacaatttaataagttttaaatttgagtgtttttcttttcagtcctattttgtagtatatatttcagcagacttacgaatatttcagcaaagcaaaataacagtgggccctacctcatagaattattatgagaattgaatgagataagtcttatgaaaatattaacataaacaattttaatcacaatagtaatattaatagtgctcttattcctcttactgcgtttaggaacaaatatgccttactttaagattttaacctaaaaatcttgatatatactgtaactaccacaatgacatgtagtgtgcaagattttagaatttaataaagcatgttcaaaaatcggtgctaatgcaggaccacaaaagtattcctaaaattatgctacattgagtaatatgattttttgtttgtatcatakcaatcagaacaagtactttatgagtttgaacatatggggagaatttagcaaatgaactttttatcttaaaagttaatagattctccacatg

SEQ ID NO: 49331 - DNA, 553 bp, Homo sapiens
cagcgtggtggatatagttaataatagtgattgtgcacgttaaaatcgctaagaaaataaatttcaaatgtcctcactacagaaaataataaacatttgaagtgatacatatgttaattagcttgatttaattattccacattgtattcagaaatcataactcamcttggcacttgcataaatatatacaactataatttgtgagcttacaataaaaaatgtctgggacatattaacactgagatttttctattaagcctatgtgcaaccaatggtgagaaccactgaacttaggattcgaagattatactgcaacctccaagagactagaggtacctccaaagcaagaggtactacataaaataggaaagtccctgaatcttctgtattcaatttaatgaattaatgcaaatgataatgtaaccaccaccctgatcatctgcttctcaaagggtggtccaaggactagcagcatcactcaggagcttgttagaaatgtggaatcctaggcttcactccatctactgagttggaatctgcattttaacaagat

SEQ ID NO: 49332 - DNA, 632 bp, Homo sapiens
taccaagactttctcaatgaaggaagcagtgcattgataaacattctggtgcaaactgcttaatcatcatggaccagtaacagtttgcagactggcacagatccatggaccacactgtggagtatttctccagaacttttcctctgcaacccatccattcaggagctggatgacaactaattcagcagctcaattcgacacatttgatttagcttctaattgatgccaggccctgtggtcagtgctgaaagcataaagatgaataggcattgccccggggactcagcagacaagagcccagccagttcattctgccaagagacayaggtggagaggagggaacgtggtgagtctcaacattggcctcaactctccccttcttggggagccaaataagtgtgtcagaccaaactatgggagctcagaagagggagagtcatcttaactttggagattggaggctgatgggggagagcttcttagacgcagagggtggagcagaattttaactgagggagatggagaggctgggcattcctggcagaggaaaggctgttactagagaagggcagggtgtgtttaggaaacaggtatagggtgtgcgtatgcatgtgtatatgttgcatgtatat

SEQ ID NO: 49333 - DNA, 602 bp, Homo sapiens
caggccactgaagtggggcagcctcctggggatgttgtaggcctgggaggcttggaggccaccttggaccttgggggctgtgagggcccccagccccagatgaggggtccctggggctaggaggaagggagtatcccaggtggaaggtaaggccaacaggatttacagagatgatcctgaggaaagagtcgttcaggtcttttgtggggcagggatcccttgagggagaatcaggctgcccctgtccaaaccaggctggtctcacctaggacttacatgatcctgttcgaaccctctagccccccgaagagtcattcaaggaggaggaagtggctgtggcagacccaagccctcagggtgagtgcgagtgctgaagcccaggctggcatggcaggggggcccrcattctcccctcggagccgcagagcccacgaggctggcggacccatttcacagatgaggaaactgagactcagagaagctaagggtgggctcccagagacttcagttgagctgagctggagcctggctttctgacccctgggggtctctctcctctcccctgacttgatctccccaagcagggtagaaatgggcctgtc

SEQ ID NO: 49334 - DNA, 552 bp, Homo sapiens
ttcaggagatgatccattagcccagcgcaaagccatcagcttcataataaaaccttggcaaatttaaaacacctgcaattcatttcatgcctcgtgatttaaagtatattacattaatgtgaaaaattaccttctgaactcacactcattgaagtgtaaatgtgctctccttcccccccggcccccgccacttccccatttcatcctgaaattccatttgtaaattctgtacatccacagatgccgtagtcattacctcrttttttgttgataagtcttctctgcctagaggtttttataagagttatttttcctgtaatgaatactcagcagttcaggcccatcttttcagctggctggatgctagtgtcccttgattaatggacctgccaactcgatgaggtgataccacaccaacaaaggctcagcctagaaaatgtcacctcttatcctggttgtccaagcacttctgttttatgagctttgtgtgcctcccagatgtgcctagtatttcattttgggttttgttaataagaaggcaagtaacatgaa

SEQ ID NO: 49335 - DNA, 539 bp, Homo sapiens
agatctacaaagataagggagaaataaatttaagcaaacatacatcccaaataataacagtataaaatacacccagatgcccagagagctccaagtgrttgagttgaattgaacatgaggctataaatgtattttgaggtcatgctgagtaacctgtattttatcctgtcaacaatggaaacaaatgttaagctgaggagaagatccttggtttcggaacatgactcaagctttgttgttaccgggattgtgccctgggttcttataatctcccaggttagaatcagaaagatcaccagatatggcagcaaagtgaaagttaaattgtattgagcttgtgcacaagggagccagcaccacaaaaggaaaaggatgggctgttctctgaggatagtaggtggtttagttttaagtggcctttctacaggaaagggtttcatcaacgtttttataggaggggtttctttagcgcttgcacggtagctccacaggcttctgcatactttgcatgtaacattggcattttatttattcattca

SEQ ID NO: 49336 - DNA, 1893 bp, Homo sapiens
tgtgtatatatatatatatatatatacacacacacatacatatatatgtatgtatayatacatatatatatatacatctggtttccctatgttttctcagtcccatggaaagcttttttttttgagtgtttgtgtaatatttctaagcatattcttgccatattttctaactgtaaaatctacatgaaatggagtgtttggggaattaggtgcctggttcattgaattttcaggattacaacaagtaatgacaaaaattatttttctcctctctggttgcttatattttctccaaaatgtccatcttcacatttttatctttggaaatagaatgtgcccaccaaaatggggtcactttgacctttcacaatgtttcacaacattccattagtgctataattgtaaatatcaactttaactgttagaacggaaagtaatctggttctgtttctttatagactagaaaactgaggcctggagaatttgagagccttccaatatccatcagtggcaaatccaggcctagtgtagtggttgttactagactcagaaatcaggccagcttgaggcctgcctttgttcctggccagctgtgtgattttaaaagttcaacagcatcagaagcttgctcagttttttcagctaaatgagtttagatgaagaattagttcagtttccaccactaaaatggtagtaaaagtattagttccctatctaaataaatttccacaaacttagtgtgacttaaggcaacacacatttattatcttatagttctggaagtagatatttgaaagggctaaaatcaggccaggcaaggtggctcatgtgagcaatcctagcactttgggaggccaaggcgggcagatcacctgaggttgggagttcgagaccagcctggccaacgtggtgaaaccacgtctctactaaaaatacaaaaagtggccggacatggtggtgcgtgcttgtaatcccagttactcaggaggctgaggcagggataattgcttgaacccaggaggcgggggttgcagtgagccgagatggtgccattgcactccaggctgggtgacaagagtgaaactcactctcaaaaaaaaaaaaaaagaaagtaaggtctaaaatcagtgcattagcagggttttgaaggccttaggggagaagtcattttcatgcctttttcagcttctggaagctgcctgcattccttggctcatggcccctccttcatcttcaaagccagcaacattctcctaggtctttctcaagctgtcatctctctggttctcttctaagctcctctttcccatataaggactcttgtgactatgttaggcccacctggaaaatttaggacagtctctgcctctccatttcaattgatgatgacctcaattgcatctgtaactttaattctcctttgctacacaacttcacatattcacaggatcccaggattagtatgcgaacatctttgggggccattattctgtgtaccacagtctagcatgagaatgaaattatttcataggcctggtttgagagttaaattgtctacatatttgaaaactgcaatagagacgaagaaggtggccaggcctggtggctcatgcttgtaatcccaacagtttgggagactgaggtgggaggatcactttaggttaggagtttgagatgagactgggccacaaagcaagaatctgtctctacagtcagtcagtcaataaactataaacagcactcatagaaaatgcttcaggtaagcacatataggaccttgaaaaagcaactgtagaacattttttaaaaagatgaaaaaggtagtaatgataggcagtatttttgagaactgcatgtgccaggcaaaaccatcactttacatgtagttcctca

SEQ ID NO: 49337 - DNA, 1893 bp, Homo sapiens
tgtgtatatatatatatatatatatacacacacacatacatatatatgtatgtatacatacatatatatatatacatctggtttccctatgttttctcagtcccatggaaagcttttttttttgagtgtttgtgtaatatttctaagcatattcttgccatattttctaactgtaaaatctacatgaaatggagtgtttggggaattaggtgcctggttcattgaattttcaggattacaacaagtaaygacaaaaattatttttctcctctctggttgcttatattttctccaaaatgtccatcttcacatttttatctttggaaatagaatgtgcccaccaaaatggggtcactttgacctttcacaatgtttcacaacattccattagtgctataattgtaaatatcaactttaactgttagaacggaaagtaatctggttctgtttctttatagactagaaaactgaggcctggagaatttgagagccttccaatatccatcagtggcaaatccaggcctagtgtagtggttgttactagactcagaaatcaggccagcttgaggcctgcctttgttcctggccagctgtgtgattttaaaagttcaacagcatcagaagcttgctcagttttttcagctaaatgagtttagatgaagaattagttcagtttccaccactaaaatggtagtaaaagtattagttccctatctaaataaatttccacaaacttagtgtgacttaaggcaacacacatttattatcttatagttctggaagtagatatttgaaagggctaaaatcaggccaggcaaggtggctcatgtgagcaatcctagcactttgggaggccaaggcgggcagatcacctgaggttgggagttcgagaccagcctggccaacgtggtgaaaccacgtctctactaaaaatacaaaaagtggccggacatggtggtgcgtgcttgtaatcccagttactcaggaggctgaggcagggataattgcttgaacccaggaggcgggggttgcagtgagccgagatggtgccattgcactccaggctgggtgacaagagtgaaactcactctcaaaaaaaaaaaaaaagaaagtaaggtctaaaatcagtgcattagcagggttttgaaggccttaggggagaagtcattttcatgcctttttcagcttctggaagctgcctgcattccttggctcatggcccctccttcatcttcaaagccagcaacattctcctaggtctttctcaagctgtcatctctctggttctcttctaagctcctctttcccatataaggactcttgtgactatgttaggcccacctggaaaatttaggacagtctctgcctctccatttcaattgatgatgacctcaattgcatctgtaactttaattctcctttgctacacaacttcacatattcacaggatcccaggattagtatgcgaacatctttgggggccattattctgtgtaccacagtctagcatgagaatgaaattatttcataggcctggtttgagagttaaattgtctacatatttgaaaactgcaatagagacgaagaaggtggccaggcctggtggctcatgcttgtaatcccaacagtttgggagactgaggtgggaggatcactttaggttaggagtttgagatgagactgggccacaaagcaagaatctgtctctacagtcagtcagtcaataaactataaacagcactcatagaaaatgcttcaggtaagcacatataggaccttgaaaaagcaactgtagaacattttttaaaaagatgaaaaaggtagtaatgataggcagtatttttgagaactgcatgtgccaggcaaaaccatcactttacatgtagttcctca

SEQ ID NO: 49338 - DNA, 1893 bp, Homo sapiens
tgtgtatatatatatatatatatatacacacacacatacatatatatgtatgtatacatacatatatatatatacatctggtttccctatgttttctcagtcccatggaaagcttttttttttgagtgtttgtgtaatatttctaagcatattcttgccatattttctaactgtaaaatctacatgaaatggagtgtttggggaattaggtgcctggttcattgaattttcaggattacaacaagtaatgacaaaaattatttttctcctctctggttgcttatattttctccaaaatgtccatcttcacatttttatctttggaaatagaatgtgcccaccaaaatggggtcactttgacctttcacaatgtttcacaacattccattagtgctataattgtaaatatcaactttaactgttagaacggaaagtaatctggttctgtttctttatagactagaaaactgaggcctggagaatttgagagccttccaatatccatcagtggcaaatccaggcctagtgtagtggttgttactagactcagaaatcaggccagcttgaggcctgcctttgttcctggccagctgtgtgattttaaaagttcaacagcatcagaagcttgctcagttttttcagctaaatgagtttagatgaagaattagttcagtttccaccactaaaatggtagtaaaagtattagttccctatctaaataaatttccacaaacttagtgtgacttaaggcaacacacatttattatcttatagttctggaagtagatatttgaaagggctaaaatcaggccaggcaaggtggctcatgtgagcaatcctagcactttgggaggccaaggcgggcagatcacctgaggttgggagttcgagaccagcctggccaacgtggtgaaaccacgtctctactaaaaatacaaaaagtggccggacatggtggtgcgtgcttgtaatcccagttactcaggaggctgaggcagggataattgcttgaacccaggaggcgggggttgcagtgagccgagatggtgccattgcactccaggctgggtgacaagagtgaaactcactctcaaaaaaaaaaaaaaagaaagtaaggtctaaaatcagtgcattagcagggttttgaaggccttaggggagaagtcattttcatgcctttttcagcttctggaagctgcctgcattccttggctcatggcccctccttcatcttcaaagccagcaacattctcctaggtctttctcaagctgtcatctctctggttctcttctaagctcctctttcccatataaggactcttgtgactatgttaggcccacctggaaaatttaggacagtctctgcctctccatttcaattgatgatgacctcaattgcatctgtaactttaattctcctttgctacacaacttcacatattcacaggatcccaggattagtatgcgaacatctttgggggccattattctgtgtaccacagtctagcatgagaatgaaattatttcataggcctggtttgagagttaaattgtctacatatttgaaaactgcaatagagacgaagaaggtggccaggcctkgtggctcatgcttgtaatcccaacagtttgggagactgaggtgggaggatcactttaggttaggagtttgagatgagactgggccacaaagcaagaatctgtctctacagtcagtcagtcaataaactataaacagcactcatagaaaatgcttcaggtaagcacatataggaccttgaaaaagcaactgtagaacattttttaaaaagatgaaaaaggtagtaatgataggcagtatttttgagaactgcatgtgccaggcaaaaccatcactttacatgtagttcctca

SEQ ID NO: 49339 - DNA, 549 bp, Homo sapiens
tgagatcgcgccactgcactccagcctgggcgacagagcgagactccgcctcaaaaaagaaaaaagaagaagaacaagaagaatcgcaacctaatttagtatagaaacaaactgtaaatctgacttgggaatgtatcatggtaacaaatagcggcggttcagccaatcacatcagccgagtgtcagtcaatggccggcagccagctgttcaaaacaagttccaagaaggcaaatccgggctgtaaccaggtctgtaaccaatccagccacctctatacctcacttctgtyttctgtatgtcactttttttctctggctataaatataacccgcacatgttgtgtggcagatcattctgaaccatttttggtctggactgctgcctgattctagaaccacaaaaaaagccaattaagatctgcaaacccacatttgttgtaattttgtattttaacagttgtgccctacaaaagacattaagctgaaattaattaaaaatcatttacggtcatgattaggtcataaaaaattgtcaaacataacaattct

SEQ ID NO: 49340 - DNA, 566 bp, Homo sapiens
ccaccttggacacacgtcgtcaggacctcctgaggctgtgtcatgggcgtgtccttaatcttggcaaaataagctttctaaattgactgagacctgtctcagatattctgggatcacaatctacaatcaccatggtgttatggttgactacagcattcagtacagagacatgctgtacaggttcgtagcctgggagcaataggctatactatgtaacttaggtgtggagtgggctacaccatctaagttttataaggacactctacagtgttcacacaaagatgaaatcacctaaggacagatttctcagaaagtataacatcgttacgagatgcctgagtgtattttaaatggtcaaagcctaggagaaaaaaagaaacttaactcttgttatgggttaawaacaaagcttaagagagttaacatatttcatctaatctaagatgccaatgattaaaagacattactttatgcaccatcacaaataggttgccaattaaaccgactttctgaataacacacaaatgtgaatttacttctattaatgccaggaaagtaaaatgaaa

SEQ ID NO: 49341 - DNA, 573 bp, Homo sapiens
cctccagcttccaggttcaagcaattctcccacctcagcctcccgagtagttgggactacaggtatgtgccaccacacccagataattttttctattttttggtagagatggtttcaccatgttgcgctaggctggtctcgaactcctgagctcaagcaacccactggcctcggcctcccaaagtgctagaattacaggcatgagccattgggccaggcmccatttaccacttctaatgctgtaacagattcaataaaattctctaagatgtaatgatctactttatgatactgatttatatcatctttgtgcagagaggcttcaacctcttgtttgtgctgggctagggccagaatccaattcaaaactttattggtcttttacagtctttctctaatccatgtgagatataaaaaaaaaaccttaacacctacctttcatcatttcaaaaaaaaaatttagagatgaattgtagagctaattgtgaaaactaaaactgtaagaaacaaaggagaatatattcatgggtggataaagatttcttaaaaaggaggaaaaagtactaaccagaa

SEQ ID NO: 49342 - DNA, 573 bp, Homo sapiens
cctccagcttccaggttcaagcaattctcccacctcagcctcccgagtagttgggactacaggtatgtgccaccacacccagataattttttctattttttggtagagatggtttcaccatgttgcgctaggctggtctcgaactcctgagctcaagcaacccactggcctcggcctcccaaagtgctagaattacaggcatgagccattgggccaggcaccatttaccacttctaatgctgtaacagattcaataaaattctctaagatgtaatgatctactttatgatactgatttatatcatctttgtgcagagaggcttcaacctcttgtttgtgctgggctagggccagaatccaattcaaaactttattggtcttttacagtctttctctaatycatgtgagatataaaaaaaaaaccttaacacctacctttcatcatttcaaaaaaaaaatttagagatgaattgtagagctaattgtgaaaactaaaactgtaagaaacaaaggagaatatattcatgggtggataaagatttcttaaaaaggaggaaaaagtactaaccagaa

SEQ ID NO: 49343 - DNA, 210 bp, Homo sapiens
tgtactccagcctgggcaacagagtgagactctgtctcaaaaataaaaaaaaaaatactactactactactactamtaataatataaaggtaaagttctcactttaccatcctattattattattattccttgtttttgagatgggagaaatagcagtatggatgatgacagggataatccagtcatcagagggaaaagagatgaaggca

SEQ ID NO: 49344 - DNA, 625 bp, Homo sapiens
tacaggcttagctggacatggtggcacgcgcctgtagtcccagctactcgggaggctgaggcaggagaatcacttgaacccgggaggtggaggttgcttgcgccgctgcactccagcctaggcgacagagtgaggctccctctcaaaaaaaaaaaaaaaaagaaccacgcagattaaacctcccattttacagaagaggaaagcaacaccctaagcggttacttgattacctaaagacgcaaagctaattcctaacaaaagcaggactgctttacctttccactgttcttccatttgcattacacttcaggaagcataggtctaggctggttagaagacttttttaatcccagggaggtctttattcaatgaagtgaattaataactgcaaaacagactcaattaaaaatgtaaaatcagtagcattgccccttccatttcaggatgtctcctgaaaattyctattcagaattgttctgagaggtttgaaaatgggtgtagtttaagcatccaagagctgaaataaaaaagtcaattttaatcaactaccaaaacaacgtcctagcagatgctgagctaatctctgaaattcctcctagttctaacattttatgagttatgaggt

SEQ ID NO: 49345 - DNA, 612 bp, Homo sapiens
tcgaggcactgttcaattattcaagcaattgtaaaattctcccagtcttagaaaagatacaggtgtgtgtccctctgctgtggctgtgcactgacgcttcagtaaaagttgccgtctaaaaccaccggcctgcccttgaattgtttttttttttttttttttcttyttttgattctcagcctcactctatcacccaggctggagtgcagtgacacgatctctgctcactgcaacctccgcctcccgggttcaagcggttcccctgcctcagcctcctgaatagctgggattacaggcacccgtccccatgcccgggtaatttttgtatatttagtagagatggggtttcaccatgttggccaggctggtctcgaactccttacctcaagtgatccatccgcctcagcctcccaaagtgctgggattacaggcgtgagccactgcgcccggcttcttgaattagtttctaggagaagccaagaacccccccgggctaagcctcaattttggggctcgcctgtgctgcatcagcttcacacgcagagaagagagtgaaagagaagggagagccgtccttttgggctgccttgaaataaaggttgacccatgggt

SEQ ID NO: 49346 - DNA, 612 bp, Homo sapiens
tcgaggcactgttcaattattcaagcaattgtaaaattctcccagtcttagaaaagatacaggtgtgtgtccctctgctgtggctgtgcactgacgcttcagtaaaagttgccgtctaaaaccaccggcctgcccttgaattgtttttttttttttttttttcttcttttgattctcagcctcactctatcacccaggctggagtgcagtgacacgatctctgctcactgcaacctccgcctcccgggttcaagcgrttcccctgcctcagcctcctgaatagctgggattacaggcacccgtccccatgcccgggtaatttttgtatatttagtagagatggggtttcaccatgttggccaggctggtctcgaactccttacctcaagtgatccatccgcctcagcctcccaaagtgctgggattacaggcgtgagccactgcgcccggcttcttgaattagtttctaggagaagccaagaacccccccgggctaagcctcaattttggggctcgcctgtgctgcatcagcttcacacgcagagaagagagtgaaagagaagggagagccgtccttttgggctgccttgaaataaaggttgacccatgggt

SEQ ID NO: 49347 - DNA, 846 bp, Homo sapiens
tatgtacatatgtttcatagtgtgcaaacctttgggctttgtgtgctgtacagtgtgtgaatataatactattgtacaaatgtggaattatttcatatttttatagcaaactagcagatattgaaacaaaataaaagataaccaaatttgctaaggtgatctagtaagtgacaaagacaaggttcaaattcatgcctgtatggcttcagcatacatacctaatatacacattttttaaatgactatagaaatgtatatttacattaaaatatccaaccaatagggaatatataaaagagtggatctccaatatagcagacccaatggctcattttataatgaatatttaaagtgtttcctttaacatgccacaattcagtttagacagaataatctgccttgacacttaattagtaaaggcgatttaatcctgccatttacatggaagamtaaattaaaaactacaatacaacacctattttaatatgtaaatcttcaagtacagtaagacaggagctatgataaagtaaacacatgccacgtagaatctgcactagcacagcagcttaaatcgaaagcaaaattggatacagtttgtaatcttaccttgatttatcaggtaatgaatttgtaaaaaaaaaaaaaaatccagcgtatatgaaaactagatgatttcaggaaacagaccatatttatattgtttaaaaagcagatttatgtataaatagatttttcaactacatgaatgtacaaaaagacattctgctaattttgcagtgctcaagaacattcttttatgttgggaactgctcggtctccaagggagactaaatgccggtagtaatt

SEQ ID NO: 49348 - DNA, 583 bp, Homo sapiens
atatatgaactttccagaataggtatatcaataaagacaggaagtatacaagtggttgccacagcctgagaggagcagggaatggtgagtgactgctaatggatatggcactttttttggggggtgatgaaaatgttctggtcagacaatggcaattamaaaactgtatacacacgaaaaaccaaagaatcacacactttaaaagggaggatttagctcggcatggtggcatgcgcctgtactcccagttactcgggaggctgaagcaggactgcttagagcccaggacttcaaggctgcagcgagctatgatcgctccactgcactccaacaaggatgacagtgcgagacccgttttctaaataataataataataataataataaataacccaaggtacccagttcacatgcaaaaccactggtaaacataaattatctccaagtaatctagaaagaaaatgagcacataagacgtcttctaaaaacacacatatatttctttacatgttacatttaacgtaaaaatcagctatgcagaagttacatgaacattttatgttggaaaggtaaatgactatta

SEQ ID NO: 49349 - DNA, 528 bp, Homo sapiens
tgctagtctctgatttcaattgctacaaaatccagcaggaatgttggggcactgtgcagcttggaagtcagaatttcacgtcagcctcctctcatcattattaaatcattttgtttcaggaaggttttctttcttttcataaaaagaaaagtcttcaaaggcattttgttrcaacgctgaaatctcgatttgtgattccaatatatttaaaagtacattggattgtggacttatgtcatcaacagaagcaaaatgtgctggtaaaacaataactggacatttccaggggtgccttgaaattgccaaacaaggtaatttaacttttctgtttttttcaatgccagagaatgtgattaaattgtgaatttctcttaaaccctacatgacatgctctagtgaacatgtgattccagttactggatttcactcatgtccatgtgaagagaccaccaaacaggctttatgtgagcaacaaggctgtttatttcacctgggggcaggcaggctgagtctgaaaagagagtcagc

SEQ ID NO: 49350 - DNA, 545 bp, Homo sapiens
gatagaaaatcaattcacatacccagcaagagtgtatgacaattccttcttcccacagtattgccaawgctgagttttaccagattattttactttttctaattgaatggctggaactgtcacttaggaatttttcttaagctttttataaggcttagcttagacagtgcttcctttaagaagtcctcccagatagctgaagaccaaattccttactcttcccatgtgcttccatgtggatcaacttagcaatttgaatattgcattagaatagcctgcttatacttctttctcccagtcttcactcttagcttcttgaggaaaggcattgtgtattttctttcattctatcaccagtgctttggtagatatttaatgaagtaaacaaattcacgaagtagaaattttagaaaaaataggaaattggcttattgtggacaagggttttcttttagatataaaataatcacaatgcaaacagctacaggatggcggattcaataacaaagtaacttcccattggaaagtctttttatctagcatat

SEQ ID NO: 49351 - DNA, 545 bp, Homo sapiens
gatagaaaatcaattcacatacccagcaagagtgtatgacaattccttcttcccacagtattgccaatgctgagttttaccagattattttactttttctaattgaatggctggaactgtcacttaggaatttttcttaagctttttataaggcttagcttagacagtgcttccwttaagaagtcctcccagatagctgaagaccaaattccttactcttcccatgtgcttccatgtggatcaacttagcaatttgaatattgcattagaatagcctgcttatacttctttctcccagtcttcactcttagcttcttgaggaaaggcattgtgtattttctttcattctatcaccagtgctttggtagatatttaatgaagtaaacaaattcacgaagtagaaattttagaaaaaataggaaattggcttattgtggacaagggttttcttttagatataaaataatcacaatgcaaacagctacaggatggcggattcaataacaaagtaacttcccattggaaagtctttttatctagcatat

SEQ ID NO: 49352 - DNA, 584 bp, Homo sapiens
ctggatggtctctggaggtccttttctcttagaaagtcttttgtaaaacaaaagatttgctatgagacaaaaagatcttgcaaaacattcatttactttaaaatgtcagatcagatttttaatcaggggacaagagaataactggcccatggatcctcagcaaatttgtcactatggaaaaaatctgaatagaagacatagactaggactctggaatgatggctgttttgctcttgccagtgttgttttgtacatagggaaaatctggaaacaatttatagttaatactcttaccgtgctggaaaaaaaagctcaaggaaatcaaaagtgcagagaggtatgtctttccaagaaaaaagctggtggtgaccaagaatggaaaccagtcttctcaacccctgggtcttctctctagaggttgccctgtatttttcactggtaatttataacacttgttattgagtaaggcttattttggcaaagacagaaagagttgatggggtgattaatatgtgttgatgttgctytatataatggtttaaaaaatcagtttttatgaatcatatcaatatgagtcatcaaat

SEQ ID NO: 49353 - DNA, 631 bp, Homo sapiens
tgggtttgggtgattgtcagcattgggagccatagtgggaaggttctgggctgtgggtaggttgctgcacagatgtgggcatctttactgcctgggagtgccacacggtctgtgtagttctcactccatagctaaagctcttggtagacccaaggaagacctgaatggggacccatatgcctccttcacccactgtgttgaggtctgcggatggtggatttgtctgcccctggggttcctctgtgccctccccacttgggaccacatgtacccactttacctataaatccaaaaagcatatcgaattttaaaaagaggaagccccggccgggcgcggtggctcacgcctgtaatcccagcacttygggaggccgaggcgggcggatcacgaggtcaggagatcgagaccatcccggctaaaacggtgaaaccccatctctactaaaaatacaaaaaattagccgggcgtagtggcgggcgcctgtagtcccagctacttgggaggctgaggcaggagaatggcgtgaacccgggaggcggagcttgcagtgagccgagatcccgccactgcactccagcctgggcgacagagcgagactccgtctcaaaaaaaaaaaaaaaaaaaaaaaaa

SEQ ID NO: 49354 - DNA, 638 bp, Homo sapiens
ttttgtaaggacttacaccattcatttaaaaatatatagtgatcttagaggttagaaagcacagaaaagaaacttgaacatagaggtacttaaaaggagaaaaataaatttcctccggtagtagacatgtatttgscattgttcactgttatctccttgatgtcctctctcctcagcttggctgaatcctacttacgcttttaagacccaggtcaaattgtgaatcttttgtgacctagtccatagtcacctctctccctcctgaatgcctataatagtctttatttggcatttttttgtattctttataatgtttcttatttatgtttatgaatatatcttacatataacttgcatcatctaaaccctaaactactcagaattgtgttcaccatgtacctggcagacagacttgaacaaataagttttgatgtaaaactgccaagattaatactaaatatagttgagatccatattagtttgctagagcaaacataacaaaatgccacagactaggtggcttaaacaacagaaagttattttctcacaattctggaggctagaagttcaagatcaaggtatcagcagggttggtttctttctgaggtctctgtccttgactcagatcactgtctcat

SEQ ID NO: 49355 - DNA, 1206 bp, Homo sapiens
aagtgccagagtggggcttgtgtctgaccaaggtccatggacttccagttagtaacattatgtgatcatgtccactgaaaaaattgtagaagaaaatgtggtttctgggagcacaccagatgattgctcggtatttaacatagttttctataccaggatatatatgctaggggcttaaatgctgggattcactaatgagttagaccagcattttccaaactgtgttctgtgaaatacaatatcttctccaaaggcattctgtgaaataaatttgttcaaataagtttggaaaaaggccatattctgtgtccttattggagattcacattagcctaatataatctctgagaattgctgagcttaagaacccttttaaacttttttcttatttagtatttcccacatttggaatatacatatacatacacacacttggaatacacacatgtatatacatacacacatacatagacacasatatatattacactgcatcaatattttgcttgacattaatgctctgtgagattcaacttgaaaaatgctgaattagacctactatattttgaatttttattttataaggttggactctcaccctatattacttttgaatgtcagttgtagaaagtgagaacttggcctgctatgctttgagttcctgactcttcttgaattcctagtgaagggaagttgattgcttagggagctgatggtggtagagaaaactcagaccatactattcccttctttctgggtggcaccacctaggggtctattatattgtctttgtagagacacattaggtataactctactaaagctttcagcatagttctctatttcatttcttcttgaatttccaacccagaaattactacataagctatttcttattttccataacatctgtattcttctgcaacaattctaaaaatgaatgtcttttctttctttgttttttctttctttctcatacaaatctgctctcgacattggtaaaatagttattgaattcattcacacacagaggctcaatttgtagactctctttaaaaatatatatatatatatttatttatctatctttctgtaaaaccacttatcaaaagagattttcagtgtgattaccttgacttttatcttatagagtacttacagctgattgatattaagatcctgattgatattaagatcctgaactaa

SEQ ID NO: 49356 - DNA, 282 bp, Homo sapiens
cacatgtgatcaagtataaaatattccacactgcaaaatagcccggtatgattcaaatatagcagtgttctagaaatgtaacattggtaaaaaataatgcatcaggatgaatgcaaattttagctaagccattcttcttattcttctgtttttcttattatgccatctcctaaagaatttcaggtcaaactccagtttgaaggagcaaatgatacaaatgagcaccccaccaagggctataaaaacaggtcccccaacgccaaccgaattaagagcgtstaa

SEQ ID NO: 49357 - DNA, 622 bp, Homo sapiens
gtgtggtggcgtgtgcctgcagtcccagctactccagaggctgaggtgggaggatcacttgagcctaggagttcaaggctacagtgagctgtgatcacaccaccacagtccagcctggtgacagagcaagaccctgactctaaagcaacaawctttttttttttttaagacggagtcttgctctatcacccaggctggatttgggaggccaaggtgggcagatcacctgaggtcaggagttcaagacaagcctggccaacatggtgaaaccctgtctctactaaaaatacaaaattagctgggcatggtggtgcgtgcctgtaatctcagctacttgggaggctgaggctggagaatagcttgaacccgggaggcagaggttgtaatgagtcaagatctcgccactgctctccagcctgggtgacaagagtgaaactctgtctcaataaataaataagtaaaaataaaaaattaagcaaaaaaaaaaaagaaagaaaaaaaagaaaaaaaaagttctggaatcctgcccctgctttcagaattctgggggaaaatgttctagaagggtattcctgtacaacctccataaaaatagccctgctcacatgtatgtagctcattc

SEQ ID NO: 49358 - DNA, 622 bp, Homo sapiens
gtgtggtggcgtgtgcctgcagtcccagctactccagaggctgaggtgggaggatcacttgagcctaggagttcaaggctacagtgagctgtgatcacaccaccacagtccagcctggtgacagagcaagaccctgactctaaagcaacaaaytttttttttttttaagacggagtcttgctctatcacccaggctggatttgggaggccaaggtgggcagatcacctgaggtcaggagttcaagacaagcctggccaacatggtgaaaccctgtctctactaaaaatacaaaattagctgggcatggtggtgcgtgcctgtaatctcagctacttgggaggctgaggctggagaatagcttgaacccgggaggcagaggttgtaatgagtcaagatctcgccactgctctccagcctgggtgacaagagtgaaactctgtctcaataaataaataagtaaaaataaaaaattaagcaaaaaaaaaaaagaaagaaaaaaaagaaaaaaaaagttctggaatcctgcccctgctttcagaattctgggggaaaatgttctagaagggtattcctgtacaacctccataaaaatagccctgctcacatgtatgtagctcattc

SEQ ID NO: 49359 - DNA, 622 bp, Homo sapiens
gtgtggtggcgtgtgcctgcagtcccagctactccagaggctgaggtgggaggatcacttgagcctaggagttcaaggctacagtgagctgtgatcacaccaccacagtccagcctggtgacagagcaagaccctgactctaaagcaacaaactttttttttttttaagacggagtcttgctctatcacccaggctggatttgggaggccaaggtgggcagatcacctgaggtcaggagttcaagacaagcctggccaacatggtgaaaccctgtctctactaaaaatacaaaattagctgggcatggtggtgcgtgcctgtaatctcagctacttgggaggctgaggctggagaatagcttgaacccgggaggcagaggttgtaatgagtcaagatctcgccactgctctccagcctgggtgacaagagtgaaactctgtctcaataaataaataagtaaaaataaaaaattaagcaaaaaaaaaaaagaaagaaaaaaaagaaaaaaaaagttctggaatcctgcccckgctttcagaattctgggggaaaatgttctagaagggtattcctgtacaacctccataaaaatagccctgctcacatgtatgtagctcattc

SEQ ID NO: 49360 - DNA, 622 bp, Homo sapiens
gtgtggtggcgtgtgcctgcagtcccagctactccagaggctgaggtgggaggatcacttgagcctaggagttcaaggctacagtgagctgtgatcacaccaccacagtccagcctggtgacagagcaagaccctgactctaaagcaacaaactttttttttttttaagacggagtcttgctctatcacccaggctggatttgggaggccaaggtgggcagatcacctgaggtcaggagttcaagacaagcctggccaacatggtgaaaccctgtctctactaaaaatacaaaattagctgggcatggtggtgcgtgcctgtaatctcagctacttgggaggctgaggctggagaatagcttgaacccgggaggcagaggttgtaatgagtcaagatctcgccactgctctccagcctgggtgacaagagtgaaactctgtctcaataaataaataagtaaaaataaaaaattaagcaaaaaaaaaaaagaaagaaaaaaaagaaaaaaaaagttctggaatcctgcccctgctttcagaattctgggggaaaatgttctaraagggtattcctgtacaacctccataaaaatagccctgctcacatgtatgtagctcattc

SEQ ID NO: 49361 - DNA, 622 bp, Homo sapiens
gtgtggtggcgtgtgcctgcagtcccagctactccagaggctgaggtgggaggatcacttgagcctaggagttcaaggctacagtgagctgtgatcacaccaccacagtccagcctggtgacagagcaagaccctgactctaaagcaacaaactttttttttttttaagacggagtcttgctctatcacccaggctggatttgggaggccaaggtgggcagatcacctgaggtcaggagttcaagacaagcctggccaacatggtgaaaccctgtctctactaaaaatacaaaattagctgggcatggtggtgcgtgcctgtaatctcagctacttgggaggctgaggctggagaatagcttgaacccgggaggcagaggttgtaatgagtcaagatctcgccactgctctccagcctgggtgacaagagtgaaactctgtctcaataaataaataagtaaaaataaaaaattaagcaaaaaaaaaaaagaaagaaaaaaaagaaaaaaaaagttctggaatcctgcccctgctttcagaattctgggggaaaatgttctagaagsgtattcctgtacaacctccataaaaatagccctgctcacatgtatgtagctcattc

SEQ ID NO: 49362 - DNA, 622 bp, Homo sapiens
gtgtggtggcgtgtgcctgcagtcccagctactccagaggctgaggtgggaggatcacttgagcctaggagttcaaggctacagtgagctgtgatcacaccaccacagtccagcctggtgacagagcaagaccctgactctaaagcaacaaactttttttttttttaagacggagtcttgctctatcacccaggctggatttgggaggccaaggtgggcagatcacctgaggtcaggagttcaagacaagcctggccaacatggtgaaaccctgtctctactaaaaatacaaaattagctgggcatggtggtgcgtgcctgtaatctcagctacttgggaggctgaggctggagaatagcttgaacccgggaggcagaggttgtaatgagtcaagatctcgccactgctctccagcctgggtgacaagagtgaaactctgtctcaataaataaataagtaaaaataaaaaattaagcaaaaaaaaaaaagaaagaaaaaaaagaaaaaaaaagttctggaatcctgcccctgctttcagaattctgggggaaaatgttctagaagggtattcctgtacaacctccataaaaatagccctgctyacatgtatgtagctcattc

SEQ ID NO: 49363 - DNA, 640 bp, Homo sapiens
cagtactgggcactcatttggagatgatgttcatttctgaatccctcacccccacccccttgatctgagagctctcagagagcaggaaccatgtcttttatctctttgttgaagcatgtcctcctgccatgaagaaggagccaataattgcaagaagagaagaggggggaggaagagaaaggggaaaagaggatgaggcaggagaagatggaggaaattaaataaagaaggacagaaaaatcttctaaaaggaaaagtagaaccaccccagattatcatttttwtatgacaacaaagtactacattatgaaaaattatgtgctaatgtaaagagtgatagaagagagcagagacaaccagcaaaagacctctatgaagcatgtgctgttttctctgtgctccagtaatttaacacagcagcccagagccactaggggcaaacaaaccatacggggacaagactgagtagttgctggatataaaatacagggtaaagtgggagcttggtcagagatgaaaagcatgggaaccgagttataatacttagatctggcattcaaggacttgcttaaggaggactggggccagaatcctaactggggccaagtgaatggcaccggtcgacaggcttaaagaaggg

SEQ ID NO: 49364 - DNA, 578 bp, Homo sapiens
ggcatgatgacaaagtggtgaggatagcctcaccaggcactaactccaacaactcattcatatggkcaactccagagcgattagcctagacaggtaactaggcttaacccctagatttggaagggcctgctgcttctattctaatccactgagctggctaaccccacaagccaaagggtatttaatctaaaagacaaaatgcatcttctatgaggaatgaaatgaatatatcaggaaactcagcgtctattgtgcctgaatcccaaaagtcatgccaaagaacaaatacatatttcttgctcatctttcacagatctttccaaagtaaacagtgaagggcaagcagagagtcaagaccagcctctgacccacctcatttgcaccagtacaaagaatcatgcccaaggtcataaactaaaagaggttatttataccatagcagccagcttctaggcccaggttcatacttattagtaataatttatgtaatacatactttataagactgcacaaaaggaaatgctttaacaaagaagacatttattttaagggaattctccagtttcttctaagttgtt

SEQ ID NO: 49365 - DNA, 578 bp, Homo sapiens
ggcatgatgacaaagtggtgaggatagcctcaccaggcactaactccaacaactcattcatatggtcaactccagagcgattagcctagacaggtaactaggcttaacccctagatttggaagggcctgctgcttctattctaatccactgagctggctaaccccacaagccaaagggtatttaatctaaaagacaaaatgyatcttctatgaggaatgaaatgaatatatcaggaaactcagcgtctattgtgcctgaatcccaaaagtcatgccaaagaacaaatacatatttcttgctcatctttcacagatctttccaaagtaaacagtgaagggcaagcagagagtcaagaccagcctctgacccacctcatttgcaccagtacaaagaatcatgcccaaggtcataaactaaaagaggttatttataccatagcagccagcttctaggcccaggttcatacttattagtaataatttatgtaatacatactttataagactgcacaaaaggaaatgctttaacaaagaagacatttattttaagggaattctccagtttcttctaagttgtt

SEQ ID NO: 49366 - DNA, 578 bp, Homo sapiens
ggcatgatgacaaagtggtgaggatagcctcaccaggcactaactccaacaactcattcatatggtcaactccagagcgattagcctagacaggtaactaggcttaacccctagatttggaagggcctgctgcttctattctaatccactgagctggctaaccccacaagccaaagggtatttaatctaaaagacaaaatgcatcttctatgaggaatgaaatgaatatatcaggaaactcagcgtctattgtgcctgaatcccaaaagtcatgccaaagaacaaatacrtatttcttgctcatctttcacagatctttccaaagtaaacagtgaagggcaagcagagagtcaagaccagcctctgacccacctcatttgcaccagtacaaagaatcatgcccaaggtcataaactaaaagaggttatttataccatagcagccagcttctaggcccaggttcatacttattagtaataatttatgtaatacatactttataagactgcacaaaaggaaatgctttaacaaagaagacatttattttaagggaattctccagtttcttctaagttgtt

SEQ ID NO: 49367 - DNA, 578 bp, Homo sapiens
acttcctggccagctggtcttgatgaagggagcagaagtctgacgctacgagcaagtgaataggagccacgtggcgctgccaggtagaaggaggacactggaagtgacagtaggctgatctagtgagcaatctacccctcaccagtcctcattcttcaggactcaggtgtattggggtcttttcaagagtctctggggagggcagctgtataaatgataaaattataagccagattttgtaagcaaaagattttgcaagcccttagccttggacctcagccaagtgtgttgttccaacaaactgccttcgctcccagaaaagtctgctcawcctgcaaatatcggaaaacagcagtgatattccctcttctgtttcaagccaagcttccctggctccttcctttatactcccatctccatctaaactatgagcccctcctggacaaggattctgccttcttcctctttgcagccttccccatgttggtcaccatgcgctaggcatggtcaaatgaatcaattttccacttaaatacagcatccaggaataaaggcacttgtacagatgtggtctaatg

SEQ ID NO: 49368 - DNA, 637 bp, Homo sapiens
aatacagaagacagtgccagtcggaggtaaggtcatgggatagagtggtgggcaggtggggattcccttagctggggaggttggggaggcttcctggaggaggaaagatgggtggtgagytttttgttgtgtttttcagggtggcattaacaccagtgtgccatatggtggtatctatgtgaaatccattgttcctggaggaccagctgccaaggaagggcagatcctacagggtgagagatggggatgggtcctcattgggaactctgtgctccatggtgtaaagagccctgcactgggaggggcagcctctaggccttgccctgctcccattctgaaaactcatgcaaatgattgcctccccaggtcatacttttctcacctggaaaggaggtgatagaacctgccctgcccatttgataggttggggggtctgcagtggcacactgggaagcataggtgatagaaaaatagtagaagacttaaaagacttgtgttgctctttggcctccatgggaaaacatactgcttcccttggaggacaagtgggcctcggtaaactcactcgcacatccggggaggacacctgagccttctgtttgcccttgctcagctcccacttctctgatggaagggg

SEQ ID NO: 49369 - DNA, 637 bp, Homo sapiens
aatacagaagacagtgccagtcggaggtaaggtcatgggatagagtggtgggcaggtggggattcccttagctggggaggttggggaggcttcctggaggaggaaagatgggtggtgagttttttgttgtgtttttcagggtggcattaacaccagtgtgccatatggtggtatctatgtgaaatccattgttcctggaggaccagctgccaaggaagggcagatcctacagggtgagagatggggatgggtcctcattgggaactctgtgctccatggtgtaaagagccctgcactgggaggggcagcctctaggccttgccctgctcccattctgaaaactcatgcaaatgattgcctccccaggtcatacttttctcacctggaaaggaggtgatagaayctgccctgcccatttgataggttggggggtctgcagtggcacactgggaagcataggtgatagaaaaatagtagaagacttaaaagacttgtgttgctctttggcctccatgggaaaacatactgcttcccttggaggacaagtgggcctcggtaaactcactcgcacatccggggaggacacctgagccttctgtttgcccttgctcagctcccacttctctgatggaagggg

SEQ ID NO: 49370 - DNA, 614 bp, Homo sapiens
agataagcttcattacacggctgcctgtggaattttagtgctggtatggaaaggatcctgagaccacatccagacttagcacaggtgaatgctgtgattgactaatgatgccaccatgggtgagggaggagcgagtgagagcacatttaccttgtgtctgccatctgtgttccaggtgataggatgtttgctcatttgaaatacattttctggactgggcatgatggcttacacctataatcctagcactttgggagaccaagaagggaagattgcttgaggccaggagttcaagaccagcccggaaaacatagtgagaccttgtctctacgaaaacatataacattgtctgggcatgatggcacgcgcctgtagtcctagctgctcaggakgctgaggtgggaggatcacttgaacccaggagttcaaggttacagtgagctgtgatcatgccactgcactccagcctgggcaacaggggaagaccctgtctccacaaaaattttcaaaataaataaataaaaattaaaaaacaattaaatacattttctggcacctcacgatatactgatcttttaacacatttttaaaaactgcattgacttacccgttgc

SEQ ID NO: 49371 - DNA, 1626 bp, Homo sapiens
atgtggcaaatataccccatggaatactatgcagccataaaaaaggatgagttcatgtcctttgtagggacatggatgaagctggaaaccatcattctgagcaaactatcacaaggacagaaaaccaaacaccgcaggttctcactcataggtgggaattgaacaatgagaacacttggacacagggtggggaacatcacacactggggtctgtcagggggaggggagatgggggagggwtagcattaggagaaatacctaatgtaaatgatgagttaatgggtgcagcccaccaacatggcacatgtatacatatgtaacaaaactgctcgatgtgcacatgtaccctagaacttagagcataattttaaaaaattgccattgtgctgtattgtacccaataccacatgcagatgggtgtttaataaatgctttttgatgatagcattgatgagaaaaaatattcctttgagagaaggtgttggtatatgctggcagtcatgaaacttataactgttaaccttttgggcacttggataaatactgaataaacacatacttacaaagcataggctatgagcttccttgaatttttacagttgaaattgctcttggaggctaagaaaggagtgttgtcctaaagactttgcctcctggggctgttctgttctggggataatgggaatccaagtgatatctctgtagtgccaactgcctcattcctttacctgcaggtcccagagtccagcagggaaatcggatggggtgaggagttggggcagtcagcgtcgttttgcctttctctggctttaaagagttcttggcagagcagcaaggtgaaggaaggagagttttatcctacattccaaaagaaacttgaaccttctcagaatatcttgtggaagggaaaggactctcttgaaatgtatctctttggccaaaaccatcagggtgatgtgtctgaatggtgctgtgattcctttgcttaggaatggcaagaccacctgccactttacctttaggatcacagtttctgcctagagggcggggtgtcagagaatggaaagaaaaaccctctaaaaaagaacgtaggttttgatttgaagtcaacaaatataaaatagggacccccaaaccattttaaagccaaaacaaaatgaaacttaaataatgactttgaagaccatgaagcaaacctgaattgttttctctaatttgtctctatcttctgttgcctgtactgtatgggaagtctgcccctatgtccatcttgcttctgtcagcatttcgtggcctgattggaatctcacctctctatgtccctgaatccatctgagtaagagtggaaggatctttccttttgtgactgtttatggcttttttttttttttttttggtctgaacactgtatttggcaacaattcttgttcagcctgtggattttgattgttgctgagacctgttattttaatgcagggcatgatacaataggcaaaacatgagcttttaagtcaatctaattcaatttatttgtgtagactcagctttcttcctaaaaagaattacaaaaacattttttaaaaaagttgcaataaaattaaccacatagcagaaatatgccaatca

SEQ ID NO: 49372 - DNA, 1626 bp, Homo sapiens
atgtggcaaatataccccatggaatactatgcagccataaaaaaggatgagttcatgtcctttgtagggacatggatgaagctggaaaccatcattctgagcaaactatcacaaggacagaaaaccaaacaccgcaggttctcactcataggtgggaattgaacaatgagaacacttggacacagggtggggaacatcacacactggggtctgtcagggggaggggagatgggggagggatagcattaggagaaatacctaatgtaaatgatgagttaatgggtgcagcccaccaacatggcacatgtatacatatgtaacaaaactgctcgatgtgcacatgtaccctagaacttagagcataattttaaaaaattgccattgtgctgtattgtacccaataccacatgcagatgggtgtttaataaatgctttttgatgatagcattgatgagaaaaaatattcctttgagagaaggtgttggtatatgctggcagtcatgaaacttataactgttaaccttttgggcacttggataaatactgaataaacacatacttacaaagcataggctatgagcttccttgaatttttacagttgaaattgctcttggaggctaagaaaggagtgttgtcctaaagactttgcctcctggggctgttctgttctggggataatgggaatccaagtgatatctctgtagtgccaactgcctcattcctttacctgcaggtcccagagtccagcagggaaatcggatggggtgaggagttggggcagtcagcgtcgttttgcctttctctggctttaaagagttcttggcagagcagcaaggtgaaggaaggagagttttatcctacattccaaaagaaacttgaaccttctcagaatatcttgtggaagggaaaggactctcttgaaatgtatctctttggccaaaaccatcagggtgatgtgtctgaatggtgctgtgattcctttgcttaggaatggcaagaccacctgccactttacctttaggatcacagtttctgcctagagggcggggtgtcagagaatggaaagaaaaaccctctaaaaaagaacgtaggttttgatttgaagtcaacaaatataaaatagggacccccaaaccattttaaagccaaaacaaaatgaaacttaaataatgactttgaagaccatgaagcaaacctgaattgttttctctaatttgtctctatcttctgttgcctgtactgtrtgggaagtctgcccctatgtccatcttgcttctgtcagcatttcgtggcctgattggaatctcacctctctatgtccctgaatccatctgagtaagagtggaaggatctttccttttgtgactgtttatggcttttttttttttttttttggtctgaacactgtatttggcaacaattcttgttcagcctgtggattttgattgttgctgagacctgttattttaatgcagggcatgatacaataggcaaaacatgagcttttaagtcaatctaattcaatttatttgtgtagactcagctttcttcctaaaaagaattacaaaaacattttttaaaaaagttgcaataaaattaaccacatagcagaaatatgccaatca

SEQ ID NO: 49373 - DNA, 1626 bp, Homo sapiens
atgtggcaaatataccccatggaatactatgcagccataaaaaaggatgagttcatgtcctttgtagggacatggatgaagctggaaaccatcattctgagcaaactatcacaaggacagaaaaccaaacaccgcaggttctcactcataggtgggaattgaacaatgagaacacttggacacagggtggggaacatcacacactggggtctgtcagggggaggggagatgggggagggatagcattaggagaaatacctaatgtaaatgatgagttaatgggtgcagcccaccaacatggcacatgtatacatatgtaacaaaactgctcgatgtgcacatgtaccctagaacttagagcataattttaaaaaattgccattgtgctgtattgtacccaataccacatgcagatgggtgtttaataaatgctttttgatgatagcattgatgagaaaaaatattcctttgagagaaggtgttggtatatgctggcagtcatgaaacttataactgttaaccttttgggcacttggataaatactgaataaacacatacttacaaagcataggctatgagcttccttgaatttttacagttgaaattgctcttggaggctaagaaaggagtgttgtcctaaagactttgcctcctggggctgttctgttctggggataatgggaatccaagtgatatctctgtagtgccaactgcctcattcctttacctgcaggtcccagagtccagcagggaaatcggatggggtgaggagttggggcagtcagcgtcgttttgcctttctctggctttaaagagttcttggcagagcagcaaggtgaaggaaggagagttttatcctacattccaaaagaaacttgaaccttctcagaatatcttgtggaagggaaaggactctcttgaaatgtatctctttggccaaaaccatcagggtgatgtgtctgaatggtgctgtgattcctttgcttaggaatggcaagaccacctgccactttacctttaggatcacagtttctgcctagagggcggggtgtcagagaatggaaagaaaaaccctctaaaaaagaacgtaggttttgatttgaagtcaacaaatataaaatagggacccccaaaccattttaaagccaaaacaaaatgaaacttaaataatgactttgaagaccatgaagcaaacctgaattgttttctctaatttgtctctatcttctgttgcctgtactgtatgggaagtctgcccctatgtccatcttgcttctgtcagcatttcgtggcctgattggaatctcacctctctatgtccctgaatccatmtgagtaagagtggaaggatctttccttttgtgactgtttatggcttttttttttttttttttggtctgaacactgtatttggcaacaattcttgttcagcctgtggattttgattgttgctgagacctgttattttaatgcagggcatgatacaataggcaaaacatgagcttttaagtcaatctaattcaatttatttgtgtagactcagctttcttcctaaaaagaattacaaaaacattttttaaaaaagttgcaataaaattaaccacatagcagaaatatgccaatca

SEQ ID NO: 49374 - DNA, 1626 bp, Homo sapiens
atgtggcaaatataccccatggaatactatgcagccataaaaaaggatgagttcatgtcctttgtagggacatggatgaagctggaaaccatcattctgagcaaactatcacaaggacagaaaaccaaacaccgcaggttctcactcataggtgggaattgaacaatgagaacacttggacacagggtggggaacatcacacactggggtctgtcagggggaggggagatgggggagggatagcattaggagaaatacctaatgtaaatgatgagttaatgggtgcagcccaccaacatggcacatgtatacatatgtaacaaaactgctcgatgtgcacatgtaccctagaacttagagcataattttaaaaaattgccattgtgctgtattgtacccaataccacatgcagatgggtgtttaataaatgctttttgatgatagcattgatgagaaaaaatattcctttgagagaaggtgttggtatatgctggcagtcatgaaacttataactgttaaccttttgggcacttggataaatactgaataaacacatacttacaaagcataggctatgagcttccttgaatttttacagttgaaattgctcttggaggctaagaaaggagtgttgtcctaaagactttgcctcctggggctgttctgttctggggataatgggaatccaagtgatatctctgtagtgccaactgcctcattcctttacctgcaggtcccagagtccagcagggaaatcggatggggtgaggagttggggcagtcagcgtcgttttgcctttctctggctttaaagagttcttggcagagcagcaaggtgaaggaaggagagttttatcctacattccaaaagaaacttgaaccttctcagaatatcttgtggaagggaaaggactctcttgaaatgtatctctttggccaaaaccatcagggtgatgtgtctgaatggtgctgtgattcctttgcttaggaatggcaagaccacctgccactttacctttaggatcacagtttctgcctagagggcggggtgtcagagaatggaaagaaaaaccctctaaaaaagaacgtaggttttgatttgaagtcaacaaatataaaatagggacccccaaaccattttaaagccaaaacaaaatgaaacttaaataatgactttgaagaccatgaagcaaacctgaattgttttctctaatttgtctctatcttctgttgcctgtactgtatgggaagtctgcccctatgtccatcttgcttctgtcagcatttcgtggcctgattggaatctcacctctctatgtccctgaatccatctgagtragagtggaaggatctttccttttgtgactgtttatggcttttttttttttttttttggtctgaacactgtatttggcaacaattcttgttcagcctgtggattttgattgttgctgagacctgttattttaatgcagggcatgatacaataggcaaaacatgagcttttaagtcaatctaattcaatttatttgtgtagactcagctttcttcctaaaaagaattacaaaaacattttttaaaaaagttgcaataaaattaaccacatagcagaaatatgccaatca

SEQ ID NO: 49375 - DNA, 1626 bp, Homo sapiens
atgtggcaaatataccccatggaatactatgcagccataaaaaaggatgagttcatgtcctttgtagggacatggatgaagctggaaaccatcattctgagcaaactatcacaaggacagaaaaccaaacaccgcaggttctcactcataggtgggaattgaacaatgagaacacttggacacagggtggggaacatcacacactggggtctgtcagggggaggggagatgggggagggatagcattaggagaaatacctaatgtaaatgatgagttaatgggtgcagcccaccaacatggcacatgtatacatatgtaacaaaactgctcgatgtgcacatgtaccctagaacttagagcataattttaaaaaattgccattgtgctgtattgtacccaataccacatgcagatgggtgtttaataaatgctttttgatgatagcattgatgagaaaaaatattcctttgagagaaggtgttggtatatgctggcagtcatgaaacttataactgttaaccttttgggcacttggataaatactgaataaacacatacttacaaagcataggctatgagcttccttgaatttttacagttgaaattgctcttggaggctaagaaaggagtgttgtcctaaagactttgcctcctggggctgttctgttctggggataatgggaatccaagtgatatctctgtagtgccaactgcctcattcctttacctgcaggtcccagagtccagcagggaaatcggatggggtgaggagttggggcagtcagcgtcgttttgcctttctctggctttaaagagttcttggcagagcagcaaggtgaaggaaggagagttttatcctacattccaaaagaaacttgaaccttctcagaatatcttgtggaagggaaaggactctcttgaaatgtatctctttggccaaaaccatcagggtgatgtgtctgaatggtgctgtgattcctttgcttaggaatggcaagaccacctgccactttacctttaggatcacagtttctgcctagagggcggggtgtcagagaatggaaagaaaaaccctctaaaaaagaacgtaggttttgatttgaagtcaacaaatataaaatagggacccccaaaccattttaaagccaaaacaaaatgaaacttaaataatgactttgaagaccatgaagcaaacctgaattgttttctctaatttgtctctatcttctgttgcctgtactgtatgggaagtctgcccctatgtccatcttgcttctgtcagcatttcgtggcctgattggaatctcacctctctatgtccctgaatccatctgagtaagagtggaaggatctttccttttgtgactgtttatggcttttttttttttttttttggtctgaacactgtatttggcaacaattcttgttcagcctgtggattttgattgttgctgagacctgttattttaatgcagggcatgatacaataggcaaaacatgagcttttaagtcaatctaattcaatttatttgtgtagactcagctttcttccwaaaaagaattacaaaaacattttttaaaaaagttgcaataaaattaaccacatagcagaaatatgccaatca

SEQ ID NO: 49376 - DNA, 637 bp, Homo sapiens
aaaaaaaaaaaaaaaaaaaaaaaaattagccrggtgtggtggcaggtgcctgtagtcccagctactcgggaggctgaggcaggagaatggtgtgaacccagaaggcagagcttgccgtgagccgagatcgcaccactgcactccagcctgggcagcagagggaaactctgtcacaaaaaaaaaaaaaaaaaaaaaaagaaagaaaaaacttgaggctgggtaatttacaaataaaagaggtttaattggctcacagtccacaggctgtgtaggaagcactgctgagagagcctcagaaaactttcagtcatggtggaaggcaaaggggacacaaatccaaaccatatcactttgagaggcatgatagaagtagaccttaccaatggggcatgaaaactatacctttagcttccaagaatctggtccagagaaatagtattggaataatatagacaaaaaaccaacaaaatctaacacctaggttattctttcctgcagggagccaaaacagtgtagatgaaacttacagattctgggacttattcacattttccacctaactggggacagagtaaccttggggatatcaggtgtagttgtaaacaaaaaaaaaatgtggccaatataagcactgaaa

SEQ ID NO: 49377 - DNA, 1186 bp, Homo sapiens
ctctctctttctttctttctaccaaatatcaccttctcaatgagtcttgggctatcctgatcaccctattgtaaacagttgcatacccatctcccacatttccagtgtcccttcattgcactttttgttttctcataggatttatcacttgttaacaatataatacttgttattttattagggtttttttgtgtttaattttaaatatgtctttgtaatgacattttgtattgtattttgtaatgcacttactaggtttactgttcatcatctctactctatgttaaagtataaggtttataaagacaagtgtgtttgcttgcttgttttttttttctcactaaaatagtgtttaggatataaaagatgctttgcaacttttttttttccaattaatggaaaatcgctgaattaagaaagtttacaaagctagctgaaagcatatccgggctgggcgcagtggctcatgcctgtaatcctagcactttgggaggccgaggtgtgcggatcacctcaggtcaggagattgagaccagcctggtcaacaaggtgaagccccatctttactaaaactacaaaaattagccaggcttggggcaggcacctgtaatcccagctacttgggaggctgaggcaggacagttgcttaaacctgggaggtggaggttgcagtgagccgagatggtgccactgcacttcagcctggacgacagagcgagactccatgtcaaaaaaaaaaaagagcttatctgccacttgaagctgtatctgttcatcccaccctgtattctgttagctgtgctatgtgtcctcccaccacagagcaaagcaatgaagaagggaggatctagaagcacacaaagtccaaaccagtcacaccactcaccagctttgtcatcttgaccaagttactcaacttctctgagactcatttggctcatccatagaatggaataacagagccaactcttaaggccattgtgaggaataagtcagaaataggtacgcatatgcacataaaccacacacacactcacacacatgcacacacacactcacacatctgcacaccaacatgtatattacacttarcacagtgtaatatacatgggcagaggagaaatttttgatgtgtaaaattggagatttaattacatgcacgttattaggcctccaaaaaagtggg

SEQ ID NO: 49378 - DNA, 606 bp, Homo sapiens
ttgagctcagctccaaaatggatgccttccacaaaactgctcacttgagcgggttcaatatcattatattggcttccattccaatgtttttcccttggtgttgtcacagagacttcaggcattggaactgcaccccttccccataggcaccctggtgagcttttgtcattccagccatgtttatgtaagatgctaaagaaacagattgctcagggacattcatagagcctgaaagaattcatgcaccttccctgttgctttgcatcatgggaggttatgtctagggggcaggataatttggctgttgaacattcaaatttatgtctcagatcatgtacccaggtcccagatatgaaatcagaaattttatgatgttccctacatgctccacatccccagacctaatcccacatcttgttstcttttttgtttctttaacccattcgctttctcttagcagaactaatcaatgacataatggattatctgagcaagaagtgtgttttcatcaaaacttcaggttatgatctttccacttataccaactaaataaacatgacagcagacacagtttcttttctctggactgtctgtgtcagtgctgac

SEQ ID NO: 49379 - DNA, 565 bp, Homo sapiens
tgccaagaaattcttgtactcctaattggccaaatcctgctttcatcacttgcagatcatagcccacaatcagtagagggcttccagaggtgtatgatattacccctgagtgcttatcacagacactaaaattcaggcagttaaactcaagagaaaacaactgggtagtgaaaacagaaaaatgactgacatttgcggatttctgttgttgatcctgcactgattaggaccaagcaggagtctccagctgccacgcagaaggaaagaggcagatctttgaaggatggtttctaacaacttgtgaagttacctggggttagacgggagttctggtaagaatgaggatcagcaaggtgctaagccagcttctattggccttaaatccatgtatttattgaaatgttacctggtttggagtgatcttaagttgttctgtaagctctgtggtaccccacaggccatctgaagaagtctacttaaagatgttggctccctggatctgggattgatgtgtacacccctgcctttttcaccttgctttmcatggcattcttaattttcaatt

SEQ ID NO: 49380 - DNA, 634 bp, Homo sapiens
tggagtcaaagcatttcacaatttatagaatgtatttccatctacaatcacagatactaacactatacccctagtcctagacatttccagcataaaactctgacaccgagatgctgagaactccacaaatatgtcacagggtcacagtcaacctacatggctttccttgggaaacaacagtagtaacaaaataaggaagcaaaacttagatttgtccmttcacttttacctagatatatggcatatttttaaggcattgtatctacaactgagaagactctaccactaattttctattacagcaacgtctgtcagcattcaaaagtcaactctcaggttgacaaagagcagcaaaggaccatagccactgtggctgtgagtgtgttctatggcagaaagactgtgcaagaacaaccaacggtgatatttaaaacacttcaccaccaacaggatagatgctgaccaggggctgggtcctctctggcctctagtgtactagacattaaccttttagctcttggattgtgagaagtttcagcaagtcagggcagtgtcatttaccaaacaacatggaaatatttcaatattttgacatgatatatcatcatactgctgtgtactagctacatattag

SEQ ID NO: 49381 - DNA, 634 bp, Homo sapiens
tggagtcaaagcatttcacaatttatagaatgtatttccatctacaatcacagatactaacactatacccctagtcctagacatttccagcataaaactctgacaccgagatgctgagaactccacaaatatgtcacagggtcacagtcaacctacatggctttccttgggaaacaacagtagtaacaaaataaggaagcaaaacttagatttgtccattcacttttacctagatatatggcatatttttaaggcattgtatctacaactgagaagactctaccactaattttmtattacagcaacgtctgtcagcattcaaaagtcaactctcaggttgacaaagagcagcaaaggaccatagccactgtggctgtgagtgtgttctatggcagaaagactgtgcaagaacaaccaacggtgatatttaaaacacttcaccaccaacaggatagatgctgaccaggggctgggtcctctctggcctctagtgtactagacattaaccttttagctcttggattgtgagaagtttcagcaagtcagggcagtgtcatttaccaaacaacatggaaatatttcaatattttgacatgatatatcatcatactgctgtgtactagctacatattag

SEQ ID NO: 49382 - DNA, 634 bp, Homo sapiens
tggagtcaaagcatttcacaatttatagaatgtatttccatctacaatcacagatactaacactatacccctagtcctagacatttccagcataaaactctgacaccgagatgctgagaactccacaaatatgtcacagggtcacagtcaacctacatggctttccttgggaaacaacagtagtaacaaaataaggaagcaaaacttagatttgtccattcacttttacctagatatatggcatatttttaaggcattgtatctacaactgagaagactctaccactaattttctattacagcaacgtctgtcagcattcaaaagtcaactctcaggttgacaaagagcagcaaaggaccatagccactgtggctgtgagtgtgttctatggcagaaagactgtgcaagaacaaccaacggtgatatttaaaacacttcaccaccaacaggatagatgctgaccaggggctgggtcctctctggcctctagtgtactagacattaaccttttagctcttggattgtgagaagtttcagcaagtcagggcagtgtcatttaccaaacaacatggaaatatttcaatattttgacatgatatatcatcatactgctgtgtactagctacmtattag

SEQ ID NO: 49383 - DNA, 637 bp, Homo sapiens
tcgcttgaacctgggaggcagaggttgcggtgatctgagattgcaccacagcagagtgagcctatctcaaaaataaataaataaataaataaataaataaataaataatccaatgaaggatttggaaaaaaatttttgagacagtcttgctctgttgcccaggctggagtgcagtggtgygatctcttttggctctttaatgctcttttggctgagggtggatgggaaccagaaaatagcttcatggaggttaaatttaagtcttcagggataacagagttcgaaaaagaggaaagtgagcaaagatgcagggaaagaaagcagaaatgagcagagaaaggaaaaggcaggaagatatggtaaagacaggaaaacatctgaaaaatgacagtcactttatgtagtgtataggactaaacagataaagcagagaaagttgaggtgactttttgaaccattaactgataaaaccagtcttatgcttaaggaggattcacctggcagtggtaaggagaagtaaatgctggagggaagagactggaggcagaaggccagttaagaggttcttgcaatagacgaggtggatgacaataagggcctgagccaggagagtgacagtggaaacagaaagcctatt

SEQ ID NO: 49384 - DNA, 637 bp, Homo sapiens
tcgcttgaacctgggaggcagaggttgcggtgatctgagattgcaccacagcagagtgagcctatctcaaaaataaataaataaataaataaataaataaataaataatccaatgaaggatttggaaaaaaatttttgagacagtcttgctctgttgcccaggctggagtgcagtggtgcgatctcttttggctctttaatgctcttttggctgagggtggatgggaaccagaaaatagcttcatggaggttaaatttaagtcttyagggataacagagttcgaaaaagaggaaagtgagcaaagatgcagggaaagaaagcagaaatgagcagagaaaggaaaaggcaggaagatatggtaaagacaggaaaacatctgaaaaatgacagtcactttatgtagtgtataggactaaacagataaagcagagaaagttgaggtgactttttgaaccattaactgataaaaccagtcttatgcttaaggaggattcacctggcagtggtaaggagaagtaaatgctggagggaagagactggaggcagaaggccagttaagaggttcttgcaatagacgaggtggatgacaataagggcctgagccaggagagtgacagtggaaacagaaagcctatt

SEQ ID NO: 49385 - DNA, 1724 bp, Homo sapiens
attttctttcttcatttttgatcacccctcaacccaaccatcaagttacacaccccttcagaccccctcctcacaccaactctctcctttgtactgtttcaactgattagaaaatgatttacttgaggccgggtgtggtggctcatgcctgtaatcccagcactttgggaggccaaggygggtggatcaccagaggtcaggagtttgagaccagcctggtcagtatggtgaaaccctgtctcaactaaaaatacaaaaagtagccaggtgtggtggcgcatgcctgtaatcccagctactctggaggctaaagcaggagaatcacttgaacctgggaggtggaggttgcagtgagctgagattgcgccactgcactccagcctaggcaacaagagtgaaactccatctcaaaaaaaaaaaaaaagtaaagaaaaagaaaatggttacttggttctaaattcatttcacagatacagtctccatgggaaataaacagaatgctcattaaccttcagtgtatgtacatagagttttctaagttcccacttacagcagctatttttggctgtgtcctgttttaagtgctggtagggcctcctcccactataggggctgatcagccactcactatttgaagcctgggtgttttctggggagctctttctcctcatcataatgaggacactcttgtcctttggccttcaggtgatgtattaggaagttattagagctgcagtggccctcttctgaccatagaggcaagctttaggattaaaaccgatgtgcccaggatgatgggttgaaatgtggaaagagtctaggtcctcagtaagacactgagtcactgaattattaaataggagaattggaatttgtgaattttctctcttgcaacaaaacagttcccgagtttcagactgaatgtacaagcttagcaagcagagccaacctgcaaatgccctacctccacacttcttattctaggggattatgaatttaatctactttagttgattacttgcagctgcaaacaaccaagcagacacagtgattaaatacaaataaatctattctatgtttctgtttactatatatttaaagctttgatggagagaagaagccaatggaaactgaccttgagttttccataaaactgaactcttccttgatgaccctaatagagctaaaactatgattgagattgcacaaagcattgaatcatcaaaagtaacgtattatgatgtcatatattaaataaactcagcttttggtaggatataagttgaaaaagcacacagcaacttaaaagtggagatggaggcttagaaacttctatgttggtgagaggaggtggaattagaatattttccaaggattattctcaaagcacataactgagaattgactttgagtgttggcaataaaggaagacttttctcctattacgatatgctagacataacattcttattaaagtaaggaggagaattggagtttctgaatctcctcctttgcaacaaaacagctcccctgtttcaaattgaatgtacaagattagcaagcagagagatgaagatttaagaaaaaaagtatgggctgggtgcagtggcttacacctgtaatcctagcactttgggaggccgaggctggaggatggcttgagtctaggaggtcaagaccagcctgggcaacatagcaagaccctatctctacaacaaatacaa

SEQ ID NO: 49386 - DNA, 545 bp, Homo sapiens
aaggatttatgggccacctgttctgcttgagattttaggagaagactctgctctcatgaagcttagagtgtcatygcagggagataggcaagtaaatgaatatatatgcatatatttagtttgtcaggtggtgataaatgtaggaaggaaaataatgcaagacagagagaaagagaaatcatgctgggaagacaaaaaagatttgtcaagatcacttactaaagctactgccatgcacataagaacataaaggcattatgaagactggcagccttttcatctttgtttctatttttctctttgccccaaggctttaccctgtatacctgagttagcctctccctagctctgggcctggcccttgctgcaatatcactccttaactccaggtgctctaatagaaggttgggctgccctgcctactcccatgctctagttccctacctcattggcaagaaagttgaaaaagatttctatttaatttttgaaaggataaaggcattgtttttttttttttttttttttttttttttttctttagtgga

SEQ ID NO: 49387 - DNA, 605 bp, Homo sapiens
agcatccactgggctcagtgggaggggctgttatcatctctgttgtaaaattcaccaccacctagactcctgacctcctgacatccaactgtcagctcatgcacatggttttaaatcgtgccttgagatcttacaaaaagcctggctttggccctgagacttgattcactttgccatcttctatctatcgagcacctctaagggtaagaagcccagcaggacatatagggaggtagatggggagcacacacagacttggggtggatcgtggggaggtggatggggggcacccacagactcgaggtggatcctggggaggtggacggggagcacccacagactcggagtggatcctggrgaggtgaacggggagcacacacagacttggggtggatcctgtggaggtggatgggggcacccacagactcgaggtggatcctggggaggtggacagggagcacccacagactcggagtggatcctggggaggtgaacggggagcacacacagacttggggtggatcctggggaggtggatggggggcacccacagactcgaggtggatcctggggaggtggacaggtagcacccacagactgagatc

SEQ ID NO: 49388 - DNA, 605 bp, Homo sapiens
agcatccactgggctcagtgggaggggctgttatcatctctgttgtaaaattcaccaccacctagactcctgacctcctgacatccaactgtcagctcatgcacatggttttaaatcgtgccttgagatcttacaaaaagcctggctttggccctgagacttgattcactttgccatcttctatctatcgagcacctctaagggtaagaagcccagcaggacatatagggaggtagatggggagcacacacagacttggggtggatcgtggggaggtggatggggggcacccacagactcgaggtggatcctggggaggtggacggggagcacccacagactcggagtggatcctggggaggtgaacggggagcacacacagacttggggtggatcctgtggaggtggatgggggcacccayagactcgaggtggatcctggggaggtggacagggagcacccacagactcggagtggatcctggggaggtgaacggggagcacacacagacttggggtggatcctggggaggtggatggggggcacccacagactcgaggtggatcctggggaggtggacaggtagcacccacagactgagatc

SEQ ID NO: 49389 - DNA, 1377 bp, Homo sapiens
ttaacaatcttccttgatcccatctagatgcctctttctcctctaatgtcccataatataattataatcttaaaatcaccctaaaattgtttgtatatgtttgccgaaagagatggttacattactgagtgcatggatcagtatttcctttaggatttcccataaagcactgcattatagcagctcaccaataaatatttgtgaggtttaaattaaatttatgaaatttaaattacatatatcggccttttcaaagcaacatttctttgtgagcatgtgagcatattgggtaaatgttttcatctccttttttattcttttacttttatttagatacactaaaattcaccttccgttcgagttttgagatgcacagagccatgtcaccaccagcacaatcaagatacagaacagttccatcacctcaaaatactctcttgtgctactcctttgtagtcaaaacagcccccatctccaatcccagaaaccacctatcagttttctgtttctatgttttgccttttccaggatgtcatataaatggaatcatatagcattgcaggcttttgagtctgttttttgtcccttagcaagtgcatttgaccttcatccacattgctacaggtatcggtagcttgttcctttctatcgctaattagtattctattgtatggataaaccacagcttgtttatcctttcactagtataaggacattcaggctgtttccagtttggggtaattatgaataaaaggtgctatccatttttaagatataccaaaaaaagaaaatttgcaaatgactgagccaaggtcacaattaccaataataaaaagaaatggtacatactttaaagaaacctataggaaaagtataagtcagtattcctatgtcaataaaatccagctcataatatattttctgtaaagagattttaaactaacttttctatatttggtacacattaatgagccagagttcagaagtatccaaccaaagcacctttccaaaggttccttcttgccaatgtgaccctggtgaccagactattataaataacttttatgtcttgatctatgtgtaactattcatcattgctgtgtaagtcagcaatgatgcccaaccagcctctgcctttyatctgacctactgtactcatttgcaatgcacagagtgggtggcaagtgatgggcccagcacttgggggctccatgagcatgcaaagaaacaggctacttagatgattatgcagagggggtaactacagctgcactttttctgttgatttagacacaaaacaacatatgtcctcatcctcaggggcagactatcacattatttccattagccggcattctgggtgcctgtctggggagc

SEQ ID NO: 49390 - DNA, 2476 bp, Homo sapiens
tattgtatttctagccacactcatgcaattatgcaaatgtgaaacttgctctgttgaacagcatgatatcactttactttttattaatttgaaagaatacatctagataaattggagttagatgttaaaaaaagctgagtgttgttgctaaacttgggtgtgtgtgtgtatgtctgtgtgtgtctgtgtgtgacagagataaagagagaaaagaatactaatgaaacttattttctaatatattcctcttttctaagataggaatgtgaatataaaatatgcaaacaatatatgcactgtctaaccaagaaggtgtgtattcatggcattatgatagctaaagtataaacgtagctgacatgatccaatatgtgattcataatgttttacagacaatattttgttaggcatttggaaaaaggaaaacacctaataataaagatgtgtatatatatatatatatatatatatattttccttcattctctcagtactattttctatttgatgtgcatatgatacatttataaatgcatatacttacataaaaaagtatttatataatttatgatgggattcagggttttttggtccagatagacatccaccaagctctaggtaataacataacctttgtctccttaggacaaaaagtgacttttcaaaaacaaaagttgtgttttatacatgataatcaggacaatacactatagttagttgtttctctttcaggttcactgtatagggaaaggcatattaacactacttagattgcgtccctttctctcaacatcattgcttgtctctaatgggctgccatctccagtccacatgtaggagtttgggtggggcaggttccatatttggtcaaaacaatcttattttactcatgtggaacatagacatataaaattttatgctaattatgcaaatattattttcatgtataatttatgaatgttttgaaaatcctctgtaaagtgtggaaaatgttttgaattgcatactgttctttaagctaactcataattatgttatgtggaacttaccaagtatactagtgcagcatgtatttagttttcattaatttggaaaaaacatactttgctacattgtacatttgtcattcaaagtcrttataacaaatgccattaaaggctagattgcctggtatgttaatggtcccaggttacattgtttgttggcatagggcctggtcattgctcttttccatcctcataatggagaccatctccaggatgcattactggagcctggtctgacctgagggcaccaatggagatggagatggcacaagaagcattccttttccaccatcccagtttggctgtgccacacgtgggtttgcgtatcacctactttcagcattaccaaaataggaatgcagctgccttcgttacagggaggtgataaaaaccgcatgctgagctgatattgtaaagaacatcctattaaatttcattgtattgtttttgttatatacttttaaagatttttaaaatatattattttaaaaattaatattttaaatcccacaatttaaattaatattattttttaaagtatattatatatttttgaaataaatgtcaatgggaaactcaggtcctaactctgtgctatttaatattccatgatataactgcgtattagtggaacgctgtctctaaaaggtgaactaataatagtcactgcttattgatatatttttacagaggttccttaggagacagaatattttaagctggtagtggtgaagatgattgaattttctttttaaatggagggggcttacgcattcttagcttattttagaaatcctactctggggatcatgcacatttgcattgaattccatggcataaaaaggaagttaattcacaccttttcacactagtctagtttataacacctttgtagcacacattaaaattttttaaattggtgaactcacatttttttctcaagtgtgcctgaatttggtttattatgtgtggcaaagagtagaaagaatatatgtcatactttgctttttctgaagttatgccgtatcctgaagttatatttttcttcttcttctttcgctctgggattccagcttcatgctagtgctattaagagctattagcatataggtccttcagtcctttcatatatttatttcagttattttaattaagcactgttttatttacttgcgttctgtttattttctgcctctctcagtgaaatagtaaactccataagggtatggacttgcagtaatcataaaggatataacagaacatattaaaatgtaaatatttttgggcagttggggagagcaaggatttaagtgagggaatgacttgattggatttacattttaattttggaaatgatcttgatggtctggtggtggtggtgttgtaggactttctccttagctaaaagccgggttgtcacacgatcatga

SEQ ID NO: 49391 - DNA, 532 bp, Homo sapiens
ccttattaactaacacttccctcaaattaaaaacaaatccccaaacatactccttttacaattttattaactccaaattaagttttcatacacgtgtttatcctacatatgtggcattcatgttaggctctctgctaccttgttctattttcaggttatactaaaacatttttcttccagaaaagatcagaaagatcagaaatctcaaggaggtgtatgaaataaagccaggttgaggttaccagcaatgtgtctcatagtgatagaaatgtttcctggtgattcataatacccagaggaagttgatagaatgtaactctggaattatttttgcactcttagkttctactaaattttcttcctgattcaataatattctctctgcacattaatttaaaaagtatatttacacataactatctatatatgtatatatctctatagatataaggatatacatattataaaaaagaggaatatttcctcttgaattttagtacataatgctgctgtacatcaccttctatttttt

SEQ ID NO: 49392 - DNA, 978 bp, Homo sapiens
taaaattatttaaaatattgtataagattaccttcaggttatgtgtatgtggctaagtgtgtatgaaatgtaagtgaattttgtgtttagayatgggtcccattcccaagatacctcattgcattgaagcaaatattccaaaatctgaaaacagttgaaacccaacacacttctgacccaagcatttcagataaaggatactcaatctgtgtaagttttgaacaaacaaagcagtcatagtgagaagccacagaagcctcctacattaaaaatactccagcataataaaggaaggtaaatgttaaagcgcctgcttgatgaattcagcaagtgatcattcacacaaaaagaaaaccaactgagacgctgtcactagggtttttcaaataggtagagaatcttaaatatccagtaatgatgacaacctcacttactgggagcttactcgtggggctaaggaggatgcgtgatgatcccatttttattgtcacagctaccgaaggaagataccctcatcaacccaattttacaaatggagaaatagaagctcagggaagaatctgaagtagtctcaaaggaagtgacaggaaggatgtggagaaagctgagtgtcaaagtcagtattcaagaccggatttactgctacttagagatgaatgaagaaatcagagggaacgcagtgtgctgatgctaaagcggctgtcaccacccagctgtgtgacataggacatcttctttctctgtctcacttgactaatatgttgtgtcaggggagacatgattgtaattgcctaaagcaattcttgtgatcaagaatcagaagcatgaacagtattgccctctgtgttagcccctttataagggaggaagtcatcttcagcatgctgaattgtcatctttcttagcagtgcaaatgactaaaacttagccaatgtagagtttgtccaaatttggagctcataactcagttcttgagca

SEQ ID NO: 49393 - DNA, 875 bp, Homo sapiens
tgatctagatagaagcccttagtatactcagctagaatagtgctctgagggcacactgtgacatgattatgtcattacatgtatggtagtgatggggatgatagaaggaagaacttatggcatattttcacccccacaaaartcagttaaatattgggacactaaccatccaggtcaagaaaagtcacatgccatagccatggtattgcacatcattcatcttgcattctttgagaataagaagatcagtaaatagttcagaagagggaagctttgtccaggcctgtgtgtgaacccaatgttttgtttagaaatagaacaagtaagttcattgctatagcataacacaaaatttgcataagtggtggtcagcaaatccttgaatgctgcttaatgtgagaggttggtaaaatcctttgtgcaacactctaactccctgaatgttttgctgtgctgggacctgtgcatgccagacaaggccaagctggctgaaagagcaaccagccacctctgcaacctgccacctcctgctggcaggatttgtttttgcatcctgtgaagagccaaggaggcaccagggcataagtctactcacttatatctgtttgtctggaacataacccatgtttgtttttacaacaaataaaattgatcttgaataaaaactgagtggtcattgtcattaatctttgaacccagattaaccttttggtcatgcctagtctaagagaaaagagatattcttatcaataaatacagagcccagctatgtcagtgaagatctcaagtgcatggacagtagtatagggaagagtcagaggccaaaaagacaggaatggcagacattgaacagaggagagtgtggtgtttgcctc

SEQ ID NO: 49394 - DNA, 875 bp, Homo sapiens
tgatctagatagaagcccttagtatactcagctagaatagtgctctgagggcacactgtgacatgattatgtcattacatgtatggtagtgatggggatgatagaaggaagaacttatggcatattttcacccccacaaaaatcagttaaatattgggacactaaccatccaggtcaagaaaagtcacatgccatagccatggtattgcacatcattcatcttgcattctttgagaataagaagatcagtaaatagttcagaagwgggaagctttgtccaggcctgtgtgtgaacccaatgttttgtttagaaatagaacaagtaagttcattgctatagcataacacaaaatttgcataagtggtggtcagcaaatccttgaatgctgcttaatgtgagaggttggtaaaatcctttgtgcaacactctaactccctgaatgttttgctgtgctgggacctgtgcatgccagacaaggccaagctggctgaaagagcaaccagccacctctgcaacctgccacctcctgctggcaggatttgtttttgcatcctgtgaagagccaaggaggcaccagggcataagtctactcacttatatctgtttgtctggaacataacccatgtttgtttttacaacaaataaaattgatcttgaataaaaactgagtggtcattgtcattaatctttgaacccagattaaccttttggtcatgcctagtctaagagaaaagagatattcttatcaataaatacagagcccagctatgtcagtgaagatctcaagtgcatggacagtagtatagggaagagtcagaggccaaaaagacaggaatggcagacattgaacagaggagagtgtggtgtttgcctc

SEQ ID NO: 49395 - DNA, 509 bp, Homo sapiens
agtgtttttgtattagtcagactttgctgaagcaataaacagctaaaagccccagggacttgtaacaacagattcgtttccctatcccattataggtggtctgcaggttgacctgctgtcttctctttctgagctccaggcataaggaatagcccctatctgggatgtactgttctcatggaagagaggaaaagtgcaagagactaaatccaatcatgtaattgcctttaaagcttctatggggctaaagcacacagcacatctattcacattccactggccaaagcaagtcacayggctaagcccaggacccactgcacaggaaagtataaccttcttacagttattaagaaagtgaattattaagaacaaaaacatcattaccatggttgcttatccagacaccgcttctactaaaattttcactcaggaatattttttggcatatcaaatgtatcacatagttttaatgccattatatagatcattgtagatttccaatacttgct

SEQ ID NO: 49396 - DNA, 677 bp, Homo sapiens
atttttagtagagacggggtttcgccatgttgggctggctggtctcgaactcctggcctcaagtgatccacccaccttggcctcccaaagtgctgggattacaggcatgasccaccatgcctggcccaaaatcaaaataattaaaagtgaattcattccctccaaatcaggtttttccttccatctcctctatttctgttaccaatttctcagtccctgggattaaaaaacctgaaaatcttccctctaaatcctctctaacaattatctctcatatttaatcagttttctgatactttagactagattctttttgaatgcttccctaacccagtagttctcaacactggttgtccattagaattattagaggagccattttaaaataaatatgtgggtcatgcctggggccacctccctcagacagctgtgtaggttattcactgcactagggtgagggggttgttccagctcacgctctccttgctaagcctttggccctagcatggaactacctttgactggagaaaaggaagcttttttgaactcacacaaaggcactgtaagggctaagaaaggtctggccatttccctgaaattctgattcagcagacgtaggcatttatattttaaatagttcagtgagatatataaactttactcttaaatagtggtgt

SEQ ID NO: 49397 - DNA, 529 bp, Homo sapiens
tttttagtctagtcaagtgcagcastgagaaggggggaaagagtagaacaaggagttggatctgtagctgactgtgaacaatcaaatgagataactcactccctttggaccagcctaaaatgtcacttttgaagaggtaatattcaagaatctgcccagttcctcaccccctgtaggtaaccatttataacacagtagattactatatatactgttctgtgtctttaaaagtacatttaaagcactctgctacgtgtgcttttttgccaaaccccttcccagaagccattacctggcaggtaatgaagagccccacaggcatagagggtgaggcatctcttgggatgacattcacttttacccacagtcccccagaccactggctgacccatacctttttctggccaaaatcaatgaggttctgcagatccaagtcatctcggtagtgcacaatggcattgttgatgatctcactcactttccctcgagcctgccggagacatgggcaaggaatcagaacacaggacta

SEQ ID NO: 49398 - DNA, 541 bp, Homo sapiens
cttcttactctgtcttttcccaaaaatgcagtcaagatctgttttgctccgagatgacagatccttccctagaaaaacaatgtgatgcttttcagtaagactgttcttcctaaaagaaagagcgcagacatgaactatgcagcacctcaaaggaaaatggcttttgggaaagaaagaaacaattttgaaactactgactttctacccactttttcattacaactctttcattagtaaacaaaattaattaaattttaaaaccaagtaaaygttttagaaccagaactcttgacattctcttaattgtagaaacaacctagagcatactgactgcaaggaaagctaaattctacagctcaccctactcccgctatgccctcaagatgcaattcctgggtctctgggttcttcatttaaaaatagatctcatttgcttcagagacatgagctacttacttagaagattacgaaatacacatgaaaaaatatcactagatacacagctccagaccccacatatgcacatgaatgagaacgtatc

SEQ ID NO: 49399 - DNA, 541 bp, Homo sapiens
cttcttactctgtcttttcccaaaaatgcagtcaagatctgttttgctccgagatgacagatccttccctagaaaaacaatgtgatgcttttcagtaagactgttcttcctaaaagaaagagcgcagacatgaactatgcagcacctcaaaggaaaatggcttttgggaaagaaagaaacaattttgaaactactgactttctacccactttttcattacaactctttcattagtaaacaaaattaattaaattttaaaaccaagtaaatgttttagaaccagaactcttgacattctcttaattgtagaaacaacctagagcatactgactgcaaggaaagctaaattctacagctcaccctactcccgctatgccmtcaagatgcaattcctgggtctctgggttcttcatttaaaaatagatctcatttgcttcagagacatgagctacttacttagaagattacgaaatacacatgaaaaaatatcactagatacacagctccagaccccacatatgcacatgaatgagaacgtatc

SEQ ID NO: 49400 - DNA, 1465 bp, Homo sapiens
tttctcttttaaaaattgtcttggatggctcggccaccttgtgcaagacttgtaaaccatgtgcaaaactcagacttgtgcagacaaccagagaagttgcaaagctgccttctgcgtacagggcttcccctgccaagtttgtgctttgtgtaaccatgtgacctatcatctttctctcaactattttttaaaaacctctcaaagtcttgctcagccgaactggcttgatggtagtttgtaaatgtgctagaacccgctgccctcactgcagctatgagtatgtttcaaaatgtttccaaatggcacacagtctagggccaatttcctgagcacttttgacactgggctctcaaagattccctttatatctaactttcraaatgaaagcagatgcattaaccccacttgggcaagttgccatcagtggctggcaggggaggagaggtattaggagtccgtggtgcaacagaagggacatgggatttggcactgggtggagtagctaggaagggcacagttggcctaaagctaaggcagaaaatactagtccatcctctgggtataggttactccatagagatgaccacaaataaggaaagaaaaacacccaggtcaggtcctccccagagtccaccagattccctgccatggtcttgactcaggaccatgatgtaagtactaattcagctgcaggtacacatgatcttcccccaccccgggccccagaggtcacagcttcatttttccacttaagccaaatttttcttcttgctttaagttaacacatccccaaaacatatataaaaagtagattctgtaaagaaaataaatatttttgaaccaagaagaggatgaaaacaagttgtaaacatgtaactgaaacagaaaatacacatcagttcacttacagaaccaaacgaggttacactgaatcatttccaattaaagaaaaggaaaattcttttttctttagctcttaaatttaggaaaagaatcactgtagcatgctcaccttgaaccagggattggatattgtgtttcttgtacaaaggaaaaaatctgtgaggattatggaaaacagtttggaaatctaaggtgaacgggtggggagaaaaactggaagattgcatagttgtgaaacagtggcttctcatcaaggtgaacaagtgcatcatctgataaaatagcatttgatatatatcttttcctgttcatgtctgcttgcggtattttgttctctgtccaccagacatttcacacactggaacatatatacagtacacacacacacacacacacacacacacacacacacatgctagcatgaaacatctgaagtacacagccatcctttgaaaggaccccacaccgctagttctggcaaagtttatattcaccaataatacactttaatcacatcctaacccacttctggtcaaaactaatctcttggattctttcatta

SEQ ID NO: 49401 - DNA, 541 bp, Homo sapiens
ctctctttctctctctctctctctctgtctcttcatatgcgtgtgtgtgtgtagatagaaagatagagagagagatataatatctaccaaatataaacagtggttctctctgggtggtaggattaacaagtgatttaaaatcttttactaatctatactttctgcagtgagttacttgagaaattgaagaaataaggaaaatatttattttaaagctggtgccacaagttgggctccaggggcatctaggtagcactcccccacctctgtgggagacccagtragggtaggggagtctggggggggggtggggtgggcatcaggggcatcaggctttgttcctggcctgcgttgggcactcactctccatgagggaccttgtcaggccaggtgactgtcccaccccagcctgcacctgctccgttaatcttccatgtcccagccaggtcgacagagcccactgtgtatattgatctaagagaagggtgtgagggcccagaaggggttcctgctccatgcctgtacctgccgttgctcagca

SEQ ID NO: 49402 - DNA, 541 bp, Homo sapiens
ctctctttctctctctctctctctctgtctcttcatatgcgtgtgtgtgtgtagatagaaagatagagagagagatataatatctaccaaatataaacagtggttctctctgggtggtaggattaacaagtgatttaaaatcttttactaatctatactttctgcagtgagttacttgagaaattgaagaaataaggaaaatatttattttaaagctggtgccacaagttgggctccaggggcatctaggtagcactcccccacctctgtgggagacccagtaagggtaggggagtctgggggggkggtggggtgggcatcaggggcatcaggctttgttcctggcctgcgttgggcactcactctccatgagggaccttgtcaggccaggtgactgtcccaccccagcctgcacctgctccgttaatcttccatgtcccagccaggtcgacagagcccactgtgtatattgatctaagagaagggtgtgagggcccagaaggggttcctgctccatgcctgtacctgccgttgctcagca

SEQ ID NO: 49403 - DNA, 541 bp, Homo sapiens
ctctctttctctctctctctctctctgtctcttcatatgcgtgtgtgtgtgtagatagaaagatagagagagagatataatatctaccaaatataaacagtggttctctctgggtggtaggattaacaagtgatttaaaatcttttactaatctatactttctgcagtgagttacttgagaaattgaagaaataaggaaaatatttattttaaagctggtgccacaagttgggctccaggggcatctaggtagcactcccccacctctgtgggagacccagtaagggtaggggagtctggggggggggtggggtgggcatcaggggcatcaggctttgttyctggcctgcgttgggcactcactctccatgagggaccttgtcaggccaggtgactgtcccaccccagcctgcacctgctccgttaatcttccatgtcccagccaggtcgacagagcccactgtgtatattgatctaagagaagggtgtgagggcccagaaggggttcctgctccatgcctgtacctgccgttgctcagca

SEQ ID NO: 49404 - DNA, 2173 bp, Homo sapiens
atttataattcaaatggtaaaaaaaaatctggaattcttcatactagaaagtccattttcttttttatgccaaaaaaaattgagtttcttccactcaatttcaaaacaaatctgaaatttttaacatacaggcttaagcatgtttatttaaacaaagacacataaatatgtgcaaaatgaactttgatggatgacatattttttaagtttttatttttgttttttcttttcttttttctgtttttttttttcttttctttttttgtttcattttggttttctttctttttcttttcttttttttggkgaattttttttttttttttttttttttttgagacagagtctcattctgtcacccaggctggagtgcagtggcgtaatctcggctcactgcaatctccacctcctgggttcaactgattctcctgcctcagtctctcaagtagctggaattataggcatgcaccaccacgttagctaatttttgtatttttaatagaaacggagtttcaccttgttggtcagactggtcttgagctcctgacctcaggtgatccgcccacctcagcctcccaaagtgctaggattacaagcgtgagccaccacgccaggccttggtggatgatattcttaatgaaagggtctggatatgtgtataccttcctatcagcgggttgtgcttgtcagcaaggctacacattctggtgctgtgattagagcagaggatcctgtttgtttttgtgatcaagattagatagggcatgatttgtaccaggtcacacaaatgttcttaaacaatcgtgtaatgcttagaatgagacttgggggttgcctccattagggaaagggcaagtatgttttatgtgtaggaaaaacggtatgtgtggatatgtggggtcaccagaattgtggcagagactgttagtggtcctaatatttgatcttcccttcttcaatagtgatagactttcaattgttcataagtaattgtccacagaaacaagacaacattttcaccagtctaattttgcaactaatgtgtggtcctataactaagtaccaaagggcaagatataagcagaattaatatgcatgacttcaggatgtgagaagaagttatagagaaatacatagcctcccttttactgtttctgtctttccattggctgaacggtgtgtgaaatggggaggtgtctggaacatgggaatgaggacagcatactaggaatgataaagctacaagacagaaaagccctaagtcctcgacatctttctattaacctcagagagaaatatgttaacttctacctcactgaagccacatatatttaaggcctattttattcccaatcaaattttaattgtattttttcctctttattttttgtagagatggagtctcactatgatgtccgggctggtctcaaactcttggcttcaagttatcctctcgcctcagcctcccaaagtgctgggattacaggtgtgaaccattgccactggtcttttcttctttttttcaaatctttatcctaaacaaaagaaaacatgccaagaaaggaggcagattccacaaagggtgagatgtaacaaaatctgggagtttggggggaaaatcctggaggaagggaaattgaatctctgacctaaacaatgaatgaaattagctaacaaaagttctgaaatgggaaccggcatggtgtgtggaggtactaaaagaagaatggaaagagaaaaaaggtagtttgtgctaaatcaggagacaaaaatataacacagatcatcctgaaggcattaaggaaggaaaagatttaaaaaagtcaaaagtgatgcccatatttttggcccaatcaactgcgtggattgtagagctatttactgagaaaagaaacaccattctgggcatggtggttcacgcctgtaatcccaataccttgggagatcgaagtgggaggattgcttcagtccaggagctggagaccagcctgggcaatatggcaaaaccctgcctctactaaaaaatacaaaaatcagccgggtgtggtggtgagcggttgtagtcccagctagtcgggaggctgaggtaggagggtcacttgagcaatcattgcgctactgcacttccagcctgggcgacagagggacatcctgcctcaaacaaacaaacaaa

SEQ ID NO: 49405 - DNA, 497 bp, Homo sapiens
catcaagaaagtgaatagaaatgtcatcaagaaaatgaatagaaatgtcacagattgggagaaaatatccataaaacatataaaaagatctcctataactcagtaatgaaaagacaaaaatttccaatgaaaacatggaaaagtctttaaataaaattatcaaggatttacaaatatccaaaaacataaacataaaaattgcttaaccttatcactatcataactttagttattttgtactaaagtgaagtgataattgaatgtagctaaaaatgggcaatatacggttccttgtgatgacagatctattctgtatcttacctttatcatatcartattctagatgtggtattatattattgtccagcatgttcaattagaggaaactggataaagattatacagaatctctttgcattttttttcaaatttcatgtgaatctaagattatcttgaaagaatgtataattcagaaggtaaataaaaaactagaaata

SEQ ID NO: 49406 - DNA, 568 bp, Homo sapiens
ttttttttcttaacgtagaaggctcttttaagaaataataactttactggcaargaaacgtttatttgaagtttattctccttcactttcttcagtttctttatccttttttaagtaaaacaaagttttctaactttccaaaaattaaagctagctaatatagaataatctcattttaattagcttatttcttttcttcccttccattgatccatccatctttctatccattcttggctaatttcttttactttcatggttttaatttaatttaattttattattattatactttaagttttagggtacatgtgcacaatgtgcaggtttgttacatatgtatacatgtgccatgctggtgtgctgcacccattaactcgtcatttagcatttggtatatctccaaatgctatccctcccccctccccccaccccacaacagtctccggagtgtgatgttccccttcctgtgtccacgtgttctcattgttcaattcccacctgtaagtgagaacatgcggtgtttggttttttgtccttgtgatagtttactctcatggttttaact

SEQ ID NO: 49407 - DNA, 568 bp, Homo sapiens
ttttttttcttaacgtagaaggctcttttaagaaataataactttactggcaaagaaacgtttatttgaagtttattctccttcactttcttcagtttctttatccttttttaagtaaaacaaagttttctaactttccaaaaattaaagctagctaatatagaataatctcattttaattagcttatttcttttcttcccttccattgatccatccatctttctatccattcttggctaatttcttttactytcatggttttaatttaatttaattttattattattatactttaagttttagggtacatgtgcacaatgtgcaggtttgttacatatgtatacatgtgccatgctggtgtgctgcacccattaactcgtcatttagcatttggtatatctccaaatgctatccctcccccctccccccaccccacaacagtctccggagtgtgatgttccccttcctgtgtccacgtgttctcattgttcaattcccacctgtaagtgagaacatgcggtgtttggttttttgtccttgtgatagtttactctcatggttttaact

SEQ ID NO: 49408 - DNA, 398 bp, Homo sapiens
tttgtaagtaacaatacaaaaaggaaaagaagggcaactgtagaaagaaaggcactgtcaaaaagagaaaaagggccatatactgaacagacatagaaataacagcaatacaggaaaatattgccatgtacatttcagtgaatctccagggtaaatattcatgtgttcatcatgggatccccaaatctgtcgtgtacaatataattttaattctcttttctgcttaagaagtcaggcaaattcgtgtgtatgtatcttctaagatttaattttaaagtaaagtgtcagtaatttaagccatttggaaatttaatgtgccctgtaacacctcccagggattcaggataggttagcttttattgtgcttctatgcctaacygtttaaaactactctcatt

SEQ ID NO: 49409 - DNA, 2185 bp, Homo sapiens
ttttacagagactcactctgtcacccagtctggagtgcagtcgtgcaatctcggctcactgcaacctccgcctcccaagtttcagcaattcttctgtctcagcctcctgagtagctggggctacaggcttgrgccaccattccccgctaatttttttgtaagtttagtagagacggattttcaccaggttcgccaggctggttttgaactcctgacctcaaataatccacctgcctcatcctcccaaagtgttgaaattacaggtgcgaggcaccagagctgacctgtaaagacctcttaaaaattagttaaaaaacaaacaaaacagaaaaggagaaagaagaaacatccactcattaaaaaaaaaaaagaaaaagaaaagaaaagaaaaaaaggcaaaagacattattttacaggtctagtgccctgtgcccctcactgtaatgggggtggatatgggcttcacaggacatgaaattcatcaaacagttgctggttgaaggtgggaaaatcttgcgggaccgacctcaagagcagatcctgtggtgcactgtttcatcctgtagccctggaaagaaaacctggctgtgccgtgctttatgtttgcctgcactggccctgttcagaggcctgagcacgcatggacacctaagtctgcccaaactttccccatcccaatattctctgtggtattgagcatgacaccctgtcttcactgagcatgtgctcatacagttttgtagccaactcttcattttacaacaggaagactgagacctcccaaaaaggcaaagactggtccagatcccagaaattgggcagagcacagagtattagggagggatccagcttcctaggccttgcatgcaccccacccatcaggtttgctttggaaatgagagcccatgagtcctggaaaaccctgtgctctactttctacctgggctttctactcttcaatgttgtcacataggcgtgcaggcatgcacacacaaacacatcacacacacacaggcttctaaagtggagatctaaagtggagattctaaagtgaggttagggaagaggaaaccaaagaagtgacaaaaggggaagaaacagtagatgcagctttgccatgaggcagaggcatccactcccccagctacatgaccaggagctgacagcatgcgatgaaggatcctccaggttccctgggttcttccaagcctggggactttcccagctgtttcaagaggacaggactggggttgtgactcccacttctgtgggcacctggaactaaaatgagctatgccctccacccaccaccccgtgtgatataaagacaggctacgggaaagaaagcctttgttttctccctcataaataggggtactgagaaggaataataccaaggattctagatactcataggtgtctgccgcccttggcttttcattggtaaatcactgtgctttgagactctgggaagaggcttttcagtttctagaggtccttcagagaagagagaggcctagagacttgggcggatgaggacttggaataaagcacaatgtgacaatgcactgggctctggagtgtggggcccagaaaaaaatactagttttttgggctgtccttgaggtcctcattcggaagtggaagaaaataatgtcgccgaatgctgttaaaatgtttaatgagtgcacagcacacccaacgaggctgaggaaaataggaatcaagggaggcttccgaggtcacttttatggcccttggagccttcagatactgctccttttcccaggggtccctgaagagccactgccttgagaattccccagtgcaggtacctgttttgtgatgcttctgcctgggacttcagtgctagcggaggcctctaggtggcggcagaccccgtgtttcttgtgcccgctggactttactggagtagctggagccgggggagagacaggctgagggcctgcagctcctgttatcattcttgatctccacattattgggtgaccgaaagcaggaaagactttgtgattttccatgttattttactcagcggctcttcccctagcactcaccctgtggcagctaccttggtaggttcaccatgtggtaccaaaaacgattatgttatccctgcatccccgcggggagcctacagtctgaggactgcaggacaaaaaca

SEQ ID NO: 49410 - DNA, 2185 bp, Homo sapiens
ttttacagagactcactctgtcacccagtctggagtgcagtcgtgcaatctcggctcactgcaacctccgcctcccaagtttcagcaattcttctgtctcagcctcctgagtagctggggctacaggcttgggccaccattccccgctaatttttttgtaagtttagtagagacggattttcaccaggttcgccaggctggttttgaactcctgacctcaaataatccacctgcctcatcctcccaaagtgttgaaattacaggtgcgaggcaccasagctgacctgtaaagacctcttaaaaattagttaaaaaacaaacaaaacagaaaaggagaaagaagaaacatccactcattaaaaaaaaaaaagaaaaagaaaagaaaagaaaaaaaggcaaaagacattattttacaggtctagtgccctgtgcccctcactgtaatgggggtggatatgggcttcacaggacatgaaattcatcaaacagttgctggttgaaggtgggaaaatcttgcgggaccgacctcaagagcagatcctgtggtgcactgtttcatcctgtagccctggaaagaaaacctggctgtgccgtgctttatgtttgcctgcactggccctgttcagaggcctgagcacgcatggacacctaagtctgcccaaactttccccatcccaatattctctgtggtattgagcatgacaccctgtcttcactgagcatgtgctcatacagttttgtagccaactcttcattttacaacaggaagactgagacctcccaaaaaggcaaagactggtccagatcccagaaattgggcagagcacagagtattagggagggatccagcttcctaggccttgcatgcaccccacccatcaggtttgctttggaaatgagagcccatgagtcctggaaaaccctgtgctctactttctacctgggctttctactcttcaatgttgtcacataggcgtgcaggcatgcacacacaaacacatcacacacacacaggcttctaaagtggagatctaaagtggagattctaaagtgaggttagggaagaggaaaccaaagaagtgacaaaaggggaagaaacagtagatgcagctttgccatgaggcagaggcatccactcccccagctacatgaccaggagctgacagcatgcgatgaaggatcctccaggttccctgggttcttccaagcctggggactttcccagctgtttcaagaggacaggactggggttgtgactcccacttctgtgggcacctggaactaaaatgagctatgccctccacccaccaccccgtgtgatataaagacaggctacgggaaagaaagcctttgttttctccctcataaataggggtactgagaaggaataataccaaggattctagatactcataggtgtctgccgcccttggcttttcattggtaaatcactgtgctttgagactctgggaagaggcttttcagtttctagaggtccttcagagaagagagaggcctagagacttgggcggatgaggacttggaataaagcacaatgtgacaatgcactgggctctggagtgtggggcccagaaaaaaatactagttttttgggctgtccttgaggtcctcattcggaagtggaagaaaataatgtcgccgaatgctgttaaaatgtttaatgagtgcacagcacacccaacgaggctgaggaaaataggaatcaagggaggcttccgaggtcacttttatggcccttggagccttcagatactgctccttttcccaggggtccctgaagagccactgccttgagaattccccagtgcaggtacctgttttgtgatgcttctgcctgggacttcagtgctagcggaggcctctaggtggcggcagaccccgtgtttcttgtgcccgctggactttactggagtagctggagccgggggagagacaggctgagggcctgcagctcctgttatcattcttgatctccacattattgggtgaccgaaagcaggaaagactttgtgattttccatgttattttactcagcggctcttcccctagcactcaccctgtggcagctaccttggtaggttcaccatgtggtaccaaaaacgattatgttatccctgcatccccgcggggagcctacagtctgaggactgcaggacaaaaaca

SEQ ID NO: 49411 - DNA, 2185 bp, Homo sapiens
ttttacagagactcactctgtcacccagtctggagtgcagtcgtgcaatctcggctcactgcaacctccgcctcccaagtttcagcaattcttctgtctcagcctcctgagtagctggggctacaggcttgggccaccattccccgctaatttttttgtaagtttagtagagacggattttcaccaggttcgccaggctggttttgaactcctgacctcaaataatccacctgcctcatcctcccaaagtgttgaaattacaggtgcgaggcaccagarctgacctgtaaagacctcttaaaaattagttaaaaaacaaacaaaacagaaaaggagaaagaagaaacatccactcattaaaaaaaaaaaagaaaaagaaaagaaaagaaaaaaaggcaaaagacattattttacaggtctagtgccctgtgcccctcactgtaatgggggtggatatgggcttcacaggacatgaaattcatcaaacagttgctggttgaaggtgggaaaatcttgcgggaccgacctcaagagcagatcctgtggtgcactgtttcatcctgtagccctggaaagaaaacctggctgtgccgtgctttatgtttgcctgcactggccctgttcagaggcctgagcacgcatggacacctaagtctgcccaaactttccccatcccaatattctctgtggtattgagcatgacaccctgtcttcactgagcatgtgctcatacagttttgtagccaactcttcattttacaacaggaagactgagacctcccaaaaaggcaaagactggtccagatcccagaaattgggcagagcacagagtattagggagggatccagcttcctaggccttgcatgcaccccacccatcaggtttgctttggaaatgagagcccatgagtcctggaaaaccctgtgctctactttctacctgggctttctactcttcaatgttgtcacataggcgtgcaggcatgcacacacaaacacatcacacacacacaggcttctaaagtggagatctaaagtggagattctaaagtgaggttagggaagaggaaaccaaagaagtgacaaaaggggaagaaacagtagatgcagctttgccatgaggcagaggcatccactcccccagctacatgaccaggagctgacagcatgcgatgaaggatcctccaggttccctgggttcttccaagcctggggactttcccagctgtttcaagaggacaggactggggttgtgactcccacttctgtgggcacctggaactaaaatgagctatgccctccacccaccaccccgtgtgatataaagacaggctacgggaaagaaagcctttgttttctccctcataaataggggtactgagaaggaataataccaaggattctagatactcataggtgtctgccgcccttggcttttcattggtaaatcactgtgctttgagactctgggaagaggcttttcagtttctagaggtccttcagagaagagagaggcctagagacttgggcggatgaggacttggaataaagcacaatgtgacaatgcactgggctctggagtgtggggcccagaaaaaaatactagttttttgggctgtccttgaggtcctcattcggaagtggaagaaaataatgtcgccgaatgctgttaaaatgtttaatgagtgcacagcacacccaacgaggctgaggaaaataggaatcaagggaggcttccgaggtcacttttatggcccttggagccttcagatactgctccttttcccaggggtccctgaagagccactgccttgagaattccccagtgcaggtacctgttttgtgatgcttctgcctgggacttcagtgctagcggaggcctctaggtggcggcagaccccgtgtttcttgtgcccgctggactttactggagtagctggagccgggggagagacaggctgagggcctgcagctcctgttatcattcttgatctccacattattgggtgaccgaaagcaggaaagactttgtgattttccatgttattttactcagcggctcttcccctagcactcaccctgtggcagctaccttggtaggttcaccatgtggtaccaaaaacgattatgttatccctgcatccccgcggggagcctacagtctgaggactgcaggacaaaaaca

SEQ ID NO: 49412 - DNA, 572 bp, Homo sapiens
catcaaataagaagaaaatataaaagtcataaacaaaataggggcaatatttatacaggcaaacaaacagttaaatcattgtattaacaaaagacatagggatggttcatatttgacttctgccccacactgtcttaatgcatacagagttgaatattgttatacaatattatattatacaaattaaaacttaaaacaataaactaatataaggtgccctaccctaaaacatgaaacacagaaatgtaaaattgcaaaacaaagttaaaataaacattaacccccaaattcttatttgaataatgaaattcaaaatcataataaataggtagaaagtaaaaacacaattaactgatgtgagacagcctactctaaaaaatacagaaacataaaattataaaacataattaagagaaactttaatccataaaatcctgaataaacatagtgtccaaatgaaaaagaatcccaggtaactacaatttttaactcttcctgtgaatctatgaaaagtatgaattttgaattatttggatacagttaggrcaacaacatttcagagaaaacacatt

SEQ ID NO: 49413 - DNA, 579 bp, Homo sapiens
caaatataaatctttaatatatctggacttctcatctatatatctcctaaaaaattttaagttgtcatctagttttatttttttccatatgaaagagtactctaacaccagctacaaaatattacaytgtttatctattttaagtcatctacaaaaaaaaagagtttgttctctgagttatcaattttatttccttggtcattttttttcattctttgttcacatctgttactaggcttttattgtatctctttttttttattatactttaagttttacggtacatgtgcacaatgtgcaggtttgtcacatatgtatacatgtgccatgttggcgtgctgcacccattaactcatcatttacattaggtatatctcctaatgctatccctcccgcctccccccaccacacaacaggctcgggtgggtgatattccccttcctgtgtccaagtgttctcgttgttcaattcccacctatgagcgagaacacgcggtatttggttttttgtccttgcgatagtttgctgagaatgatggtttccagcttcatccatgtccctacaaacgacatgaactca

SEQ ID NO: 49414 - DNA, 579 bp, Homo sapiens
caaatataaatctttaatatatctggacttctcatctatatatctcctaaaaaattttaagttgtcatctagttttatttttttccatatgaaagagtactctaacaccagctacaaaatattacactgtttatctattttaagtcatctacaaaaaaaaagagtttgttctctgagttatcaattttatttccttggtcattttttttcattctttgttcacatctgttactaggcttttattgtatctctttttttttattatactttaagttttrcggtacatgtgcacaatgtgcaggtttgtcacatatgtatacatgtgccatgttggcgtgctgcacccattaactcatcatttacattaggtatatctcctaatgctatccctcccgcctccccccaccacacaacaggctcgggtgggtgatattccccttcctgtgtccaagtgttctcgttgttcaattcccacctatgagcgagaacacgcggtatttggttttttgtccttgcgatagtttgctgagaatgatggtttccagcttcatccatgtccctacaaacgacatgaactca

SEQ ID NO: 49415 - DNA, 539 bp, Homo sapiens
cagtaactgcagaaaaaaaaacttccaataggaaggtgatggtcatgggatttgtcaggtacataatatattaataattttcaatacagaattttcaggggagtgacatccaaaaaccctaaagggtgacaaattgaatgaggaaagagggagtgaagtatatgagaawtgatgatgaagatagttggctgggaataaaaaatagtatagtagctggtgtttttatttaacccatatccatctctctctctctctttttttttattatactttaagttctggggtacatgtgcaaaacgtgttttgttacatgggtatacacatgccatggtggtttgctgaacccatcaacccatcatctacattaggtatttctcctaatgctatccctccctttgccccccacccaccgacaggccccagtgtgtgatgttcccctccctgttctcattgttccactcccacttatgtgtgagaacatgcaatgttggttttctgttcttgtgttagtttgctgagaatgatggtttccactttca

SEQ ID NO: 49416 - DNA, 553 bp, Homo sapiens
aataaaataaaatataaaatataaaattataaaatataaaataaaatataaaatataaaatataaaaaaataaaataaaataaaataatataatataaaatataaaataaaatataaaagtttgaagtggtggatgagagaagagtcctctgtactgaccctactggtttgttgcccacctgaacactgactgtgtgtgagcccaaaggtgaggggacaccagacctaagatgtggtttctagttcccaggcagcctaggtgaccagctttgagagtgagtgcttgttgggggggtcccccgtcactgcactcttccccatgaataaactaccaaagggctagagagaacttgagaacaaacttcatataacattcactgttttcagggatagagtgaggcccaygggggaaaataagcaggtgtccctcagcaggaaggcacagcaggcatcggtcccgagctggactgactggaccgcaggctcacgacttcttctttcacgatctctgtctcaggacattctggaacaaggctgcctccttaaatccgga

SEQ ID NO: 49417 - DNA, 639 bp, Homo sapiens
atgatagataactgtaatcccatgggaaaccccaccttccagcacacatatcctttctaagaaggaaacatcaccctaagaggatcctgtaattgcagrtcagggagaggaatgtgaagaggtctgagagtgaaagcactttttttgaaaagggatataaatgttaggggtacagggaaaaaaaaagcatggaaactgaagcagagttgctgttggggaatctggagataaggataagacagtaaatggttcattctcatctttccctgtctacccaatcctcagtaaaataatcatgtttttccttaagaccttgcagacatgaaactgttccttgaatttgttaaaggaaagtactggattctccttcaaattggttttgctgcaggaacaatgactgttcaagagttactacattcaaacaatgtaaagtttctgaattgttcatcacaacattgttagtgggagtttgggattagaaacaacccaatgcccatcgctgaggaatgggtaagccaaaatggaaaacatccatctggatgccatttagcaggaagaagcaacaaagtatgttgtttaccagaaacagttggagaatataaaaacaaaatgatgttattaacatagtgccatttaagt

SEQ ID NO: 49418 - DNA, 622 bp, Homo sapiens
tcagcaacagcagagcattgaaccaagtgtggggctcttctaagcttggggcacatgttacgtgcccacgaagctagcccttaaagatgcctttgcgtggttcctgagagctgctgtcaaagaccgtattcaccatgtaacctggtgaattgcaaagaaaaattcacatgataaattcctctttgttctcagcaccagaatagcatttatcacccgaaatgacctattacgttcctgtaattgagcaataggagctaccagaattaaatgttgtgctcaaatgaggtcgttttgctcagtctgggttttgggatgccatttcgttgttgctatttgactttgattttatatgcaatgttaatgggttttggtctttgtgttctaaggcatctcaaatccttttttggaagtagagacagtacgtaagtaaacaaaactcttaaaagtagttttaaaagttgattttaaaagcctatcatcaacattattcactgrtggcagtaatagctctattaatgagattaatgcgttccaacaacataattattttttagagacttcataactacaggcagaaataatccaggaaagcagaaggatgtgttccacataagcaagaata

SEQ ID NO: 49419 - DNA, 638 bp, Homo sapiens
tgaagccactgtttctcacttgtaaaacggagataccattttctacctcgtaaagcaggtaggatggygtgggtcatacagggaagaaaatgagagtggctgttaatattatacttgtgcttcagcactctttccttataccattagcttttattatatggttactcttcaaattgtttctaatacattatattctcttcctttaggaccatttttaatttctccttgtcttctgacacaaaacaacttagaattatagattttctatttctctgtttcgttctccaggtcatcaatgtggctactgaatagcttatttaggacaaatctctttccagcattacttgtttccatggattggtgcctcactctgataattatggttcaagttggacttagtattattttttcctaatagagtacattcaagtatgagctatgttcctctcttaaatagatttttatgggtccaaataagaacattattatattcaatatagaaattgttttcctagttaaactttccaagccatgattgtcaaaaataattatatgggtctggtagagtttgcttttgaaaaaagtctctttattgtttattagtttctttgataaatatcatacataaaagtattaag

SEQ ID NO: 49420 - DNA, 638 bp, Homo sapiens
tgaagccactgtttctcacttgtaaaacggagataccattttctacctcgtaaagcaggtaggatggcgtgrgtcatacagggaagaaaatgagagtggctgttaatattatacttgtgcttcagcactctttccttataccattagcttttattatatggttactcttcaaattgtttctaatacattatattctcttcctttaggaccatttttaatttctccttgtcttctgacacaaaacaacttagaattatagattttctatttctctgtttcgttctccaggtcatcaatgtggctactgaatagcttatttaggacaaatctctttccagcattacttgtttccatggattggtgcctcactctgataattatggttcaagttggacttagtattattttttcctaatagagtacattcaagtatgagctatgttcctctcttaaatagatttttatgggtccaaataagaacattattatattcaatatagaaattgttttcctagttaaactttccaagccatgattgtcaaaaataattatatgggtctggtagagtttgcttttgaaaaaagtctctttattgtttattagtttctttgataaatatcatacataaaagtattaag

SEQ ID NO: 49421 - DNA, 638 bp, Homo sapiens
tgaagccactgtttctcacttgtaaaacggagataccattttctacctcgtaaagcaggtaggatggcgtgggtcatacagggaagaaaatgagagtsgctgttaatattatacttgtgcttcagcactctttccttataccattagcttttattatatggttactcttcaaattgtttctaatacattatattctcttcctttaggaccatttttaatttctccttgtcttctgacacaaaacaacttagaattatagattttctatttctctgtttcgttctccaggtcatcaatgtggctactgaatagcttatttaggacaaatctctttccagcattacttgtttccatggattggtgcctcactctgataattatggttcaagttggacttagtattattttttcctaatagagtacattcaagtatgagctatgttcctctcttaaatagatttttatgggtccaaataagaacattattatattcaatatagaaattgttttcctagttaaactttccaagccatgattgtcaaaaataattatatgggtctggtagagtttgcttttgaaaaaagtctctttattgtttattagtttctttgataaatatcatacataaaagtattaag

SEQ ID NO: 49422 - DNA, 638 bp, Homo sapiens
tgaagccactgtttctcacttgtaaaacggagataccattttctacctcgtaaagcaggtaggatggcgtgggtcatacagggaagaaaatgagagtggctgttaatattatacttgtgcttcagcactctttccttataccattagcttttattatatggttactcttcaaattgtttctaatacattatattctcttcctttaggaccatttttaatttctccttgtcttctgacacaaaacaacttagaattatagattttctatttctctgtttcgttctccaggtcatcaatgtggctactgaatagcttatttaggacaaatctctttccagcattacttgtttccatggattggtgcctcactctgataattatggttcaagttggacttagtattattttttcctaatagagtacattcaagtatgagctatgttcctctcttaaatagatttttatgggtccaaataagaacattattatattcaatatagaaattgttttcctakttaaactttccaagccatgattgtcaaaaataattatatgggtctggtagagtttgcttttgaaaaaagtctctttattgtttattagtttctttgataaatatcatacataaaagtattaag

SEQ ID NO: 49423 - DNA, 550 bp, Homo sapiens
tcatatctaagcaagaactttggggcaaactggacacaggtgcacacacctgtaatctcaactactcaagagcctgtgatgggaggatcacttgagcccaagagtttgaatctgtctagcctgggcaatatagtaagaccctgtctctaatgtgtgtgtgtgtgtgtgtgtgtgtgtgtgtgtgtgtgtgtgtgtgtgtgtgtgtgtatcagactatggggacagagtaaaccgtttagtttattcctccattttgcaaatgttagcttgacctgtcaaaaacgcagggaaaggaggcaggcagtattctccaccagggccaacgtgcttaatttccaggccagccactttggaacattttggccttcatstctcccctttccttcccccgactcactgaggtttcttaagcaagaagccaggccaaggatgcctgtgtacatatgtaggcatgagcacacccatgtctgtgtagactgatgtgtgaaaggctggcatttggatataatccccatcagttcattaaaatggactaaactgccaggcgcgg

SEQ ID NO: 49424 - DNA, 424 bp, Homo sapiens
agcctttattctttccagtacaccgtgggcccttcagatgcagtgccattcacccaaggggcatagcgtcttatatttcaacttgaaaaagatgcacatcatggacaaagatatatatttggctaaattttatagattggatagcttactttggatttaaatgatagcagccaaagattccattggtytttaaactggattattttcttttcctgttttgaaaaaatataaaccagtgaattgagagcaatagttcttatggaaaggtgtgtcagcttcagattactcatttgctgtgctttatccagtggggtcccacttgtcctcttggggacacccacgaaatcctgtgtgactgtagtgacagacagtagaagacctatagagaggagggaaaagggagtgaaaaaaaaaaaggatttgg

SEQ ID NO: 49425 - DNA, 642 bp, Homo sapiens
gtgccgcccagcagagcatggtttttcctgtcagctagaaatagagttttgtcctcccagtatttaaaaagaacaacagcaggtgccagataatgttatcccccaataaatcttttgcttatggtctctaggatataacaaacacatttttgttgatcagtttaaggcagagaagacaccaataatggaaactgccctaaactgtcttactgcagcagagctccgtacacacctgaccattttgcctggccagtagtttatctctgtcactctcctgggtcctgctgcggttttgacttgtttaacagcatctggtgtctggagtgaattaaatggaaccgacgtcagtcagtgctcattcctcattttgcaaattcatagtgaccagatacaagcagatattttatttctttggcagagggagcagaaggaacacttagcactatttctgcccatttctgatataatcaaggatttttctagctgggagaaacaaaacttccctctttttggtcagtttctgaccacrtgttcttatacatgtttgtgtagatgttaaaaagtttccacctaaactttgtgactattgtgaacaaaagtgaaacttattttttaaataatttcaatgtttcttttagattc

SEQ ID NO: 49426 - DNA, 969 bp, Homo sapiens
ggaagaagaagagtttgatgactgagttaagggcaatgtatgagaacccttcgggtttcactctgttgacctggcagtcactaatctgtattaagggtaatgtggtttgtctaggacagtggtgtggggctgctgcctccccctggaaactctccyatctacaccctggctgggagtgcaggaggagctcctgctttgtaagatgcgggcccactatcaaggtgaccaagggcctttgtggatggagaaacagggagatgctgctgctcacctgtgcttggctcccacctcgttacccagtttctgacccaggctttaggactgtggctcctaatctttcagccgagattcttaccctgttacaaacctggtctgtggatccagaagtctccaccacgaactccacgggctaagtcttatcaccccgggcttcaatgccatgtcttgcctgctcgaacctgcttcttcctgtttaccttcccctgtacctggactcttaggactgtcttgtctgcttgaatcttgagctgctaatccatccttccttattggcactgacttttccattgccccctcatctgcagggtcttgaacttggtttcctgccctggacttaacctgccttcctgacaccgactgacttcacctctccccatgccctcatgtcatgtcttatctgttcctattgtggatccgggattccttggcctgtcccttggcctgctgctgatcatatctccactctgacccacaatatagattttcaaggtaaaaattttttaaaaaaatgtttcactctgttgtctagtaaaatacatgaatgtgtatcctttgactaagggtctttgtgggtgaggaaacaaggaagcaccgcagctttctaggggaggttaccttcaagcttcgtggaaagttcctcatgtcgcctggcaaagcactggacacctttcaaagcacactgaaaattct

SEQ ID NO: 49427 - DNA, 1866 bp, Homo sapiens
tattaatttgctgataagaactttcaaagaatattaccatttattccatagaccaaatcaggatgatttttcttcctaaaatcaggatgaaaataagagtgaggaaactgaaagatattagaaagcagttgtacaatgaatatccaattcatttcaccttttgaattaagataataagagtctgataccaagttagtttaacaagaaaatatggtattatccacatctattcagtttttgaattttagatattaagggagagtttgaatagtaaggggcatctaaaatattaactgaatgtttggttcctatgttaggaaaactagttagcataatgaagaataggaaaggatactggaatgcagacaataggaaacttggaaggccagagaagaagaagatccactaattttatcacatattataactcattatatcttytgtgactataaaaatgaaaaaaaaaaagtgagacaaaactgtatagaaaaggtttctcaaaattctacttttatgaactaattatgagccctaatgcatgaagcatcatatagagagactgaaacactcaaattttcacaaaggtgttatgacactaaacttgttggcttacctccctgacaactccttattcagaaatggaataacttcttaacaataaaaactgactatgtctatataatgagctgccattaagatcagattttgagaaaaatgattaaataaaccacagcaacattagtagaccaagcattccacagaaataccattatttactatattactgaactatacatgtgatctaaatctgcttaaaagaatacttaccaaatttcactaaatttactaatttaccaaaagatctgatggtattccctttaaaaacataaaggtactaaattacatatcatttgaggcagaaggaatggcaaaaaaagataccagattaggagagagactgtctagattcaagttttagctgtaaatctcactagcaaggtaactaaggacttgggagtttcaggtttattatctctaaagtggaggaaaacctgcttcccacaactcacaggtacctgtgaatgatatgcgtaaaatgcaaatctaaccatgccttaaaatccactactttgaggacaaagtaaaaatgctaaacctgcctatgaggagagatatggcccctgcccattcctctcttttgctctttcctgcacttcttcaaataccagacatcatatgccttagggccttctccaacatgctttgaaatttttgttgtgtttcctttcaatgtgtgtgcatgggaaaacaggcaaaatttattttacattttgcctatttttctttgctaaaaaactttatgtctcattatgtgcctttatgtaaacctatttcagaaaactataaactatagaaatacttctcttttaaaaatatttttctcgtcaaaaaacatgtaattatttttaatagttaaatacaaaaaaagcatgagtaaaaaataaaaatcactgccagagcacatatcttactaatgttagcatttttcattaaattccctttatatataaatatacaatttgtacatacatgtatataaatatacatgtttgtacatacatgtatatatacacgtttgtacatatgtgtatataaatatacacgtttgtacatatgtgtatatacatgtttgtacatatgtgtatataaatatacacgtttgtacatatgtgtatataaatatacacgtttgtacatatgtgtatataaatatacacgtttgtatatatgtgtataaacacacacacacacacgaatttttaatgtagttgtaatcataccaaatgtgtgactttgtaagttgca

SEQ ID NO: 49428 - DNA, 376 bp, Homo sapiens
tcaaagatgcatttcatttctgcactcaccccagtctagttggataccctctgaagtacccaggaaccaagccaagagcagtatcaagaaaagatagatgattatgcagatggcttgagtaaaacttgtctttaggctcccagcatcctcccacttcctaggctcagtactcctctaaagttgccagacttagcaaggaartacataggtgcctgtatgttatctcattaaggcccttaatagctttatcttaatccttctgccatcagagcctatttttttggggaaaaaaattcagattactcatcaagccttagagcaatatttctctaaatctggtcccagataatctgcagaagaataacttgggaacatg

SEQ ID NO: 49429 - DNA, 376 bp, Homo sapiens
tcaaagatgcatttcatttctgcactcaccccagtctagttggataccctctgaagtacccaggaaccaagccaagagcagtatcaagaaaagatagatgattatgcagatggcttgagtaaaacttgtctttaggctcccagcatcctcccacttcctaggctcagtactcctctaaagttgccagacttagcaaggaagtacataggtgcctgtatgttatctcattaaggcccttaatagctttatcttaatccttctgccatcagagcctatttttttggggaaaaaaattcagattactcatcaagccttagagcaatatttctctaaatctggtcccagataatctgcagaagaataacttgggracatg

SEQ ID NO: 49430 - DNA, 1647 bp, Homo sapiens
ggttcttctgttgctagtttttttttcccccagccaaagaaaattgactgacaaaataaatagtcaggtttgaatatgatatgttaagacatcattctagtacccaggacatccttcaaacattacatcaacagttctgttcaacaattttctgacctgtgaggcatcttaatctctctagagttttgaagatgaagattctattgcacaataaatgagctcgtgacagaatgtaagatctggcatgtgctcagagggcaagaataaattctatcagtacattgacaccatcagtcatgcgttatccaaaggccacacaacaaaaaccacattgcattttacttaatgctcatcattatgaatcagaacacaaaataagtccctctttaacatatcttggaactatgctaattccactgaatattattattctgttgatttcagttggattgcttgttttcaacgcctaccacaaccttctcccttaattctagattttagtatctagaatgactcttctagtttgcttcttcatgtttttactctttttctgtaataactaagatgatctagcccaatgagaagtgcttctccaaggaatcaaaaatggtytttgtagtagagagattagtctcaagcagcttgctgtatgcaacatggagtttgcctgtggcttttacccacagccgtacaaaaaactatgtacatgatgttaaaaaaaaaaaagttgtaagattgtgagaatcctaagcacactgattagatgcctgtaagaatgacagatacgttagcttgagatttgccattttcagtgaagtctgagtgtcaagaaagaggaaatttactttccacatatgttcattcaataaatgtatattgagcatcttctatgtgccaggtgctatgttaggaaaccaatgagtaagtcaatgagaagtctctgccttcataagctggtgggagagacaggtaataacaagtaaatataaatgataatgtcacgtagtgattcatgattcacaaagaaaataaaacaggttcaaggcatacaaagtgacagcatagagtgagtcctattatatatgtaatgatcgaggagtcctcctcaaggacatgacatctgagtaaaaactgaaataatgtgaaaaagagttttagtgagaacagtgttacgggcagaggggagatcaagtagaatggctcgaagatgcaaatgagcttggcatgttcaagaaacaatagaaacactgctgtgtggctgaaacccagtgaagagcatggtaaagaaaggggacaggaataaagagataggcaggggccaggtaacgtacacactgttgagaaatgcaaaagcacagatgcaaagatattgagtagtactgaacctgaggcctgctttgaaaagattctctggctgtgttgtggagaatcgacctgagaagggcaagagtaggaatagggacctgttgggtggctgtagtggggctgcagatgagagttggtatgacttggacaagagcgggatggcagaattaattgttcttttctcagcatgttcaatttgaaatgtctattatgaaactaagtgaaaacaattggatctaccagtcagggccatgagcatgaccctgaatcagctcaggagag

SEQ ID NO: 49431 - DNA, 1307 bp, Homo sapiens
aaggctatgtctaccctgggcgcatggctcacgcctgtaatcccagcactttgggaggctgaggcgggcggatcacaaggtcaggagatcgagaccatcctggctaacacagtgaaacctcgtctctactaaaaacacaaaaaaattagccaggtgtggtggcaggctcctgtagtcccagctactcaggaggctgaggcaggagaatggcatgaacccaggaggtggagcttgcagtgagccgtgattgctccactacactctggcctgggcgacagagcgagactccgtctaaaaaaaaaaaaaaaaaaaaaaaaggctatgtctattacaaatccagaagatgccatgtaaaagatgatttgactctaagactagttaggaacaaaggcaaaaactgaaaagagagactacatctgggtctaaggaagtatgattctatctccccagcctaccttcagaagaatcccctcagactgggagaagagaaattagagaggagaggagaggagaggggtacaatgataccacattgtggctttaattttcactttgatgactaaggaagtcaagcatcttttgcatgtttattagacatttggatttcctcttttgtaaagtgcctgttcaagtcttttgatcattttcccgttgggttatctgtcttttgctggccaatttctcattttttactcatctaacttgagaaactttttaaaaattatgttctttccattatctttttaacataaatttttttttccaaaatgtttttatctgggatatttcacagctttttctatgagtcatcaatatgagtatttatatctctaaggatatatttttattggttttagatgtttatccataattcttttcaatgacaactttctcactctcaaatatttatcttcaacatttacagacttaaagacatgtttaatcattaytatagtaaaggccattcttttctgtcacactgccatattttagttttttgaattacaacatatgacttttttgtttatttgtttccttgtttaccatatttttcctaccaaaagtcttcatcttgttcatctccagtgtttagaacagtgaacactatataaaggagatggtttcaaatccttatagaattaaagtgacctgatttttgactaataattggggtttctttttcatcttaaagctcaaacattctaccagaatgtcttgagaaattttctgtttgttttgccttgaatatgatgagctgttttcatatttagtcttagtcaattgcattatatctttgattaccaatt

SEQ ID NO: 49432 - DNA, 1307 bp, Homo sapiens
aaggctatgtctaccctgggcgcatggctcacgcctgtaatcccagcactttgggaggctgaggcgggcggatcacaaggtcaggagatcgagaccatcctggctaacacagtgaaacctcgtctctactaaaaacacaaaaaaattagccaggtgtggtggcaggctcctgtagtcccagctactcaggaggctgaggcaggagaatggcatgaacccaggaggtggagcttgcagtgagccgtgattgctccactacactctggcctgggcgacagagcgagactccgtctaaaaaaaaaaaaaaaaaaaaaaaaggctatgtctattacaaatccagaagatgccatgtaaaagatgatttgactctaagactagttaggaacaaaggcaaaaactgaaaagagagactacatctgggtctaaggaagtatgattctatctccccagcctaccttcagaagaatcccctcagactgggagaagagaaattagagaggagaggagaggagaggggtacaatgataccacattgtggctttaattttcactttgatgactaaggaagtcaagcatcttttgcatgtttattagacatttggatttcctcttttgtaaagtgcctgttcaagtcttttgatcattttcccgttgggttatctgtcttttgctggccaatttctcattttttactcatctaacttgagaaactttttaaaaattatgttctttccattatctttttaacataaatttttttttccaaaatgtttttatctgggatatttcacagctttttctatgagtcatcaatatgagtatttatatctctaaggatatatttttattggttttagatgtttatccataattcttttcaatgacaactttctcactctcaaatatttatcttcaacatttacagacttaaagacatgtttaatcattactatagtaaaggccattcttttctgtcacactgccatattttagttttttgaattacaacatatgacttttttgtttatttgtttccttgtttaccatatttttcctaccaaaagtcttcatcttgttcatctccagtgtttagaacagtgaacactatataaaggagatggyttcaaatccttatagaattaaagtgacctgatttttgactaataattggggtttctttttcatcttaaagctcaaacattctaccagaatgtcttgagaaattttctgtttgttttgccttgaatatgatgagctgttttcatatttagtcttagtcaattgcattatatctttgattaccaatt

SEQ ID NO: 49433 - DNA, 593 bp, Homo sapiens
caggagtttaagaccagcctgggcaacatagtgagacccagactctacaaaaaaagtgaaaaaattagccggacatagtggcacgtgcctgtagtcccagctacctgggaggctgaggcaggaggatgaattgagcctgggagattaaggatgcagtgagctgtgatcacaccactgcacagcagcctgggwgatagagtgagaccctgtctctaaaaaaaaaagaaaaagattctttagatgttgagcccttcctttgaggccagggacagtagtgactcctgtctgaagcccccagtcccccagatctgagtcccagagcctcagagtggacactcagggcagtgggatggaacgtgctagtcttggaggctacagtctggaatgtaaacttcaactccacctcctccgtgctgcgtggccttgggcaggtcctggccctctctgagcgcaatttcctcacctgcccaatgaggaaagttgaactaagtcatccccaagcaaccactgactgaccagtttcacttcagtgcctcctctttttcaaagagatttggaaggaggcctcgcttcctgctgacccagagccccaa

SEQ ID NO: 49434 - DNA, 593 bp, Homo sapiens
caggagtttaagaccagcctgggcaacatagtgagacccagactctacaaaaaaagtgaaaaaattagccggacatagtggcacgtgcctgtagtcccagctacctgggaggctgaggcaggaggatgaattgagcctgggagattaaggatgcagtgagctgtgatcacaccactgcacagcagcctgggagatagagtgagaccctgtctytaaaaaaaaaagaaaaagattctttagatgttgagcccttcctttgaggccagggacagtagtgactcctgtctgaagcccccagtcccccagatctgagtcccagagcctcagagtggacactcagggcagtgggatggaacgtgctagtcttggaggctacagtctggaatgtaaacttcaactccacctcctccgtgctgcgtggccttgggcaggtcctggccctctctgagcgcaatttcctcacctgcccaatgaggaaagttgaactaagtcatccccaagcaaccactgactgaccagtttcacttcagtgcctcctctttttcaaagagatttggaaggaggcctcgcttcctgctgacccagagccccaa

SEQ ID NO: 49435 - DNA, 1381 bp, Homo sapiens
gcagtaagttctagccaggaaatacccacgatgcctcagcccatcgaaaaagtctccgtgtcaactcagacaaagaagttaagtgcctcttcaccaagaatgctgcatcggagcacccagaccacaaacgacggcgtgtgtcagagcatgtgccatgacaaatacaccaagatcttcaatgacttcaaagaccggatgaagtcggaccacaagcgggagacagagcgtgttgtccgagaagctctggagaaggtaatgcttgtcgccactgtgggtgccctgctgcagccggcactcctgtcatggttaggctcctttcactcatgcatcaacccagtagcagcttttacatgtagccatataatgacaccagtatcttttacagcatttcaagtaataatgatactttcctcacctaaattttttacacatgtaatgaaggggaaaaaaggtacctcatgcaagttgtgttaagtttctgttccagtgtagatggtctgtgttaagttgtgtgctgacgcactgtgggttgtcttttcattccagctgcgttctgaaatggaagaagaaaagagacaagctgtaaataaagctgtagccaacatgcagggtgagatggacagaaaatgtaagcaagtaaaggaaaagtgtaaggaagaatttgtagaagaaatcaagaagctggcaacacagcacaagcaactgatttctcagaccaagaagaagcagtgggtaaataccagtcttttttagacccttatttctgaaaatgtaccacaggtatgatgcccgttaattcagaaggtagctgtggcacatgcagaagatgtttctgaaataagatcaaatgtgaaatggtcagctttagttttaaaaattttattaaaagtcctatgatctctcaaccccagatcccatattactgtgtactgctcaggattattttgttaaattgagattataataccttagtacatatttattacaattaacttatataatttctccatctatgcatatattttatttgggcaaagtggctggccctgacttttacctggtgatttcagatgggtaacatccaaatggtgaaattataaatgtaattatcacaataaatagtttcagatttccctgcacttaacatttatacattagattttgttaaagaaatcagttacttttactttatagtagtgacatctcattggtctctaactaccctccctcatacctgactagtrtcatttgtcatcgtgtcctgctcgccagtctcatcctccccactagagtgggagcttctgagtgcacagggtccaagtgctcgtcctacagccgccacagtgctcagtgaattagggaaaagttttgctcccgaaag

SEQ ID NO: 49436 - DNA, 525 bp, Homo sapiens
ttcgttaaaggaatttgctcaggttctgtgaacatttcattgccctatataaatgttttagtgactaggaaacaaaaatatccaggcctatgaaaagtgtaatgagtcccaatatagccatttgtaatggggatttaactgctttgtttgtgagcttcwgctaaggaaacagattaccttcatcatgtgctaataccccggagtcgatgtaaactctgttccactgtagaaaggtatcatggggatgccagcaaagactctaagatcaattttgtaaacctgtaagctggtaaacaaaaaaaaattattcctggttccaaacccagctcaacactcttcttccttgtaaaggacttaaaactaattaataaattgtcatagatattttcaaaattgaaatcctattttcataataattgaagcacttgtgtacaaaatattgtgtactgaatgtctaagaacctaaggtctaagagagtcataatgaaaaagacataattccttggattaaattatgatagtgtc

SEQ ID NO: 49437 - DNA, 607 bp, Homo sapiens
ttttttttttttaagacagagtctcactctgtcggcaggctggagtgcagtggcacaatctcagctcactgtgacctctgtctccygggttcaagtgattcccctgcctcaccttcctgagtagctgggactacaggcgcgcaccaccacgcctggctaatttgttgtattttagtagagacggggtttcatcatgttggccaggacagtctcgatctcctgaccccgtgatctgcctgcctcagcctcccaaagtgccgggattacaggcatgagtcatcacgcctggcccctgggtaatttttatgttttctgtacagacagggtttcgccgtgttgcccaggctggtctcaaactcctgggttcaagtgatctgcccaccttgcgctctcaaagtgctggggttacagctgtgagccactgtgcctggcccatagaagatttcaacagacgtaattccaccagagcagtaagttaaaattcgtctcctgaagtaacttactcatcaccaagactccaggtctgtgctgagtgcagcccattgacaaagtgtaaccagatgaacacacacactgatctcataattagcatctcacagggtgcggc

SEQ ID NO: 49438 - DNA, 556 bp, Homo sapiens
agctgggattataggtatgcaccaccacactcagctaatttttgtatttttagtagagacagggtttctccatgttggccaacctggtctctatctcttgaccttgtgatctgcctgcctcggcctcctcccaaagtgctgggattacaggcgtaagccactgcgcccagccaagtgatagatgttttaatccattatctyatttaatcctttaaacaactgaaggagaatagttgattatttctcctttcatagatgctgggtatagcatctgtcacactgctgaaggaaccacagttggaacctaagcctgtctggcactaaatcaagtccctgttctttctggtaagccgaaggggtcttcttcagaagtctagtctccaatcaattcatttctctaatgaagcattaaatacatcatctctcaaagttcagtctgaatgactcatcttcctggcttctaaatccctgaggaagcctacccatttacttctaggaaaagttagcaccaatttcacctcaattaacacatctcagatatgatgatgtgcaattg

SEQ ID NO: 49439 - DNA, 622 bp, Homo sapiens
ccaattctgtctctttttaaataatctactagattcagtttataaagattttatatgtttacttatgttagtatttaacaaacatatatttccttttttttttggrgggggggatggagtcttgctttgtcactcaggctggagtgcagtggtgtgatctcagctcactgcaacctccgcctcccaggttcgagcaattctcctgcctcagcctccggagtagctgggattacagacacgtgccaccatgcccagctaatttttgtatctttagtagagatggggttttgctatgttgcccaggctggtcttgaactcttgacctcaagtgattcacccgcctcagcctcccaaactgctgggattacaggcgtgagccaccgtgctcagcctttcctcatttttgtcttttttttttttttttttttttgagacagactctcgcactgtcgcccaggctggagtgcaatggcgcgatctcgacacattgcaaccttggcctctcaaagtgctgggattgtaggtgttagccaccgcatccagctcctcatttttttctaatcaaagaaatgaggctcttctcaaaggatattaaggtatgcaggacctctgtgaggattat

SEQ ID NO: 49440 - DNA, 1938 bp, Homo sapiens
atcagtggaatcatacattattcatcatttgtgactggcttattttgcttagcataatgtcctcaaggttcagccatgttgcaggaagtgactggatttccttccattttaaggccgcataatatccccttgtatttatgtgccacattttaaagatccattcatccattgatggacatgcgtgttgtttccaccattcagctattgtgaatagtgctrccatgaatgtgggtctacgtaagcacttaggattttgataatgacaatctcttcaaatttgatagcagaacacttgcttaacagtaggtaacaagatttcaattttatagagacaccctttactacttcaacaaacactcgctatctccgagtgccaggtgctggtgtccagggcaaaccccagagctgtcagagaacttcagtcaccagggaggcaaataggaaacaggcaaacacaccagttggcatttatcattattcatggcagccagtgctgtgaaggaaacagcaggacgcactgagagagctctggctgggtgaccttgctctggcagggtggtcagggaggggctttctcacaaggggatctttgtgctgaggcctgaggatgagaagaaaccagggcagtgcagagtgggaggtaagaactttctgggtgagagcacagcacaggagagttctgggtaacacacctggactgtcccccactctgtagatcagttctgactgtgctcctagttgctgagtgtgacttgagctcctgacattcctgcagctcagtcttggtttatgaatcaagcataaagttgcctgctattgacacatgctttgtaaccttggaactgaagcatctcaggagtggatagaagcatgaatatccttctgcttccgtggctcccaacccagtcctgttttagggtctgggtccccagggagttcataacaaaaaatctttgctggtgtttcccatatgagaggaaggagggtgctgtttcaatatggagcatcactcagacagagcccttccttggtgaaatgtgctctaaagcttacacatttcctcctgtcgtttgtatatatatatatatatatgacatatatatatatacacgtatatatatatgtgatatctcactgtgtcccaaatatgtatttatttgtcccagaatggaataagtcttaagtcaggcaattttatattgtggaatggattgctaaggaaaagattctggatttccaggaagccaacacaaatagcaaactacaaggatgtaaagtgagaacaaaaaatgacatcagttttggaaacttctatctcaagcccatgtcagcctccccggtcctcattgtgaacgtgcatgtgtcttctcaggcctgttcatcaaagccatttcctcggacccactttatagagaaatgagtgctcagcgcatgtgaaccgaaggtccttttgtgatatgaagtgactccggacactcacgaacacctgtctgtactagatgtctctgagataggatgaacctatttcactgaaaacttaaataggttaagctctttgctgttactgttgctgatgtaatgtcacccacatttttttttattaatatgatcccttaggatatgaaaatatttatattagtctcagatagccaaggaacacacttttgttttagtcattcaattttttctcacataatgctaactcagtgccgactttgcctcttggtctgaggctggcctattttgtttattgttgttagtgtatttttatatgtgttatatgcagtcctttttgaggactaggacaataagaaatatattttacttcatctgaattaacaaattttcacaaaacaacatttattacttactccaagagacgcattctagtatcttctaatctataatattctctttaattatgttctatttcatttt

SEQ ID NO: 49441 - DNA, 1938 bp, Homo sapiens
atcagtggaatcatacattattcatcatttgtgactggcttattttgcttagcataatgtcctcaaggttcagccatgttgcaggaagtgactggatttccttccattttaaggccgcataatatccccttgtatttatgtgccacattttaaagatccattcatccattgatggacatgcgtgttgtttccaccattcagctattgtgaatagtgctgccatgaatgtgggtctacgtaagcacttaggattttgataatgacaatctcttcaaatttgatagcagaacacttgcttaacagtaggtaacaagatttcaattttatagagacmccctttactacttcaacaaacactcgctatctccgagtgccaggtgctggtgtccagggcaaaccccagagctgtcagagaacttcagtcaccagggaggcaaataggaaacaggcaaacacaccagttggcatttatcattattcatggcagccagtgctgtgaaggaaacagcaggacgcactgagagagctctggctgggtgaccttgctctggcagggtggtcagggaggggctttctcacaaggggatctttgtgctgaggcctgaggatgagaagaaaccagggcagtgcagagtgggaggtaagaactttctgggtgagagcacagcacaggagagttctgggtaacacacctggactgtcccccactctgtagatcagttctgactgtgctcctagttgctgagtgtgacttgagctcctgacattcctgcagctcagtcttggtttatgaatcaagcataaagttgcctgctattgacacatgctttgtaaccttggaactgaagcatctcaggagtggatagaagcatgaatatccttctgcttccgtggctcccaacccagtcctgttttagggtctgggtccccagggagttcataacaaaaaatctttgctggtgtttcccatatgagaggaaggagggtgctgtttcaatatggagcatcactcagacagagcccttccttggtgaaatgtgctctaaagcttacacatttcctcctgtcgtttgtatatatatatatatatatgacatatatatatatacacgtatatatatatgtgatatctcactgtgtcccaaatatgtatttatttgtcccagaatggaataagtcttaagtcaggcaattttatattgtggaatggattgctaaggaaaagattctggatttccaggaagccaacacaaatagcaaactacaaggatgtaaagtgagaacaaaaaatgacatcagttttggaaacttctatctcaagcccatgtcagcctccccggtcctcattgtgaacgtgcatgtgtcttctcaggcctgttcatcaaagccatttcctcggacccactttatagagaaatgagtgctcagcgcatgtgaaccgaaggtccttttgtgatatgaagtgactccggacactcacgaacacctgtctgtactagatgtctctgagataggatgaacctatttcactgaaaacttaaataggttaagctctttgctgttactgttgctgatgtaatgtcacccacatttttttttattaatatgatcccttaggatatgaaaatatttatattagtctcagatagccaaggaacacacttttgttttagtcattcaattttttctcacataatgctaactcagtgccgactttgcctcttggtctgaggctggcctattttgtttattgttgttagtgtatttttatatgtgttatatgcagtcctttttgaggactaggacaataagaaatatattttacttcatctgaattaacaaattttcacaaaacaacatttattacttactccaagagacgcattctagtatcttctaatctataatattctctttaattatgttctatttcatttt

SEQ ID NO: 49442 - DNA, 633 bp, Homo sapiens
ttgcaggtgcgttagggcagaaaaattagtgttgcctcctttgtctgagtctgagtttccttatcagttaagttaaagggcttatttgaaattctctgttatgtgctgagatggaaatggtgttagaagttataggatgcggccgggcgcggtggcttaygcctgtaatcccagcacattgggaggccaagcagatcacaaggtcaggagatcgagaccatcctggctaacacggtgataccccatctctactaaaaatacaaaaaattagctgggcatggtggcgggtgcctgtagttccagctacttgggaggctgaggcaggagaatggcatgcacccaggaggcggagcttgcagtgagctgagattgcgccattgcactccagcctgggctacagagcgagactctgtctcaaaaaaaaaaaaaaaaaaggaagttataggatacagcatagataggcagggtattggtgctgttattctcctttttttacccccttttatgctcctctaggtcatttttccaccccaagaaagagggtaaagcaaagaagcctgagaaggaggcatccaatagcagcagagagacggagccccctccaaagtatgtcacagggctgggatatggtga

SEQ ID NO: 49443 - DNA, 547 bp, Homo sapiens
ctgggtctctgtcctgtctagaccctgtccaccctcagaagcaaccctgacaccttaggaacatagctgccctaaaacactaatcagtaccaattcttgcctgtgaggcagaaattgcaaattactgttccagtaccactttcttcttctttcttagtaacagaattcagactagggtgggaatgaaaccaactaaacgactgcatttcccagactgtcttcctgctaggtaaaaccagtcctgtgactgaagtctggtcaataaaatgtaagtggaacatatgggactcccagaaagactccttaaaacggagagttgtgccctttctgtctttctattcttcttccttcctgctgccttgaatatgagtattatgactagaacttcagcagccatcttggaccattagattactttaaaggtggtgtctatgatctagagaatatggggcrgaaaagacagacagaatctgggtctggatgacttcatggcactgttattccagttatgccctgcctgcctctgaacttctttttaggtaagaga

SEQ ID NO: 49444 - DNA, 2222 bp, Homo sapiens
tggagttgattgtaaaagctacaaattaacagatgaagctacaattattctcattgcacagagaaaaatacaccttataataacatatgtaaagaaaatgggtttataaaaatggtgaaaaaaaggtctgtgtaaagtagcacaaagagaatataaattcttgccttgacctagaatccatctgcttctgtctgacgaacacccaggcacctgcagagtacccttccactccaggaaccaacagtgataattagcccacatagtgatagtatttgattagaaaaccctactaggcagctgtgttgaacatgtcaaaaaatgtgtcctggacgtccctcctgtgcatctcttactgaagccagatcttatcacctgctctttttatatctgcgtctcttagaaacctaggttcttctgcctgtttcttcccattctgtaacccagcactgtggagatgctcgtctatatccagctaaatgactatgtgctgttctctcgccttgtcttttctggttctttgctatggattgagctccatgttcattacattgtgctttcttttcaaggaattttcttgggttggaccttgatattcccatcaacttcgcattttcaaagctgtattttcccttgcccttagattgcaagggcaatgtttggcttgctctttttatttggcttttttgtttgtttttgtgggttttttttttttttttttttttggctaggttcaagttgtctaggttcatatttggacatggcataatttttaagtatttgagagctattttactcagcccctaacagtccccacccacctcccaagttcacattcactccccctcctgttcaatttgatccctatcattcttaggatgttcttctgaggcccattaagcaaaagcttatcctcagcatttaacactggaaattagagttagatgaagaagaatcaaaactatttcaggtaaatgaacattttgctacaccactactctgaattttctggaaacaaaatcacattaaatggcaagtcaccatttaatcaaatgatctgaaataaagctttccagaaacatcaatatttgaaaataaatagtaaatcatcaattcaggtatagtaaggattctgacatgattcaagtttttctagttaacagatctggataaatggtatgtattgactctaaaggatccctgaaatttagaaatttaaacaggcagttttggcccagttgttatttttaattctatggtaattatatattagatatgaagaacagaatgtctctgtgagaatgaaggtggcgtgtacatgcatgtcagggaccaagtggataagcatgacctcataaggacagatacaatttcattgtggttaaatttgttaaacatttaaaaccatatacccattattaaaataacctagggtttacttgtgggcatttaggttccccctaatagctccaacttcaatgaacaatgccagaaagtttaacattacattattctaaattcatgtgatacttacatcttggttaaaatgcatatttttttaaaattattcatatatttaattccagattattttatgagcatgagatttactgaaagtagaagaaaactgagaacacagctgaataaaatggctatcttttttttttttttttgagacggagttttgccctgtcgcccagtctggagtgcagtggtgccatctcagctcactgccacctccgtctcccaggttcaagcaattctcctgcctcagcctcctgagtagctgggactacaggtgcccaccaccacgcccggctaatttttgtmtttttagtagagatggagtttcaccatattggccaggctgctccgctggctatcttaatagtctggagaaagaagatggggagaagaggtgcagaaaatggagttcacagcactatacattattataaacaagacctaatcctcctagctcttgacctcaccaaaagacaagctccttctgtgaaaataaaattgccaaatattttttctttagttgttttccattcatcattttgctcttctcctttccagaccctaatgctaatattccagaatcagcttgacttttattacagattcgttgtcttttgagtcagtccatattactgttgaactactctagctttggaatattatttcttaaattgagctaaaattggactctcttccctact

SEQ ID NO: 49445 - DNA, 1931 bp, Homo sapiens
tgaccctccttagacctgtaaatatgtattggtaccaactgtacagcaggccctgtgctgtccgccagcaagataacagtgaatgaaaacatctctgctctaaagtagatattctccccagcccttcccagcatggtctggaagggaacagcaggatattcagacagtgccttagcaaggaaggacacagtggtgcgttcgtgtcaaacactggtgtgcagaaggtagggagtccaggagggcttcatggaagagggagacttgactgcgccttgagatgtctggaaggagtacagagggctcttcaggagtcagaacaaacagataagtgatcggaagccgtggagaaagtttaattgttagaatttccatttattttggtgtgtatgtgctatgtttaaaccttaggaatttgcataccacttggtatcattttattagatcctagttttgtaggtctagaagtcaagaccaatgttaggaaaactgcccttgatatgtagagacacccacctggccatctcctgtcttccccagcagaaggatggagaaacagacaagctcctgatagcagtgacatgatgcatatgtgatgggcaaccaactgtgactctgaagccactttaaacactgtttctctgatttaaaaacctgtttggagctttggaagttgatttttaggtttataaaaaaactggactattttgagtttggaaacataatttactatttccaagaaaagagttttaaaaaccgattactttccctaactcctcatccccttgcgacaatttataaaagagaaatcaggatttcaaatcctgcacgtggagtgagtagcttttttgagttcagttcacgaggttgcactttgacatgctttttaagatttgaatatttttataaatcatgattatgctactgtttaatgagaacaaaagtggaaatcgcatctgtttgtctgcggcggagcatctcccggcctgtgtgtgctgtctgggaaagtggtggcccagtctggagagctgacgagcagcttgattagctgaaattacttcctgcagtagtttgagggtgtcagtcctgggatgaactgggtcatctcagggatctgggacacgggagccactctgagactcagggtggctgatggcccggactccaatcagaaatccccaactcttccccgcgtgaacacgtcgggcagattcccttccagcccaggttgggatctcagggtctgttccttgctagaccgggtccaattggtatcagccccctattcctgctttggaatagggggctgatacaaattggattgaacctaattgagatgccctgtagtgtcagctggtcccggggaaagaggctatacaggtgcaggcacgttccctgagggtgggagatagccgcggccgagagacagcagtggaaatagacctatagcatgggcatcgaggacaggactttggagtcaaaatgcttaattccattatcactcagcccgatcatcgatgttcaggttgaagagcctgtgtcagcaaaagagttgaagtaatttggagttctttgttcactcagctttagaacgctgctgttttttcgttttccttcaaactagtaaaactaaaaacgtttctgatttttaactgttactgtttttatctggaaaactcattaatctagattttgttaccactgacagcctataggtccyctctaaatattgtttttaatgtaacttctctacaacgaaatgcctggatctttggcatgcggttcaatcagttttgcactgacaaatgcagacatctgtgtaacccacattcctatcaagtaaaagagcattcccatcagcccagaaagccccctcgtgccccttcccaggcatccccctgcctccagaagcagccactgatggtttgttttta

SEQ ID NO: 49446 - DNA, 1828 bp, Homo sapiens
gggaacaataatgtagtctgccrcaaacatattaaagtgtaactggatatggttgctgcagaattttgaacctttgttttaattgtgatttttactctttcccccctatctagtgcccttttgtaatacagtaattatcatgatttttgtctgaactgaaatcttctgagattagattgtctacgaaaatacagtcgatcctccttgttttcagcttttgtatttgtgaactcacctactattttttgtaacccccaaatcagtactcacagcactttcatagtcatgtgtttgcgcagagtgtcaaagaatttgagtttgaacaggatgatattctgccttctttttcagctctcatacaatagtcaggtatcctttttgtggtctatttaatgccatgcttttcctgtttttgtactgtttgttggttgttttgccatttaaattaacccccaagcatagtgctgaagtgctgcttagcattcacaagtccaagaagtctgtgatgtgtcttacagagaaaatacatgcattaaataaactccattcaggcgtgagtgctgtagtgccgttggctgtgagttcaatgttaatgaatgaacaatgtatattatttatttattcttcatttaattaattattattattattttttttgagatagagtctcactctgttgctcaggctggagtgcagtggtgcagtcttggctcactgcaacctctgcctcctgggttcaagcgattcccctgccttcgcctcccaagtagctaagactacaggcatgcgccaccatgcctggctaattttttttttttttttttgtagttttagtagagacggggtttcaccacgttggccaggctggtctcgaactccagacctcaaatgatctgcccgccttggcttcccaaagtgctgggattacaggcgttagccactgtgcctggccaacaatatatattaaataagcacacatacaacaaaagtaggtgttggtaagcttacaaaagtgtgaccagtagcttgctgaaacctaactttttatttgttcatggaactttctagaccgtaactacactgaataatgagaatctgctgtaatctttttaggtgctgtagatgagccattggattaaattattacagtatgtttcagactgctgtatgttgaaccctagtgaaatgcctctcaaaccttcataaggatcacaatctcatgtcctttttttttgttattaaatgcccagtatgtgttagcgatttaaacaaaattcaaatatttttttttttttttttttgagacagagtctcgctctgtcacctaagctggagagtgcagtggtatgatctcggctcactacaacctctgcctcccgggttcaggcgattctcctgcctcagcatcctgagtagctgggattacaggcacccgccaccacgctgggctaatttttgtatttttagtagagacggggtttcgccaggttgtccaggctggtctggaactcctgacctcatgcgatctgcctgccttggcctcctgaagtgctgggattataggcgtgagccaccatgcccggcgttgacttcttaataataaccatactgactggtgtgagatggtatgccattgtggttttgatttgcatttctctaatgatcagtgatattgagctttttctcatatgcttgttggccgcatgtgtgtcttcttttgaagtgtctgtttatgtcctgtgcccactttctaatgagatttttttttttcttgtaaatttgtttaagttccttatcagtgttggacattagatctttgtcacatgca

SEQ ID NO: 49447 - DNA, 1828 bp, Homo sapiens
gggaacaataatgtagtctgccgcaaacatattaaagtgtaactggatatggttgctgcagaattttgaacctttgttttaattgtgatttttactctttyccccctatctagtgcccttttgtaatacagtaattatcatgatttttgtctgaactgaaatcttctgagattagattgtctacgaaaatacagtcgatcctccttgttttcagcttttgtatttgtgaactcacctactattttttgtaacccccaaatcagtactcacagcactttcatagtcatgtgtttgcgcagagtgtcaaagaatttgagtttgaacaggatgatattctgccttctttttcagctctcatacaatagtcaggtatcctttttgtggtctatttaatgccatgcttttcctgtttttgtactgtttgttggttgttttgccatttaaattaacccccaagcatagtgctgaagtgctgcttagcattcacaagtccaagaagtctgtgatgtgtcttacagagaaaatacatgcattaaataaactccattcaggcgtgagtgctgtagtgccgttggctgtgagttcaatgttaatgaatgaacaatgtatattatttatttattcttcatttaattaattattattattattttttttgagatagagtctcactctgttgctcaggctggagtgcagtggtgcagtcttggctcactgcaacctctgcctcctgggttcaagcgattcccctgccttcgcctcccaagtagctaagactacaggcatgcgccaccatgcctggctaattttttttttttttttttgtagttttagtagagacggggtttcaccacgttggccaggctggtctcgaactccagacctcaaatgatctgcccgccttggcttcccaaagtgctgggattacaggcgttagccactgtgcctggccaacaatatatattaaataagcacacatacaacaaaagtaggtgttggtaagcttacaaaagtgtgaccagtagcttgctgaaacctaactttttatttgttcatggaactttctagaccgtaactacactgaataatgagaatctgctgtaatctttttaggtgctgtagatgagccattggattaaattattacagtatgtttcagactgctgtatgttgaaccctagtgaaatgcctctcaaaccttcataaggatcacaatctcatgtcctttttttttgttattaaatgcccagtatgtgttagcgatttaaacaaaattcaaatatttttttttttttttttttgagacagagtctcgctctgtcacctaagctggagagtgcagtggtatgatctcggctcactacaacctctgcctcccgggttcaggcgattctcctgcctcagcatcctgagtagctgggattacaggcacccgccaccacgctgggctaatttttgtatttttagtagagacggggtttcgccaggttgtccaggctggtctggaactcctgacctcatgcgatctgcctgccttggcctcctgaagtgctgggattataggcgtgagccaccatgcccggcgttgacttcttaataataaccatactgactggtgtgagatggtatgccattgtggttttgatttgcatttctctaatgatcagtgatattgagctttttctcatatgcttgttggccgcatgtgtgtcttcttttgaagtgtctgtttatgtcctgtgcccactttctaatgagatttttttttttcttgtaaatttgtttaagttccttatcagtgttggacattagatctttgtcacatgca

SEQ ID NO: 49448 - DNA, 1828 bp, Homo sapiens
gggaacaataatgtagtctgccgcaaacatattaaagtgtaactggatatggttgctgcagaattttgaacctttgttttaattgtgatttttactctttcccccctatctagtgcccttttgtaatacagtaattmtcatgatttttgtctgaactgaaatcttctgagattagattgtctacgaaaatacagtcgatcctccttgttttcagcttttgtatttgtgaactcacctactattttttgtaacccccaaatcagtactcacagcactttcatagtcatgtgtttgcgcagagtgtcaaagaatttgagtttgaacaggatgatattctgccttctttttcagctctcatacaatagtcaggtatcctttttgtggtctatttaatgccatgcttttcctgtttttgtactgtttgttggttgttttgccatttaaattaacccccaagcatagtgctgaagtgctgcttagcattcacaagtccaagaagtctgtgatgtgtcttacagagaaaatacatgcattaaataaactccattcaggcgtgagtgctgtagtgccgttggctgtgagttcaatgttaatgaatgaacaatgtatattatttatttattcttcatttaattaattattattattattttttttgagatagagtctcactctgttgctcaggctggagtgcagtggtgcagtcttggctcactgcaacctctgcctcctgggttcaagcgattcccctgccttcgcctcccaagtagctaagactacaggcatgcgccaccatgcctggctaattttttttttttttttttgtagttttagtagagacggggtttcaccacgttggccaggctggtctcgaactccagacctcaaatgatctgcccgccttggcttcccaaagtgctgggattacaggcgttagccactgtgcctggccaacaatatatattaaataagcacacatacaacaaaagtaggtgttggtaagcttacaaaagtgtgaccagtagcttgctgaaacctaactttttatttgttcatggaactttctagaccgtaactacactgaataatgagaatctgctgtaatctttttaggtgctgtagatgagccattggattaaattattacagtatgtttcagactgctgtatgttgaaccctagtgaaatgcctctcaaaccttcataaggatcacaatctcatgtcctttttttttgttattaaatgcccagtatgtgttagcgatttaaacaaaattcaaatatttttttttttttttttttgagacagagtctcgctctgtcacctaagctggagagtgcagtggtatgatctcggctcactacaacctctgcctcccgggttcaggcgattctcctgcctcagcatcctgagtagctgggattacaggcacccgccaccacgctgggctaatttttgtatttttagtagagacggggtttcgccaggttgtccaggctggtctggaactcctgacctcatgcgatctgcctgccttggcctcctgaagtgctgggattataggcgtgagccaccatgcccggcgttgacttcttaataataaccatactgactggtgtgagatggtatgccattgtggttttgatttgcatttctctaatgatcagtgatattgagctttttctcatatgcttgttggccgcatgtgtgtcttcttttgaagtgtctgtttatgtcctgtgcccactttctaatgagatttttttttttcttgtaaatttgtttaagttccttatcagtgttggacattagatctttgtcacatgca

SEQ ID NO: 49449 - DNA, 1828 bp, Homo sapiens
gggaacaataatgtagtctgccgcaaacatattaaagtgtaactggatatggttgctgcagaattttgaacctttgttttaattgtgatttttactctttcccccctatctagtgcccttttgtaatacagtaattatcatgatttttgtctgaaytgaaatcttctgagattagattgtctacgaaaatacagtcgatcctccttgttttcagcttttgtatttgtgaactcacctactattttttgtaacccccaaatcagtactcacagcactttcatagtcatgtgtttgcgcagagtgtcaaagaatttgagtttgaacaggatgatattctgccttctttttcagctctcatacaatagtcaggtatcctttttgtggtctatttaatgccatgcttttcctgtttttgtactgtttgttggttgttttgccatttaaattaacccccaagcatagtgctgaagtgctgcttagcattcacaagtccaagaagtctgtgatgtgtcttacagagaaaatacatgcattaaataaactccattcaggcgtgagtgctgtagtgccgttggctgtgagttcaatgttaatgaatgaacaatgtatattatttatttattcttcatttaattaattattattattattttttttgagatagagtctcactctgttgctcaggctggagtgcagtggtgcagtcttggctcactgcaacctctgcctcctgggttcaagcgattcccctgccttcgcctcccaagtagctaagactacaggcatgcgccaccatgcctggctaattttttttttttttttttgtagttttagtagagacggggtttcaccacgttggccaggctggtctcgaactccagacctcaaatgatctgcccgccttggcttcccaaagtgctgggattacaggcgttagccactgtgcctggccaacaatatatattaaataagcacacatacaacaaaagtaggtgttggtaagcttacaaaagtgtgaccagtagcttgctgaaacctaactttttatttgttcatggaactttctagaccgtaactacactgaataatgagaatctgctgtaatctttttaggtgctgtagatgagccattggattaaattattacagtatgtttcagactgctgtatgttgaaccctagtgaaatgcctctcaaaccttcataaggatcacaatctcatgtcctttttttttgttattaaatgcccagtatgtgttagcgatttaaacaaaattcaaatatttttttttttttttttttgagacagagtctcgctctgtcacctaagctggagagtgcagtggtatgatctcggctcactacaacctctgcctcccgggttcaggcgattctcctgcctcagcatcctgagtagctgggattacaggcacccgccaccacgctgggctaatttttgtatttttagtagagacggggtttcgccaggttgtccaggctggtctggaactcctgacctcatgcgatctgcctgccttggcctcctgaagtgctgggattataggcgtgagccaccatgcccggcgttgacttcttaataataaccatactgactggtgtgagatggtatgccattgtggttttgatttgcatttctctaatgatcagtgatattgagctttttctcatatgcttgttggccgcatgtgtgtcttcttttgaagtgtctgtttatgtcctgtgcccactttctaatgagatttttttttttcttgtaaatttgtttaagttccttatcagtgttggacattagatctttgtcacatgca

SEQ ID NO: 49450 - DNA, 548 bp, Homo sapiens
tttcaaaataaattaataaatgttaataaaggtacaaccaacttacaattattatactatattaaatctcattttaataaaatattttttcatcaacmtatttttgtactattgatactgccgacagttttaaattatatttttataaaacctttaacaatatcttactaaaatgtaaaataaaaattactaaccaacaccacactaaacatcataaataacactacataattctcgtacttaacaattttgttatagctgggtttatgggccccatattaacacatcacttcaacttaactcatttaaaaaacttctaattcaattatacataatgtataatactaactttagagtctgcatagccatgcttagggaattataaagagatggctctccatggcaggtcatatccacagctttcttcaaagacgttatatgttttcttgggtttcctaaaatagaaataagatctttaaataaaatcctatatattaaaaaagtttatgtttctctcaaaatttacatatctatgatgttaaagaaca

SEQ ID NO: 49451 - DNA, 548 bp, Homo sapiens
tttcaaaataaattaataaatgttaataaaggtacaaccaacttacaattattatactatattaaatctcattttaataaaatattttttcatcaacctatttttgtactattgatactgccgacagttttaaattatatttttataaaacctttaacaatatcttactaaaatgtaaaataaarattactaaccaacaccacactaaacatcataaataacactacataattctcgtacttaacaattttgttatagctgggtttatgggccccatattaacacatcacttcaacttaactcatttaaaaaacttctaattcaattatacataatgtataatactaactttagagtctgcatagccatgcttagggaattataaagagatggctctccatggcaggtcatatccacagctttcttcaaagacgttatatgttttcttgggtttcctaaaatagaaataagatctttaaataaaatcctatatattaaaaaagtttatgtttctctcaaaatttacatatctatgatgttaaagaaca

SEQ ID NO: 49452 - DNA, 548 bp, Homo sapiens
tttcaaaataaattaataaatgttaataaaggtacaaccaacttacaattattatactatattaaatctcattttaataaaatattttttcatcaacctatttttgtactattgatactgccgacagttttaaattatatttttataaaacctttaacaatatcttactaaaatgtaaaataaaaattactaaccaacaccacactaaacatcataaataacactacataattctygtacttaacaattttgttatagctgggtttatgggccccatattaacacatcacttcaacttaactcatttaaaaaacttctaattcaattatacataatgtataatactaactttagagtctgcatagccatgcttagggaattataaagagatggctctccatggcaggtcatatccacagctttcttcaaagacgttatatgttttcttgggtttcctaaaatagaaataagatctttaaataaaatcctatatattaaaaaagtttatgtttctctcaaaatttacatatctatgatgttaaagaaca

SEQ ID NO: 49453 - DNA, 548 bp, Homo sapiens
tttcaaaataaattaataaatgttaataaaggtacaaccaacttacaattattatactatattaaatctcattttaataaaatattttttcatcaacctatttttgtactattgatactgccgacagttttaaattatatttttataaaacctttaacaatatcttactaaaatgtaaaataaaaattactaaccaacaccacactaaacatcataaataacactacataattctcgtacttaacaattttgttatagctgggtttatgggccccatattaacacatcacttcarcttaactcatttaaaaaacttctaattcaattatacataatgtataatactaactttagagtctgcatagccatgcttagggaattataaagagatggctctccatggcaggtcatatccacagctttcttcaaagacgttatatgttttcttgggtttcctaaaatagaaataagatctttaaataaaatcctatatattaaaaaagtttatgtttctctcaaaatttacatatctatgatgttaaagaaca

SEQ ID NO: 49454 - DNA, 548 bp, Homo sapiens
tttcaaaataaattaataaatgttaataaaggtacaaccaacttacaattattatactatattaaatctcattttaataaaatattttttcatcaacctatttttgtactattgatactgccgacagttttaaattatatttttataaaacctttaacaatatcttactaaaatgtaaaataaaaattactaaccaacaccacactaaacatcataaataacactacataattctcgtacttaacaattttgttatagctgggtttatgggccccatattaacacatcacttcaacttaactcatttaaaaaacttctaattcaattatacataatgtataatactaactttagagtctgcatagcyatgcttagggaattataaagagatggctctccatggcaggtcatatccacagctttcttcaaagacgttatatgttttcttgggtttcctaaaatagaaataagatctttaaataaaatcctatatattaaaaaagtttatgtttctctcaaaatttacatatctatgatgttaaagaaca

SEQ ID NO: 49455 - DNA, 509 bp, Homo sapiens
actcctggattcaagcaatcctcccgcctcagcctctcaaagtgctgggagtacaggtgtaagtcaccacrcctggcccccaaatttgagatgtctgtacatgtcaaattaccaagaagctagtatagccaactcatatatcatttgatactgtgtcaaagtttaactactaggacttttccttcttaatggcttataaaagtatcttgtaattgatggaatctgagtttcaatgaaatatagtattccgtaaacattttccatttcagcactgtcttcgtatcaatcaataacctaagtatcattaaattgattttgtcataaaatataatccatcaaagcatactattaaacatttaatttttaatctgtcactattatacataatgttacaaagagtatctttgtagagtgatcattctccttccataacattccctaaatataatttcaggaacaatttttatgcttttctaaaaaatattgaactaatttgtaagactatcagc

SEQ ID NO: 49456 - DNA, 1702 bp, Homo sapiens
ttatggtgactattatgtcaattatttggaagaagagaagtccagcaagtgaaggctaaagcagatatgtatgartgaaggtgagaggcgaggcgtttatgtgcaaggcctagccagttatgcattcttcccaacacaaacaagtcacaaacaagtaaagagcagataagcccactctattggttaaaacgttacactgcgtcagccccatattcatgctgcggggtgagtgggcagaacagagggaggtttcctgcagggtctgagaaaccactgcaggtcactaaacacgcagtgatgggggaaagccacgaggcagcagggattcctgttgaatccattaaatcccattcccctctcaatgtcctcctctcagatgcaagcctgtctggtgctgacgctgtcatctgtatgcccctactgatcctgatgcttcccaccaagtgtaaaagtaaatacaggggatgatgtagtgcttgtttgaaggagagcacctaacatttactcagtgcctgttatgtaccaaacactgtaggagggcctttgccttttactgcttctcacatccaccctgtgaaggtggaactgtccatttcacaatgaaaaagaaagctgaccgcaacacctgtaggctgcagtgtccatgggcaacatttattgagtgttgcgatgcgccaatcacggtgcaaagcatttcacacacatcagggcattcaatccctgcagtggggctctgagaatgtggcatcttcattatttccatttggcaggtgagagaactgtggtgcagggaggttatgtggatgggactgtaagtgctacagctgggactttaaacctagggtagtctgattctaaaatctatgctctcccacattcatttattttagctaagagaggagagttcaagttacttctacccatgctgagaagtggggctgggctgtggtgggagatgggaagatggagagaaaggcatgaatggaggacctgttgccgttcaaaagaggggaaaagagagaatttatattctccttaaaacacaagctcatttgaaataaacagaaaagaacgagaactactgtgtgtctggcccttgcaaggtgctagtggtaagaagctgacagagcctcctcagttccagcccccaaagcctccttgactgccttttcagggtgatggatgcttcagcgtcttcccttgcccatgctgctcttctcataacaacagtgccgcccaggctccccgctaagcaccgacacacagtagcttctttcatcctctccaccagctcccacgttactattattatcccttttctctgtgaggttatggcaacatcagtaactatctgaggtctatgagctgggaggctgatgctgacttccatacctcttggcctttaaagcaagttctcttcccactctacacagctggaccctgtatgggataatttgaggggcttcctccaaaatgccctctgcctccaattaattggtcctgatattcttccactaggattgacaggagcctgttatgattgtgcactgtgagtgctctgatggcagaagctatctgtgtcattcaccaagaggtccccagcccagtgccagcacagagagagctttcaataaaggtgtaactgagagaaaacattaccccagctcatatccttgcacccaggaagagtcaaagcaaggca

SEQ ID NO: 49457 - DNA, 1702 bp, Homo sapiens
ttatggtgactattatgtcaattatttggaagaagagaagtccagcaagtgaaggctaaagcagatatgtatgaatgaaggtgagaggcgaggcgtttatgtgcaaggcctagccagttatgcattcttcccaacacaaacaagtcacaaacaagtaaagagcagataagcccactctattggttaaaacgttacactgcgtcagccccatattcatgctgcggggtgagtgggcagaacagagggaggtttcctgcagggtctgagaaaccactgcaggtcactaaacacgcagtgatgggggaaagccacgaggcagcagggattcctgttgaatccattaaatcccattcccctctcaatgtcctcctctcagatgcaagcctgtctggtgctgacgctgtcatctgtatgcccctactgatcctgatgcttcccaccaagtgtaaaagtaaatacaggggatgatgtagtgcttgtttgaaggagagcacctaacatttactcagtgcctgttatgtaccaaacactgtaggagggcctttgccttttactgcttctcacatccaccctgtgaaggtggaactgtccatttcacaatgaaaaagaaagctgaccgcaacacctgtaggctgcagtgtccatgggcaacatttattgagtgttgcgatgcgccaatcacggtgcaaagcatttcacacacatcagggcattcaatccctgcagtggggctctgagaatgtggcatcttcattatttccatttggcaggtgagagaactgtggtgcagggaggttatgtggatgggactgtaagtgctacagctgggactttaaacctagggtagtctgattctaaaatctatgctctcccacattcatttattttagctaagagaggagagttcaagttacttctacccatgctgagaagtggggctgggctgtggtgggagatgggaagatggagagaaaggcatgaatggaggacctgttgccgttcaaaagaggggaaaagagagaatttatattctccttaaaacacaagctcatttgaaataaacagaaaagaacgagaactactgtgtgtctggcccttgcaaggtgctagtggtaagaagctgacagagcctcctcagttccagcccccaaagcctccttgactgccttttcagggtgatggatgcttcagcgtcttcccttgcccatgctgctcttctcataacaacagtgccgcccaggctccccgctaagcaccgacacacagtagcttctttcatcctctccaccagctcccacgttactattattatcccttttctctgtgaggttatggcaacatcagtaactatctgaggtctatgagctgggaggctgatgctgacttccatacctcttggcctttaaagcaagttmtcttcccactctacacagctggaccctgtatgggataatttgaggggcttcctccaaaatgccctctgcctccaattaattggtcctgatattcttccactaggattgacaggagcctgttatgattgtgcactgtgagtgctctgatggcagaagctatctgtgtcattcaccaagaggtccccagcccagtgccagcacagagagagctttcaataaaggtgtaactgagagaaaacattaccccagctcatatccttgcacccaggaagagtcaaagcaaggca

SEQ ID NO: 49458 - DNA, 638 bp, Homo sapiens
ctgtgatattttagatatgctcatttttatttataataattgcacaatgttaattaaagcatgtgtgcttcattgacacatttctaaagagaaatggcaagcaatgttttttataacagaatattttttgtttttttacaaacagaatattaatagacaagtgtcttagtcttattcacctccacggacacatcataggtaaaagaaagttatctaactactaaatccacaacataaattagtcctaatagcagaaggaatttttcaaatatagagaattaaaaatatttacttcctaatttgcaggtatgggataacacagtgaaccattattttcccaatgactaatgactgatgacrcaaaaatcatacctaggtaaaagattcattcaaagtgcaaaatagcccaatgaatcttaatgttatagcatatgaaaagttcatcgctgaacagatcccaaattgcaactaagctttaagaaaatatttcttattgatttttgatagaatatcaaaggaaactttgcacaattatctgcaaaggctatcaaaatactcctttcatttttctgcttcatatctgcatagaaatgtattttcttcatatttgtcaacaaaaactacgtatcacaaaagct

SEQ ID NO: 49459 - DNA, 585 bp, Homo sapiens
tgaccacaagcagatacaatttcactttgtgggattttcccagcttttccttgcattaggattgcaaagcttgtaacaccagctgtgtctgagccagccctccaaaaaaggcaattgtgttccctgatggaatcgctgcacacaagagctgctgccagctctgctccttgagcagccttttcaggattgtggggctgcttccagcccctcctccccactcaccagttaatgatgttggcccctcaaacagcccatggtcctttaaaaggcctaggaaaagaaagggaaaaataaagcatactcttcctctctcwttccctgggaatccatttttatttttttattttcttcatcaccaagattctcatcaatcttgtatttatttcatcaatacacatttatttataaattaccatccttgtccttggcacttatgttaggggttggggaaaataagcttaaacaaggcaggtgctatttctaccaggactcataaaacaacagggaactggaaatgggatgataataataataataataatagtaataccagtccacaatcccttatccaaaatctttgaggcc

SEQ ID NO: 49460 - DNA, 585 bp, Homo sapiens
tgaccacaagcagatacaatttcactttgtgggattttcccagcttttccttgcattaggattgcaaagcttgtaacaccagctgtgtctgagccagccctccaaaaaaggcaattgtgttccctgatggaatcgctgcacacaagagctgctgccagctctgctccttgagcagccttttcaggattgtggggctgcttccagcccctcctccccactcaccagttaatgatgttggcccctcaaacagcccatggtcctttaaaaggcctaggaaaagaaagggaaaaataaagcatactcttcctctctctttccctgggamtccatttttatttttttattttcttcatcaccaagattctcatcaatcttgtatttatttcatcaatacacatttatttataaattaccatccttgtccttggcacttatgttaggggttggggaaaataagcttaaacaaggcaggtgctatttctaccaggactcataaaacaacagggaactggaaatgggatgataataataataataataatagtaataccagtccacaatcccttatccaaaatctttgaggcc

SEQ ID NO: 49461 - DNA, 1525 bp, Homo sapiens
aattggatttgcccttcttcacatttttccatggtagtaaaataaatgtctttatatagacatgagtgttatgtatatgctgagagatgctgaaagtttctttcagtttgaataccctgatgggaattagaacgttgaatttattccatctgaatgtccttctcagtcctgtgtttcagctrttcatactgacccactgtctttccttcctgttaagcagtaaggcagacagactagctctttttaagaactcgttagcttggtttgtatgtgtttgggtaagtcacaaatgtatttcaaatcttgatgatttgtggagaaggcatcaccaaccaggagagtagaatcagggaatcctgaaaggaaaggttcattacttgtcccataacatctttcattattttacttaacaaacaatgaacaatatattataaacataaagaaaaaatattaaactttgaacccttctagtgactctcagctttttatgggagacatataagcaatatgacagtagactctgtgtaataatagatgagaagtcaactgtttcaaaggcaaagaagaaaagatcttgactatgtctggggactgctaaaaggcttccccagaggtagagacagttggatagggtatcaaagaatgaactcataagatagatttaggaagagccgtctttttagacaacaagatatacaaattcatgggggagtgactgagcatcctgtgtccgaggcaaattgtttgatgtgactaaagcaacatgtatacctgaggcagttgcaaaaacttgtagtaagagagccataggggggtaacctgtgtcttgtgaaggagtttgtaattcagtgttgatgagaggtgatctggataagtttttagcttgcggcaatttcaaaagccataatgctatagcatctgatgggtgtgattagcagctggtaaatgttttcttctcccgcttgttccctgtttaagctgagttcaagacactccatttccagggacctaattgggggatggatacagttcatctccatctctgtggaaaggattgattcaatgatatgcaagatatacaaaagcctctgtaatctttaaagacttcctcttatgagctgaactaaggccatcacagtaggataagggagagactgaaaggaatctatgtggaaagagaagtgacaggatcttgacaatggcctagtgaaccatcctgagtcatggcaaatgagtggatgattattcagagagctgcaactggaatatgagagaaaagataacattttccactcggcaaagggagtaggtatgtggaagatctatggtggaggagacacagcttaggatcccatgttcaacttaagttgatggctcatacataatcaaagcatctaattgttcttgatctttctagagcagcgttcagtatgttttaaatgactgctcctccagtaacattgttaaatgggccctagctaacttccagttacctatagttacttagaattacatataagacagc

SEQ ID NO: 49462 - DNA, 1525 bp, Homo sapiens
aattggatttgcccttcttcacatttttccatggtagtaaaataaatgtctttatatagacatgagtgttatgtatatgctgagagatgctgaaagtttctttcagtttgaataccctgatgggaattagaacgttgaatttattccatctgaatgtccttctcagtcctgtgtttcagctgttcatactgacccactgtctttccttcctgttaagcagtaaggcagacagactagctctttttaagaactcgttagcttggtttgtatgtgtttgggtaagtcacaaatgtakttcaaatcttgatgatttgtggagaaggcatcaccaaccaggagagtagaatcagggaatcctgaaaggaaaggttcattacttgtcccataacatctttcattattttacttaacaaacaatgaacaatatattataaacataaagaaaaaatattaaactttgaacccttctagtgactctcagctttttatgggagacatataagcaatatgacagtagactctgtgtaataatagatgagaagtcaactgtttcaaaggcaaagaagaaaagatcttgactatgtctggggactgctaaaaggcttccccagaggtagagacagttggatagggtatcaaagaatgaactcataagatagatttaggaagagccgtctttttagacaacaagatatacaaattcatgggggagtgactgagcatcctgtgtccgaggcaaattgtttgatgtgactaaagcaacatgtatacctgaggcagttgcaaaaacttgtagtaagagagccataggggggtaacctgtgtcttgtgaaggagtttgtaattcagtgttgatgagaggtgatctggataagtttttagcttgcggcaatttcaaaagccataatgctatagcatctgatgggtgtgattagcagctggtaaatgttttcttctcccgcttgttccctgtttaagctgagttcaagacactccatttccagggacctaattgggggatggatacagttcatctccatctctgtggaaaggattgattcaatgatatgcaagatatacaaaagcctctgtaatctttaaagacttcctcttatgagctgaactaaggccatcacagtaggataagggagagactgaaaggaatctatgtggaaagagaagtgacaggatcttgacaatggcctagtgaaccatcctgagtcatggcaaatgagtggatgattattcagagagctgcaactggaatatgagagaaaagataacattttccactcggcaaagggagtaggtatgtggaagatctatggtggaggagacacagcttaggatcccatgttcaacttaagttgatggctcatacataatcaaagcatctaattgttcttgatctttctagagcagcgttcagtatgttttaaatgactgctcctccagtaacattgttaaatgggccctagctaacttccagttacctatagttacttagaattacatataagacagc

SEQ ID NO: 49463 - DNA, 1897 bp, Homo sapiens
caccccacttattgtcgataatcttttcttgaaaataacatattctgccctaaagtgctcacagtgagtctacttcccattattttaagtgggaaacgttataatgtgttatcaatttaaaacccccttctagttatttttttgagacagtctcattctgtcactcaggctggagtgcagtggcacgatcttggctcactgcagcctccrcctcccgggttcaagcaattctcctgcctcaccctcccaaagttctggcattataggcgtgagccaccatgcccagcctactttgattctttctccacagttttctttaatacttcaactttttggggattcattatgtgaacaatagggaaaaataagagcttattgtgaaaggcactgtagaaacttgttcagaataaatgaataatagcagagaatggccacttgtccctctcttagttctagcagcagttaagatttgttgatatatagtgaacttttgaaaagcctaagtgtgagtctgacattataccaattcagaatgtaactcgaaaatgtactcatgcattgttttgtttaaaatgttatgttgaaatttggagacagaaacataaattttcctatataaacattgaccagaaacactgggtatagagagttatctttggtctgtaatgactatatagtaaaagccaagaggcattctccaagggagtagtattctatgaagtatgctattatttattgaagtgcatgcatacattgcatacttactaagtgtatgcatatgtatttttgtaatagagactttattaaggatttagtaagaaacaaaggaggtttatgaaacataacacctagcataattaatataaattcccatcagacatcactgtcttctatatctctctttgtctctctcttttaatatactcgttgatgttttgagattttactgatttggaaaaaaaataaaatcaagaaaatcatgaaaaaaattaggattgctagcatagaaaatacagttgttgccgggcgcagtggctcacacctgtaatcccagcactttgggaggccaaggcaggtggatcatgaggtcaggagatcgagaccattcctggctaacacggtgaaaccccgtctctactaaaaatacgaaaaataagctgggcatggtggcgggcgcctgtagtcccagctactcgggaggctgagggaggagaatggcatgaacccggaaggcggagcttgcagtgagtcgagattgtgccactgcactccagcctgggtgacagagtgagactccgtctcaaaaaaaaaaaaaaagaaaagaaaatacagttgttactgaacataaattcactttttatcaccacgaagtgccaggatatgaaattcatcacgagaaattctaggtattttggtaagagtgctattttaacgtaagtaccacaaagggaactataatgaaaaaaatggaatgagtgtaatgaagtcatccatgttctcacactatagataaaaccctcaaatctctgatgtagataaccagaagaaggagattcattctgtgaaaaataaaaaaagttggatgctaaagtgggtaaggacagatttgaatcagtaatgtgctattacaataagaagagtcacacatgaattgcactcaactttgatttgtgtagagacaactggtcattttaaaggaaagtgaggaaactgggagaggttgagtgaggctcagagttagctaagtgaaaagttccagatagtgggaaggggggattggtccatgtggaacccacctgggtgctctagctggtatttatcaaaattagtctcctaccttctcacagagactgaaagactgaaaggccctgttttcagctcttggttggaacaaaca

SEQ ID NO: 49464 - DNA, 1897 bp, Homo sapiens
caccccacttattgtcgataatcttttcttgaaaataacatattctgccctaaagtgctcacagtgagtctacttcccattattttaagtgggaaacgttataatgtgttatcaatttaaaacccccttctagttatttttttgagacagtctcattctgtcactcaggctggagtgcagtggcacgatcttggctcactgcagcctccgcctcccgggttcaagcaattctcctgcctcaccctcccaaagttctggcattataggcrtgagccaccatgcccagcctactttgattctttctccacagttttctttaatacttcaactttttggggattcattatgtgaacaatagggaaaaataagagcttattgtgaaaggcactgtagaaacttgttcagaataaatgaataatagcagagaatggccacttgtccctctcttagttctagcagcagttaagatttgttgatatatagtgaacttttgaaaagcctaagtgtgagtctgacattataccaattcagaatgtaactcgaaaatgtactcatgcattgttttgtttaaaatgttatgttgaaatttggagacagaaacataaattttcctatataaacattgaccagaaacactgggtatagagagttatctttggtctgtaatgactatatagtaaaagccaagaggcattctccaagggagtagtattctatgaagtatgctattatttattgaagtgcatgcatacattgcatacttactaagtgtatgcatatgtatttttgtaatagagactttattaaggatttagtaagaaacaaaggaggtttatgaaacataacacctagcataattaatataaattcccatcagacatcactgtcttctatatctctctttgtctctctcttttaatatactcgttgatgttttgagattttactgatttggaaaaaaaataaaatcaagaaaatcatgaaaaaaattaggattgctagcatagaaaatacagttgttgccgggcgcagtggctcacacctgtaatcccagcactttgggaggccaaggcaggtggatcatgaggtcaggagatcgagaccattcctggctaacacggtgaaaccccgtctctactaaaaatacgaaaaataagctgggcatggtggcgggcgcctgtagtcccagctactcgggaggctgagggaggagaatggcatgaacccggaaggcggagcttgcagtgagtcgagattgtgccactgcactccagcctgggtgacagagtgagactccgtctcaaaaaaaaaaaaaaagaaaagaaaatacagttgttactgaacataaattcactttttatcaccacgaagtgccaggatatgaaattcatcacgagaaattctaggtattttggtaagagtgctattttaacgtaagtaccacaaagggaactataatgaaaaaaatggaatgagtgtaatgaagtcatccatgttctcacactatagataaaaccctcaaatctctgatgtagataaccagaagaaggagattcattctgtgaaaaataaaaaaagttggatgctaaagtgggtaaggacagatttgaatcagtaatgtgctattacaataagaagagtcacacatgaattgcactcaactttgatttgtgtagagacaactggtcattttaaaggaaagtgaggaaactgggagaggttgagtgaggctcagagttagctaagtgaaaagttccagatagtgggaaggggggattggtccatgtggaacccacctgggtgctctagctggtatttatcaaaattagtctcctaccttctcacagagactgaaagactgaaaggccctgttttcagctcttggttggaacaaaca

SEQ ID NO: 49465 - DNA, 1897 bp, Homo sapiens
caccccacttattgtcgataatcttttcttgaaaataacatattctgccctaaagtgctcacagtgagtctacttcccattattttaagtgggaaacgttataatgtgttatcaatttaaaacccccttctagttatttttttgagacagtctcattctgtcactcaggctggagtgcagtggcacgatcttggctcactgcagcctccgcctcccgggttcaagcaattctcctgcctcaccctcccaaagttctggcattataggcgtgagccaccatgcccagcctactttgattctttctccacagttttctttaatacttcaactttttggggattcattatgtgaacaatagggaaaaataagagcttattgtgaaaggcactgtagaaacttgttcagaataaatgaataatagcagagaatggccacttgtccctctcttagttctagcagcagttaagatttgttgatatatagtgaacttttgaaaagcctaagtgtgagtctgacattataccaattcagaatgtaactcgaaaatgtactcatgcattgttttgtttaaaatgttatgttgaaatttggagacagaaacataaattttcctatataaacattgaccagaaacactgggtatagagagttatctttggtctgtaatgactatatagtaaaagccaagaggcattctccaagggagtagtattctatgaagtatgctattatttattgaagtgcatgcatacattgcatacttactaagtgtatgcatatgtatttttgtaatagagactttattaaggatttagtaagaaacaaaggaggtttatgaaacataacacctagcataattaatataaattcccatcagacatcactgtcttctatatctctctttgtctctctcttttaatatactcgttgatgttttgagattttactgatttggaaaaaaaataaaatcaagaaaatcatgaaaaaaattaggattgctagcatagaaaatacagttgttgccgggcgcagtggctcacacctgtaatcccagcactttgggaggccaaggcaggtggatcatgaggtcaggagatcgagaccattcctggctaacacggtgaaaccccgtctctactaaaaatacgaaaaataagctgggcatggtggcgggcgcctgtagtcccagctactcgggaggctgagggaggagaatggcatgaacccggaaggcggagcttgcagtgagtcgagattgtgccactgcactccagcctgggtgacagagtgagactccgtctcaaaaaaaaaaaaaaagaaaagaaaatacagttgttactgaacataaattcactttttatcaccacgaagtgccaggatatgaaattcatcacgagaaattctaggtattttggtaagagtgctattttaacgtaagtaccacaaagggaactataatgaaaaaaatggaatgagtstaatgaagtcatccatgttctcacactatagataaaaccctcaaatctctgatgtagataaccagaagaaggagattcattctgtgaaaaataaaaaaagttggatgctaaagtgggtaaggacagatttgaatcagtaatgtgctattacaataagaagagtcacacatgaattgcactcaactttgatttgtgtagagacaactggtcattttaaaggaaagtgaggaaactgggagaggttgagtgaggctcagagttagctaagtgaaaagttccagatagtgggaaggggggattggtccatgtggaacccacctgggtgctctagctggtatttatcaaaattagtctcctaccttctcacagagactgaaagactgaaaggccctgttttcagctcttggttggaacaaaca

SEQ ID NO: 49466 - DNA, 571 bp, Homo sapiens
ctcactcgtatttgtatctccagtacttaacatagtgtctgtctgtgctattttaaaaatttatatttatttttattttttaagttgacttcgtaattgtayatattcatgggatacatactgatgtttttttaaaatgtacatgtaatgcttttatttaaaaaaatcttttattttaggttcaggggtacatgtgcaggtttgttgtagaggtaaatttgtgtcataggggtatgttgtacagaatatttagtcacccaggtactaagcctagtacccaatagttattttttctgttcctctccctctgccagcctccatccccaagttggcccaagtgtttgttgttcccctctttgtgtccatgtgttctcatcgtttagttccagcttataagtgagaatatgcagtatttggttttctgttcctgcaatagtttgctaaggattatggcctccagctccatccatgttcctgcagaggacatgatcttattcttttcaatgactgcatagtattccatggtatatatgtaccacattttaaatatccattctaccattgatgggta

SEQ ID NO: 49467 - DNA, 571 bp, Homo sapiens
ctcactcgtatttgtatctccagtacttaacatagtgtctgtctgtgctattttaaaaatttatatttatttttattttttaagttgacttcgtaattgtacatattcatgggatacatactgatgtttttttaaaatgtacatgtaatgcttttatttaaaaaaatcttttattttaggttcaggggtacatgtgcaggtttgttgtagaggtaaatttgtgtcataggggtatgttgtacagaatatttagtcacccaggtactaagcctagtacccaatagttattttttctgttcctctccctctgccagcctccatccccaagttggcccaagtgtttgttgttcccctctttgtgtccatgtgttctcatcgtttagttccagcttataartgagaatatgcagtatttggttttctgttcctgcaatagtttgctaaggattatggcctccagctccatccatgttcctgcagaggacatgatcttattcttttcaatgactgcatagtattccatggtatatatgtaccacattttaaatatccattctaccattgatgggta

SEQ ID NO: 49468 - DNA, 605 bp, Homo sapiens
gtaaatgaacacatcacagaggatctgaaacatgctaaaatccagtcaaatgcctgtctgtgggttttttatgggccactttctattctaatcctctgttctttgcctgctctatgactcccctggatctgcccctctcatatcaggattaactgcaggcattctttcttactgacctatttggacctacttctccagctaggtccttggcactgtatcctggagataatccatggtcagcctttggctccacaccctgaagctttgtggaatgggtgctcctgccttcccttgctcctgagagcttgactcagcttggcctagttggccatggttcctcacagtatgtgagtgtatgggagtgtgagcagtctttatctcctttgtgtattgcctggagtctaagagggaggaaactgaaaygctgctcagagttgtttatttatttattttgagatagggtctcactctgttgtccaggctagagtgcagtggtatgactgaagctcactgcaaccttgacctcctaggcttaagcaatcctcccgcctcagcagccagcttatgccatcacacccgacttatttatttatttatttatttta

SEQ ID NO: 49469 - DNA, 627 bp, Homo sapiens
tttgtttttgcttttgtttttttgagacaggaactcgctctgttgctcaggctgcagagcagcagcgcgatcatggctccctgcagcctcaaactctcaggctcaagtggtctcccacctcagcctcacaagcagctaggactacagacgcaggccaccatgctcagctaatttttttgkttttttttgtattgagacagggtctcactatgttagccaggctgatctcaaattcctgagctcaagctatcttcttgccttggcctcccaacgtgctgggcgtgagccaccgtgcagacccagggattcttgaattctgttctctgcaaatactgatgtgtctgccacaagccagacccaggggttaccaccagattagagtaatgacaatccttcctaatatttagaaaaatatatcacttaacaaaaaatgttctcaattttaagtttcactcccatatatattttcttagacttttagtgcaagcttccatttgtcagctacctatcagccagataaaacaaatgaacaaacggcaaaagaatattaatgcagaaagcaggaaacaaacagcgaatcactctgagtgtgacagtcaggtttgcttgtagacatgtgggcttaca

SEQ ID NO: 49470 - DNA, 627 bp, Homo sapiens
tttgtttttgcttttgtttttttgagacaggaactcgctctgttgctcaggctgcagagcagcagcgcgatcatggctccctgcagcctcaaactctcaggctcaagtggtctcccacctcagcctcacaagcagctaggactacagacgcaggccaccatgctcagctaatttttttggttttttttgtattgagacagggtctcactatgttagccaggctgatctcaaattcctgagctcaagctatcttcttgccttggcctcccaacgtgctgggcgtgagccacygtgcagacccagggattcttgaattctgttctctgcaaatactgatgtgtctgccacaagccagacccaggggttaccaccagattagagtaatgacaatccttcctaatatttagaaaaatatatcacttaacaaaaaatgttctcaattttaagtttcactcccatatatattttcttagacttttagtgcaagcttccatttgtcagctacctatcagccagataaaacaaatgaacaaacggcaaaagaatattaatgcagaaagcaggaaacaaacagcgaatcactctgagtgtgacagtcaggtttgcttgtagacatgtgggcttaca

SEQ ID NO: 49471 - DNA, 525 bp, Homo sapiens
gattttatttataagacattatagcaatggagaacagataagttgtcagggatcaagttcaaggagagctggtcatggtggtagtggtggttgaccataaaggaatagcaaaagtgaatttagtgtggtaatggagagttctatatcttaaatgcttctgttttcaagctacttaaaatttattagggcagtagacttacacagaactctccaaaaagataattcagaagcataataaaaagtgatttaagctgggcgcggtggctcatgcctgtaatcccagcactttgagaggccgaggcggggtggatygcctgaggtcaggagttcgagatcagcctggccaacatagtgaaaccctatctctactaaaaatacaaaaaattagctgggcatgtgatgggcacctgtactcccagctacttgggaggctgaggcaggagaattgctagaacctaggaggcagaggttgcagtgaactgagatcgcaccattgtactccagcctgggcaacttcactgggca

SEQ ID NO: 49472 - DNA, 525 bp, Homo sapiens
gattttatttataagacattatagcaatggagaacagataagttgtcagggatcaagttcaaggagagctggtcatggtggtagtggtggttgaccataaaggaatagcaaaagtgaatttagtgtggtaatggagagttctatatcttaaatgcttctgttttcaagctacttaaaatttattagggcagtagacttacacagaactctccaaaaagataattcagaagcataataaaaagtgatttaagctgggcgcggtggctcatgcctgtaatcccagcactttgagaggccgaggcggggtggatcgcctgaggtcaggagttcgagatcagcctggccaacatagtgaaaccctatctctactaaaaatacaaaaaattagctgggcatgtgatgggcacctgtactcccagctacttgggaggctgaggcaggagaattgctagaayctaggaggcagaggttgcagtgaactgagatcgcaccattgtactccagcctgggcaacttcactgggca

SEQ ID NO: 49473 - DNA, 560 bp, Homo sapiens
tattttatttagggtttccccwgaaacagactctgagataacagttgaagtgcaagtagttgatttgatgggcaataatttgggaggcactggaaggaaaatggggtgagagaaaggggagaaggggcatttaaggcagcaaagtgagagactaagacttgcttgcaggtattttgttggacaagtgatcataggaaacaggagtgaaggacattgggtgtgaaaggggaaggtggaaaaaaaccaatacaaacattgattaaggtggccatggttatgaatggctaggactcactacctcaggatcttctgaggacccttctgaaacacatctcagaactgtccatttatctctctagaaaatcaaatggataaacattgattcattaacctagcacacaacacagtgtgtggggaaagtatatctcagttttggagtcaaatggaacggcttttgtatcttggtactgcctacttactagctacatgggatcattgtaataccttcctgaaaattttatcttatatctgtaaaagacggagtaatattgcctattttt

SEQ ID NO: 49474 - DNA, 547 bp, Homo sapiens
tctttttcttcattcggtcagtattctgagaatttgctatgtgccaggcactgctacaattattatacatacaaaaacagttaagacatggactctgactttaaaaatctcatggcctgatgaggaatgccaatcaataagtagataattacagcacagagtgatcaatggatgycataacagagaggagtgcagaccacagcaggaggagaggaaaggcatcccctgactttgaaggccctcttccttaatatttcttggtgtcagcatctggttcaaaatctctctatccttccttgcctattttttcttccttcaaagatcattgaataacttcatcttagagtttcatgagatatatccccattttctttctgtctttttcaaaatgacccatcccatggtcctcatctctcaggccacgcttgtaagataaggcagtgtctggtgggaacatttcttaggaggtcagaaaaaccaagtaagatgggctgggttgatttctcaggaaggctgaaaccatagaaagacactgtaggaaaaaaaa

SEQ ID NO: 49475 - DNA, 590 bp, Homo sapiens
tctcagctagaaaaggttttccacatccacagtcatgatgggagcctttcattcctcagaaataatcccttttcaggtcatcaaaaaagagtacaactgccacagctcatgaggcagtatcttcatgagcccagagcacatacaaatcctaagggaactaccgtagtacagcgctcattcttggcaccrgaacaaatgaaacatattctatcctgcacacacctgccaaagcaggccactttcctcttctgggagatttaaaaacctccccaaaatgttattactcccatccccaatacacagaaaaagggggaaaggctgtttccagtgctccacctttaaacaactgtaaatgtcagtactcacagtggcatattacaaagtaatagaccgcgcacttgagggcaaaccacatattgagctaatgaagagctcactgtgattaggattcgatcaaacataacagcagaacataaggaaattttatctgaattccgtaatgaatatacaggctgtactaacattaaaaaagcatggcagcctatcccaaaccagcaagaacagttgtgtgcatacagtgggtctttgtg

SEQ ID NO: 49476 - DNA, 545 bp, Homo sapiens
taatgaaaatacttctaatacattcttttcctccttagagatccagagtcagtttctattgtttgcaactgagtcctggctggtaccctcacccttcctctagccactgggtcaggaagctggggtccttcttgactgttcctttccggttcacacaccactgtcactgagatccactaatcctgccccatgatgtcacctctgttgctctctgccacccctagccaggccttcattatatttacctgttgctgctgccccctgtcaatggctcctctggctgctgggctcttctggatgacggccatctacttctggtcaaacttcaaaatccaggatcagactacrtcctgcacaggaggttttggcaaggagaaaaaagataaaactggagaaaagaaagatgtccagtgactctgggtggagaaggatgagaaaagtcaggtgtacaaaacccaggtagaactcaggtgctaccgtgtctgcctgaggtcttgaggctgcacaagcttctctcccttcatgctacttttccttattttcta

SEQ ID NO: 49477 - DNA, 585 bp, Homo sapiens
gtttttaaaaagtttcttgggcgattcagatgtgcaaccaggattgagaaccactcgtttacatgtctttcttcctgtgtaactgttgaggctagaaaccgggagtccaaggcttcaagactcccagcacaaatgtctgaactataggaaatatgagaaatgggtttgttattgttattactaataaaataatcatggaggaagataaacagcaaatggaagatgatatagtttgcatatttttktctccaaatttcatgttgaaatttgatccccgttgttgaagatggggcctactgggaggtgtgatgggggcggatccctcatgaaaggcttggtgccatccttctggtaatgtgtgggttcttgctctattcgtttccaaaagaagtgattgttaggaaatgcctggcacctgcctcctctgtctttttcctcctctcttgccatgtggagcctgcacccctttgccttcccccataagtggaagcagcctgaggcctcaccagatgcagatgctggcgccatgcttcttgtacagcctgcagaaccatggtccaaataaacctctttctgttgtaaatt

SEQ ID NO: 49478 - DNA, 545 bp, Homo sapiens
gagattacatttatgatagttcagagtttatgaagcactgccatggctttttgctttttctcctcgtttgatacctgcaacaattcaatgagataggcaggaatcctcatgttgcagaaaaaaaaataaggttcagagagattgtaacttatcaggatcacagggcttctgccagtggcagagctggktctcaaaaaagtccagtggggctgggtgcagtggctcacacctgtaatcccagcactttgggaggccaaggagggtggatcacaaggtcaggagattgagaccatcctggctaacacagtgaaaccccgtctctactaaaaatacaaaaaattagccgggcgtggtggcatgcacctgtagtcccagctacttggtaggctgaggcaggagaattgcttgaaccagggaggcggaggttgcagtgagccaagatcgtgccactgcactccagcctggcgacagagcgagactccatctcacaaaaaaaaaaaaaaaaaaaaaaaagcccagtgttctccccatctattttagctcca

SEQ ID NO: 49479 - DNA, 545 bp, Homo sapiens
gagattacatttatgatagttcagagtttatgaagcactgccatggctttttgctttttctcctcgtttgatacctgcaacaattcaatgagataggcaggaatcctcatgttgcagaaaaaaaaataaggttcagagagattgtaacttatcaggatcacagggcttctgccagtggcagagctggttctcaaaaaagtccagtggggctgggtgcagtggctcacacctgtaatcccagcactttgggaggccaaggagggtggatcacaaggtcaggagattgagaccatcctggctaacacrgtgaaaccccgtctctactaaaaatacaaaaaattagccgggcgtggtggcatgcacctgtagtcccagctacttggtaggctgaggcaggagaattgcttgaaccagggaggcggaggttgcagtgagccaagatcgtgccactgcactccagcctggcgacagagcgagactccatctcacaaaaaaaaaaaaaaaaaaaaaaaagcccagtgttctccccatctattttagctcca

SEQ ID NO: 49480 - DNA, 545 bp, Homo sapiens
gagattacatttatgatagttcagagtttatgaagcactgccatggctttttgctttttctcctcgtttgatacctgcaacaattcaatgagataggcaggaatcctcatgttgcagaaaaaaaaataaggttcagagagattgtaacttatcaggatcacagggcttctgccagtggcagagctggttctcaaaaaagtccagtggggctgggtgcagtggctcacacctgtaatcccagcactttgggaggccaaggagggtggatcacaaggtcaggagattgagaccatcctggctaacacagtgaaaccccgtctctactaaaaatacaaaaaattagccgggcgtggtggcatgcacctgtagtcccagctacttggtaggctgaggcaggagaattgcttgaaccagggaggcggaggttgcagtgagccaagatcgtgccaytgcactccagcctggcgacagagcgagactccatctcacaaaaaaaaaaaaaaaaaaaaaaaagcccagtgttctccccatctattttagctcca

SEQ ID NO: 49481 - DNA, 610 bp, Homo sapiens
tttgtaagcctcagtttctttgtatgtaaaatgcaggtaataattgggcatacttcattaggtctttgtgaggattgaataaataatgcaagtaaaacacttagcaaagtatttcccataaagtaaccactcaattaatgctaattaagtgttatttactaacatcagagtttcctagtgtgaactctttgaagtactttaagttctgagaaaaacaaaattaattaaatgcaactctgtcgattccacagttaattagacctattcatgtttctattgactggattaacagaacggcagattttatggattctgttaaaacctatataaaaacactttaaaagaagccaagttattgactgcacaaaaacataatctcatctgatatcttttttatccccctgaggttattgtrtttttgtttaaggcaaaatcaagaactaattgggatgaaaataactaaagtttactttgtctgatttaagtcccaaactgactaataagtaatcccatttgatcaacagattcagtgaaaactgtcccccattctcaactaccatatggatattctgagaaataattaatgatgcagaaaaccattttttgtttt

SEQ ID NO: 49482 - DNA, 540 bp, Homo sapiens
tgaaaagctagtatgtctttttctcgtatttggaatgaaagtacccacattttacaatgtagtgttgagaatgtggctgccaataaatttagcacaatgcaatttatttaccttaaaaaacaaacaaaaacaaaaataaagaaaaatactgatttcaaatcagactcttaaaaagctggaacattagacctgatattttattatgatttttcccagaataagtttaatttctctttgactttcatagaaacactttccccttatagaaattgcactatctccaatttatttctagtttgagttgaaatgaatattttatcagattaattatgtgtcacatttttggtgggttttctcaattttaaaaaagaattcattttaaaaaataattattttcagagaccaaataaagacaataaaaatgactatcacataaaaatccttgttaaaaaagagatcttaaattatgttggctctccctcaaaactattaaattagaaaaygaaactaaagctccagtttgtagaggctgttggacct

SEQ ID NO: 49483 - DNA, 607 bp, Homo sapiens
aggcacatgccaccacaccccgctaatttttgtatttttagtagagacagggtttcaccatgttggccaggatggtctcaatctctcgaccttgtgatccgcccacctcggcctcccaaagtgctgggattacaggcgtgagcactgcgcctggcctatagttttatctttaggcctatgaactcttttgagttcatttctatacatatagtatactattctataatatttgagatccattttttcccatgtcatcatatttttgttttctggcactatttgctaatatctccattttaaggtgaaagaataaaagaaaaaaaatagtgtaattttaatgttcttagataaagaggatatggtattaattgcataaggaagtaagaaaagaaaaatgaggaacagaaagaggtagagaaggatagcaggagaaaggaaagaaaaagaaaaattaaaaaaaaatgggaaaagcaaggaagaaaagaaaaaatccaagcatttctctgaatcaatagccacatttttaygctttctattctaatagtttttaaagtcaagctctgtttccacgactacagatacaaagaagttactacctattggttca

SEQ ID NO: 49484 - DNA, 1651 bp, Homo sapiens
ataagacctttaaaaatcttattccttatttttatcactttacttgatggaaatttggggggacaatttaatgtagttgactcttcaaatattctgaagttttatttctgagatactaatgaatattaataagacttcaagtgatttgttggaaaaaaattaggaagaaagcaacagattgcagcattgtgaggatacagcttaaaataaagaaatagttattttagtttcacattaaagtataaactaaagttatctctcatatttatttttttctgttgcaaaacatgagttgaaaataaaacccacaaactcccaataaggagagcttggggcttgaagttcctagacacatgcaatatacacatacatacgtgaaactggtttaagtagctgatgattttaggagtgaaaatagcctcaatgcagctgtaaaaaggacacaacaggactttctttctcactatctccccatcctcatcctcaccatttctcagcaatactttctcagaaccatcttctttctcagcaaacctcttccacatgatctcaagatgactatcagcatattaactgttccatatttttttgtcaaagtccatatagggaagaaacaatctttttttccatagctaaacacctttaactgagtttcgctgactttgaattaacctatttttgtgtcttgtgcccatgtctgagtttattgctgttgccaggaagataaaaggctaattaccttaagaaaatttcaattaaattataaaactagcagtgaaatcaattccactcatttatatagctgggaaatttggagtactgctaggaagaaaaaagagaaaatgattataaaagaggaaaacatcaaatgaccactgaaatatttatgtggaaattcaagctaaatgtgaggaaataaaagtatcatcttaggtcaatccatggtggataaaactagaattccatctctgaaggtggcacatgccaaaaaaaaaaaaaaaaaaattaggacaaatgtgcgctagtcacaatgtcttctttagagattggggtagtccctcgactcactttaatcaactttttcatcttttgattgagttcaactacttttaattaatttctcaccaataaatttctgtgaagtaaaatataattttcttgttcctagaactttttttgtttgtttgttttttgttttaagacggagttttgctcttgttgcccaggctgtagtgcagtggcatgatctcagctcactgcaacctctgcctcccgggttcaagcgattctcctgcctcagcctcccaagtagctgggattacaggcatgcaccaccatgcctggctagttttgtatttttagtagagacaaggttttcccatgttgagcaggatggtctcaaactcccgacctcaggtgatccgcccacctcggcctcccgaagtgctgggattacaggcatgagccactgcaccccctagaatctttactggaaatggttagaagcctagtgatcaagtaaacatgactttattttgcaccctgctgaattacctgcmtcagattactatgtgggaaaaaaaaaatcccactttaaagttggcactaattctgggtgtatgcctaattgtcaaatgaagagaaaaatcag

SEQ ID NO: 49485 - DNA, 552 bp, Homo sapiens
gagctttacaggagtcctccctaatattaggcaatgctgagaagggccaagcaattcaagggggttgtatttgccacaaaggcaaggccaggacttaccactgtacagacaagacaagctgctactagtggtatcatccttgatgatttggaactggtcttaaaaaaaaaaatcccactcaaactccacttgtaccactaatagacacataagggattagacatctagctggtggacctgtgccaccagtattgaacagataaggtaattgatgatattgatgataatcataggagtaacaatagccaaagtttactgaggatttaataatcttcacagcaaccccttatcttaggcattgtaattatgaccattttaataataaggaaacatagatgctaagtaacttgcctatgatcacctggcaaaaagtggtatgagagggctgattctacgtttcaacttgggtcactcctgttatatatgaactgctcagtgcaacaggtcttggttgaatgtttatttygtgcctaacactctgggaggtatgag

SEQ ID NO: 49486 - DNA, 707 bp, Homo sapiens
tacaaaaaaattagctgggcatggtggtgcgcacctgtagtcccagctactcgggaagctgaggcaggagaatctcttgaacctaggaggcaaaggttgcagtgacccaagatygtgccactgcactcccgcctggcaacagagtaagactccatctcaaaataaaaataaaaaaaataataataataattgtgaattacatcaaaattggaattattaaaatacaatcagattcagacattaattttttcttagagtcagggtcccattctgtcacccaggctggagtgaagtggcatgctcatggctcactgcagccttgaactcctgggctcaagtgattctcacatctcagtctcctgagtagctgggactacaggcatgtgccatcactcctgactaagtttttctatttttagtagagacagggtctcactttgttggccaggctggtctcaaactcctggcctgaagtgatccttctgtcttagcctcccaaagtgctgggattccaggagtaagccaccacacccaacctcagaaagagtaattttaagaaaaaaattaatgtagaaatcactgttgatttaaaatatggagcatttcaagattggagagtcataaactaatttggaactatttaatactttttacatttgctagtagcagtgacagcagaaaatacatttccaagtggtagaatttaa

SEQ ID NO: 49487 - DNA, 621 bp, Homo sapiens
gtggtggataaaccagagctgtcaggctgagcaggagaggcccttctgggtgatgggggcacccaggggcagtgctcagccccaactcactccaggtgtacacttgccccagctgtggctcccctcaccctacccctccagctttctcctgcagagtcaaactactcaagtagggttgtggggtcatgagcctcagaccacggggagccatagcaggtggagacgttggggaccagacctaaagtcaaaaatgactgtccaaggtgaaaagggactgcggcaggcctgaaacaggatcactcagataacgacactttgttaagatcctatgatcctaaatcagctcagcagaggctggtgacctatgggtgggggtgggaaggatttccaggaggccagaagtctgaaccaagtaaaggatgcgtagcagttctttctgccagaatagtgtgggaagggtattccaggcggagggggcagctcggctgaagmcagggaggtacgagaagcgcaagcggggaggaagagagatgtcagggaagacccacttgtcaactctcaggggagagcggccggcgaggctcggaggcccgtgtggctggaggtcccgggctggggccg

SEQ ID NO: 49488 - DNA, 525 bp, Homo sapiens
ttcatttgtggcaactttacagaacataactaccaccagaaatgagaatcaactatatctcctgtttctccttctcttggcctgcttccttctctccaactcaatgtccatagtagggcaaggaacaggtcgcccacagctgtgcctcatagcctctgccaccagagaggggcttttcatgtttgaaaaatccgggaccaatcaactacrgtgggagtggggaagcttgcacatatacagggtgtctcccagtgaaactatataaaattcaggagcaccagttcctaaaagaacagaagactgctctcatatgcctggaaaaaagactgagcagacaaacatgtcactcattcacacatacacacacacatgcacatatttacttaattctcattgcacaagttttactatatccacataccacctgtaacattaccacctagttttccttaaattaactctttatttatttgcttaaatgtatttaaaaagaaaatttatatttctatcatatatagaaattga

SEQ ID NO: 49489 - DNA, 532 bp, Homo sapiens
aaagtggccccagactgtgctgtaatcaagcaactcattctgaatatgaatacacaaacagggcaaaataaatacactttcagacacaagagctgagagagcttgccatcaagacagttccaaaggagaggcttctgacaaaatgataattatctctgaggaaatttttcaaatgtgagtagaaatgaaaaacaaaaagggaaaaggtaaaaatagagtaacgtctaggctggggaaggaaatgaaatagaacaaagatgatcaaaataacatattttaggagaaggtgattggaattacagcattgaagattattttattaccagtagaaaggcagagatattaactttcttatttagttcaatttgcatgtaaattttctggaggaaccaattggaaaattaaaaacaaatttataaataactcattgatctaagaagcactgatatattaaaccacttaaatacatgaagcttggggctgggcacagtggctcactcctrtaattccagcactttgggaggccgaggcg

SEQ ID NO: 49490 - DNA, 582 bp, Homo sapiens
ctctaaaaacaaggtaagagaaccaacctgacaaagatttaaaagggtcaatgtttagtttaaagaagaagcaaagaagaagagaggtagccaggaaaagaacgagagacagcaagataagaaaactcagcacaaacaagcaagataaaaatagcctctcaccaccactgtccttttaaaattactttctatatttgagcttaagcgacaagtgaaatctcctctgtaatttcccatgtgttcagtttaatgaatttccggcaaatggtttcagtattggagggccaatttggacattgtgggggtggggctggtgagaaaatgaggggtatggaaatagactaacaaattgagctagaaaccaaatgaagaggtgattgaaggcatgtgaggaaggaaccaagtcctggaacttgttcaactccaagaaggactgggaattgatcttactctagctggtgtcacgatgatgtttcccttcatgctgtagagggagcccacagtcccaggctgcctkgcaactatgctttgtatcacattgcctattgtctaaagagctttgtttgtttaaacagaaggcaa

SEQ ID NO: 49491 - DNA, 582 bp, Homo sapiens
ctctaaaaacaaggtaagagaaccaacctgacaaagatttaaaagggtcaatgtttagtttaaagaagaagcaaagaagaagagaggtagccaggaaaagaacgagagacagcaagataagaaaactcagcacaaacaagcaagataaaaatagcctctcaccaccactgtccttttaaaattactttctatatttgagcttaagcgacaagtgaaatctcctctgtaatttcccatgtgttcagtttaatgaatttccggcaaatggtttcagtattggagggccaatttggacattgtgggggtggggctggtgagaaaatgaggggtatggaaatagactaacaaattgagctagaaaccaaatgaagaggtgattgaaggcatgtgaggaaggaaccaagtcctggaacttgttcaactccaagaaggactgggaattgatcttactctagctggtgtcacgatgatgtttcccttcatgctgtagagggagcccacagtcccaggctgcctggcaactaygctttgtatcacattgcctattgtctaaagagctttgtttgtttaaacagaaggcaa

SEQ ID NO: 49492 - DNA, 549 bp, Homo sapiens
caaataacttaagttctcttacttcatttccctatctgtaaaataagaaaaatcaactcgcctggtgggtttatgagactcaaataagacgatgtctggcaagccttatgcacagagctcaactcatacattcctgttcaactkttttttttttttgagacggagtctctccgtctctgtcgcccaggctggagtgcagtggcgcgatctcggctcactgcaaactccgcctcccaggttcacgccattctcctgcctcagcctcccgagtagctgggactacaggcgcccgccaccacgcccggctaattttttgtatttttagtagagacggggtttcactgtgttagccaggatggtctcaatttcctggcctcgtgatccgcccgcctcggcctcccaaagtgctgggattacaggcgtgagccatcgctcccggcctcagcatattttattaataggaactctggggcccagtctcatttcttccttaccacttgtaagagccgcagacgttggactgtccaacacctgctgtcattcttctgt

SEQ ID NO: 49493 - DNA, 528 bp, Homo sapiens
acagacgctacccatgcacacaaacctcaaacacacgtgcacaggcacatgagcacacacagtcacactaatgcacatctacacgtatccctaacacacacacgcacacacacgcgcctacacacacacacgcatacaagtgcagatagcacccacatacgggtactcaccacccacattcctgtaagcactcaaatacggacacacaggcacacgaggtgcaaacacgaacacaacatgtgatcacacacgcatctatttgggcccacacacgtgccacgccggcacattccagcctgcactcgcccatctccaggcacacgccatgtacactcatgcccatatgcgcacaagcggacacctgcccctacccccacacaggcactcacamcccaagtcccgggacctcccacaccccgggccgcagcgcactgtgcgagtggagggggtgagctccccagcagaggcgcaaggagggtgtagggtgcgcggtgtggctgtgggctgcggacaggggccgggggcgcg

SEQ ID NO: 49494 - DNA, 523 bp, Homo sapiens
aataataaagcttccatcccattgaaatacgctctatcgtttctatctttgcaaagagcgaatcgggcattatgtggtgaattgactgcaggcccggaaaacaggcgggcggcgggtgggctgcggccctggggctggggccgggccgcgtgcaccttgcygaggcccaccttggccccggctcccactgcagctcaggccgctcctcctccgtgtgtgtagatcatcctggaattctggcacatctttcctcggcatctgattaagttaacaatgtgctgctatttgcatgcagatttgccggggctttctctccagctgctcccagagacttggtctttctctgcgttgtgatagcacagcagtccctaaatgcaatctttgtcagacccaggtgtgctctcattgaggacgccttcgttccaagcaatttttctttctgtagcatttataaggctctattatagtatagccacatctggaggaaaattctcctattaattatatacttttaccactagga

SEQ ID NO: 49495 - DNA, 1506 bp, Homo sapiens
catggggtggttatgtctcaagttttggagcaaaactgggccgggctgggcaggacccatcgttggctttccttgcagcagaattttgattgctgttctcttgacacctgtcaagcaagagcatccactatccagcacggccatgcatctaactctctccagccctaagcccctaggaccaggctgccagcattacccagttttcgagatctttcaggattcagttctgcccacttgcgtccatctgcaacctggcagcctgagagatctccccaaaccctccatggctccccaccagcctgagagatctccccaaaccctccatggctccccagtgccctcaggataaacttggcattcaaggcccttcaggctctggctccggctgagcttattccccagctgccttcagccctcgtgccctctgttcttcctctgcccccaggtccctgtctcaggggcagccacatcaatcctagtccttgggcctgagctgtggccctcatcctgtgaatgtccccttcctcctcctccttgcagtggtcctcctcctgagcatctctgtcacccaccctctcctcctttccctgttctcttgcccaggccaccacagtgggcttccagccttcatctcacctcccctggtctaccctccactcaacactcaacagccagagggatctttctgtgtcttttttttttttttttttttttgagaccactctgtcgccagactggagtgcagtggcgcaatctcagctcactgcaacctccacctcccgggttcaagtgattctcctgcctcagcctcccaagtagctgggactacaggctctcgccaccacgcccagctaatttttgtatttttagtagagacggattttcaccatgctggccagactggtctcaaactcctggcctcaagcgatccgcctgcctcagcttcccaaagtgctgggattacaagtgtgagcccgtgcacctggccagatctttctatacctgaacatgcctgtcccctgctccaaaccctcccaccactcccagagccctcaggacacagctttggcccctccctgtggccaccagggcccctgcgagtctcgtgcagtgccacactttagccacactggccactcccagcttcctagggggactgtctgtatttcagagccttgatggtgttccttccttggcctgaatatgcttcacactcctcgcccacactccccmcatcctaccaactcaagcttctgtgcccctctccagaacccttctctggagctccctcttgaggcaaggcactgccccccaattcctgtgtatttcctgactgtggccttgagcactcttcatccttattagccagctaagagtgtgtgtgcttgcgcacgtgcatgtatgtgcacctgtaagagagcgagagagagacagagagggtaagcgtgctcttcaagacctcccatcacatagtacacagtccgacacatggctgatctttggtat

SEQ ID NO: 49496 - DNA, 540 bp, Homo sapiens
tgctttgctactctaaacctagtttgaaatcaacagtcttgagaatagatgaaaattttgatgaatagtggaattcttttaaatggaaacctcttacaygtgattttccttgccatctagaaataaaccatagtatttatgttgaatcaatcaatattatattttgtttttttcctcctcttctgagactcttattgtggaaatgttagacttttatgttttcctaaatgtccctgatattctacttatttagaacatcttttcattttttccattattctgattgggtaattttaatttgtctattttcaaatttgctggagtgttcacctgttgttatctgtgtcgtcccactgagtgcattcaccaccttttaaattttggtcactgtatgtatcagttctaaaatttccattttgttctctatattttaaatttcttgccttatattctattttcctgcaaatgtgtcagcatttgcttgtttgagctttttttttttcaagacagggtctcaactctgttacccaggctggagtg

SEQ ID NO: 49497 - DNA, 540 bp, Homo sapiens
tgctttgctactctaaacctagtttgaaatcaacagtcttgagaatagatgaaaattttgatgaatagtggaattcttttaaatggaaacctcttacatgtgattttccttgccatctagaaataaaccatagtatttatgttgaatcaatcaatattatrttttgtttttttcctcctcttctgagactcttattgtggaaatgttagacttttatgttttcctaaatgtccctgatattctacttatttagaacatcttttcattttttccattattctgattgggtaattttaatttgtctattttcaaatttgctggagtgttcacctgttgttatctgtgtcgtcccactgagtgcattcaccaccttttaaattttggtcactgtatgtatcagttctaaaatttccattttgttctctatattttaaatttcttgccttatattctattttcctgcaaatgtgtcagcatttgcttgtttgagctttttttttttcaagacagggtctcaactctgttacccaggctggagtg

SEQ ID NO: 49498 - DNA, 540 bp, Homo sapiens
tgctttgctactctaaacctagtttgaaatcaacagtcttgagaatagatgaaaattttgatgaatagtggaattcttttaaatggaaacctcttacatgtgattttccttgccatctagaaataaaccatagtatttatgttgaatcaatcaatattatattttgtttttttcctcctcttctgagactcttattgtggaaatgttagacttttatgttttcctaaatgtccctgatattctacttatttagaacatcttttcattttttccattattctgattgggtaattttaatttgtctattttcaaatttgctggagtgttcacctgttgttatctgtgtcgtcccactgagtgcattcaccaccttttaaattttggtcactgtatgtatcagttctaaaatttccattttgttctctatattttaaatttcttgscttatattctattttcctgcaaatgtgtcagcatttgcttgtttgagctttttttttttcaagacagggtctcaactctgttacccaggctggagtg

SEQ ID NO: 49499 - DNA, 860 bp, Homo sapiens
ggtgtggtggcacgtccctgtaaatctagctatttgggaggctgaggcagaagaatctcttgaacctgggaggcagaggttgtaggagccaagattgtgctaccgcactccagcctgggcaacagagcgagactcatattcaaaaaaaaaaaaaaaaaggccgggcgcagtggctcacgcctgtaatcccagcactttaggaggctgaggcgggtggatcacgaggtaaagagttcgagaccagccgggaaacatggtgaaatcctgtctctactaagaatacaaaaattagctgggtgtggtagcacctgcctgtaataccagctattcgggaggctgaggcaagagaatcgcttgaacccaggaggcggaggttgcagtgagcagagattgcaccactgcactccagtctgggtgacagggtgagactctgccctgaaaaaaaaaaaaaaaagaaaagttcaggtgtgcagcatacaacacaaacagccgtttagggcaatcctgtgaggggcgggtatagtagccttggggactttgaggtcctcattcagaatctcccccaccccccaaagtgctccaatgaggctgtattggtggccaccttccaccccacggaccccactgtgcttatcacctgcgggaaatctcacatctacttctggaccttggakgggggcagcttgagcaagcggcaaggcctctttgaggtgagtgccaggggtttgggggacaggctggccctgagagaggtagttagggacaggcagggaggtagcaagatcccccagagggtggcaggggtttgggattacagggacgctgagatgttgcctgctggggcctcagtttctttctcc

SEQ ID NO: 49500 - DNA, 846 bp, Homo sapiens
gcaggaggatcacttgaggtcagtagttcaagaccagcatggccaacatggtgaaaccctgtctctactaaaaatacaaaaattagcagacatagtagtgcatgcctgtaatcccagctactcgggaggctgaggcaaaagaatcacttgaacccgggaggcagaggttgcagtgagccgagattgtgccactgcactccagcctgggcaacagagttagacaccatctcaaacaataaaaaataaaataaaccttttggccagacgtggtggctcacatctgtagaatcccagcactttgggaggccaaggtgggcagatcacgaggtcaagagagggacaccatcctggccagcatggtgaagccctgtctctactaaaaatacaaaaattagctgggtgtggtggcgcacacctgtaatcccagctactcaggaggctgaggcaggagaattgcttgagcccgggaggtagaggttgcagagagatgagatcatgccactgcacttcagcctggcgacagagcaagaatctgtctcaaaaaataaaaataagcatgtcaaaggttcttgagaagatccagaacatgccttatctttaccatgtgagaacactggccaacttcatctttaataggaaaacttcaggccgggcgtggtggctcacgcctgtaatcccatcactttgggaggccgatacgggcagatcaggaggtcaggagatcgagaccaccttggctaacacggtgaaaccccgcctctactaaaaatacaaaaaaattagccaggcatggtggcrggtgcctgtagtcccagctactcgggaggctgaggcaggagaatggcg

SEQ ID NO: 49501 - DNA, 547 bp, Homo sapiens
cccccatggtcctagtcattcctccctcttgcctctctcctgaggtcacctccttacccagggctccagcttctaaattgaccatcggttccctctagaagtgagctctgagtttacatctcctgagctggaggtcattgcttctctcctctcggggtgggggtggtctcagaaacacttccattccgatcggtttgaatctgaactcatggcccccctccctacactgtcccccattttggtctagtccttcagtttcccagaccccacgctttggggtctcctgatgttctctttctctcatctgcacatcctgtccctcagcacgtctgctggtgctgcctggcacagtctctcctccgtcaattccttctctgagtcctcctgcctcccctggctccatcccttgccacctctctcctggatgcctcccacgggcgcctccctggtctccctgttgccgtgcccaatcctttcctccactctctcctcagtcccggacaggctttttccttccttccttccttccttccttycttccttcctc

SEQ ID NO: 49502 - DNA, 547 bp, Homo sapiens
atatgggcctggagtggagataggggcctggagtggagatatgggcctggagtggagatctgggccaggaagtgttgatctgggcctggagcctgggtctctccacagctgagagccctgttcttggcagcaggtagcagggaggctaagtttaccttcagcccagcaagggcctggctgccaagacacacagtgcagtgggggcagcagggtgccctggtttgcctgcagttggatcgtctatcatgatctttctttccagggttcttcttgctgcagggggcctggccactcatgggtgagtccgtccccaaaccttagggtgtcatctccccacataagaggatttttctgaaacaggagggaagtcctgtcggggagtctctcataaactaggaagaggggacccttggatactcggcccacatttctgacctcgccctcccyggcctttctttccctttcctgagtcaagctctgtgaagactggggtgagactggggtgctccaagctggggtgtgcagggaggaagtggtgtcagcagca

SEQ ID NO: 49503 - DNA, 1169 bp, Homo sapiens
tccttaaatagcaaagcctcagaaaaaacacaccttggctgggtggtgtgggactgtgcagctgaaagaaacagcacctgcatgttccaggtgagtaccccaaaagaccaggcagtcagccagtcagggaagaaacaggagaggtgccagaggctgtggctgtcagtcctgtatctgcccaagactcaatgcttctgccctattcacatttgagaaagtctgtacttctcccacacaaagcaggtggcctcgatctccgagccctcagatcgttgtgcatccgtcttctgacacacacacctgccctgggctcttaaggacttgggtggactgaggggtgggagatgccaactctgaytgaacgatgcctgcagaggaatcaaaggtgccacacagggcaatcttctctctgttttctgcacagcggagctgcccaagccctcggtcactagcaacaactccaaccctgtagagttttctacatataagtttaagttatctgtgaacagagataattttacttctttccgatttggatgtctgtttatttgtttgtttgctgcctaatttctccagctaggacttaaaatactatgttgaagagaagtggggcaagcaggcatccttgtcttgctcctggtcttacagggaaagctttcagtctttctccattgagtatccctctattatgttgaggtggtttccttccattcacagagtgtttttatttataaaagaatgttgaattttgtcaaatgcttttattggctaaatcttattactaattataggtctattcagatttttttgtgtgttccaggaatttgtccgtttcatctaggttatccaatttgttggcatacaattatttaccgcactcttttaatctttattatttctgtagaattggtagcaatgtcatcaatttttttgagagtaggtctcactctgtaacccaacccaagctggagtgcagtggcttgatcatagcttacttgcaggctgaaccccctgggctcaagtgatcctcctacctcagcctcctgagtagctgggactacaggcatatgccatcatgcctggctagtttaaaaaaaaaaaaatgtggagactgtgtcgccctatgttgcataggctggtcatgactttctggcctcaagcaaccctca

SEQ ID NO: 49504 - DNA, 1555 bp, Homo sapiens
tgcttaatggcaatgtcattaaatgtgttcaagaagagtctatgtccttccaaaattgtctaaattgctctcagaaagtattctgttctgggagcatctggctcaattgtccatgggttatatgtggatgtatcattcctgaatcactggcaccagtgcttaatgccaaacaaaacccctaaacctcaaactattaagtgttgagcaagatatttagcaacactgggagttctaaaagtacatcatattttggctcagatacctaggggaaaggacaggtttttaggattaaattgatttctgagcrtcattatctctcccacagaggccatacacaatttatgaggaaaaagcaaatcacactctcttcaaggatacatttatatgtcaaggtaatagatcagccttcttctgtttatgtcagttggtcagccaatgaagaatgtggctgaacatgcaaatgagctcagcagtctagaagcacgaggtcctatccctcattctcagtgaaacaaaaccactctgtaaatgcaaatgaagattttgcaatttgaagcaaaattgtataggtttccaataataatgtctagaaaaatctttaaaatttggtaagttaagctggtatgaagtcaaaagacatagagactgacagactctgcttatgtggggtttcctaaatatagttttaacagggactatctacaggttcaggcatcagttttattacttcacaatgatgagagtgaaaaaatcacttaccctgaccaagcatgtaagacaatgatttctagatcagatgatagctattaatttttcatgggagataaattgcacctctctacccattttctgaagggcagggcactccagagaccaaacaacaaaccaaaaacccggggagtgaactataaaggagaaattcagcatggcaaaaggagatttacatcaaattaacatatcttgagatgttattcttcttccctgcaggggtatttctgtctagacacctaggaatggtcattagaatccgcacttcaccctgaagggggctgacaatacatactaatttgcagtctctcactttgcattttctacagctgtggttctctctgcacatgctgcctatagggaatcacatcacatctcctatcatatcagaatcttttctattggaggcaaagagcttcgggaaacattttactgtcttgccactagattataacatatatcggattgattattctgacggatcctgctctcatctcattgcttagtggatattttaaatttaaattttatttccaaaatcattgtatttggatgcaatggggagggagaaaatacaaaagtgagaagaagaaacttacactcttaccattatttttgtcccttggaaatgctcctaggttcctagaattccttcaagagttataatttttagttcaaaaattatatgtggtcagtggtcagctaaaattggatgactttggccaagtatttaggtttcttaaatatatattatggacctcctactttttttttccaaattctattt

SEQ ID NO: 49505 - DNA, 852 bp, Homo sapiens
agacaagagtcttgctctgttgccagggctggagtgcagtggcgcgatctcagctcactgcaacctccgtctcccgggttcaagcgattctcctgcctcagccccctgagtagctgggactacaggtgtgccaccacacccacctaatttttgtagttttagtagagatggggtttcaccatgttggccaggatgatctcgatcttttgacctcgtgatccgccctcctgagcctcccaaagtgctgggattacaggtgtgagccaccacacccagccaagaaggaccatattccaaacattgttttatatcatattgtctatcttgtttgagtttcctgcatttttttttatgaatgatttaaaagacaccgatcaaacccatagttctagggcacatgagaatgtaatgttcaatatgtgcttgaagaacaaccatgcagggactgtcaatcagggctgcaaactaagatatttaaagagtagccaacagtcaggacgggtaagtcaaatttgagggactacagaattcaaggaaaagtcaggaatgtggggaatcttaactaatcaagaatttagggcrggacttagggagtcaattaatcaggcagctcaaagcagaactatacagctactgggatatgtaggggggtcatatatgcttatcgccattttataaggaggctgtcctattcaatgaaattatcttagaatgtgggaaaatttagcacctattctccaaaagcagaaaaaaggacagagtgcctctgtaacaatgtatgtctacacagacatgactacagggatttatggagggttcagtaagtgtcacactaaacaaagtctaggatga

SEQ ID NO: 49506 - DNA, 332 bp, Homo sapiens
caaaggtattgttgactgtgagcacaagtctaaagttcctctgatttaggaggaaacgtaaaggtttttcactcattttagacatacgggtgtacagacacaygccccgcaatgctgtggctctctttgtcttgcctctccagcctccagtcaggcacaagaaacgaaaggctctttcctgattaagcttcaagttcatattcttttgtacatagaaatgggaccatgcctaaggtttcctgaacctatttttaaattaagtgatttggagaggtaggaaatttaataataatattgtccaatattacatttttttctttgtatctcttggg

SEQ ID NO: 49507 - DNA, 332 bp, Homo sapiens
caaaggtattgttgactgtgagcacaagtctaaagttcctctgatttaggaggaaacgtaaaggtttttcactcattttagacatacgggtgtacagacacacgccccgcaatgctgtggctctctttgtcttgcctctccagcctccagtcaggcamaagaaacgaaaggctctttcctgattaagcttcaagttcatattcttttgtacatagaaatgggaccatgcctaaggtttcctgaacctatttttaaattaagtgatttggagaggtaggaaatttaataataatattgtccaatattacatttttttctttgtatctcttggg

SEQ ID NO: 49508 - DNA, 531 bp, Homo sapiens
gtactcctgagttggagatgggaaggtaagaaaagaatgtgtaagcatgaaaaatcaaaacatagtcaaccatctaattggccaactaccttctaacacttcaacacttgaatcttcctggctacttgtacagaattgttaaagtagaataaatcatttgacatgactaggttttaggaaaatatgtgagagtcattcaggcacaaaatcagcttggaatagatgaaattttccatctgagtgcttctaccgggagaagcacttaatgtataaatgtataaatcactcaattgtaaaggcacttcaattttattttcctttagttttgagcttttggaattgctctgtgcagttccaagtaaaagctcttagataaaagttgcatgctgaaaaccaccgtcacaaatatgcaagtacaactataaatttatacaacackcaagctgtttgtagtttgcaaaatttggtaataaaatgcagaagtggggtttccatttaacactctatggcactggcactgcatgtataact

SEQ ID NO: 49509 - DNA, 617 bp, Homo sapiens
atacactcctcttgctacatcccacagagttcgatgtatagtttttaaaattatttacttctaagtattttcaaaattcaatatgatttcttcttagattcattagtttttagaagtttccaaacgtggtatttcaaaagttatctttttgttatggttgttggagaatatggttgtaggatatcagttacgtgaacattgagacattctttatggcctggcatttgattgctttttgtatgtgtttcatttgttttctatttggaagcaatattctgtatatgtctattaaatcagacttgctggttgtgatatgagttcttctctagccttaataatgtttktatttatttatttatttttttgagaccaagtctggctgtgtcacccaggcctggagtgcagtggcacgatcttggctaactgcaacctccgcctcccaggttcaagggattctcctgcctcagcctcctgagtagctgggattccaagtgtgcgccaccatacctagctaatttttgtatttttagtagagatggggtttcaccatgttggccaggctggtcttgcattcctgacctcaggtgatccaccagcctcggcctcccgaagtgctg

SEQ ID NO: 49510 - DNA, 2548 bp, Homo sapiens
aagacttataaggatgaggctaacagtcagaatgacgtggagcaaagcactgggctgagacaagatggaatttatatggtaagaagtgaacttttaattgtcttagccattaaaattttaaggtgttaggctattgcagcataatagcaaggcaatcttgacgtacataaatattatacttttgctgcgctgaaaatcagttaatattgcatgaagggtatttatataacagattaataacaataattacttagcatgcatggaaaattgcattacccatcatttatacttaaaattttaatggtcatattttattagaacataatataggatactgcatggttttgtttttttcttacaaataatactgacagccttgacaagttattacaaagaatatgaagtaaatcaaaatattcaataacatgagaaaatattttcataaacctttctgagagttgattatatatgtaagaatcatcatttgagaatattttcaaaattagggggttggtagatattaacaatcagttactgaataaaaagctgatgtaattaaaatggcatgagtggatggcctttccctccactttttattaacattggactatgtgttgactacatactacaggacatgacttattagctaagcttagcaacggaagtgtcagaacaaaactgaagttggatgcagctcgatgtgacaacctaatatttactcaaagtaataaacatggccaagaaactaaagaaatattcaaatgtctcaaaaatgtactttattgcagaggaaatttatggatccaagttaactttatctcttttcttagagattttcaattggaatgtggatatatttgctgktacgttcaaagaacaaaaatgagagctaaatattttaataatttttattttctaatctgtttttttaaaatttttcccttaaaatcttaagagattattacaaagcttaatttcccagtgaaatcttagaaagtcgaggcctaaatattgaaactttttcctgatattatagctattatgaattttaaaaggtacaataaactaaaatatgctgtataaattttcttttggttttgcaaaagactaaacctattttctaccactaatttatattctgttttaaagtgcaatcaataaaataaaaactttttctataaatattttcaaattattatataaatgctggtgcctaggatatgtttgaataattttatgattgtatagttgataaacacagcctttcctaattgctattaatgtggcttggtgtttctatgttttctgatttggtgggaaaatctgttgaatgtcagggtctttgcattctatagtttcctatataggctcaatttaaaattaatataattaaccataataccttctttctattttgtatctagctatatcacagttttattaatgctagagttatagggaaatatatttaatgaacttagtaaagtatttttaaaatcaattttattttaaaatctaagttttagatttacagaaaatttttgaagatagaacagaaagaatacctatatatttacatccaatttcctctattactaacatctaatattagcatggtacatttggtataattgatgaactgatattaatacattattattaactaaaaagtctatagtgtattcaaatttcttaatttttatctaatattcttcttctgtgcccagatcccattaaaggtatcatattactttttttagtctcaggattcttaagcagtaagagtagccctgaatttctttatgtaaatgaccttgaaagtctaggggactttctggtcaggtgtcttataaaatgtctataagtcagtatatctttgatgaattttacattattagactgggtttatattttgctttgttttgtaatttacagagtgggtggagaagaccataaagataaagtaccaatttcatcacatatatgggcatatatatgaacatgacttaacattgctgatgttagcagttggctaaggttgtgtttgtcaggtttctctgctggaaagttagccttttctccctatgcctactctatctacactttagaatgacgtcactacgtccagccacacttgagtgtgcataaatgcttcactttcttgatgccagagtaattgcacaaatgattaaatgatgttttaggtactctacatacttctgaaaaggtgccttagaaagcattgtttgtagccatcacatactagaatgatttctgtaaattaatcatgaaggtgagagtctgcgagtaactgtacacattcttattgttgaaaatgttttttccactaactgaaatcaaaccgagagtttactataccaggtatcatcaaacttatgtacataaaaatcatgagttcagatgtggtctcctaaatatgataaaaggttttgatgcatcgtacatttagaaacaatgtacaagataccatatatccaactatgtatctactgccttatatgtgttttatactaatcagattcccaaa

SEQ ID NO: 49511 - DNA, 644 bp, Homo sapiens
gttagagatgatttaatctgttagttgagtgagcaatcgaggaagacgtgggtctttggggttcaaatgaggaggcatgactgcctggtaaycaaattgattgcagtgagctagcttcccttttctcttgtctgtagagactctctaatctctttttccacccaacccccacttctggatgccattgttccctagaaggagaatctggggaccaaaagggtgaaggaaccagccatggccaccttggagcccatgatgttatcagaagggaacttggccccggctctctccctcctacactcaggggcacatccatgttccacgactgtgtctgatgttttcttaaaatgctccaggtgtgaattgtaatagtagtaatagcaatcatattcttgataacttttattgagcaattgctatacacaggcatatacatcatctcacacaacctgcctcccttgtgactattactgttagcccattttacagacatggccattaagctcaagggaaactgggtaacatatcgaggtttcttgcccaaactcacccacttataaacagcatgactgatatttcaactttggcagtttgacctagatcccagctatcttgatatattaaggaacaaaacaggtttcaaa

SEQ ID NO: 49512 - DNA, 604 bp, Homo sapiens
gcatttaatcttgaattatgtgttaaaaatgtgagatgaggataaaagtaattccaaataagaaacacataataacagcaatgcaactagcattgaggcctactgtatgccaaacgctgtgccaaagccactaccattattacctcatttgatacaacaaccctatgaggtcagttctatcactttggtccctacattgcagatgaagagaccgaggcacagaggcgaagtaacttgtccatgtcccagagctgtaaattaatgctcagtaatgagcagaatagcgtcctggtccatgtaagcrcttaatgcacttgtactcggctttggaaagaatggagagactgcagtgtatacaaacatcccaggaaaacctcattcatttggaccatttccgtctagattttattataatttgaaaggagcctagggtcgtgttctctctttttttttttttttttttctgcttgcggggaaaagctaagcaaatagtacaaacaaagtaaaaatatttttgtggggcgttttagaatttagacgagatagggtgcattcaggatagtatgaccgtagacacattttagtatttataaagcattttcct

SEQ ID NO: 49513 - DNA, 607 bp, Homo sapiens
ggttcacgtgattacctttttcttttggcttggattaatattcatagtagaactttataaaacgtgtttgtattgtaggtggtgtttgtattatgcttatgactatgtatggtttgaaaatattttcattatacatgaaattcaactttccaaataaaagttctacttcatgtaatccaaaaatgtttgtattctgttctatatagttaagaagaatcagaatttacatattaatcttaactacttcagttgcctctgatcctggaatatctataaatgaagtataatttaataaagtaaaaataagataaataaaatattttgatttcaattactttataaatatacaatatcatcatctataaaaaakaatattacaataaaatttatatttataataaatataaatttaaggtgaatgtatatttatctggtcatttttaataaaaatgtagaaatgtcacttttcaagaaaatgtccgatatgctatattttcaatgaggctagtagataattttgatatggtcttttagaattgggttacccactttggctcaggggacaatctattgaaaattgttatttttaaaaacggttttattgacc

SEQ ID NO: 49514 - DNA, 607 bp, Homo sapiens
ggttcacgtgattacctttttcttttggcttggattaatattcatagtagaactttataaaacgtgtttgtattgtaggtggtgtttgtattatgcttatgactatgtatggtttgaaaatattttcattatacatgaaattcaactttccaaataaaagttctacttcatgtaatccaaaaatgtttgtattctgttctatatagttaagaagaatcagaatttacatattaatcttaactacttcagttgcctctgatcctggaatatctataaatgaagtataatttaataaagtaaaaataagataaataaaatattttgatttcaattactttataaatatacaatatcatcatctataaaaaagaatattacaatamaatttatatttataataaatataaatttaaggtgaatgtatatttatctggtcatttttaataaaaatgtagaaatgtcacttttcaagaaaatgtccgatatgctatattttcaatgaggctagtagataattttgatatggtcttttagaattgggttacccactttggctcaggggacaatctattgaaaattgttatttttaaaaacggttttattgacc

SEQ ID NO: 49515 - DNA, 607 bp, Homo sapiens
ggttcacgtgattacctttttcttttggcttggattaatattcatagtagaactttataaaacgtgtttgtattgtaggtggtgtttgtattatgcttatgactatgtatggtttgaaaatattttcattatacatgaaattcaactttccaaataaaagttctacttcatgtaatccaaaaatgtttgtattctgttctatatagttaagaagaatcagaatttacatattaatcttaactacttcagttgcctctgatcctggaatatctataaatgaagtataatttaataaagtaaaaataagataaataaaatattttgatttcaattactttataaatatacaatatcatcatctataaaaaagaatattacaataaaatttrtatttataataaatataaatttaaggtgaatgtatatttatctggtcatttttaataaaaatgtagaaatgtcacttttcaagaaaatgtccgatatgctatattttcaatgaggctagtagataattttgatatggtcttttagaattgggttacccactttggctcaggggacaatctattgaaaattgttatttttaaaaacggttttattgacc

SEQ ID NO: 49516 - DNA, 607 bp, Homo sapiens
ggttcacgtgattacctttttcttttggcttggattaatattcatagtagaactttataaaacgtgtttgtattgtaggtggtgtttgtattatgcttatgactatgtatggtttgaaaatattttcattatacatgaaattcaactttccaaataaaagttctacttcatgtaatccaaaaatgtttgtattctgttctatatagttaagaagaatcagaatttacatattaatcttaactacttcagttgcctctgatcctggaatatctataaatgaagtataatttaataaagtaaaaataagataaataaaatattttgatttcaattactttataaatatacaatatcatcatctataaaaaagaatattacaataaaatttatatttataataaatataaatttaaggtgaatgtatatttatctggtcatttttaataaaaatgtagaaatgtcacttttcaagaaaatgtccgatatgctatattttcaatgaggctagtagatarttttgatatggtcttttagaattgggttacccactttggctcaggggacaatctattgaaaattgttatttttaaaaacggttttattgacc

SEQ ID NO: 49517 - DNA, 607 bp, Homo sapiens
ggttcacgtgattacctttttcttttggcttggattaatattcatagtagaactttataaaacgtgtttgtattgtaggtggtgtttgtattatgcttatgactatgtatggtttgaaaatattttcattatacatgaaattcaactttccaaataaaagttctacttcatgtaatccaaaaatgtttgtattctgttctatatagttaagaagaatcagaatttacatattaatcttaactacttcagttgcctctgatcctggaatatctataaatgaagtataatttaataaagtaaaaataagataaataaaatattttgatttcaattactttataaatatacaatatcatcatctataaaaaagaatattacaataaaatttatatttataataaatataaatttaaggtgaatgtatatttatctggtcatttttaataaaaatgtagaaatgtcacttttcaagaaaatgtccgatatgctatattttcaatgaggctagtagataattttgatatggtcttttagaattgggttacccactttggctcagkggacaatctattgaaaattgttatttttaaaaacggttttattgacc

SEQ ID NO: 49518 - DNA, 607 bp, Homo sapiens
ggttcacgtgattacctttttcttttggcttggattaatattcatagtagaactttataaaacgtgtttgtattgtaggtggtgtttgtattatgcttatgactatgtatggtttgaaaatattttcattatacatgaaattcaactttccaaataaaagttctacttcatgtaatccaaaaatgtttgtattctgttctatatagttaagaagaatcagaatttacatattaatcttaactacttcagttgcctctgatcctggaatatctataaatgaagtataatttaataaagtaaaaataagataaataaaatattttgatttcaattactttataaatatacaatatcatcatctataaaaaagaatattacaataaaatttatatttataataaatataaatttaaggtgaatgtatatttatctggtcatttttaataaaaatgtagaaatgtcacttttcaagaaaatgtccgatatgctatattttcaatgaggctagtagataattttgatatggtcttttagaattgggttacccactttggctcaggggacaatctattgaaaattgttatttttaaaaayggttttattgacc

SEQ ID NO: 49519 - DNA, 1780 bp, Homo sapiens
gtcaaatcctcttctgcctgtctagccttctctctggctgcaaaatggcaccatgacttcagctgctggctatcaggaaggtagaaacatgcctgcagctccgaggagacactccactttggtttgagtggtcaagggaaggtttcaggaaggcattgtttaaactgggtttgtaacaatgagtaagatggtaaataggtgatgagggcagtaagtattcctgtagagttaacagggccacagtggtgagggaagttatttgtgagaaaagagagtggatccctggaagaggggtaaagtttcacatggggaaggctttgcactgggtatctgagatctggaactcctaagactgaaagatccctgcaacggaacaggacacttgttcttacattaatagcaaatgataatttatactttgcacgtggcatttcactggaacatctgcattaatcaggaaggtcgggtgatccagatttagtggacagtggccagggagtgaagggcttctctgctgagcagtagagctgggcctgccttgcttcttctgaccacactggtacatcagccattccaccatactccataccctgtagagggatgcagggccctccctggcagaaggtatgagtgaaatgagagacatgcttctccagagaggagacaatgcaagcatttccaagcacaattctgggcagatattgctggtctgcatcacggttggtgtcccttggcgtggttccatctgaacctgaagaaagtcaatgctgctctggtgagactcacgtgtgtgtagcatccacacctctgtgatatatttgtggtttataacgatttcagccactgttagtcattatttctggagtgaaattagaagcaaagttttaaggtgttcagggagaagagtgatgttttcttctaatttcagaactcttcaggatgtggacttaactcagcatcagcacaaacagacccgagctctgtctggaggcctgaagaggaagctctcccttggcattgctttcatgggcatgtcgaggaccgtggttctggatgagcccaccagtggggtggacccttgctcccggcatagcctgtgggacattctgctcaagtaccgagaaggtaggcactgggcctcattctgccttctcttcccacaatattgtgttgcaggaaatgcattgctactgtacagtagaatcaagttgtatcccagtgaggctacattatccttttcagaaaaatataaatttttaaaagcacttatagggatatattcgttagataacatctctatagtgcttagaattgcttactttgtgtttgaccttttaactcaataacagcaatgacatctatgtacattatacattatcatacatgatttcaaggaaaattgtcttcttctggaagcatagtttcttagaagaggcatcccagatcataggacaagcctcccttgtctcagatgaagaaatgaaggctcagagagacgggcatgtgatttacttgtagctacagagaaagtttcctgaactgagggtggatgttgaacctcttgtccatrtttctcacatctattattgtttctttccaatttaggacatttgatgggcagttactaatttccaacttctgattctttctgcaatcctgacagctaggaagcattgttctatgtattttctgtgagaatactcccttttggaaagaaacattgcaacagtaaaacacatcttggtgctggtaaataagtgtagaggcatcagtggcagga

SEQ ID NO: 49520 - DNA, 631 bp, Homo sapiens
tggaagatggccatctgctctgcctaaggggaccgagtgtgcattgctctgtcctatgtgggttccctcagatgagtgtgcatcactctgtcctatgtgggctccctcagaatgtttttctatgttctcgctttcctgtcctgagggctcattttcaccccagctcagtgatcccaggggtgcctacaacagactcccacctccctttcttccaagaatctgactcagggcccacctctcccaggggtggaagcttctgtgggttttcaggattaacttcccagcccaaggcattggttccttgctattaggagcccagcgaccctgcactgccctccacaccagctcccatctgcactgtctacaccattgacactggtggcaccatttgccttagcgtgacctcctatgcyccttgtctgtctgaaagccaatgccttgacccagctcagttgccctgggtgccccttcacaccagcagcccctcccagggcacggctgtaggcgggtccctgcacaagcaggtatctggctggtccttaagtgcgagctgggcttctgcactcactcatgctgtcttctctctttttttcattgtcttgggatcctagaaccctgtgcccaccccagc

SEQ ID NO: 49521 - DNA, 629 bp, Homo sapiens
tcagcagcctggctctgctgacgatggagcggcagctgcattcctgcaggcagcacatcgtatttctacagctcggtctccagggagcatggactgtcctctgcagagggacggctgcctttaccctccactagtcttaaccatacagccttccagggacccccacagaggctgagcttgtcagtaacagtactcagtcactcctgccatgccatggttgcctcgctggccacatcgttatgacatgtggagaggacactgatggggtcaggatttagccagcatgtcatgagaaagcacgggttgttccctgggagtgttgctacacaagaaggaccacactcctggtgagtgactctgggatggtggccacattgctcaggatggtgccacagccttgtttcacctggcagcttccacctgctcctgtgggggcagagagcaaagtgttatctcaagcagtgaattgggctactttaatggcactgaaaatcagaagrgatggatgtgcccagcctgtgatggagaggagcacagtggctcagccccatctgggggacaataccctgagcaaggcaaagcccccctgcaggctgtgaggccccagggaaaagctctccatgcggcct

SEQ ID NO: 49522 - DNA, 591 bp, Homo sapiens
ggggccaagccctggctgtgtttccctgctctgcacccagcacagtcacctccrttgtcagatacccagggccagaacaagtacagctactggattcaaccttctagaattcagacaatggggatatatgtgctctaggatatatgtgtctagccaccttccctgtggctgacatcaggtattaggagagaaagagaggaagatccttccctgtctcctctttttctcacttccaactctccaggaaaggtgccaggaaatgaaaaggacccatcttatcagtcaggatgctttctcctgcatgaaacggggaacccctacccaactggcttgagtaataagaaagcttggccgggcacggtggctcacgcctgtagtcccagcactttgggaggccaaggcaggtggaccacttgaggtcaggagttcgagcctagcctgaccaacatggtgaaaccccatctctactaaaaatacaaaaaaataaaattagccaggcatggtggtgggcgcctgtattcccagctacttgggaggcttaggcaggagaatcacttgaacctgtgaggcggaggttgcagtgggctcaga

SEQ ID NO: 49523 - DNA, 419 bp, Homo sapiens
acttgcagtgcctggcagcatttgcaaggtccctcatgggtcctttcccacagggtcccaggatgatgagcgtgaaatgagaccaataaaagattgcacaaatcttgttggactcacacataggatggaaagcaatatccatgtctgaaacatgttggagcaggccttccaccaagccctttagaaaaagggttgtatgtgttgtgtagagcaaacctggctgacaggcattagcatgcccattttacagatggtgaaacgggatctgagaatttacgagccttgctcaagcttccacagctatgccaatgccgccakcccgccatccctggggttggagccagggcatgtggggtgatgtttttcttggtcgtgagcagatgggctagtgccctacctgcacagtctcaccgtagctc

SEQ ID NO: 49524 - DNA, 636 bp, Homo sapiens
cacacacacacacacatatatttatttattttttgagacggagtttcgctcttgttgcccaggctggagtgcaatggcttgatcttggctaactgccacctctgcctcctgggttcaagtgattctccagcctcagcctccctagtagctgggattacaggcacccgccaccacgcccagctaattttgtgtatttttagtagacacagcgttgcactatgttggccagactggtctcaaacccctgacctcaggtgatccacctgcctcggcctcccaaagtgctgggattacaggtgtgagccactgtgcctggccgctaggtatatttttaaaataattcatcatcttgctttttgaaatttagtgataaagcaaggatagcaaaatgttaattgtaacatctaggtggtttgtttgtttgtttattgggagagacaaggtctcactatcttccccaggctggtctccaactcctgggctcragcaatcctcccttctctatctcccaaagcgctgggattataggcatgagccaccacaccaggcctggcaaatttatttttaattcctgtgttcaccatacagttgttaaactttctgtatgtttgaagcttcttataataaaatattggg

SEQ ID NO: 49525 - DNA, 560 bp, Homo sapiens
tttttttttcttgtgggagagtttcactctgttacccaggctggagtacagtggcataatctcggctcactgcaacctccacttctcggttttaagtcacttctgttgtctcagcctcctgagtagctgggattacagatgtgaatcaccacacttagctaatttttgtatttttttgtagagatatggttttgctgttggccaggctggtcctgaacacctggtctcaagtgatctgcctaccccagcctcccaaagtgctggaattacaggcatgagcwccatgaccggccctttctagctttttgatgtggacattagtgctataaatttccctcttttcttggtttctagtgattattttattctatcttggtgagtagtcagggaaataatcttaaatttacaatcaacttatagtttaaatctaaataattatgtgagaagaaccctttgttatttgaaggggatgtttgaagattttgtaaccgtgccttttaggtagtcctaaatttctaattgtagttaaaaacatgccattttcatttctaacattttaa

SEQ ID NO: 49526 - DNA, 560 bp, Homo sapiens
tttttttttcttgtgggagagtttcactctgttacccaggctggagtacagtggcataatctcggctcactgcaacctccacttctcggttttaagtcacttctgttgtctcagcctcctgagtagctgggattacagatgtgaatcaccacacttagctaatttttgtatttttttgtagagatatggttttgctgttggccaggctggtcctgaacacctggtctcaagtgatctgcctaccccagcctcccaaagtgctggaattacaggcatgagctccatgaccggccctttctagctttttgatgtggacattagtgctataaatttccctcttttcttggtttctagtgattattttattctatcttggtgagtagtcagggaaataatcttaaatttacaatcaacttatagtttaaatctaaataattawgtgagaagaaccctttgttatttgaaggggatgtttgaagattttgtaaccgtgccttttaggtagtcctaaatttctaattgtagttaaaaacatgccattttcatttctaacattttaa

SEQ ID NO: 49527 - DNA, 1104 bp, Homo sapiens
tgttgtcagcagcgacatgaagggattaggaggcccaaccttcgtggtcctcccagccctaggattctggttctctgtacagttagcaacgaaaacaaactcaggagcctcaatcgtgtaacttctgaacctcaccggtcttgaatccagggccagacatactgtgcataaacggggacatagacaaaacggggtccctgccgggcatggtggctcatgtctgtaatcccagcactttgggaggcgaaggcaggcggagcgcttgaggccaggagttcaagaccagcctggctaacaaggtgaaactccatctctactgaaaaaaaaaatacaaaaattagccgggcatgtgggcgcctgtagtcctacctacttgggaggctgaggcaggagaatcgcttgaacccggaggtggaggttgcagtgacaagatggcgcctctgctctccagcctggatgacagaccgaggctccgtctcaaacaaacgaacaaacaaacaaacaaaagacggggtcacatcacacggggctgttttcaggattcagagcaaagacacgggtagtcgggaagctctccagggcaggaggatggagaccccagcctctctctctccgcgttcccagacaggatcagccacacagctcagccagccctgtgcaactcctcgcagcagaacccacccacggccagaggcttccatcagcaaagcaaagctgaaaccaggcaccaaactgtctatgtcaagtaacaggtttcctaatgactcattaacaacccattgtccaaactgcatcgagaaagccacgtggcaagtcccctggagggctggcatcaagttccagctgaagtaaaaatctaccctgtgctgatgtgactgaccataggacacaaaccgaccaaaggaaacatctcgagcgactcctggaggggcacaaaaaattcggcgagaaggttcacggctgcgctgttcatggaagacaaaggtggcagcctccaaacgcgcgtccactgatgaagggatacacggaaaggaaggaagcgccgacacccacagcaacacgcgtggggacagaaagcatcccrtgtgtgaagcaacaccatgt

SEQ ID NO: 49528 - DNA, 1516 bp, Homo sapiens
tgaatgagtcaaaatttccccattcttgcttcctctttttgtgggttcattgaagaggatgagataagactaaatacrtaatagtaaggacagcagagtctttagggaagtattagtatagaatttcagaattaattttgatgagattacactataggatggcactgtatagtgattccacagttctagttacatgtttctttaaaagtgtttatgtattagtttgctgttgctgctgtaacaaagcaccccaaatgtaattgtgctttcttctatagttctgaaggtcagaagtctcactgatctaaaataaaggtgcaggcaggagtgtgttccttctagagcctctaaatgagaatcaattccttgcctttcctggcttctagaggctgctcaccttccttggctggtggccaaagccagcaattagatcatcattctagcctctgcttttttctctcctgcctctttcttcccttgataaagatcattgtgattccaatgtgtccattcacataatacaagatgatcttttctccagattcttaatttaatcacatctgcaaagtgcaaagtctattttgtcaagtaaggtgactaggggttaactagttttctctactgccgcttaacaaatatccattaaacaaatagatatgtggacatctttgaaggccattattctactggtaacagttttgtgttgttttccagccctgacctccctctcctgaggccagcattgtcactgggccacagagatatcacattagcctttgaaataactctaaccatgagcaaagttgctcacctaggaaaggaagtattctgaggatggtcagtggtagaattggtttggtccagctacttaggtttgcagagctgtctccctttgtatctcagctaggcaagtcttcacactggctttctaaaagcagccccaattcaggcagacacataatacattttgaattgttcagtttgagaatgtagccaccccaaaggacagagatgacagtgacctgctgtccttccagaaaatcggccttgtgtacaacacttggtctcattgcatatgggttgcttaataaaccagaatagtcatgtttccttcagtcatattcctataactgcagccaaagaaaaatagtgctgaagaaaaggcttttattatcttttattttaccctctaaaatctaattcagagcatgaggagaaatgtacgcacagagccaaatttcatgttcattaatgtaattggacattagtgccgtagccacgtcctctcactcagcagcgaaaatgaccctcttcctgtgttatcatcaataacggcatggtgatgtcctggctgggactgaccagagtgtaacagagctctcggtcccttgggcaatggggtgatttttatttacagtgacaagatgatctttacacttgtttctctttggactgtacacgcacagctctatccataagccaaaatacagccaggctggctctttctgccctgcac

SEQ ID NO: 49529 - DNA, 1516 bp, Homo sapiens
tgaatgagtcaaaatttccccattcttgcttcctctttttgtgggttcattgaagaggatgagataagactaaatacgtaatagtaaggacagcagagtctttagggaagtattagtatagaatttcagaattaattttgatgagattacactataggatggcactgtatagtgattccacagttctagttacatgtttctttaaaagtgtttatgtattagtttgctgttgctgctgtaacaaagcaccccaaatgtaattgtgctttcttctatagttctgaaggtcagaagtctcactgatctaaaataaaggtgcaggcaggagtgtgttccttctagagcctctaaatgagaatcaattccttgcctttcctggcttctagaggctgctcaccttccttggctggtggccaaagccagcaattagatcatcattctagcctctgcttttttctctcctgcctctttcttcccttgataaagatcattgtgattccaatgtgtccattcacataatacaagatgatcttttctccagattcttaatttaatcacatctgcaaagtgcaaagtctattttgtcaagtaaggtgactaggggttaactagttttctctactgccgcttaacaaatatccattaaacaaatagatatgtggacatctttgaaggccattattctactggtaacagttttgtgttgttttccagccctgacctccctctcctgaggccagcattgtcactgggccacagagatatcacattagcctttgaaataactctaaccatgagcaaagttgctcacctaggaaaggaagtattctgaggatggtcagtggtagaattggtttggtccagctacttaggtttgcagagctgtctccctttgtatctcagctaggcaagtcttcacactggctttctaaaagcagccccaattcaggcagacacataatacattttgaattgttcagtttgagaatgtagccaccccaaaggacagagatgacagtgacctgctgtccttccagaaaatcggccttgtgtacmacacttggtctcattgcatatgggttgcttaataaaccagaatagtcatgtttccttcagtcatattcctataactgcagccaaagaaaaatagtgctgaagaaaaggcttttattatcttttattttaccctctaaaatctaattcagagcatgaggagaaatgtacgcacagagccaaatttcatgttcattaatgtaattggacattagtgccgtagccacgtcctctcactcagcagcgaaaatgaccctcttcctgtgttatcatcaataacggcatggtgatgtcctggctgggactgaccagagtgtaacagagctctcggtcccttgggcaatggggtgatttttatttacagtgacaagatgatctttacacttgtttctctttggactgtacacgcacagctctatccataagccaaaatacagccaggctggctctttctgccctgcac

SEQ ID NO: 49530 - DNA, 562 bp, Homo sapiens
ctttcaaagttctgcctgttctgagttttttccaaacccctctggtcattcctatagaggctttcttgtcacatattgatgttgcctagaagtctggtttaggtcccccttcccaaaccacacactccctctgcactgttcaatgatcatctctctccctgtgatttgagatgtcatctctgggaactcacacttcttcctcattaaaaaacataaaacctcattgtaattgttaaaatcttgtccttcttttagcttacaacctaagtattggaaagtctgtttgcctctttcatgtgtattgccataagccagcctttttccatattacgctgcctaatagctcttcagagtctatgtttaatgatgcaacttgtagctctgtggttctcagcgtggacaattttgcctcccagggggacatttgacaatgcytgggaacatttttggttgtcacaactagggagggagggatgctactggcatctgtgggtggaggccagggatgctgctaaccatcctataatgcacagatagtccccaccataaagaaatatccagt

SEQ ID NO: 49531 - DNA, 641 bp, Homo sapiens
aagataatatttgagaaatcatattacaattattttctgttcttactcattggagcttgatgcccctaaaaacttcatcattggaaccacctctggtcctttaaaagaaaaaaaaaatccacattctcacacaggtgcaagaaaatgagaatctcaggcattgagacccaggcctcatcatttgtaagctcccaaggtgagttgactcaaagccaagattgaggaacggcgacatggatctccacataacctgcctaaacagattctctagaagcagtttataaagaaattccacatgaactgtggaagaggatatgaatatgatgaagartatgtcctcacttaacatctttgaaagtctcttggaaacttcaccttgaagcaaaattatatatagtgaaaccacttatttttcatcaacagtataactacacaactttgaacaaccaatggtgttggaggacctcctgtacattgtttccataaagtcagttttcagggaattccaaaacgaagtgaggacttcttgtatataaaaagatgtttgtgattccacctggatgacaggttattgctcagaaagtaaaagaggccacctaggtatagaggattctgtcatgaggtttctgctaaacaaagga

SEQ ID NO: 49532 - DNA, 642 bp, Homo sapiens
tgtgcagctgggaatccaacaggctaaggaaaaaggacaccaaaacgaagaagacacagaggtgaggattcacgatgactgggtagtgcagaggacgacagatggctacaaagcagtcataggccatcacagtcaggagcatgccttctatrcatgcaaaaaggaccaagaaagacatctgcgtcaggcagcccgcatgagagatgactctgctatgcgactgcattccacaatcatcttggcaaccgtggccgaggtgaaaccgatgtcagcccagcacaggttggagaggaagaagtacatggggttgtggaggggggagtcagagcggacagccaggatgctgagcaggttcctcagcaccgtgaccagatacatggacagggacagggacagcaaagcgaggaccggctgcagttctggatcctctgagagtcccaggaggagaaattctcagacccctgtgtgattccgtggctctgtgtgtcttggacaccttgagaaggaaagaggattggaaaaataaaagataaaaaccagcccttaatgctggatgcaagcaattcacaaggaacatcttcactcttgcggaccatacaccgccagcaatgtttctcagttgtgacaattccaaaaatctca

SEQ ID NO: 49533 - DNA, 642 bp, Homo sapiens
tgtgcagctgggaatccaacaggctaaggaaaaaggacaccaaaacgaagaagacacagaggtgaggattcacgatgactgggtagtgcagaggacgacagatggctacaaagcagtcataggccatcacagtcaggagcatgccttctatacatgcaaaaaggaccaagaaagacatctgcgtcaggcagcccgcatgagagatgactctgctatgcgactgcattccacaatcatcttggcaaccgtggccgaggtgaaaccgatgtcagcccagcacaggttggagaggaagaagtacatggggttgtggaggggggagtcagagcggacagccaggatgctgagcaggttcctcagcaccgtgaccagatacatggacagggacagggacagcaaagcgaggaccggctgcagttctggatcctctgagagtcccaggaggagaaattctcagacccctgtgtgattccgtggctctgtgtgtcttggacaccttgagaaggaaagaggattggaaaaataaaagataaaaaccagcccttaatgctggatgcaagcaattcacaaggaacatcttcacwcttgcggaccatacaccgccagcaatgtttctcagttgtgacaattccaaaaatctca

SEQ ID NO: 49534 - DNA, 578 bp, Homo sapiens
ccgagtcagagtcaggaccccctctctctggacacccgcttcggagctgctgttgtgggtctcactacacaagaacggcggcctgcatctaccttgcgctgctgagttctcagctaccggcacacggctggcactcaatgggcacrccacatgcccacacttgtggaacttcacccgtgatctagttttgtgtccctgagcctggcacacagtggacccttccggagtgttcactgcttctgcttccactgcttcatgtggaagaaggtgcccactgggcagaccagaacccactaatgctcatggaccagggaagaggagcagctgatctgggagacacagactggggccacacgaacccccaagccccagggaaatgagctcaagctgatggcctcagccctgctccacaggagacacagagcttcctggatgcagtgggcatctgagaacaggataaaaatctgccctaggtctatgggaactgggcctcccatcccaggaactgtgccacctgtgacaggtcactggggaatgccccactccctccctgggcacggaggagctgaggaggccct

SEQ ID NO: 49535 - DNA, 578 bp, Homo sapiens
ccgagtcagagtcaggaccccctctctctggacacccgcttcggagctgctgttgtgggtctcactacacaagaacggcggcctgcatctaccttgcgctgctgagttctcagctaccggcacacggctggcactcaatgggcacgccacatgcccacacttgtggaacttcacccgtgatctagttttgtgtccctgagcctggcacacagtggacccttccrgagtgttcactgcttctgcttccactgcttcatgtggaagaaggtgcccactgggcagaccagaacccactaatgctcatggaccagggaagaggagcagctgatctgggagacacagactggggccacacgaacccccaagccccagggaaatgagctcaagctgatggcctcagccctgctccacaggagacacagagcttcctggatgcagtgggcatctgagaacaggataaaaatctgccctaggtctatgggaactgggcctcccatcccaggaactgtgccacctgtgacaggtcactggggaatgccccactccctccctgggcacggaggagctgaggaggccct

SEQ ID NO: 49536 - DNA, 331 bp, Homo sapiens
gcaggagcttatccattcccacaaaaactaacccaattgtgggagaactgacccagccctgtaagaaatccatcacctctcggaccaccttccaacactgctacattggcaattaaatttcaccatgagttttggcagggacaaaccacatccaaaccatagcctctgtgtatgtccaagcctgaggatgcctgtctggtcattggcctcaggtcagggaggtgagacccgagctttcttaatggggagacagccttgtggaattgatagagatagtgtcagrgaccccttagggctggtttctcttctgtccagctgccctttttggaaa

SEQ ID NO: 49537 - DNA, 1483 bp, Homo sapiens
caaaccctgccctgggaactaccctctttcaaatcctgatcaaaattagtagggaacaaggaaatttaggcccttttgatcaggaacttcattttgacttccaaaatattttgacctttgaaaatattctagaacaagatcctaacttatctctcagtgttgatggtctcctatgaacgcccaagtcaacaaatgtttattgagcacagaccatgtcaggcactgggagttacagagagaaccaagacccagccccacccttgaagagcacaatgacttactaaaatccagaaaagacttttaaatacacaatgacctggcctctaaacagtcttgaagaaacattcaacatttaagctttaaaatactctttctggccaggcgtggtggctcatgcctgtaatcccagcactttgggaggccgaggcaggcagatcacccgaggtcaggagttcgagaccagcctggccaacmtggtgaaaccccatctctactaaaatacaaaattagctggacgtggtggtgggtgcctgtaatcccagctacttgggaggctgaggcaggagaatcgcttgaacccgggaggcagaagttgcagtgagctgagattgcaccattgcactccagcctgggagacagcaagactccgtctcaaaataaataaaataaaataaaataaaatactctttcccagacttaaccttctttcttttggtaccttaccttgccaaaagagggttttgttgttgttgttgttgttaaatattaaaatgtcagggatgttctttcttttaagagattgctcaacagggccttatgtttctcaaaagagaacttacatacaaattcagtaacttcatggaatagaatgagaggcactatcaagcaggcttgaagttgagtgacattaaatctacttttcagacttaattaagcctgaagcccacaaataccctcactcccaaatcaccatttattgtggaagataaaagcaaatgacttaaaataaagaagaaaacctgcaaaacaacatcttagcgttctgtcagaaaacacggagtcctctgaggacagttaataacaaaattaatcccaaagagctaatacccaccccctgtactgctgtagagtagctaatcacgatttcctcttgcctgaaggctgtttctggaaacaaggacaggtcctgcccttcccaggtgagcactctcaggtgggttgggactgctgctaggccactgtttcttaagactgccttcttttccaggctcagggaaacaccattgccttttcctagattgctgagaatttccagaggcctacggccaaagcatcttcttctgtggcatatgtaagttcatggatggatcgcttgctgccctcaagtgtggtcgctgctcagcactctgtgaacccggaaagaaatcttagccccttagagtgaccattaaaagcctctcacaaaggaatctgtgtgtgtgtg

SEQ ID NO: 49538 - DNA, 1801 bp, Homo sapiens
tgcactgtgtcctttatatctgttttatactgttttctgtatttgctttttttgctctctgctttggtctgcatattttcttctaatatttcttgcagtttactaattctctatttttttatctaatttactgttaaatccaaccattgtgtttttaatttgttattatatattttagtttttcaatttatttggttcattttattatctatcttgtgttttagtatttgtacatacacagcttatttaaaaatgcttattcattaactggaccatgtatatttgtttttattgcactcagctttcaatcagtccatgtcttctatactttgttactttttttgagtgcttgattttgcatatgaaatgtggcaattcaagaattttttcggatttttttttctttaagagagaatttcttgtatttctactcaagagttgggattggagaagtaaaaaatcccagatagtcttaatccaatcaagaaatcagatgatgcaagctggacttccgttcctttgaggactgccccattgtctgtgcattcctactccatgagtaaatcttcctggggtctcaaatgaaagccttgctgtttacaaaggatgcttttccttggtagaccttcaattttacatgttgtcacttagggtaaatcatctacagaaagtttcacacaacttttcaggtgttcgtttatggcttttagaattatttcacttttagagaaaagagactctaaatgtggggttctgatctctagctttctttttctttttggagacagggtcttgctatgttgcccaggctggactcaaactcctgggttcaagggattctcccacctcagtcttaaaaatagctgtgactacataacatgctgatatggtgtggctgtgtccctgtgcaaatcacgtcttgaattataatccccattatgcccatgtgtcatggaaaggaccaagtgggaggtaattgaatcatggatgtggtttccccatgctgttctcatgattgtgagtaaattctcataagatttgatggttttataagtgtctggtatttctcctgcttgcacaaattgtctctcctcctgccctgtgaagagacatgattgcaagttacctgaggccttcccaataatgtggaactgtgagttaattaaacctcttttctttataaattaatgactcttgggtaattccttctagcaatgtgagtacagattaatacatatgcatttctccttttaaaacaataaatatatattgtgtctatatttcactctctaatttggtaatacgtatggattgcagacaatactatgaactatggattttttggcaatttctacattaatttttgtatttgtacatsattatttttgaataattttttattattggagcaaatacattcagattctgtgctgttgtaggtatcatacgacaaacacttttgtgtcattcagagaagtggaaagcatagtagatatttgaattcagctagaagggatgtagagaattatggcttagttttgtattagttctccgtcttggagtcatagtttaagccacagtatctttgatcatatgtgatagttttcagaattaaagctatgtttgtgcatcttttaccacttaccattaagagaacacagcacttacagacattctcttcaaattttagcagtaatacatattacatttggggtagatgaatttaatccatttattaggttagttgaaaatgaccaacttttagtggagcctgttacatgataaagaccttatctggctc

SEQ ID NO: 49539 - DNA, 1801 bp, Homo sapiens
tgcactgtgtcctttatatctgttttatactgttttctgtatttgctttttttgctctctgctttggtctgcatattttcttctaatatttcttgcagtttactaattctctatttttttatctaatttactgttaaatccaaccattgtgtttttaatttgttattatatattttagtttttcaatttatttggttcattttattatctatcttgtgttttagtatttgtacatacacagcttatttaaaaatgcttattcattaactggaccatgtatatttgtttttattgcactcagctttcaatcagtccatgtcttctatactttgttactttttttgagtgcttgattttgcatatgaaatgtggcaattcaagaattttttcggatttttttttctttaagagagaatttcttgtatttctactcaagagttgggattggagaagtaaaaaatcccagatagtcttaatccaatcaagaaatcagatgatgcaagctggacttccgttcctttgaggactgccccattgtctgtgcattcctactccatgagtaaatcttcctggggtctcaaatgaaagccttgctgtttacaaaggatgcttttccttggtagaccttcaattttacatgttgtcacttagggtaaatcatctacagaaagtttcacacaacttttcaggtgttcgtttatggcttttagaattatttcacttttagagaaaagagactctaaatgtggggttctgatctctagctttctttttctttttggagacagggtcttgctatgttgcccaggctggactcaaactcctgggttcaagggattctcccacctcagtcttaaaaatagctgtgactacataacatgctgatatggtgtggctgtgtccctgtgcaaatcacgtcttgaattataatccccattatgcccatgtgtcatggaaaggaccaagtgggaggtaattgaatcatggatgtggtttccccatgctgttctcatgattgtgagtaaattctcataagatttgatggttttataagtgtctggtatttctcctgcttgcacaaattgtctctcctcctgccctgtgaagagacatgattgcaagttacctgaggccttcccaataatgtggaactgtgagttaattaaacctcttttctttataaattaatgactcttgggtaattccttctagcaatgtgagtacagattaatacatatgcatttctccttttaaaacaataaatatatattgtgtctatatttcactctctaatttggtaatacgtatggattgcagacaatactatgaactatggattttttggcaatttctacattaatttttgtatttgtacatgattatttttgaataattttttattattggagcaaatacattcagattctgtgctgttgtaggtatcatacgacaaacacttttgtgtcattcagagaagtggaaagcatagtagatatttgaattcagctagaagggatgtagagaattatggcttagttttgtattagttctccrtcttggagtcatagtttaagccacagtatctttgatcatatgtgatagttttcagaattaaagctatgtttgtgcatcttttaccacttaccattaagagaacacagcacttacagacattctcttcaaattttagcagtaatacatattacatttggggtagatgaatttaatccatttattaggttagttgaaaatgaccaacttttagtggagcctgttacatgataaagaccttatctggctc

SEQ ID NO: 49540 - DNA, 615 bp, Homo sapiens
ggcgggcggattgcaaggtcaggagatcgagaccatcctggctaacacggtgaaaccccatctctactaaaaatacaaaaaattagccatgcgtggtggtgggtgcctgtagtcccagctactcgggaggctgaggcaggagaatggcacgaacccaggaggcagagcttgcagtgagccaagatcatgccactgcactccagcctaggcgacagtgcgagactccatctcaaaaaaaaaaaagcacgcaatcattcagcactttttgtgttccaggcactgtgctaggtgcttgttgccttcccactaaatcctcagaatcaccctatttcacagatgagtaaattgagaacagtttctcaccagtaagccctataccttttaagaaataaaaccaagagcagatgaagtgagccttgattcctgaaagccactaagccactagttstgaatcactggggtgggagtggcatgtagtacagatgccacctaatatgtccattttacaaatgaagagactgaagcccaaagaggagtctgggatattagagaggcacagttgaggggctagagccctgccttctgaaagcccacaggctactgagaatacacagc

SEQ ID NO: 49541 - DNA, 594 bp, Homo sapiens
tgcttagagagaggcacaggtgaaggtccttttaaggggtttaacgattggcatgaatatgtgttgtttgcacacagattctgttttccaggcagagtgcccagcttcatttgcatttttgtttattatttcttcagcattccacatgctattcagctggctgttttgtgaatctgatcacatttggcttgctattctttaaaagggaaaatgtcattttaagatggggaatagatctatatctggaatgggatacaatttgtaattctgagtcttttgtgttgttccattcatttgtttaccagagcattctctggatgctgtaggggtaccctatggaaagaagactttctgaggttcctattataacacaaaaagagaaaaatacagggaaaatgggatctatgaaaaaacaaaacaatatgccataatttaccacgtttaaattcaagcaggttttcagtattttttttttttggtagtagagtttgagatatgtggtttacatccagctaacatgcttcatgtagtaatgtctataatgtgcctggtgtgtgtgtgtgtgtgtgtgtgygtgcgtgtgtgtgtgtgtgt

SEQ ID NO: 49542 - DNA, 525 bp, Homo sapiens
atcacatagtctactgcaacttccaaagttatatttctaaaatagctattattttcctcccacttgctctgtcctgtgtttcatctctcaatctctctgtctccctttctctttttctgtgcatatgtctgtctatctctttcattttccatctctctattgtattcttcaagatgaggaagcgatctccagtgtcctaagatgctctaggcacagacccacatgatagagaactgaggaactgcccaggccaatcaacaggaagaaactggggttctcagttcacattgaatcttgccaatttccatgaggcagattggaggctgatctctccccaaatccagcttcagttgaaatcacagccccagcctcataagggaccttgaggcagaggcacccaactaagctatatcgagattctggttcacaaraattgtgagatagtatttgttgtcaaaatgtgctaaaattcagggcaatgttgtcagagacgggcaaatgactaacctcctctttcagacccca

SEQ ID NO: 49543 - DNA, 525 bp, Homo sapiens
atcacatagtctactgcaacttccaaagttatatttctaaaatagctattattttcctcccacttgctctgtcctgtgtttcatctctcaatctctctgtctccctttctctttttctgtgcatatgtctgtctatctctttcattttccatctctctattgtattcttcaagatgaggaagcgatctccagtgtcctaagatgctctaggcacagacccacatgatagagaactgaggaactgcccaggccaatcaacaggaagaaactggggttctcagttcacattgaatcttgccaatttccatgaggcagattggaggctgatctctccccaaatccagcttcagttgaaatcacagccccagcctcataagggaccttgaggcagaggcacccaactaagctatatcgagattctggttcacaaaaattgtgagatagtatttgttgtcaaaatgtgctaaaattcagggcaatgttgtcagagaygggcaaatgactaacctcctctttcagacccca

SEQ ID NO: 49544 - DNA, 826 bp, Homo sapiens
cataatmcactctgaggtcttcatgctgatatgaacctatgatcatacctgtggccataagcccaggtatgagagtcaacatctctccagctggctggattcagataagaggatctttacttggctgtaaactgggttcagaaataagtcactatcccaactgtgactggatgttcacatgtggtagttacaattccagctgtggacggcattcaggtatgaggtttagacctccctaatcacctctgttcctgtgtaggaatgacaattctgatgattggtgggtgtgcacacagagaacacaatctcacctgtgttctgggccctgtgatgacactgtaccatctgagtgctttacaggatatgcaagagtgcttattttctctgaccttcatagtaagagaagacccataattttgcacattttgtaaagcctggatatgagacaaagtatctctcctattggttggtttaaggtatgaatgtcatcatcacacctacatgttaggccaaaatatatgtgacaatctcacatttgagtagtcagcaagcaggagggtctcatcacctgggtcattgtcagggatacgtcacattctcccctgaggacagggacaaggcaagaaagtcacatccctaggtattctgccagggatatgttcttgttccctcctgaaagcatgacacatgcagcagagtcacctcacctgggttctgggtccagcgatatgtcacaattttccctgtgagcaaggcacaggcaggagaaacacatcacctgtttgctgggcccagaaatatgctacagtttttcttgtgagcaggg

SEQ ID NO: 49545 - DNA, 826 bp, Homo sapiens
cataatccactctgaggtcttcatgctgatatgaacctatgatcatacctgtggccataagcccaggtatgagagtcaacatctctccagctggctggatycagataagaggatctttacttggctgtaaactgggttcagaaataagtcactatcccaactgtgactggatgttcacatgtggtagttacaattccagctgtggacggcattcaggtatgaggtttagacctccctaatcacctctgttcctgtgtaggaatgacaattctgatgattggtgggtgtgcacacagagaacacaatctcacctgtgttctgggccctgtgatgacactgtaccatctgagtgctttacaggatatgcaagagtgcttattttctctgaccttcatagtaagagaagacccataattttgcacattttgtaaagcctggatatgagacaaagtatctctcctattggttggtttaaggtatgaatgtcatcatcacacctacatgttaggccaaaatatatgtgacaatctcacatttgagtagtcagcaagcaggagggtctcatcacctgggtcattgtcagggatacgtcacattctcccctgaggacagggacaaggcaagaaagtcacatccctaggtattctgccagggatatgttcttgttccctcctgaaagcatgacacatgcagcagagtcacctcacctgggttctgggtccagcgatatgtcacaattttccctgtgagcaaggcacaggcaggagaaacacatcacctgtttgctgggcccagaaatatgctacagtttttcttgtgagcaggg

SEQ ID NO: 49546 - DNA, 826 bp, Homo sapiens
cataatccactctgaggtcttcatgctgatatgaacctatgatcatacctgtggccataagcccaggtatgagagtcaacatctctccagctggctggattcagataagaggatctttacttggctgtaaactgggttcagaaataagtcactatcccaactgtgactggatgttcacatgtgrtagttacaattccagctgtggacggcattcaggtatgaggtttagacctccctaatcacctctgttcctgtgtaggaatgacaattctgatgattggtgggtgtgcacacagagaacacaatctcacctgtgttctgggccctgtgatgacactgtaccatctgagtgctttacaggatatgcaagagtgcttattttctctgaccttcatagtaagagaagacccataattttgcacattttgtaaagcctggatatgagacaaagtatctctcctattggttggtttaaggtatgaatgtcatcatcacacctacatgttaggccaaaatatatgtgacaatctcacatttgagtagtcagcaagcaggagggtctcatcacctgggtcattgtcagggatacgtcacattctcccctgaggacagggacaaggcaagaaagtcacatccctaggtattctgccagggatatgttcttgttccctcctgaaagcatgacacatgcagcagagtcacctcacctgggttctgggtccagcgatatgtcacaattttccctgtgagcaaggcacaggcaggagaaacacatcacctgtttgctgggcccagaaatatgctacagtttttcttgtgagcaggg

SEQ ID NO: 49547 - DNA, 826 bp, Homo sapiens
cataatccactctgaggtcttcatgctgatatgaacctatgatcatacctgtggccataagcccaggtatgagagtcaacatctctccagctggctggattcagataagaggatctttacttggctgtaaactgggttcagaaataagtcactatcccaactgtgactggatgttcacatgtggtagttacaattccagctgtggacggcaytcaggtatgaggtttagacctccctaatcacctctgttcctgtgtaggaatgacaattctgatgattggtgggtgtgcacacagagaacacaatctcacctgtgttctgggccctgtgatgacactgtaccatctgagtgctttacaggatatgcaagagtgcttattttctctgaccttcatagtaagagaagacccataattttgcacattttgtaaagcctggatatgagacaaagtatctctcctattggttggtttaaggtatgaatgtcatcatcacacctacatgttaggccaaaatatatgtgacaatctcacatttgagtagtcagcaagcaggagggtctcatcacctgggtcattgtcagggatacgtcacattctcccctgaggacagggacaaggcaagaaagtcacatccctaggtattctgccagggatatgttcttgttccctcctgaaagcatgacacatgcagcagagtcacctcacctgggttctgggtccagcgatatgtcacaattttccctgtgagcaaggcacaggcaggagaaacacatcacctgtttgctgggcccagaaatatgctacagtttttcttgtgagcaggg

SEQ ID NO: 49548 - DNA, 826 bp, Homo sapiens
cataatccactctgaggtcttcatgctgatatgaacctatgatcatacctgtggccataagcccaggtatgagagtcaacatctctccagctggctggattcagataagaggatctttacttggctgtaaactgggttcagaaataagtcactatcccaactgtgactggatgttcacatgtggtagttacaattccagctgtggacggcattcaggtatgagrtttagacctccctaatcacctctgttcctgtgtaggaatgacaattctgatgattggtgggtgtgcacacagagaacacaatctcacctgtgttctgggccctgtgatgacactgtaccatctgagtgctttacaggatatgcaagagtgcttattttctctgaccttcatagtaagagaagacccataattttgcacattttgtaaagcctggatatgagacaaagtatctctcctattggttggtttaaggtatgaatgtcatcatcacacctacatgttaggccaaaatatatgtgacaatctcacatttgagtagtcagcaagcaggagggtctcatcacctgggtcattgtcagggatacgtcacattctcccctgaggacagggacaaggcaagaaagtcacatccctaggtattctgccagggatatgttcttgttccctcctgaaagcatgacacatgcagcagagtcacctcacctgggttctgggtccagcgatatgtcacaattttccctgtgagcaaggcacaggcaggagaaacacatcacctgtttgctgggcccagaaatatgctacagtttttcttgtgagcaggg

SEQ ID NO: 49549 - DNA, 851 bp, Homo sapiens
cctaagtgatgaacaaaaagatatgtcataatacccaggtggaaatgggccatgcaggtaagtcacattacctaggtgttggacccagtgatatgtcacaatacacaatatatgcagggcccagccaagaggggagagtcaaatcacccaggtgctgggcccgatgatacattgtaatctgtctttggtcagagccctagcagtagaagaaactcacatcacctccatgctgaggtcagccatatgtcacaataaccctgagaaatgagcccaggaaaagagtcacatcatttaagtgagaggcccatagatatttccaattcctcctgtgggtagtcctcagtaaaaagacagtcacattagttagagtctgtccccagcgatgtgtaagaatcccagctgtgaacaggcaccagacaggacaagagagtcccatcacctgggtgaacagtgcacagatatgtcacaatgaccccatgtaggtaaagtctagacaagagttacatcacctgggtgttggacccagcaatatgtcacaatggctcatgtgggcaaagcacaggacacagtcatataacaaagtgccaggaccagtgttaggtcaggataccctttatgggcagtrccaagacaggagattagaagcatattaattagatgctggattcaaggatatatcacaatctcatctgtgggctacacccaggcaaaaaagtcaaatcactcaggagctggctagaggtgtacgtcagaatcacacctgcaggaaggtccatggatgagattaacaatccctcataagtgccagttctggatatgagagtgaacgcctcctgtatgttgcatctatg

SEQ ID NO: 49550 - DNA, 553 bp, Homo sapiens
gaggcgggtggatcacaaggtcaggagatcaagaccatcctggctaacacagtgaaaccccatctctactaaaaatacaaaaaattagccgggcgttgtggtgcatgcctgtaatcccagctactggggaggctaaggcrgagaatggcgtgaacctgggaggcggagcttgcaaagagccaagattttgccaccgcactccagtctgggtaacagagcgagactccgtctcaaaaaaaaaaaaatgtagagtcaccacaaatgatcatgatagtgatgtctagcaagagcagaagactcagaaatgcatcagccagttaagtgttttgtttggctttccatttaaaaggaaacaatatattatcttgggtaagtaccctaggaaggttattacatgcacgttatttttgacaattttattaccgttctcatttgttgtggttatttctgttagctgaaaaaaatccacacttaccaaatgtgttactttttaaaatgcaaaacacttagcttccttggcagagttagcttcactattgacgtgctcttgggt

SEQ ID NO: 49551 - DNA, 553 bp, Homo sapiens
gaggcgggtggatcacaaggtcaggagatcaagaccatcctggctaacacagtgaaaccccatctctactaaaaatacaaaaaattagccgggcgttgtggtgcatgcctgtaatcccagctactggggaggctaaggcagagaatggcgtgaacctgggaggyggagcttgcaaagagccaagattttgccaccgcactccagtctgggtaacagagcgagactccgtctcaaaaaaaaaaaaatgtagagtcaccacaaatgatcatgatagtgatgtctagcaagagcagaagactcagaaatgcatcagccagttaagtgttttgtttggctttccatttaaaaggaaacaatatattatcttgggtaagtaccctaggaaggttattacatgcacgttatttttgacaattttattaccgttctcatttgttgtggttatttctgttagctgaaaaaaatccacacttaccaaatgtgttactttttaaaatgcaaaacacttagcttccttggcagagttagcttcactattgacgtgctcttgggt

SEQ ID NO: 49552 - DNA, 1393 bp, Homo sapiens
gtggaatcactggttctttgaaaaaaaatcccagaagtggctttgactttttggctaggaggcctaaacgtgctgagaactttcctgcccaggattctgtgtgaacaaaagtgcctctgctgggagctggaatcctcgggaccatgcttgctagcactagatgagtctccggaaggacgcacgggactccgctgacctgtcccaccgaggtcaaatggatacctctgcattggcccgaggcttccaacttacatcaccgtcaccagccgtcagcatccttgtgagcctgcccaaggccctgactccggggagactcttgagaacccggccttcatcggctaaagtagaaagggatggagacttccacacacaaggtccccactgaactgcgaagatgtggagcgtaggtcagagaggggaccaggaggggagacgtccagacaggcgatgagttaactaggctctggccaccccactcacgtcctacgtcacgggaacccgcggaacaccgccgctttatcccctcctctgtccacagccgcccccaccccaccccgcaacccacgcacacacactggaggttaaaaaaccacacggcgtgaatagagcctgacagagcgagagctcatttctcgaggcggaggggtggggtggggtgggggttggggggtctgtagagagcccgattctccctcctgggtggctactgtatacaaatgaatatcgcttcttgggcggaggggcttccttaggccgtcacgtttgcgggactatctctcaaacccttccttgaggccacaaaatagattccaccccacccctcgacgtttccctgggcgctggatgtatcctgtcaagagacctgagcctgacagtttgagtgaaacacctttattggttttgtgtgtttgtttgtttctgagatggagtcttgctctgtcccccacggctggagtacagtggcgtgatctcaactcactgcaacctctgcctcctgggttcgagggattctcctgcctcagcgccaccacgctcggatcattttttaatttttagtacacacggggtttgaccctgtttcattggttttcactggagattctagattcgagtcacacctcgttgtgtgccacataatgacttcttttttwaatttctttttttttttaaagcacgatatatctgctttatttgagtggctttatatatcgttataattgtgttatagatgaagaaaaggtattaaacacggtgctaatgatagtgaaagtgaaaataaaagaaaggctatctattttgtagttagaataaagttgctcagtatttagagttacctaaatatgtcagcatttaaactcctcctagtaaaagctggccaatctgaataatcctc

SEQ ID NO: 49553 - DNA, 628 bp, Homo sapiens
atactcatatcaaacagacagctgacaagatgtttttaataattatactttattaagaaaatagcatgagcattaattacatgataccctgttctcctaagaaaacattttaatgtctctttcttggagaaagcatttttaaatgtacaatctccagtacaaattaggtgcctttgtcagaattacctgctgtatatcctccttgttgtgtattagatttcctttgcacaggaagacaattatcttccttttgactttcaataatgccttctcattttgcttgcttcttgggtaaggtgttgatttcttcctttatttttcctgttaatctgtaaccacaaatactcctaaattgcttttgggcaatctgctcttggttttacgggccacargcccacactgaccaattctttataggggctcttactgcctgtgttaaaaagtcaccctgaggtgtcagtctttccttaataaccgagtgcctttttcacacttttacttcaaaccatttcattctggaaagtaatttgtttacttactagttggacctcagaagatgacttttttttttttaacttacaacaaactctttatcattgtcttagaaagcattgtttagattataagt

SEQ ID NO: 49554 - DNA, 628 bp, Homo sapiens
atactcatatcaaacagacagctgacaagatgtttttaataattatactttattaagaaaatagcatgagcattaattacatgataccctgttctcctaagaaaacattttaatgtctctttcttggagaaagcatttttaaatgtacaatctccagtacaaattaggtgcctttgtcagaattacctgctgtatatcctccttgttgtgtattagatttcctttgcacaggaagacaattatcttccttttgactttcaataatgccttctcattttgcttgcttcttgggtaaggtgttgatttcttcctttatttttcctgttaatctgtaaccacaaatactcctaaattgcttttgggcaatctgctcttggttttacgggccacaagcccacactgaccaattctttataggggctcttactgcctgtgttaaaaagtcaccctgaggtgtcagtctttccttaataaccgagtgcctttttcacactttyacttcaaaccatttcattctggaaagtaatttgtttacttactagttggacctcagaagatgacttttttttttttaacttacaacaaactctttatcattgtcttagaaagcattgtttagattataagt

SEQ ID NO: 49555 - DNA, 593 bp, Homo sapiens
ttacagaatccttttctacctcacaattgtaaaacttaacatctattttcatctaggtacagatgatatgaagagagggaagtcccagagtgaagagaaacacacagatatgtttgatttggggagaaagctggggggaatgagcaagaagcaaagagttctaaggtggagttttaacatttaaaacctggtcaggtgtggtggctcacgcctgtaatcctagcacttttggagggcaaggtaggcagatcactcgaggtcaggagttcaagaccagcctggccaacatggtgtattcaccaaaaaatacaaaaactagccaggtgtggtggygtgtgcctgtaggcccagctacttgggaggctgaggtggaagaatcacctgaacctgggaggcggaggttgcagtgagccatgattgcccaactgcaatccagcctgggtggcagaataagactctatctcaaaaatgaaaaagtttaaatcatttgcttataattttaaaatatgtctacaaagcctataagatattttatatggcaacttcaataaatactttctcttgggctaagtaatgacttatatacctccttg

SEQ ID NO: 49556 - DNA, 1756 bp, Homo sapiens
gcatgtggcataaaaaaaccctacgaaatcactcaaacagaaggaacaggagaggattagaggaaaccagctggctagaatgaaattggcagagttcagccaatgaaagtcaacttgccaagatttagtcttctgttaggtcatctgtttcctcctaactaaacaactcttggatatttatagacataaatgaatttttattctccacaatcgccaataacttgtcatttctggtatttgaatgtcagtcatggggaagaacaaggacttgtatatagaacactcaaatgtagtcgcctacaagtggaaaacaaggaacagatatattatttttctatactgaatgccaaaccaaaacagaattcgtggagactttatatagttggcagacattatacatattgctggacagctgcatgttatttataaaactttccaaagtttaagtatttttgaatatgtacatttccagccctctgacttcaggcttccaaattacctgaatagtctataatcacttttggtgacaaggtattttttcacctgacttcaacccaggcctgactctcagaacatgaagctcaaagtttaatttatacctctcctgctgaggcaattagcttcctttatttgtttgcttatttcctatttagcacatatctctaaagcttatttttgtattattttcatagcaagttgccttatgattgcattgatttctgatttttcttggaagttcaaaatgtcagggtgactttcagtttattatcacctagaactaatttttgttatatgtgagggagtgggaaaaggatatgagaaatatgtgcgtgtgtgtgtgtgtgtgtgtgtgtgtgcgtttgtgtctgtgatgtaacgacatgtttataaacatgaagagacacataaaaaagtacatgtgtaccttttgacttttgtacatgtaactgtcatgattttgtctacttttcagtgacacaaaatgtccatgatctacagtaactggtattttgctaaaccatgaatttaagtggcatgggtcacaagtgtaatgaacaacctcactatcaataggactgttacggttttttagtttatggggtgtacagctacttttgtcaaaaaaatttaatttttaaaaaatatatgaaattcaacactgtaaaatgttactgaaaatgttcctaacttatggggtgacaatatgcataggaaacatgactttgggggaaaatgtgcttcagacatagctaatagctcataaaaatatttcctgacaaagcattaagcatattgaaactacatgaaagtcttgattattttctccttcacattctagagcagaggttacaaactctaaagtctctagggcctagggaggtcgtgatgtcaatgagcaaacggaactaggtgcaaaaaacattctgagaggtgacgagctgggaaaaacgtgtgagcgcaagctgtgtctaaagaacaatggatatttaaatccaaacatcatggctgatttccaatttttttaggaaaagccataaatccagatttayaagcaagattttccaatttgtaaatatcagctcaaatgaccaaaaaaaaaagattgtgtgtaagtcataaaaagaaaaatcatagtacctagctagtttataacttctgacctagtacctgcacaaacacatgtgtatacacttagagaaaaatgatgaaggtatttataaattttcaagtagctggaaggatcttattcagaaga

SEQ ID NO: 49557 - DNA, 569 bp, Homo sapiens
ccatattgtgtgattctatctgtatgaaatgtccagaataggcaaacccacagagtcagrttagtaggtgagtagttgcctagcactaggagttggggaggggaaacaaggagtgaatgttaatgggttcgaggtgtcctctggggatgagattatttcagaattgggttataatgatggttacacatacaactctgcaaatatattaaaatcttttgatagcatatttttaaggggtgaatttaatggtatgtaaatgtatctcagtaaagctttttggaagataataacacattacagagtgctcctctggaaatgggtggctgatgggctgtatccagcctctacaagtgtttgatggatcattattgacttatgagtaaacagagatattcttcaggcttccccagtccacacttgtctgttgtctatatcaaggttttctttcatttcatttcctgctttggcccctggaaacatttgagtctgtgcctccttccaagggaagaaagtggaaggaatcattctacatggacagtgaagttacctgggctgtggaggggcctttg

SEQ ID NO: 49558 - DNA, 535 bp, Homo sapiens
aaagacatcaaaagcaacatagaaggttacatggatgtgaaaactgaaaaccctcagttttcccaagtaattaaaaaaaaataaaggtaacacatggattatcttgataaaacctaaaatcttcattacaggccagtcatttaaagggtaaaactcctgtggcataactgtgtcttcttatgggaagctaatttaaatcacttggaagtcaattccgatgacaargagactttaatttaattagacatagaaagagtgtgtccagggtcatgagtgagcataatattacaaaggaatgtaaacaggaaaaccagagcatagagcagtggggatccatagctcacaatgatagcatggaagtttcctggttacatgaagtaattaagacatatttaaaagccaagagtacaaaatcagacctgatgaaaaagctgaaggagttatcatcccagccaagcaggaaacccaagccttttattccttctcaagaaggaacaggagacagtgatgtgatctgtgagtcatgtgtaacatg

SEQ ID NO: 49559 - DNA, 1286 bp, Homo sapiens
acacttgcccatgtacaaggagttttaaatctagcacatgtctacaggttaaaaaaatttgcaatactctagctctttaggatatatatgtaggctgttatccatgtcatgtttaggagaactgaattttgattgaattcattacagtttttttacttcaaaggaaaaagatcatcaggcttcaatagatctcactaagtttttgcatcaaaatatccagttatctgaagagtaagatttgctgacttgcaaacaattagtatatactaactgattatctcctgtgtcatatgcaagacttcacaaaacaacagaatgcctttgaggggttcaatttaggttaggattgtgtccactatgttttcacgtcacaaataattccattccaaataaagtagaaaaattgcactgctacaacatcaaagaagagaactaaacaaagattaagcaaaggtatttggcaacccattgtgccagcacatggaaacacaagtctccactttggcagctgtgtttgtatacattccagtccaggctgaacattaggactccttaccaaactgaacaccatgtgactggtgaagcttcagcataaacacagacagtgttatgtatatggattcactttgcaacctgatatttatgtcatgtaaattaaatatgcatttgtacaaagattgaatatatcagtacatatgcacaatatttagagactgccttcttgccagcactgtactagactggagaattataaacacatgactatatcctagctatttataaaaacatgcaaaataaatacaatacgttttcaatcattgtcatcatgtatctcaccacatattatttttcttcataattttaaccctaaacacactacaaattatttaattaatacataggaacactaaaatttaaatttgcttttttttcctttgtgctttttctatacatatgattctaagtaagtwaaaagggcccagacttctctttttccatcctaatgatctctgataacaaatcatttcacatatagaagggagaaaatgttgttggccttttcttaaatttttgatgtttccaaaattatttgccaaagccactttggggactcttctgaggttgtggaactttctgctttatccactaatgtcctggaaccatagccttcattgaggtcagaattataagtgactatatggaaagatcttttttttttttttttttctcaagaaaccctcaaatccaacactctggtctgcgtgtatatgtcagggttcctagct

SEQ ID NO: 49560 - DNA, 614 bp, Homo sapiens
cgctttttatgtatttctatatatattaataaatataagtagttgtatgtacatatataaaaacatacctatgtgtgtgcatacacatgtatgtgagtatatatktttgcttctaccttgtatgagcaaagtatgccagagtggcagagtgctacatatatatgtgtaaatttctatattaaatatatttatgtatgttacctatatatttatatgctcataaatatatgtttccttgaatagtcacctatgttctatatttctaaatttataaatatgcatatttatgtgtgtgtatatgtacatatatttatatttaatttttatgtgttgcttctgccttatttgttaaggtagcccaaaatggcagagagattacatatgtatgctataaatgtttatactatatatattatgtttatgtatatatttatatatgttacgtagttctttttttcaagaatttgaaaaagtttctaaattgaggaaaaatttacataagattaagcactttaaagtgtatcattcagtgacatttaggacattcttaacactctctagttccagaattttttttcttttttgagaggggtctcattctgtcccttatgctg

SEQ ID NO: 49561 - DNA, 657 bp, Homo sapiens
aaatgaaaatataaagtctaaaacaccagagggaagtaggaactaatgttgtttgaggagcaataggagcaaaggtgagacatagtttaataacaactgtaggtttaggtggtagttacagaagcataaatcaataatatgacattattccccccaaatattcattcattcttgggtttcatgaatagaactgggtttagaatagaaaaggtwatgatttggctgtaaatttatgttgcttctcccatagctagagctatgaccccaatcctgggcaattcactttaagaactttgagaagtagtgtacacctaaaacttgcaatcctcatggaaagatgagtccaaactgtgtcacgtgaagaatacctaaagctgtggttccaaacttatggccttcagatgtgttctaaatggcccatatggggtttttagaaatttgaatttgcggcagatgtttcaaaattagtagatgtctcattaaatatagatttctgggatttactcttgctactgtgagggtgtgtgatcctgtgtttgtgttcctctcagaccactttactcatttactttaaatttctggtgcctatagcaatcggggtgctaacacccggggggataaaaaaggactggggaattcatggcctgtaaaacaagg

SEQ ID NO: 49562 - DNA, 657 bp, Homo sapiens
aaatgaaaatataaagtctaaaacaccagagggaagtaggaactaatgttgtttgaggagcaataggagcaaaggtgagacatagtttaataacaactgtaggtttaggtggtagttacagaagcataaatcaataatatgacattattccccccaaatattcattcattcttgggtttcatgaatagaactgggtttagaatagaaaaggtaatgatttggctgtaaatttatgttgcttctcycatagctagagctatgaccccaatcctgggcaattcactttaagaactttgagaagtagtgtacacctaaaacttgcaatcctcatggaaagatgagtccaaactgtgtcacgtgaagaatacctaaagctgtggttccaaacttatggccttcagatgtgttctaaatggcccatatggggtttttagaaatttgaatttgcggcagatgtttcaaaattagtagatgtctcattaaatatagatttctgggatttactcttgctactgtgagggtgtgtgatcctgtgtttgtgttcctctcagaccactttactcatttactttaaatttctggtgcctatagcaatcggggtgctaacacccggggggataaaaaaggactggggaattcatggcctgtaaaacaagg

SEQ ID NO: 49563 - DNA, 1860 bp, Homo sapiens
cttgggaaatttcaacaatagtgaggaccacaaacaccatctacacattgataactcctaatatccccagcttgtatcactccttagagtcccagacccataaaatctacaggccacaagccatttttcacctggatgccccaaagactcttgaggctagcacgtgcaagcatgaatatcgggtctctcacacctgtgctctgctctatcatgcactcttaatgcatgataatgcagtggcttaaactggagtttggaagtcattctacattcctcctcttctcaatgcctcaaatttactccctaccctccttctcctttctacctgctcaagttaaggtgtcatcatctcttgtctggactatgacagtcccctccgtctaaccttgtccactgtttaattcatttacctcacagccaccatgctccttccagtatgaaaacccctaatgttatgcatatgcaaacagcagggtggggtggcagtgggtgacctggtgaattacccaatagtggccaactattaataatgagaacatgccatacacctgataaaagctgaaattgaaattaacaatccctacctccataatattatatttatactcaaggataatcttaatattctttggatttacttcttattaaacaacttagaaatacagaaatgctttgacttattgagatatcacacttttgtaaatggctaatgtgatacaaattgagcacaatatttataactagtagccaggttagcacttcataaatctttataggtagatcccacatgtaaagtattccagagtatttccctgaataaggtgtcatgaatgaatattaactgcacatacacatgaaatttatatatttaaatttacacacaaatactgactgtacatccagtcacaagcataatatcataagcatgaaggaatcattaagtttattaatggcacttttgtcttgagaaaaagttcatataaattcatatatagggaattttaataaattgtataaataaatacttaatttccatcaaactactttgaaatataaattgtgagtcatgtatctggctttttaacatcgcttaaggagtaagtgtgttcaacatgtccattttccagatgtggtatggtttttccagttgtgctcttaccacaagtaagagcaaaacaggtaaaaatttataaggcaataaaagcttccataatttatctttgctttctatattaaagctttaatttagtattttttaaaatttttattttcgtggccagcttttataaagaataatctagtatttctgcattaaagcatcaatctagtatttcaaaagtgttgtaaaactatagacaaagcaaatcagagtgttcacaagattatatcctctatagtagtactgatacaatggtttaaaacatcatcagtgcttacagacgaagcaaaacatctcagtgatttttagacagaagggccatgtaaatggtcacagggagtcarcagagctagaagaaacttcctctcggtggatgtggccacactaggtagcagctctaactatcttctcctttgaagcaggaaactcttcattttctttccttatagatacagatagcttcacttatttccttgaagagttgttttgacaacccgttttgaaagaatctaccttataaaacacatccagccattcattccatatgtaaaacatttaaaatacctaagagtacagaatgaggctgaagtttgcgaagaaatgtaatcagtgtcgatgaataatgattagatacacacatttctgacaattaacactgagtttaaggaccaatcaactgtgtgtctaaaaatttaaaagtc

SEQ ID NO: 49564 - DNA, 1352 bp, Homo sapiens
atcttgttttcccttctatctctgtagagtagttaagcctgaataacaaaatggctttatgagttaagatgaaattgcaagaaacttcagaaatgccttttctcattatctccctcagacatctgtcaatatttatctgttaatagactaagcgatcagcctcagtaaacaaaatatcagatccaaatatatatgtatatcatgtaagcaattagaaggatgagtggggatagcatattagcatgacaattacatcaaatacccttatttatatggatctttccttcacaaaagttaatagatggtgaaactagcagaacagtaatgacattcctcaggttttctccccattgtcaaccacttcactgatattcatgagaagcctaactggaagcaaattcagaaataaacagactccagtttataaaagtagggcaaaaatcaaggtcacttgggtaatcaagtaaaacacaactagtactcacattgaagccacatgctttctgtgactttggtaaagtctgacttttcttagttgacagtaaagtgggatacaactgcataccggccttcgacttactagttgtataaacttgaggaggttacttaaactctttgaagcatatgcaaaacattttcagaatgagattatgaaataaatttcatataacttgatgatatggtttggctgtgtcaccacccaaatctcattttgaattgtagctcccataattcccacatattgtgggagggacctgttggcagatagttgaatcatgggggccatttctcccatactgttctgataatagtgaataagtctcatgagagctgatgattttataaggggtttccccttttgcttgactctcattctttcttgcctgccacaatgtaagacatgcctttagccttctgccatgattgtgaggcctccccagccacgtggaactgtgagtccaytaaacctcattttctttataaattactcaatctcaggcatgtctttatcagcagcatgaaaacagactaatacacttggtgtgataattttgagaaaaaatgtgtaaattactcagtacaatgtctaacattaaataggttttcaaggcttattacttagatcacttaagaatattaagagaaacttatataatgcaaacaaaatatacttagtaaatgatcagttccttaaaagcaatagtccttcatctattctgtaagacgatgatgataatttaatgaaaatctgaaatagtctcagcattttaaacaaacctatagttacatgcagctgtgcatttgagtatgttcatattagccctggctctacttttgaaagatgcagtttc

SEQ ID NO: 49565 - DNA, 1352 bp, Homo sapiens
atcttgttttcccttctatctctgtagagtagttaagcctgaataacaaaatggctttatgagttaagatgaaattgcaagaaacttcagaaatgccttttctcattatctccctcagacatctgtcaatatttatctgttaatagactaagcgatcagcctcagtaaacaaaatatcagatccaaatatatatgtatatcatgtaagcaattagaaggatgagtggggatagcatattagcatgacaattacatcaaatacccttatttatatggatctttccttcacaaaagttaatagatggtgaaactagcagaacagtaatgacattcctcaggttttctccccattgtcaaccacttcactgatattcatgagaagcctaactggaagcaaattcagaaataaacagactccagtttataaaagtagggcaaaaatcaaggtcacttgggtaatcaagtaaaacacaactagtactcacattgaagccacatgctttctgtgactttggtaaagtctgacttttcttagttgacagtaaagtgggatacaactgcataccggccttcgacttactagttgtataaacttgaggaggttacttaaactctttgaagcatatgcaaaacattttcagaatgagattatgaaataaatttcatataacttgatgatatggtttggctgtgtcaccacccaaatctcattttgaattgtagctcccataattcccacatattgtgggagggacctgttggcagatagttgaatcatgggggccatttctcccatactgttctgataatagtgaataagtctcatgagagctgatgattttataaggggtttccccttttgcttgactctcattctttcttgcctgccacaatgtaagacatgcctttagccttctgccatgattgtgaggcctccccagccacgtggaactgtgagtccactaaacctcattttctttataaattactcaatctcaggcatgtctttatcagcagcatgaaaacagactaatacacttggtgtgataattttgagaaaaaatgtgtaaattactcagtacaatgtctaacattwaataggttttcaaggcttattacttagatcacttaagaatattaagagaaacttatataatgcaaacaaaatatacttagtaaatgatcagttccttaaaagcaatagtccttcatctattctgtaagacgatgatgataatttaatgaaaatctgaaatagtctcagcattttaaacaaacctatagttacatgcagctgtgcatttgagtatgttcatattagccctggctctacttttgaaagatgcagtttc

SEQ ID NO: 49566 - DNA, 656 bp, Homo sapiens
gcaaagaactcatctgtgtacagatagtatgtaaattcgtctcttctttgaaggtgtccagcaaaaatgtgtgagcgttagaggctggggttctagcattgatctctatgagatctcggggctggtattttgcttctctggactttgttctattattcttaaacaatgagtttcaaattagtgtcctaagaacattgttcccaggaaattaagtatagaagagacaggagtgtgcacaatgaacaatttttttttgtttctttttttttttttttttttttgagacagagtctcactgtatcgcccaggatagagtgcagtgrtgcgatcttagctcactgcaagctccgcctcccgggttcacaccattctcctgcctcagcctcccgatcagctgggactacaggcgcccaccaccatgcctggctaattttttgtatttttagtagagacggggtttcagcgtgttagccaggatagtctcgatctcctgacctcgtgatccacccgcctcagcctcccaaagtgctgggattacaggcgtgagccaccacgcccggcccacaatgaacaattaaatgcaggaaacgctagatttcacacaggtacttgggctgctttccctggaaacaactcgctgttctcagtgtccatta

SEQ ID NO: 49567 - DNA, 559 bp, Homo sapiens
ttgaaatatcagcgaaaggaaacgtaattttgttacacagtaaaatgatcctttctaacctccgggatatcttatttcatactacttgatatgtgcgattacatctggatctcaagttgagaacacctartggtagtgatgttgagtatatgaagtgattttagttcatatagttaattcactcagttaaaggttgctaatccttgagtcttgtggcagaagacttgaacagaggcagaaggattggcacaaattcttgcagaagcttagaatgccgtttctaagaaggggattccactgaaacagtaggtagatataagtattatcaccacatggatagatggcacttttctttgagactttaacttgttttattgatgcttccaaattagggaaatatatacctaatttgttatggttatagagaaattcataatagaatgggttgctgaaatcatgtggtaagttagcaacagagccatcaaggtagagtcccttggggtcaagattgccaggctatccctgttctttctgttttaggcgttaggtgaagcccatt

SEQ ID NO: 49568 - DNA, 1362 bp, Homo sapiens
catttttgaatactttcataatataaaattaattccttcacaaaaatatctgaaaattaaaacttcattctttttttctattaatggaaataatttgactatgaaatcagattcccaaatgttgaatttattcatggtttcttatctcataaactgttcaatgaaataaaagaatacttagtcacgagtattgtttaatcttcctatctcatgttaaattaaaaaaaaaattctccattaacttaattattttaacccaattctatttcccagtttccctctactgaatcacttctttttgcactacttactgcttctccacaattttatgatttgttttcccttgaaaaaatcagtttagcattgttgtcaacagtgtaaaatatgacagtttatacttcttaaaacacatgaagaatcaaaatgtatatttgtaaaattagttatgaaaaaagaaaggaaaatatattcctatgtatcttgtctayttcatccacctatcaacctctttcataaatgcaatttctcaatattgttctatttattactgcctgggaataccaaggccacagtttaccttgattgctgtaggaaaataacatgttttctagaattccacagccacagaaaaatactgcctaagaaaaaaatggggattgtgtttttaaattaaatctggcttaaaattaaagaaaatatattgtttcttgaaattactatcaattaaaaatacaaatagatataccaagaagataaatcatatggatacaaatttgtttatattaattaacaaaaagtatcaaaatattaaggcataaattactatgttcatagttatagaactatgttcgtagttatagaagtatcataactcactgtggtactgtagaagaaaggggttttagagaatgactactagaaaaagggagttatgaataataaactacagtcttctgatcaaatacagaaagatgaacagcacaaatcaaccatatcatttttgcttgcacacatttctataaagtgcactaattagtggttaaatttgtagttagtttatagattacaaaatataaagatagaatttataaagataagtaaacaaataatgaaaataaatctatggcgttacggtgaaggcagaaaacagatctaaataaactcagaaacacattcctcactcacatgattttgtattataaaaatgttgagtttttgtcaaattaatataatactatatttgcacaacattttaagaagttatgttaaaaactggtcccaataattttatagttcatacaaaagaacattgcaatttctaagaaatatagcataaaaaaatgaagaaaatgttcaatgttc

SEQ ID NO: 49569 - DNA, 538 bp, Homo sapiens
caagaactttctactgagaaacgaagcccctgacaggggtgttcaagtgttattcccttagtagttagggcaggttattaatttagtttcgcctacaggcgctctgtccctatactgcrtggaagttaattagcattttaactctgaagctgccaaggtcggcaaaactgtaagctgctaacatctaagttgatgcagtatgatgtaatgtctgccagttttttccctgttagacttaattcctacaaaatattacaatcctaaaaaggaataaatgacagcatttgcaggctaatctcttattaagatgctcttttcaggttttacagaaacggccactttctcaatgaatattcaagaacatcgattaaaaagtcaaaacatgcatggtatatcttagactcccccacaagaggaaagtctattgtaaacaaaatcgtctttttcgggttgcaattccaaatatttttttaaggttcttcatgttcaggagcatgttctgcaattccacttccaaatattaccgataataaaaaaa

SEQ ID NO: 49570 - DNA, 538 bp, Homo sapiens
caagaactttctactgagaaacgaagcccctgacaggggtgttcaagtgttattcccttagtagttagggcaggttattaatttagtttcgcctacaggcgctctgtccctatactgcgtggaagttaattagcattttaactctgaagctgccaaggtcggcaaaactgtaagctgctaacatctaagttgatgcagtatgatgtaatgtctgccagttttttccctgttagacttaattcctacaaaatattacaatcctaaaaaggaataaatgacagcatttgcaggctaatctcttattaagatgctcttttcaggttttacagaaacggccactttctcaatgaatattcaagwacatcgattaaaaagtcaaaacatgcatggtatatcttagactcccccacaagaggaaagtctattgtaaacaaaatcgtctttttcgggttgcaattccaaatatttttttaaggttcttcatgttcaggagcatgttctgcaattccacttccaaatattaccgataataaaaaaa

SEQ ID NO: 49571 - DNA, 550 bp, Homo sapiens
cacttgatttctttccaaagggttatataacactaatttcaccagcaatatatgcgactactcatttcctacatactcactatcacttgggtgcagtcaaggaaacttagtaggcctgaattgcccaaacctggcatactccaaagaatggtgtgactctagcccggctcctgggaaataacctctaagtccttggaatctcctgcctatgtgggagttaacaatgtgatttattgtggggaccttggaccatgcagtgtcagcttgaccttgggaagggtggagacaggaaactaaggtcatccaaatgggtgctcttktccatgagaccaacctccagtaaaaccctcaaccccaagactcaggtaagcttcttgttggggagtattttctgtactttctgccacatatcgttgggtgaattaagcactgttcacatgataccactggcagaggacaactggaagcttgtgcttggtttctcctggactctgccctatgcacctttttctgctgctgattttaatctgtatccttttgttgtaataaa

SEQ ID NO: 49572 - DNA, 550 bp, Homo sapiens
cacttgatttctttccaaagggttatataacactaatttcaccagcaatatatgcgactactcatttcctacatactcactatcacttgggtgcagtcaaggaaacttagtaggcctgaattgcccaaacctggcatactccaaagaatggtgtgactctagcccggctcctgggaaataacctctaagtccttggaatctcctgcctatgtgggagttaacaatgtgatttattgtggggaccttggaccatgcagtgtcagcttgaccttgggaagggtggagacaggaaactaaggtcatccaaatgggtgctcttttccatgagaccaayctccagtaaaaccctcaaccccaagactcaggtaagcttcttgttggggagtattttctgtactttctgccacatatcgttgggtgaattaagcactgttcacatgataccactggcagaggacaactggaagcttgtgcttggtttctcctggactctgccctatgcacctttttctgctgctgattttaatctgtatccttttgttgtaataaa

SEQ ID NO: 49573 - DNA, 2105 bp, Homo sapiens
cttctccttgaatgtttcgctaagattctgtcaaacagatcaggaaaacggaatatatgcaagattgactttgcaatcaacaagcacaaaaaggccctggtagataaatcagttgaaagagaacatatacaatgactgactggcagtattgtaagacaccatttgaggtttgacattgaagatattcttgaagaataatttatctgagaaaagatcaacttgctctatagaagtgccaaatttagagttatcctacttaatgcatcaacatcaaccttaatatttgggaaggtttttctyttttaatttaagttgttccttcaagaaaatatgtagcatggacctatttttgctctttgatgtacaaagcagacattaaattggatttcagattcagtgacagaggcggactaagattaaacaccaaggtcgtctatgaaattgattgaatcatttgtttaatcatggcatacctcgccatagagaagtgcttaccaactttatgcttttatctttactagtcagcaattcattgaataccttttattatcattgctttcttctattttcagggcaggagagggcagtaggtagcatcgttcttggtcactattaccatctgtctctctcattctctttttacctcacttcttagatgacagaaggtgacatctcaactaactcccatatttcattgactctaagatactgtaaattgtaaggcacactatttttttttacttaccactaagaaagaaaaacatggctgcttaaacttcaccgtaatgctttcttatcacctagaatttttattctatacttatcaaaataacagttttaaactttgtcacatatttgtatcatatttcacgcttgtgaaaacacaaaaaagtaagtaaaataaatggttaaaatacctaaaatttctgcatatttatagtttaacccatccaaattcattttttacacagttgttgatatttgtgtttttcaatatattcttaagttctgcactatttgaatattagcatccttaaattattatctccaagactttcttccaaactgctgacactcactgctgcagtgagctttcctgagcaagcacaggtgataactctgtcacaaccactgcctggtcagcagcaatgttaaggtgctttaaaaaaaaaaaaaaagtacatcaagaatttgttaaatacaatctgtggtttaagatgcatctgaaaatataacccaacagcttacctctgttccttaattggtctggtgttttctgaatataaaatataactaccattacatgtctttagccttttatgttaatataggtgtttacttgtaaaggacactccttccttcttggtataaactctttgaattatgatttcaacaaatgtttcattcaccatcttaattgtaattcacaaattattttgtggaaacaacaaacttcccatgaaattcatgtaggtaacatatattaaaatctttatgtttctgtttttactcaaactttgcaagttcaaatgttaacttcatctagccactcaaagacaatggcagttcaacataggcattcctcaggtaatgtgttattgcattcctgaagaactgtgattaaatcaaacattcataaatagaatcatgttttcctactgtcttagatttttatatcagagctcgcttttttcagcttctgctagatcttaaacattctatcctttctcgaaactagcctttaccttgatctccttttctcctgcccacatctctctttaagataaagttatgcaaacttgagcttaatttacttgggagtgctcaacgtttgaaataagctccccacaaatactcttgtgatgtcttaaaattaacgtgtcttgcgattaataaacccaatgatttagatttgttttattttacaggctggcttacactggggacattttggtttccatttatggggtaacacccctaaacatgttctgctgaacattgtaacccatcctaacaactttgccataaaagcaaagaattttttatcaactccattattttttatttgtgttttaattgttttttcctatgtgtttgttttaaaa

SEQ ID NO: 49574 - DNA, 2381 bp, Homo sapiens
gcataagagcctccaatattttaaaagtaaaatagcagatggcttgttgcagtggctcacacctgtaatcccagcaatttgggaggccaacgtgggcagattatctgaggttaggagttcaagaccagcctggccaacatggtgaaactcccatctctactaaaaatacaaaaattagctgggcatggtggcaggtgcctgtaatcccagctacttgggaggccaaggcagagaattgcttgaacctgggaggcagaggttgcagtgaaccgagattgcgcgattgactgcactccagcgtgggtgacagagcaagactctgtctcaaaaaaaaaaaaaaaggaaaatagcaggctcctaattatcttggaaaatccactacataaaattctgattttattctatttgcacattcaagaattactgataatttaaagcaagactgttgtattagtccatttttatgctgctgataaagatatacccgagactggggaatttacaaaagacagaggtttaatggacttacagttccatatggctggggaggcctcacaatcatggcggaaggtgaaaggcacatctcacatggcggcagacaagggaagagagcttgtgcagggaaactcccccttatagaaccatcagatctcatgacacttattaactatcatgagaacaagtacaagaaagacctgtccccatgattccattacctcccgccaggtccctctcacaatacgtgggaattcaagatgagatttgggtggggacacagccaaaccatatcaacgtattattataagaaaaaatatatttaacaagtaaacaataccatcttaccttataatttgaacttataaaaacgaacgtttcaagaaaagaagtttcataaaggtttatgacaatttatttgaatgggattttctgtgtcattaagaaagatcacagcactttgggaggccaaggcaggtggatcacgaggtcaggagttcaagaccagcctgggcaagatggtgaagccccatctctactaaaaataaaaaattagccaggcgtggtggcaggtgccacttgggagctacttgggagactggggcagagaagtgcttgaacctgggtggcagaggttgcagtgagcctagattgtgccattgcactccagcctgggtgacagagtgagactctgtctaaaaaaaaaaaaaaagaaagataaaataattacaagatctttcataaaatagaaaataggagggagaggacaaaaataataatctatcacacatatcactgtaatacaatcatttagttaatgcattaattttatatagaattataattcaggcttttcttattgagtactaaaggtaatactcaatattccattaggagaacaaattgcctagaataaaattctagcattaacattaaatgccaattaatcaacacagctgcccagtctgcatttcactgttgcgagaaaaaaagtataaaaatgttcatttgattcattgcatgaaatacaacactttggttaggggagaggggaagaagatggatgaaataaaatctcagagattaaactggaggaagaatggttaagacggacttaaaaggaaaagaaaaattactgaggagaaaacaaagaaacaaaaaacaaagagactctctgcagacaaccaaaaatatatattcctggctaaataatcagtgagacattttaattcaactgagcatttttttttaattttaaaaaatagagatggggggccaggtgcagtggctcacgcctgtaatcccagcactttgggaggctgaggtgggtggatcacaaagtcaggagatggagaccatcctggctaacaccgtgaaaccccgtctctactaaaaatacaaaaaattagccaggcatggtggcgtgcgcctgtagtcccagctactcaggaggctgaggcaggagaatggcgtgaacccaggaggcggagcttgcagtgagccaagattgtgccactgcacttcagcctgggcgacagagtgagactccatctcaaaaaaatagaaaataaaactaaaaatagagatggggtcttgctatattgtccaggtttgtcttgaactcctgaagtcaagcaatcgtcccacctccacctccaaaagtactgggattacaagtgtaagccaccgcatctggctgaactgagtaattaactgcctcctacgagcaaggatgtacaaggctcattaagtactaagaaaatcatgcaaaagagtgttgccctttttgaggtgtctctttaggaaggcttctgctcatcattttggccatgctgctaatattctaaacatttctrgaacttctttttggaactacattcaatcag

SEQ ID NO: 49575 - DNA, 2048 bp, Homo sapiens
tgaattctttaaatatttacaaagaaaagcaataggataatatattttccaactaatttaagttttagtagtaaacaaacacatgttcctgtgcttctcatgacaaatttgggacagagattttttcagaaaaatacttttatcttaatgccttcaaacccgattttactcaataattccttttgtgtgcacatgaacacatatatgcatgtatatagtgaatcaaaaccccatttactatttcttaaaggtggtcattcatctgtctctgaaaagaatttttgtcttaaaactaagttgatgagtagagatattttggagcagatactatgtattaacatcatcttattaaagcaattcaggaagagacaaaagaaacatcttgaaaaatttgctagtcgcatggcatgaatttgcataattgctccacttttatcttttatcatcaaaggaaaaaataggatttatgtaattatagtgatccagtagtaaaatgtagcccaaagaataatttgtcctttgctgagtttcagttgccacatgtatgctaaagctataatactcttcagataaattgacagaaatattagaagatgcctagcaaatatccttgtatatacagcgagccagacttaattgaagtgtattcatatgacctcaactgctcttttattttcttctatattcaaaacatctgattttgaaatctacaatcccccaaggagaagctattcccatacaaaacatgttttgtttctcaaagtcacaaaattattatgaggacaaaaaaatctacagacagcttatctgttacaccagtatttcgttccttgttaatacaggttgtagggagaatggttccatttacagaaattattgtttcatgttagtaccttctggatttccccacaaataaccattttggaaaatgtcaagttagccattttaggctttttacttacttgtctgtagctctttctctctggcctgcacatcagaaaagacttgcttaaaatgatttgtaaaggccacaaagtctgcatccaggaacatgggtccttgtcctttctctttcagggctatgctttgaatttttaatcgttcaatttgaggttgaagacctgatagccggttgacttcatcctgtgccatagagtatggaaagtaagtaacacgtttactttgcatacattacattttgcaaaagaaggtattaaaaagcagtaaggcaagtttagcttaatacccttcacaaatatctgataagaaacatccatgacagtatagacaagcctctatcaccagccatacatttaaggataccttggctctttgttcaatatgtatcatcctatataatgatatttaaatttcaagatgacataatttagagcattaatgggtatgaatgcgtacagtggaaaaatactatgcatgaccttaaatcctttccataaatcaaatataggtgtttggctgcacccctcttatatcaaaatgatgtgcgcttgcttcaaattttaagctcactcaatgaacaatattttctctttcatttctgcaaaatataaattacatatatacctacatatatgtatatgtgtatactataattataaatatattttgatacaattatatagatyatatacacacatacaaaatctatataatacttatacatatgtatgtacacacccaaatataaaaatatatctataatcttctatgttttgtatggtctcattacttgtcctgaccaaacaggcaaccactgctttttttttttttttttttttttttttttttttttttgggacagagtctcgctcttgttgcccaggctggagtgcaatgacgcgatcttggccaaatgcaaccttcacattccaggttcaagcgattcttctgcctcagcctcctgagtagctgggattacaggtgcccgctaccgtgtccagcaaattttttttatttttagtagagatggagtttcactgttggccaggctggtctcaaactgctgacctcatgatccacccaccttg

SEQ ID NO: 49576 - DNA, 2048 bp, Homo sapiens
tgaattctttaaatatttacaaagaaaagcaataggataatatattttccaactaatttaagttttagtagtaaacaaacacatgttcctgtgcttctcatgacaaatttgggacagagattttttcagaaaaatacttttatcttaatgccttcaaacccgattttactcaataattccttttgtgtgcacatgaacacatatatgcatgtatatagtgaatcaaaaccccatttactatttcttaaaggtggtcattcatctgtctctgaaaagaatttttgtcttaaaactaagttgatgagtagagatattttggagcagatactatgtattaacatcatcttattaaagcaattcaggaagagacaaaagaaacatcttgaaaaatttgctagtcgcatggcatgaatttgcataattgctccacttttatcttttatcatcaaaggaaaaaataggatttatgtaattatagtgatccagtagtaaaatgtagcccaaagaataatttgtcctttgctgagtttcagttgccacatgtatgctaaagctataatactcttcagataaattgacagaaatattagaagatgcctagcaaatatccttgtatatacagcgagccagacttaattgaagtgtattcatatgacctcaactgctcttttattttcttctatattcaaaacatctgattttgaaatctacaatcccccaaggagaagctattcccatacaaaacatgttttgtttctcaaagtcacaaaattattatgaggacaaaaaaatctacagacagcttatctgttacaccagtatttcgttccttgttaatacaggttgtagggagaatggttccatttacagaaattattgtttcatgttagtaccttctggatttccccacaaataaccattttggaaaatgtcaagttagccattttaggctttttacttacttgtctgtagctctttctctctggcctgcacatcagaaaagacttgcttaaaatgatttgtaaaggccacaaagtctgcatccaggaacatgggtccttgtcctttctctttcagggctatgctttgaatttttaatcgttcaatttgaggttgaagacctgatagccggttgacttcatcctgtgccatagagtatggaaagtaagtaacacgtttactttgcatacattacattttgcaaaagaaggtattaaaaagcagtaaggcaagtttagcttaatacccttcacaaatatctgataagaaacatccatgacagtatagacaagcctctatcaccagccatacatttaaggataccttggctctttgttcaatatgtatcatcctatataatgatatttaaatttcaagatgacataatttagagcattaatgggtatgaatgcgtacagtggaaaaatactatgcatgaccttaaatcctttccataaatcaaatataggtgtttggctgcacccctcttatatcaaaatgatgtgcgcttgcttcaaattttaagctcactcaatgaacaatattttctctttcatttctgcaaaatataaattacatatatacctacatatatgtatatgtgtatactataattataaatatattttgatacaattatatagattatatacacacatayaaaatctatataatacttatacatatgtatgtacacacccaaatataaaaatatatctataatcttctatgttttgtatggtctcattacttgtcctgaccaaacaggcaaccactgctttttttttttttttttttttttttttttttttttttgggacagagtctcgctcttgttgcccaggctggagtgcaatgacgcgatcttggccaaatgcaaccttcacattccaggttcaagcgattcttctgcctcagcctcctgagtagctgggattacaggtgcccgctaccgtgtccagcaaattttttttatttttagtagagatggagtttcactgttggccaggctggtctcaaactgctgacctcatgatccacccaccttg

SEQ ID NO: 49577 - DNA, 2048 bp, Homo sapiens
tgaattctttaaatatttacaaagaaaagcaataggataatatattttccaactaatttaagttttagtagtaaacaaacacatgttcctgtgcttctcatgacaaatttgggacagagattttttcagaaaaatacttttatcttaatgccttcaaacccgattttactcaataattccttttgtgtgcacatgaacacatatatgcatgtatatagtgaatcaaaaccccatttactatttcttaaaggtggtcattcatctgtctctgaaaagaatttttgtcttaaaactaagttgatgagtagagatattttggagcagatactatgtattaacatcatcttattaaagcaattcaggaagagacaaaagaaacatcttgaaaaatttgctagtcgcatggcatgaatttgcataattgctccacttttatcttttatcatcaaaggaaaaaataggatttatgtaattatagtgatccagtagtaaaatgtagcccaaagaataatttgtcctttgctgagtttcagttgccacatgtatgctaaagctataatactcttcagataaattgacagaaatattagaagatgcctagcaaatatccttgtatatacagcgagccagacttaattgaagtgtattcatatgacctcaactgctcttttattttcttctatattcaaaacatctgattttgaaatctacaatcccccaaggagaagctattcccatacaaaacatgttttgtttctcaaagtcacaaaattattatgaggacaaaaaaatctacagacagcttatctgttacaccagtatttcgttccttgttaatacaggttgtagggagaatggttccatttacagaaattattgtttcatgttagtaccttctggatttccccacaaataaccattttggaaaatgtcaagttagccattttaggctttttacttacttgtctgtagctctttctctctggcctgcacatcagaaaagacttgcttaaaatgatttgtaaaggccacaaagtctgcatccaggaacatgggtccttgtcctttctctttcagggctatgctttgaatttttaatcgttcaatttgaggttgaagacctgatagccggttgacttcatcctgtgccatagagtatggaaagtaagtaacacgtttactttgcatacattacattttgcaaaagaaggtattaaaaagcagtaaggcaagtttagcttaatacccttcacaaatatctgataagaaacatccatgacagtatagacaagcctctatcaccagccatacatttaaggataccttggctctttgttcaatatgtatcatcctatataatgatatttaaatttcaagatgacataatttagagcattaatgggtatgaatgcgtacagtggaaaaatactatgcatgaccttaaatcctttccataaatcaaatataggtgtttggctgcacccctcttatatcaaaatgatgtgcgcttgcttcaaattttaagctcactcaatgaacaatattttctctttcatttctgcaaaatataaattacatatatacctacatatatgtatatgtgtatactataattataaatatattttgatacaattatatagattatatacacacatacaaaatctatataatacttatacatatgtatgtacacacccaaatataaaaatatatctataatcttctatgttttgtatggtctcattacttstcctgaccaaacaggcaaccactgctttttttttttttttttttttttttttttttttttttgggacagagtctcgctcttgttgcccaggctggagtgcaatgacgcgatcttggccaaatgcaaccttcacattccaggttcaagcgattcttctgcctcagcctcctgagtagctgggattacaggtgcccgctaccgtgtccagcaaattttttttatttttagtagagatggagtttcactgttggccaggctggtctcaaactgctgacctcatgatccacccaccttg

SEQ ID NO: 49578 - DNA, 550 bp, Homo sapiens
ttacccatcctccttcctttccctcattcctgttgttatttgagaatgagggagaaacagtattttacatttatgtaattaggcttttccgttagttctcaaggatcctcttttggctcttgggaaagaattgtacctgtacaaggcaattatagaatgcgaactgctttgcctcattccatactgatcatcccagctgaacaatttgaaaactgttctgcctttttgttacatgaatctgtcagaaatatatttttaatttaatataaatgaaattcaataaaatatgaaacaaacgttctcttttgtgtcagaaatttgttattagataagccaactagcagagaggaagatttgttctaggtttaataatgtgaagatataaaaatgggcttattttgcccrtatttatgcagctcattagttattcctcagaactctttggtgtttgggatgtgatatgttccatatgtttttaccatccactgcatatgcccattgatgtgtacagacttactcatctgtgcatgctatgcttaattaactctgg

SEQ ID NO: 49579 - DNA, 591 bp, Homo sapiens
aaaaccaccaccatgtggagagcctactgatggtgtgccctgcccaaggtgttagaaatctgcttggtaaggcacccacttctcccccacatatatcagagaatattgcagataactacacttatctctagcagtgttattgcatatattagtgttaatagaggagaaacttcatataaaatgcctaatttataaataagttggtaaattttctagcgtttattataggctaagtggtcactggaaacttctaaaatactcacaatgtagaatctgatcctgatccaatgtcaaagcttcatttaaaatgacgatgatgagaggaagaaattatagaaaagctgtgaggtatataaagcggtatagaagagcttctaacaaggctaaaatgaaygtcacaattctgactctagctactctctcctgctttatagtcttaaaatcctgaattcacaattgcttaatttaaaaagcccctatggggagacacatatatgcagccatacatatatgtacagaatatatagagatgtagtagatatacatatacagaacatataaagagatgtaaaatatttaaagatatattga

SEQ ID NO: 49580 - DNA, 591 bp, Homo sapiens
aaaaccaccaccatgtggagagcctactgatggtgtgccctgcccaaggtgttagaaatctgcttggtaaggcacccacttctcccccacatatatcagagaatattgcagataactacacttatctctagcagtgttattgcatatattagtgttaatagaggagaaacttcatataaaatgcctaatttataaataagttggtaaattttctagcgtttattataggctaagtggtcactggaaacttctaaaatactcacaatgtagaatctgatcctgatccaatgtcaaagcttcatttaaaatgacgatgatgagaggaagaaattatagaaaagctgtgaggtatataaagcggtatagaagagcttctaacaaggctaaaatgaacgtcacaattctgactctagctactctctcctgctttatagtcttaaaatcctgaattcacaattgcttaatttaaaaagcccctatggggagacacatatatgcagccatacatatatgtacagaatatatagagatgtagtagatatacatatacagaacatataaagagatgyaaaatatttaaagatatattga

SEQ ID NO: 49581 - DNA, 551 bp, Homo sapiens
ccaaataaatacaacagcataaataaataagttaatctgtttaaagaataaatttctactttcacagggcatcatgtgcactgctttagttttcagcttggttgtactttttaataatatttaaaactggtcctgaatatttgataaggatatggcagtcctaacttctctcrtcaaactctatggataacttatactgataaaataaattatgtttcataaaagaaaagctgttgtttcaaaagtaatggaggcagggccaaggtacaatcagacaattttaattgtcttcaactattatatatcttactatattttaggtcagataatttggctcataatattcaaaactgtattaattatgggattttacaacaaggttatgtagtgtatgtttgccagttgggaaagaaagataattatgcttgaatgtaggtcacatttaagaaaccctcttaggcctatgggaaccatgtttccttaaaaatcaagagttaatgatattaaagagaatggtgccacctctcatcctgtgacccagttcttttggt

SEQ ID NO: 49582 - DNA, 556 bp, Homo sapiens
ctctttgtctcttttccagatttaaagaattaagatacttgaataagctgctgtaaggaaccaccaatactagaagacatactgtactttaagatgattgggcattgtgtagygcagacaccaatccttggaaggacatacaacacactaaggatatttggggccatggaaaaatctagctcctgaagtaactgatgagggtcccccttttcccagcaaatactcggcctgcaggactaatgtttaactagccatgtagtttaacatatatttccctattcccctccttcccttgacttttgtcaaactagctttcttggactagtttgattatatgcctcttaaagggaaggaagccttgtatctttctctccattggcatctctatgaaattcgcatgctggttactgaagacagcaaaggctcacagcaagctatagatgtcctggatgaatgtctttgctgagtcttacaaatttagaccaaaaaaagaatactggaatctagaactaataatatatatatataatatatatattttaataaatatatttta

SEQ ID NO: 49583 - DNA, 539 bp, Homo sapiens
tttactgggtttttagctatggggaagaggcataggtgctcagccacactgggactgggtggcctgggactggccctggaaggtgcctggctgaccccttgctcctggacagattgagccactcgaggggatgcggctgctggcagtgcctgagctgtgcaggggatcctgcgagacacccagaagacttattgtgcggggattattattttgtaaaatgcattttacaaaaccactcagggattttccagagcgaatctctggggcagggacgggctctccactggcytcgtcccattggctgggctcagagggcagcagccatcttcatttgaaacctcaagaaataaccagaacagggactcctggggatagggacagggactggagtgggactgggggctgggatctgcaggctctactgtgtcctcaccgcagctgtgtccttggcagtgcaactggtgtggagaaggggcacagtgaatgtcctcttagtgaagatcatagtaaactggcacattttaaaaaatatcaatact

SEQ ID NO: 49584 - DNA, 1077 bp, Homo sapiens
cagagtaaagaggattcagagtgcaggggaaggggtggatgtaattctcaccgggagctcactaagaaagcaacagttttgkaagacatgtagaagttgaaaaaaagtggatatctatgaatgtactatttcaggcaaagagaacatcagtgaaatacaaacatgtaagaggtaaaggagatcatatgtgatgcgatcaaggaacagcaaggaaaccaggggcctggagaagaaacaagtgaaaagacagttgtcgatcaggtcagggagccaaagggcctgtaggggcatggtgggcaattggaaggaccatggcttgcctttgaatgtgactgtccaacacaatgaacagaggaggcttgggagaagaaattaggtcacatgtctatttatggctcctttcatttttgtctctcctactttctggacaagtttaaagaattctgaatcctggccatttttctcttttctatttattcacttcctctgtatggatggggacaggtgtggtgaaggttaagggatctggtgaaagacagaaagaaaaaaaaaacacgattttagtgttttattctactttatattgcaaactctataattgagtgctatgtttcaagaacttcaaagacgctagcagaagattatgagaaagatacaccaaagtaataaaaatcatgaacttgaattatatatggaactcaaaaaaacaagacaaaaattggaaagttatatccaaacatctcagtgtgcaacccctgcagaaagtgaccatgcttcattatcacattactaggtacatcatttaaggtaccacactgagagagaccaacgagaatagctagtcatagccaaagctgtgacttcagcatcttgaattatgccagttgaataaaaatgacattcaaccaaggcccacactaccaataattcagtaactttataatccagtctcactttacagtgttgatggaagatgcccaccaattttctgtcctctgaaagaaatgagattaaaaaataactaagatcagagcagaactgaaggagatagagacacaaaatttccttcaaaaaatc

SEQ ID NO: 49585 - DNA, 1077 bp, Homo sapiens
cagagtaaagaggattcagagtgcaggggaaggggtggatgtaattctcaccgggagctcactaagaaagcaacagttttggaagacatgtagaagttgaaaaaaagtggatatctatgaatgtactatttcaggcaaagagaacatcagtgaaatacaaacatgtaagaggtaaaggagatcatatgtgatgcgatcaaggaacagcaaggaaaccaggggcctggagaagaaacaagtgaaaagasagttgtcgatcaggtcagggagccaaagggcctgtaggggcatggtgggcaattggaaggaccatggcttgcctttgaatgtgactgtccaacacaatgaacagaggaggcttgggagaagaaattaggtcacatgtctatttatggctcctttcatttttgtctctcctactttctggacaagtttaaagaattctgaatcctggccatttttctcttttctatttattcacttcctctgtatggatggggacaggtgtggtgaaggttaagggatctggtgaaagacagaaagaaaaaaaaaacacgattttagtgttttattctactttatattgcaaactctataattgagtgctatgtttcaagaacttcaaagacgctagcagaagattatgagaaagatacaccaaagtaataaaaatcatgaacttgaattatatatggaactcaaaaaaacaagacaaaaattggaaagttatatccaaacatctcagtgtgcaacccctgcagaaagtgaccatgcttcattatcacattactaggtacatcatttaaggtaccacactgagagagaccaacgagaatagctagtcatagccaaagctgtgacttcagcatcttgaattatgccagttgaataaaaatgacattcaaccaaggcccacactaccaataattcagtaactttataatccagtctcactttacagtgttgatggaagatgcccaccaattttctgtcctctgaaagaaatgagattaaaaaataactaagatcagagcagaactgaaggagatagagacacaaaatttccttcaaaaaatc

SEQ ID NO: 49586 - DNA, 545 bp, Homo sapiens
gtcycctcccaactgccacactcattaccttctctacacttaagtgtctatggtgctgtttcccaagactcttctccgcttgctcaaattgaacccatccttcaaagcccaggtcacgccatctcttcttttgggctactccaagcactgctgatgtccctttaccatataacttagcacaaggattggagctcagttttataacatttgttagtgtttgcttggaatgtggtgttgagaaagattctaagtctcagaggggaaaagaatgtcatgattgattagcaatgtctgccagtaggcctacggggacagagagacacttacttagctattactaatgggtttctgggcatcagtccatataatctcttgtgagtgtggcaaatatgttacattatttccatcacccagtcttttcttagtacagagacatggaatgacttgaatcctgaagttaggaaaagttctgaataactcctccaaccccctcctaacttcaagtcagagcgcaactgcactgtcttacctggctttatttatgc

SEQ ID NO: 49587 - DNA, 545 bp, Homo sapiens
gtctcctcccaactgccacactcattaccttctctacacttaagtgtctatggtgctgtttcccaagactcttctccgcttgctcaaattgaacccatccttcaaagcccaggtcacgccatctcttcttttggrctactccaagcactgctgatgtccctttaccatataacttagcacaaggattggagctcagttttataacatttgttagtgtttgcttggaatgtggtgttgagaaagattctaagtctcagaggggaaaagaatgtcatgattgattagcaatgtctgccagtaggcctacggggacagagagacacttacttagctattactaatgggtttctgggcatcagtccatataatctcttgtgagtgtggcaaatatgttacattatttccatcacccagtcttttcttagtacagagacatggaatgacttgaatcctgaagttaggaaaagttctgaataactcctccaaccccctcctaacttcaagtcagagcgcaactgcactgtcttacctggctttatttatgc

SEQ ID NO: 49588 - DNA, 545 bp, Homo sapiens
gtctcctcccaactgccacactcattaccttctctacacttaagtgtctatggtgctgtttcccaagactcttctccgcttgctcaaattgaacccatccttcaaagcccaggtcacgccatctcttcttttgggctactccaagcactgctgatgtccctttaccatataacttagcacaaggattggagctcagttttataacatttgttagtgtttgcttggaatgtggtgttgagaaagaytctaagtctcagaggggaaaagaatgtcatgattgattagcaatgtctgccagtaggcctacggggacagagagacacttacttagctattactaatgggtttctgggcatcagtccatataatctcttgtgagtgtggcaaatatgttacattatttccatcacccagtcttttcttagtacagagacatggaatgacttgaatcctgaagttaggaaaagttctgaataactcctccaaccccctcctaacttcaagtcagagcgcaactgcactgtcttacctggctttatttatgc

SEQ ID NO: 49589 - DNA, 574 bp, Homo sapiens
gaaaaaaacgcaatatcccagtttaacttcataacctggctttaatcctggacactcacttatctccctggattctagctccctcagctgtcaatgcaggcagtagggagagagatacatttactgtttcttccagctttaaagttcatgatccatcatctaaattgatattttaagtattgaatccgcaaaatgaaattatttcaattaatatttawtacagaaagtattttgtgatgaagggcctagcttggatattaaacatttggaggaagcatttggctattttagagcctgtagtttaatcagcctacctacctacacttttggaaaacagtctataactacagaattagggagattgaatttgatcacaattccaactgccacttatagtctttgccagagcaaagtggctttttacaatttcgctgtcttctcattccaaatgcagtttcaaaaccggcaacgtcagagctgccactgcagttggagattttttttatcaaatgagccaaccttaagtgtcccctcagtccctcacttcttcatttgccatttaattattcttact

SEQ ID NO: 49590 - DNA, 564 bp, Homo sapiens
ttttctacaatatggaaaaacttactaaaaccatagtgattggggaagatcagtctgaattcaagaaaagactttcaagaatatttttcatgaagtttagctttctctctcaaatacrtacggttaacttgaacctaactgatagcctgtttctaaacccagctgtttactactgaataactagcaggacatttgcatataaagtcttgattttcaaaggtctgtgtttatgaacagttctccttatcaggctggataagcaggtcccaaccctgattcccaggtgcacattttaatgacctgggggctccatgcaccagagctgcgcctcagactggcacttccccagtgctgtctacagtagaccagtttatctgtgttttctaaacagacacgcggagagacttgagggccattaggttaaacgtttctctgcaaccaattcttttttcaagatcaggtcaaaatgcttttcagttctgaaatgaatggaagtttcctgagtttatgaagatgaagtgagcagggatgtgggggctcttccatgacactgttttgcacagg

SEQ ID NO: 49591 - DNA, 585 bp, Homo sapiens
aaatgagcccaaataatatgtgaaattgtatcagggctgctgtgcccagaagcctcacacagaacggggaggggcactcaccagaccaggttgctgacactcgatatcttctcaccgccatgggctgattagaaagggattaagattaagtggacgggggcaactccagtgcataaggctggagcgtgacgatgagaggagagcagtcagctaacaactaagccctatgatgggacccaagcagccaacacaccgaacccttagcggtgcctgggattcctgttctgcacttcacctgtgttgctctcacgtgtgtccccacggctccatcatcatttcctcttggtagatggagacaccaagkctcagagctgctcaataggctgcccaatccaccatcatctgtctcctcaaaggcgtgctctggtccacaagggctaccagctgtagttaagtcatatgtcacaggtgcaagctgggctaagctgctgggctccagaagagaggcaatgaggtgctcccagggagattggctctcaggaaggacgtatttggatctgtctctgtttaaagttctctgtggca

SEQ ID NO: 49592 - DNA, 613 bp, Homo sapiens
gtagccaggtggcaatttcagtttctacttaaatagaatcattgatgtrcccattggtgaacacattccttctttgggaaccaagacctctatagaagcaaagcccaaaactgagggtaaaacaaacaaaatcttgttagtgaatcatacagataatgatgagaggagtcactctggcttctaccttttgattcttggacccataatcccaaaatagcaccagtatattgattgctgattcagagtatatatcatattctggtaaaagcatcccagatctgtaaagtattgttacccaactgaattttcaaaagtcctttctacgataatttttcacatttgcaaatacagaaaaccataaagatggcaattgacataatccttgtggaaggccatcaagtagtgataaccacaattacacttttggcatatgttcaggttatgtgtgtgcttacggaatgcggaagtatccagtctacgtatctctataaaaattgctttctatatgtatgtttatccatctgcacttttaccaatgacatattaaaatgttcattgcaagttatttttaccagaatggctctttgttggggaaaaggcgaagttcttaggc

SEQ ID NO: 49593 - DNA, 613 bp, Homo sapiens
gtagccaggtggcaatttcagtttctacttaaatagaatcattgatgtacccattggtgaacacattccttctttgggaaccaagacctctatagaagcaaagcccaaaactgagggtaaaacaaacaaaatcttgttagtgaatcatacagataatgatgagaggagtcactctggcttctaccttttgattcttggacccataatcccaaaatagcaccagtatattgattgctgattcagagtatatatcatattctggtaaaagcatcccagatctgtaaagtattgttacccaactgaattttcaaaagtcctttctacgataatttttcacatttgcaaatacagaaaaccataaagatggcaattgacataatccttgtggaaggccatcaagtagtgataaccacaattacacttttggcatatgttcaggttatgtgtgtgcttacggaatgyggaagtatccagtctacgtatctctataaaaattgctttctatatgtatgtttatccatctgcacttttaccaatgacatattaaaatgttcattgcaagttatttttaccagaatggctctttgttggggaaaaggcgaagttcttaggc

SEQ ID NO: 49594 - DNA, 652 bp, Homo sapiens
acagtatgcttatttttactttaaaaacagtgacatattactaagaaaatgagactaattgcacattagtatctcaagaatcaataatataacaatgtctacagcaactaggatgcaaaattaatgtatttatctttatcttttactttccattgttaaaacagcatttagaagtgaacagtatttctcaggaatatccaatgtcttagttccrgttactctaacaaagtgccataaactgggtggctgataatgaaatttgtttctcaccatttggaagctggagtttgaaagcagggtgtcagtaaggtcagcttctggtgagggctgtcttctgggttgcaggctgcaggcttctgattctatggagaaccaggttccagggcagaaagacattgaactagctcttgggcctcttctaatcgtgacgctaattccattcataagggctctaccctcatgaactgattacctcctacaggcccacctccaaacaccatcacattgaaattagagtttcaacatatgaagattggaaggacagaaatattcactccatggcgtgtcaacaaaaataagtgtgtctttgcatataatttgtggaggttttttttttattatactttaagttccagggtacacgtgcacaatg

SEQ ID NO: 49595 - DNA, 562 bp, Homo sapiens
gcatggtaaagtaacaaagttagaaatacacaaacaatagaaggattaaaaaaaattctcatcatatatgaaacaatgtgataacacaacaacaaaacaaacagaaaacaaagggaagcagttgattctggtgctataytttccttgagttatgagtgctgaaaaagcaatgctatctttcttcctgtttattattacttctacttctctaaatcacatattgtataataatctattcactgaaatttagaccttttatggcctagtattgatcaattttgtgaatattctgagaataagatgggggagaacctttatttttatctgtatagctagtgggtcacacttgttacctcttatttcatattttctatttttttgttctgttttatctgtcaataacaggagcaaaatatttccattatggtcagtttgggacttactcctttagttatacctaccttctttgccttatatttttaggctattttagaaactcgaactttaaaatttctgcatcctttcggttaacagaacctatgaaaatagcaggttctattaa

SEQ ID NO: 49596 - DNA, 2057 bp, Homo sapiens
attccagcacttattgataatgacaatgataatgatgatgatgtccctggctctgaaccaatattttatcacttaatgaatacatttgaatactgtctgggacacactggggattttcctctgctgtatttcccttccagtagagaaagaaccaggattagaccacagagcccagtcagaaatttacttggtggctggtggtggggtcacttagatgctgatatttccctgggatgaaggtaagaaggaaggggtgaaaggaagcttggtggactctggctcatgaagactggctgatgggttcaggttattgcccttttcccagcctgtttcggggaggtcagggaacaaaagcaccatgatgactttggaaagaaggagaggtcttacagggtcagaggggtacattagctgcaaatttttccactatgtggcctcctagaaataactggagtaygggaattaaaaaactcagtcctcagccttcttctgaaccagctgagtgacactgggcaagccacttaaccactcaatggctaaaagttgtcgctgtaatcacagtgccatagtgcaaatcaaaactaggtaatacatgtaaaatctcttcacaataaaaccctttccatgctctgtgaagtgatatagatagcaaagcactgttcccattgtgttctggtcacttaggtgtcctggagtttgctgcatcagctatttgggcagggcccttgtgagcagccccaggtctagcatagagcctggaagtgagcattgttgcgtgggtttgcagcttatgttgcctataattttagctgtgaatggtgcttttgtctctcttgaaatcagataagagcctaagggaaacaagaactttccaagatactgtcatctatcctttccctccaccagctgtaaggtaataatcagaagttccttgaaaatgttgattttcctgctggacatctgctagaacactcccgcctgtgaacgcccaggacagatctgaggggggccctgaagggttgtgcatcatccacaatggcctttgccttttctatcctttgcaactatttctccacaccttcttttgcacaagactgtagcctctgtttctcttcattcatcatgataaaatccaaattgcccaatagctgctactgtgtaagaacagctcttccttcttcagagaaccttcctggaccacctagctttggagctagctgaactttgacctaccccctcctactcaaatcctgtaaagcatttcatgttccttccctaagttagaaagcttccttggagttttctcatgcctggcattctggagcaaaactatgttaatgatgctgtagtaattttcctagaatctgggtctgagaggcccagattttttttttatggcagtgggtgctaggatggggtatttcgtattttcagacttttcttccattgtcagtagaaaaaaagacatatttccttctgtccttgctgttgtaatcatttagatggctctgggtcttctataccaaattactatcgttttgttatagaatcaacttcgatgactgatcaagtcttcagccttgttttagacaaggccaggactaggataaggttagtgaagcacttgcttttgagcacagtatttaaggagatggccaaaaactcagtaaccaagataactagtattttaatgtgtcttttaaaaatagacactaatgcaaaaaaaatccatgatgagcaaaatatgataattttaaataaacctgaggtcaatattattgagttttctttttgctccaggctgcaatgtaacctggcatagcactggcctgggatatctatttctgataggtttccttccatcagggtcttttctgatttaccagactgcttcattttctctgtggatcacgtacctccagtgggagtttccctaagccacagcaccctcaaaagccttcaatgtgctcttctccttcctttacccgtgacttcatcctcatgtgcgtaacggcagcagccaacatttctcgccaatgtgccaggctctgagctaa

SEQ ID NO: 49597 - DNA, 601 bp, Homo sapiens
gagttcccctgcacaagctctcttgcttgctgccatgtaagatgtatctttgctcyttcttcgccttttgccatgagtgtgaggcctccgcagccgtgtgaaactgtgagtccattaaacctctttttctttataaattacccagccttgggtatgtccttatgtcactcctgtcttggtgaaaacatacctctgaataataaaacttttattataaagagatactaagaagttattccttagtttgcaacaatgatatcagggcagttgtggttaagtactagtgcttagacgtttaagaggatttaatttattaagctaacaagtttggtttattactggtagaagcagttatatattttgagactttttctttaagagaatcataaatttaataatatgagcactaaacatagcacaaatattacaattctacacatagtaacacataaaaatctccttgggcattgaagatcctagtattgtaatgtagtaatggttcttttcagttctcttatatgcaaaaaggtcagaacctccatgttagttatttctagaactctacagacacatcatcaacctatggacaataataatatga

SEQ ID NO: 49598 - DNA, 601 bp, Homo sapiens
gagttcccctgcacaagctctcttgcttgctgccatgtaagatgtatctttgctccttcttcgccttttgccatgagtgtgaggcctccgcagccgtgtgaaactgtgagtccattaaacctctttttctttataaattacccagccttgggtatgtccttatgtcactcctgtcttggtgaaaacatacctctgaataataaaacttttattataaagagatactaagaagttattccttagtttgcaacaatgatatcagggcagttgtggttaagtactagtgcttagacgtttaagaggatttaatttattaagctaacaagtttggtttattactggtagaagcagttatatattttgagactttttctttaagagaatcataaatttaataatatgagcactaaacatagcacaaatattacaattctacacatagtaacacataaaaatctccttgggcattgaagatcctagtattgtaatgtagtaatggttcttttcagttctcttatatgcaaaaaggtcasaacctccatgttagttatttctagaactctacagacacatcatcaacctatggacaataataatatga

SEQ ID NO: 49599 - DNA, 599 bp, Homo sapiens
actgcctgaaatgaactgtatttctgtcataaacaggatctgtttggttaaagttataccctcttattttagtaacaggtarttgtgtttgtgaagctgctttcaactgacacacagcatgaaaaactgataccatatatgtaatccagaagggaaaatgaaggtaaaacttgaagatcaaaatgttgtctcttaacaattgggtctgagttcagaaatgatgtccacatgtttgaatacgccccatgttagcagccaagaatggtggcttaagactctgggttctccacttttacactgttggtgggactgtaaactagttcaaccattgtggaagtcagtgtggcgattcctcagggatctagaactagaaataccatttgacccagccatcccattactggggatatacccaaaggattataaaacatgctgctataaagacacatgtacacgaatgtttattgtggcactattcacaatagcaaagacttggaaccaacccgaaatgtccaacaatgacagactggattaagaaaatgtggcacatatacaccatggaatactatgcagccataaaaaatgatgagttcatgtcc

SEQ ID NO: 49600 - DNA, 1049 bp, Homo sapiens
ctgaaaatatgaggatggctatttgaatttccttaactcatggtagattgtttccacatttgctttataatttctgatggtgagaacatagtaaatggaaatttayttgagggtgctctaatggctaggaatttagcgattaacacttttgagatgatttctgtttgtttctgctaagtatcaccaaactaactatttttgtgttcatttcatggctttccaggtcatgtacatattgtacatttgaatcctaaaacaaagcaagtacaaactggtatttatgcactctcaacatgggctaacagagaaaacctaccttgtctcccagtcccaataaacatatgttttctagtttacctgccactgcagctatggctttttgtgcatcctggctttatgcagagtgacaaggggggaaaagagactcattgaggaaattttaactgtaatgtcaaataaagaaggacattagattggtacatgtaactagaaaaaaatatgttttattctcttgagttgttggcatgatgttttttaaagtagggtgatacatgatggacattgtgtgataagagttggttttgacttgacaatgtagctgaatgtaattcaggataggaaatataatagtcagttacctctatttctattgtgtaggatgaccttggaagtagcagtcatgaccaattttagaaaaattataagataataataaaaaagacttgaagggaaagaagccatctttctgccctcaaatagattcatagcagcaagaggcaaatataggagaagtgggccaatgaagatgaagtcaggaatgctttgatgtgcctccaatctcctcttcagtaagactagccatgcctatctttaaccattgtcttagtccctttcatgctgctataacaaaatatcacagactgtataatttatgaataaaagaaatttatttatcacagttctggaggctggaagtccaagatgaatgtgctggcaggattggtgtctggtgaaggccaggtctctgcttccaagatagtgctttgttg

SEQ ID NO: 49601 - DNA, 1049 bp, Homo sapiens
ctgaaaatatgaggatggctatttgaatttccttaactcatggtagattgtttccacatttgctttataatttctgatggtgagaacatagtaaatggaaatttatttgagggtgctctaatggctaggaatttagcgattaacacttttgagatgatttctgtttgtttctgctaagtatcaccaaactaactatttttgtgttcatttcatggctttccaggtcatgtacatattgtacatttgaatcctaaaacaaagcaagtacaaactggtatttatgcactctcaacatgggctaacagagaaaacctaycttgtctcccagtcccaataaacatatgttttctagtttacctgccactgcagctatggctttttgtgcatcctggctttatgcagagtgacaaggggggaaaagagactcattgaggaaattttaactgtaatgtcaaataaagaaggacattagattggtacatgtaactagaaaaaaatatgttttattctcttgagttgttggcatgatgttttttaaagtagggtgatacatgatggacattgtgtgataagagttggttttgacttgacaatgtagctgaatgtaattcaggataggaaatataatagtcagttacctctatttctattgtgtaggatgaccttggaagtagcagtcatgaccaattttagaaaaattataagataataataaaaaagacttgaagggaaagaagccatctttctgccctcaaatagattcatagcagcaagaggcaaatataggagaagtgggccaatgaagatgaagtcaggaatgctttgatgtgcctccaatctcctcttcagtaagactagccatgcctatctttaaccattgtcttagtccctttcatgctgctataacaaaatatcacagactgtataatttatgaataaaagaaatttatttatcacagttctggaggctggaagtccaagatgaatgtgctggcaggattggtgtctggtgaaggccaggtctctgcttccaagatagtgctttgttg

SEQ ID NO: 49602 - DNA, 523 bp, Homo sapiens
ttgcaataatacttatgtcaaatttattctgtatattattttaaaaattagtagactaaaaactgggctattatttttcctgtgttagcaaaatagaggattactgcctctgcttttgtttatattctgccttaatgtatgagggtattttgtaaaggttaatataatctcaagatgttaacttcctgaggcaacactctaacaactttacaactttatatttttcacatttaatatgcattttcagtgggtaaaattatccractacagtgatggtggcatttcattaccataaaaaagatgtaactcttctcaaagaatcttagacgagttatatctgagcaatgccaacacataattaaatttaaaatcatttatattcttcctttcggttggtgagaagccctatcatttggggcaggttttgtgcaggtgtaaagtattgctttctaattatttcctgataaatacaggcaatttcatctatcaggaggtaagttagtaattggaaataatcgattaa

SEQ ID NO: 49603 - DNA, 636 bp, Homo sapiens
tttaactttcttggaattaacttctttgtatggagcaagaaaggaattcaatttcatgatttaaaaaatctttagagtcagtaatgccagcatcagtaattaaattatctataattttcccactgatctgttaagcaaccttcattatgaattattttacatgaacatatggaataaaattctcatatattcaccgattcatgtctggttctatttatttttttgtccatgaactaaacttcattgttttaattactatggctttgtaataagtctcattatccagaaggacaaactctctatccatgttctttatttagaaaaatttggcttttctcagccctctcatccttcataaaaatgttagaatcagcctggaaaatgccatgaaaactttgytgggatttaattaaaattgtattgactgtacggattaacttggagggacagaaatgacctacttatactaatgaggttttttgtccatgaactgtgtctcattttcaaactcatcttttgatctccatcaagcaacccaatagctggcccagaaaagaaagaaaaggagacatagatgatttgggagaccatcaaaaccatttttaaaattctttttctttagtcaaaaccagttta

SEQ ID NO: 49604 - DNA, 524 bp, Homo sapiens
gtaaaaacaaagaacasgtcctgttcttctgctaggaaagggcagggttgcgggaagaggtggagagaaaaatccctgagtgtacttcaggcctgaatttgcagtatttctgcaatatacactttaatcaagaaaacttagaatacatggcagaaaacattttctatggaaatatcaatttggggagtgaagaatatatctcattgtcatgcacagtaggtggttgatgagcctcaaaatacggagattcccccaccccacctcttttttaaagctttttccagctgacagaggcattgccccttgtcatagcactggatcctcacaatcaggggcaagggttgtcattgctattgtgccaatgaggaaatgaagaagaaaatgccttcataaacaggggacatgaattcaaatccagattattacttccttccgtccctcctgcggttcattgaaaacatgcatttattaacttcctgttgtgtgccagtgctctgctagctgttgccagatgcatggcttat

SEQ ID NO: 49605 - DNA, 571 bp, Homo sapiens
acaataattttaaagcagtgtctgattatcctaaaaactttggaaaagagatacatataaaatgatttagtactgacatccagctattcattcattcaacaatttttttcttttttttttttttagaaaagttctcactctgtccctcagagggagtgcattggtgtgatcatggctcactgcagtcttgacctcctgagctccacactcagctaacttttgtaaagatggggttttgccatgctgcccaggctggtctcaaactcctgggctcaggccattcgcccacctgggcctcccaaartgctgggattacagcatgagtgatatgttagctaccccgcccgaccagcaaatgtttttgagtgtttactgtgtagcagtcagagtaggcacttaaccaatgttagcaatttgatgtacaaaatttatttcctgtacttttttctgtatggatatctggaagcagttttagcaaaaattactacttttgtggaattctgagcttctaatgaaatcatgccatttctttgccttttatcgtttattttctagggcatgcattgaaatt

SEQ ID NO: 49606 - DNA, 559 bp, Homo sapiens
ttgagacagaatgaggcttgggcactgacagtaaaaaaaaaaaaaagaaacttctcaggtgcttttaatgtgcaactaaggttgatcaatttagcaaaatagcaacaactacaacaagcccagttaagtttgcattccaaataaacaacaaatcatgttttagtagaagtayaccacctgaattgtttggaacatcatcttcccattcccctcaccctccattctatgcaaaaagccgtatctggaaagcagcaataagtttgtgggttttctttttttgagatcttttgcacagcgtggtggatatagttaataatagtgattgtgcacgttaaaatcgctaagaaaataaatttcaaatgtcctcactacagaaaataataaacatttgaagtgatacatatgttaattagcttgatttaattattccacattgtattcagaaatcataactcaacttggcacttgcataaatatatacaactataatttgtgagcttacaataaaaaatgtctgggacatattaacactgagatttttctattaagcctatgtgca

SEQ ID NO: 49607 - DNA, 588 bp, Homo sapiens
ttgaagcctaatccccaatgtgatgatattggaggtggggcctttgggaagtgtttaggccaagaggtcatgagccctcctgagtaggattacctccctataaaggaaaccccagagagcccccttacacttctattatgtaaagactcatcawgaggacagctctacatgaaccaggaagctggccctcaatagacactgaatgtactagcaacttaatcttagacattccagcttccaaaattgtgagaaataaatttctgttgcttataaaccacccagttcatgatattttgttatagcagcccaaatggactaaaacagatatatttatgtgttcttgtacattctgctatatcttcattcatttaagtggtagacagtttgttctatatgtctttgcttaagggaaatgttgtagcagcactgaaagccaaagttttatctgaaagatatctcccttcttagctcttgtttcccaaaaccaaatccccttgctaggaacaacgctcaaaatcctaaagaaattgagcacttgaacaaagggttcttagcaaagcaattttagttcttcgcagaggggtgcct

SEQ ID NO: 49608 - DNA, 479 bp, Homo sapiens
atttccttacacattgacattcttaggaaattatcttttcctggttggtatttggctaagaatgtcagacataagtttgtttttacatacactccaccattcaattctatgctagtggaaattatttactctattacttggcatagtttatcaagacctccacracacctatggaaatatttcttccatatttttaattggttcagaatcgattttttcttaaaattaatataatcctgaaaataatgataatagtaatgtgttaagtgctttacaaacatgaactcttctaagcattggtgcgaagtaagcattttttaagaaaggaactatctcagttttttaaataaaaaaactaaagtttaaagagaataaagagcatgcccagagtctttctgttaatcagtacaaggcttgggttgatcttgaattcaggttgagctgactccaaaacctatactctttccattgcaccctgc

SEQ ID NO: 49609 - DNA, 604 bp, Homo sapiens
gtcaccatcatacattctgtcagtggtgacctaaacatcttatgtgtcacataactgtacatgtagaagtacttggaatgtagctgatgagtaatcagcattcaataaatattagatcttattgttattggatggtattagcatgttcagaaattaataatgtgcttttgtaagtttctttttcatcatgtgtatttccactggcctcctattaggccacatgtgatttttgtttgcttttcacagccttgcccaaccccccacccaggacaagatccttccttaaaaattacttctgaagggccaggtgcrgtggctcaggccactccagcccgggcgacagagcgaggactccatctcaaaaaaaaaaaaaatacaaaagtacaaaaaattagccaggcatggtggcatgcgcctgtaatcccagctacttgggaggctgaggcaggagaatcgcttgatcccagaaggtggaggttgcagtgagccgagatcatgccactgcactttgcctgggtgatagagcaaggctcttgtctcaaaaaaaaaaaaaattacttctgaagcagagcagcatgctgctgttgtcaggttggtcttgtgt

SEQ ID NO: 49610 - DNA, 879 bp, Homo sapiens
ctgatctcaggagatccacccaccttggtctcccaaagtattgggattacaggcatgagccactgcacccagccattattaccactttctaagctgaggatattctgcttcagaaaggagggagtgacttaaaccctgtgacctgaatgggacataggccatgttgctcagtgatctgccaccacattgatcatgccagttaaggcccattgcaaaagttaaactaatgacagttgaccaagcctgttccttggggcaattcaataatcctttcctatctccttgttattattttagtctaagactaaggagcaggcatcctcaaacccctgattgtgttctgagctcatagctctttgtgtccattttaggttgattatataatgcaaaaataaccagtccattctgtccttgattcatttgagacagcctggtcatgggttcagggaatctagaataaacttctgggataaacttctgggctccaccactctctcttcttcctatctagtagaccattcccagaggacccaaaggtcaaggtgatcttcaagcatttataaaagaaataacagaaaattaacaaaaatttagttctcaagcctagatgatcatcacagtttttagaacccacagattaccaagccaacattctgattcactaggtctgcatggcggctgaacaatagttttgytggtttttttttttgttttgttttgttttgtttttttttcacaaagcatcccaggtgactctgatgttcagtttggtttggggcaactaacctgagacattaatctccattttcccatccgtttgcttcacttctttctctgtctttggcatgtaaacatttttaagtttctctaacttaaaaa

SEQ ID NO: 49611 - DNA, 608 bp, Homo sapiens
tacatgatggatgattcctgtacccgctcctttccaatgcgatgtgtggactcagacatatgaccacaccccctccccttcccctcctgcctgctttgcccctttcagtattaaagccctcaaaatcctctttggaaaaattggatctcaggttgttcctgtggtttcctgttccttttccccaggcacatcctgaatgttggcagaataaacctctgagttgattgaggcctgtctctgccactttttggtttacarctataaagggtgactgcataagggctgagataaatgacaagaaatgtattggaaagacatggtattcatcctggaagccttcctgcagttggggagactcaagccaggctttaaagaacatgaggggtgaccagaagaatatccccaaatgagaaggcaaatactcagaaacacaaacctctcgattagaaattctgttttaagataaagcactggtggaggggggacagagagacagaaccagagagggacagaaagaaagggagggagagaggaagggagagaaatagacacagaggaaagaagaaaggaggagaaaagagagggagagtaagagcggggagagagaa

SEQ ID NO: 49612 - DNA, 451 bp, Homo sapiens
gccctggcttcagctcccagtggaacagcagccaaccagcctggaatacatactcctttccaagagccagcctgcactaccagtcccatgccagctatacctactgtactggacaccctgctgtaagtaccttatttttctgtattttgaaaattggatgatttatgcagttacattttcaatctagcrtgggtatctattaattgggctttttttctaatgatataatgcttctaaggtaagaatttgctgctcttgagtaaaagagataagaatttaaaaagtcttttaagtgtttaagtaacatgtttggatgatttttgctgaaaactgatattgcactaaaagttatttctaagtgatgtagtgttggtgtggagactggatgcacatgtatctctggttttattcttctggtttccttttgactgttgcttatgaatttagttgg

SEQ ID NO: 49613 - DNA, 451 bp, Homo sapiens
gccctggcttcagctcccagtggaacagcagccaaccagcctggaatacatactcctttccaagagccagcctgcactaccagtcccatgccagctatacctactgtactggacaccctgctgtaagtaccttatttttctgtattttgaaaattggatgatttatgcagttacattttcaatctagcgtgggtatctattaattgggctttttttctaatgatataatgcttctaaggtaagaatttgctgctcttgagtaaaagagataagaatttaaaaagtcttttaagtgtttaagtaacatgtttggatgatttttgctgaaaactgatattgcactaaaagttatttctaagtgatgtagtgttggtgtggagactggatgcacatgtatctctrgttttattcttctggtttccttttgactgttgcttatgaatttagttgg

SEQ ID NO: 49614 - DNA, 602 bp, Homo sapiens
tcttaactgaaagtaggaggaggcttggaacacagatatatggagaaagaaggccatgagaagatgaagatggaggcagaggttggagtgacggatctgcaaagaccgcctagggttgctggccaatgtcagaatctaaaagaaaggcatgggaacaaactttcctcagagctcccagaaggaaccaaccttaccaaaaccttgattccagacctctggccttcttcactgtgagaatacatttctgttctcttaagctacgtagtttgttgaaatttgttgcagcacccttacagaaactaagcccaacaccctatttgtatatgtgatcatctatgcagatatacggatgatagacaggtggaaaatggatggaagaaggcacccrccaggttgttaacctcagacatctgtgccagtgggaagctggacaagggatgctgctggaggagagggatggagggaagggaacatctggcaagggcaagcatcaaaggacaaactaagagctgagccccagatatgggatccgtgcaagatctagaactgagccagaactacctccttgaacataatagccaaaagggatatagctagttctt

SEQ ID NO: 49615 - DNA, 539 bp, Homo sapiens
aaagtaggaaaaagagttatttctttaactgatcatctgaaatgtgtcactctaaaacaattttttgagagacaagcacttaaacacagttcactagctcagttctaagaccagagcgatgttcatgaaaatgtgacagaaccacatataaaaggtgattttggaatagagtwtgataagactaaatgcctcattaagacaaaaagtcctgagcactttacctgtttgttaaattttgccatgacctccactttacagatggtaaatcaaagcttagaagagttaggtaacttacccataaatccactgcttataaatggtagcttcaatcaaaactcaggccgtttgactccagtgctcacattttcatactgtggctatacaatggagagaaacacacacacacacacacacacacacacacacacacgcacgcattgtcaaccatttctattctgtggtatttttattattccaggattttaaaaaataacagatgaaactgccttttcattggcacatgcaatttttttgacaga
